United States Patent Application Publication US 2014/0057251 A1 - sequence listing, part 175

SEQ ID NO: 348932 - DNA, 888 bp, Cannabis indica
aaaaataagttctctaataatgtaaataaaacttataattaaatttgacacgtgtagaaaatttaaatttaacaataattaaaagttatatactaaatttgtattcttttacctactaaaaaaaaaaaaaaaatatcaaaatttggtacaaaaaatataacattatattaaatttaacacataataaacgatttttttcaattacagttttattattgataattaataataaattttaatatgcattttttaattacaatattattataattattttttaaaatattcaatttattgatgtttattcatgatattttctttttgttataatagcaaatatggcatttaattatttttttttgtcaaattttatataatatttacattagataattttatacccatttttattaggggaattatcacatatactattttttttatttatttttttttcaaatttacggtttggatttctaaagtggttgcaacgctagttgcaatagagtttttgtacgattttttattacaatttaggttgcagcgctagttgcaataggaatttttatgtaaaatttcgtaaaaatgtaaaaaaaaaaaaacggttttgaaacgtaaaaataaaaaaacccttgattattattatgagagtaaatatatttaatttaataattattataaaaagttattaattagtgcatttcttttagggatattggcggctaaaccacccgaactttacggtttgtaacacttaaccacaaaaactgaatttttggcggctaaactacctaaactcccattccgttttgctctgtacacctccgtccaaaaatctcagttaagtgccacgatggactgtccacgtgtacacacttgtacacgtgg

SEQ ID NO: 348933 - DNA, 790 bp, Cannabis indica
ctgtgccgatgtgatacagtgtcagcctatactcggtcaaactggtcatactccagctgctagtcatactctagcctgtaccgatgtgacacagtcggatggttcgaagccaacatacatctctaatgtaatctgacaggctttctaacatgcacgctaaacatgtaatctatatatgcatactcttatgctaatcttaccacaattccaaattcaggtgtgccggtcaacctgactggaacgaactacgcggcggattacaggctcctaaaccataacaatcacaacactataagtgatacgctaaatcacttcctggggacttaaactaggaaataaaagtttccttatcgataaaaaacatggcaataccccaaataacataaaaacgaggaaatctggggtttctgaaaatcacccaaccggcacaccggttgtccaaccggaattccggttctggatattttcaaaaccaattcggaattccggatgcacaatcggaatttcggttcctcgcaggcagtactaaaaaattcataaatctttcaaaacaaatccaaatcacacaaaaccttccagacctgttctaaacatcctatagaacatttctaaagcaacaaaaccacccagaattcacagaatcaaaaagtgccatgtgagctccaagctttgagtttcaaactcaaacttggctaaagctcacctacaagcatcaaaccatgattaaaactacctaaacatgcatactaaagctgcagaaaacaaaaacaaactcatgcaataatcacag

SEQ ID NO: 348934 - DNA, 579 bp, Cannabis indica
atattggaattgctgtttgagtatgtttattactttaatatgtgtgcattaatttaggatttaaaattggaattgtgattgattattggactgaaaatctaataaaaccctatggtggtcattactgttgtacatagatttttgtaaaccgtccaaattgtaacccgctcaaactaaaccgagataacccgacgaaaaatacaaactgaaaaacttgacgaaaatataacccatccaaactaataacctgaccaactcgactaagaggatttttatatatataggtgcacttttaatgggtattacccatgaattggtaaattttagtttttaagcttaatttttctatctaattagtttaatctcttatttttacattatatgggttagggttgttccatttgttggaaaaaaattaagaaaaaaaaatcggtaaaaaaaagataaaaaaaatgagtttgacttaaatattttgtatctaaacatatttttgatatagtataaacagagatatttttttattttttttattaattatgtagctaaactaagcatatatatatatatatagattaaaat

SEQ ID NO: 348935 - DNA, 1051 bp, Cannabis indica
tcgtgtctctttcttggggcatataatagataaagatgggatcatggtggatctgaccaagattgaagctgttcgggattagccaacaccaaaattggctactaaagttagaagctttctgggcttagctgggtattatcgtcgtttcgttgagggtttctcaaagattgcattacccttgacggagttgacccgaaagaacttgaagtttgtttggactgatcggtgtgagaaaagttttttagagttaaagcagtgcttgattaccgctccagtacgaactcttccttcagataaggaaaagtttgtggtttattgtgatgcctcgagacaaggtctcggctgtgttcttatgcaagttggaaaggtaatagcttatgcttcttagtagttaaaggagtatgagcagaggtaccctactcacgacctagaacttgcagcagtagtatttgcactaaagatatggcggcattacctatatggcgaggaatgtgagatatacactaatcataaaagtctgaaatacttattcactcagagagacctcagcatgagacatagacgttggctagatctggtgaaggattatgattgtgagatcctttatcaccctagtaaggccaacgtggttgtcgatgccttgagtaaaaagagcagagtcagataaatactgtaaatcaaatctcctagcagtttgcaaatgatatgacctgagctacaattgagttggttgtagggaaatttgctaatatcaccctgcaatctactcttttagagcgaatcagagaagcacagatgatagatccagagttagtgaaatctcgagataggatttcggcttggaaggttggtggcttttcagtggatgatacaggaatgctactatttatgaatcgtgtttgtgtacctatgaatgatgatattaaaagagagatcatgaatgagtctcatacgactccgtacccagttcatccagagtcaacaaagttgtatcaagacctcaaggccatgttgttgtggccaagcatgaagaatgatattgctgagtatg

SEQ ID NO: 348936 - DNA, 649 bp, Cannabis indica
aacaatatgtatattgacaattttagtcccgccatgtagaaaagaccaattcaaagaatcttttgtgatcctcaagctctcgtgcataacttgtatctgtatcattcatcttcaagtgcacccaaggatatgaggtttcgtctaagctctgggaagtgccttacattcgtcagcaccttgattctgccatcatactatttgacaaaaacctttccgattccaatgaccatacatgaatgatcattacccattagaattttacctccatcagctgatttataataaaaaaataattctcgactctgacacatgtgacaagtgcatctggactcaagaatccactctctgttcatagaagactttaagatggagaacagctctccatccatagagcaatcatcactatcttctgcgactgtaactgaatccttcctgtggtgacgcaacttatcttttctatctccattgtgagatttgttgaagtcttgttctctttatacttcttgcaaaatatttacaagtctccagactgactacagaagtaacacttccttgtttctttctgtctgaacttcaatcttgattgagactgatggtgtttactattcgaacttactttcttgggcgatctacctcttgccaagtacac

SEQ ID NO: 348937 - DNA, 1405 bp, Cannabis indica
ttgaatgttttgcgtgtttcctaatagtgtaagaatcaaattaatgttatactaagaaagatacttttccagactctctctctcgactcttcagtatgaacaagggttcatcttcttcccctgcatgttcacactggttttctgaatgtttccacaaggtgaaacccatgcccagctccagatcgctcgatcatggtggctccgactcttcctctactgagacacaacacagctcgactcgtccgagccaagcaagccgtcttcctctgcaggtacccaactactccagtcgcgtaaccattaactccgcccttctcccatttccttcgaatcgtaccgtgtttaatgagcctcttacaggtattgatttcctcttacatttctccctattcactgtcaaatcgtttcagaggaaatggttttttatttaacaatacaaatatatgtttggtttgcctattaaattctaccctgaaatttgtactttacaaaggatttggggtaatgggaactctccaaaatctgtcgacagaaggtacttaatcccctttgctattttgagtttgaaccccccatttaatgtggtctgcaaatgtgttctgtctattgccatattccaatactttgtgcagcagatctacccagtattaaatactttcgatttgactgatactgcctcgtatcactcctctaccgtgagtgtttgtctatttatagttaagcctaggaggtggtttgttgtgtgcgaattagtcatttctagcttaccctctctgcaaagctcattgttctttaggttatgttctaataagagtaccaaccgattgtccccattgctaaatcctcttgtgtcttctagttatcctccccacccgtggactcctacttcaagtttaattttattttctcttcataagttgctatattatcagagtaccatatcgggcagtctctttttctgtgtgtgtgttatttttggaagtgtttcttggtttattcttactgttttccctgaagccgtggttccccttcatactttttcccttcccagtaacttcactttcttgaacaaccgtgctgtcataacccttttcccatacaaacctttgtgccttttaacttccattcaatcaccttctatctttcacactctgccaggtcctttattgtttgaggtttcttactacattttagcttcctatcctatggatgatctaacaaattctctctctgttgctctcaacctcacagaaaccgagtgtactattcaaacacttcatgaactcactcctgcaactacacctgaaaccgagacacaacaagccccccttttccttgtagccaaagtgcacactgtcaagtcctttaaccgaaagaacttcattgaaaaaatgacaaagaattg

SEQ ID NO: 348938 - DNA, 699 bp, Cannabis indica
gcagagaacaagtcatttatgatttccatgtacccacaccttatcatccaatcgcaatcgaaagagactgtgaactgttttgtcttgtgacccagggtggtccgaatacacatacggatctacagggcaaggtaaccaagggccatgtaaaattgagatcgtaaaaccatctcccaccatccttcgagcacccgcccgaacaatagactgcgcctcatgcacactccgccaaacaaagttgggattattacccaatctagcatccaaaaacgttctatttggatagtaacgagccttaaacacctttccaatcagagaagattcatttgtaaggagctgccacccttgctttcctagtagagataaattaaaatcatgaaggcttcggaagcccagtccacccgcatgtttgtgtctacacatacgcccccagctcatccaactaatactccttgtagtcgaagagcctgttttccaccagaatttagccataataccttctaaagccttacaagtttccaccagaagcagaaagacactcattgcatagctaggaatagcctgtgcaaccgttttgagaaggacctccttccctgctcgagagagtaaacgacctccccacccttgaatacgcttttgtaatttgtccttaagaaaacctaaaatggcagtcttatttcggcccataatattcggcag

SEQ ID NO: 348939 - DNA, 501 bp, Cannabis indica
atatatatatataattatgttaagtgtgtcaaattcatgtcttattattaacatatttaatcgtgtttttaatgtgtgattgttgagtttgtgtcatgacacgtttattaaatgtgttatcgtgttgtgtcatgtgacctgctaagtaatcgtgttgtgttcgtgtctggagtcttgacacaattaataatcatgtcatgttcgtgctcaccataaacttgtcgtgtcataaacatgttaacacgaatacgacacaataacacgaattgtcggccttaattataatattaagagaaatttgtgacattaatacctaagtagttcactctattgcgatttaatgcctgcggttacagttttggtgcacctgttggggtccctcttctattgttaaatagtaattttgtacatatgaaaatattagaagccgtttggtaacacttttgttttttaattttttaatcacaaaatgaaagtaaaagttttgtttttaaaaatttt

SEQ ID NO: 348940 - DNA, 752 bp, Cannabis indica
tataataatattttctttaactttttaatatatgtgtataagattatatgaattattaatataaaatgaataaaatatattaataatataatatttaaatgatatagagaaaaaatagagaagctgatgtatgatataatataaaagtttgaggtaaaaaaaatagttgaagagttaaaaaaaaggtcaaaaaatcacatccaatagatgagctaaaaataactaaaaaaattaccttatgaatagtgttcagctaaatgtagctaagagttatcttagttttagtacttagttataatttttataatgtatttatttttataatgtatttatttaattgtaagtgtaaaaataaataaatattatgtaatatataatattttattatttgtgtgtactataaatatattatttaaatattttagagaaaattataaaaaaattgatgtatggtataatgtaaatgtgtgaggtaaaataaaaaaattaaaattttggtgacgtattttaaaaaatagaatagagaagctcttgtgagtgttcttagctaaataatttagctcttagagcactcacaatagcttcttcaaaatgagcttttctctaaaatagagaagagattggttaaaaatggcatacatcaagtgacctattttatattttcttttaaagcaatgaatagtatttctcaatatgtattgtgacagtcagtagtcccgtgatccgtaaggggatataccgggtaagctgtg

SEQ ID NO: 348941 - DNA, 561 bp, Cannabis indica
tcccagccttttttgaggtacatcgccagctggggacgcgtgacatatttgcaggttgtgattagctaggttcctcgaaaacggtgggtgtatccagccgttttttgaaatatctttctactcgcacacctagctttttgcatcttggtgggacgattggtttttgcaagaattcagatcatcctctcaagaagattttatattttatatgcgagtgaggtcacttattttgtttttgcacgttcaccacgctgaaaagatcttctatctttcagatgcacgatctatcggatagccaaatgcttggctcaggaggcaacgtgattgaaggcgactaagaagacagcttcattccgacctcgatctcagaagaagaggttgcaactgccggagacatagaattgggtctgatctcctctgcagacatcgagaggatggtgcaggagctcgcggaaccaggaaccatcgagattcgagacagcaagtctacggtgtcagcgcgtgattagctcatccattctaggcatgctcttaacgtcgaggtcgaggagatggatgatg

SEQ ID NO: 348942 - DNA, 697 bp, Cannabis indica
tcgacactatcacatcggtacgactagagtatgactagagtaccgagtataggctaatattatggttgatagtattgttgtatgaacattctaaactcagtaccgcctagggtgcgaggatatggttatagttgggtgtatgggcgcttaattgtaactgggttatatttatgattatgattatacttttcttactgagtctatcgactcacagttattgtttgcatgtgtaggtaagggcaaggctaaggctgagcagtcgtgagagcgagtggatgaagattgtacatgtcagggcgattagacctggagcgtacgatctttgggacaactggttgtattttgtatagtcgttaggcgacaacatttgtatcaagtattttgaatcagctgtaagtattttatacatgggatcccagttatatatatatgttatttgttttgttatttataagtatttaagcagagttttaattactcacaatttttaataaactcgttgattagcaacgagttgcacggttaatataaaatcacgataacacgcctaacttagtagagtgttacaaaataaataatttgtaacaggtaaaatttgtaatttttttcatctgtgataaacctagtaacatgataggtcctatccaaatcaatttgtatgtatgagcctatatgtttgctattgggcttagaagca

SEQ ID NO: 348943 - DNA, 503 bp, Cannabis indica
tcgggacctagaacaccccgtctcgatcccgatccaaaactcagaaatgggacctgggacctgaactagaactagaccgagacccgtgacagtgatttagatatttactcgggattcgggtaaccgggcttggaacagaccagtagtccgtgtctagatctaggactctgaatattaccagaaaccccgacgaagaaccaaaccaaaacccagacgtagacctgtgacccaaaattagaacgtgaacaagaatcgccgaaccaggacactagaacaagactaggaccatgaccaggaccatgaccaggaccatgacaaggaaacggaccaaaacctagaactgaacacagacctagcctcagacccaaactgaaactagaactcgtgcccggacacggtcgtgtacccagaccggaactgagtcccggacctggacctaaatttgggacccaatcccaaacatatatagggatccgaatacgaaccttgactcggaccaagac

SEQ ID NO: 348944 - DNA, 653 bp, Cannabis indica
cattccattcctagtcttctgcaatggacaatttgatgatcgaatgaattatgaaaattaagaagctagtggacattacatttcagtcaattgtaagtatgaagaattacaacggaagctgaaagaggtcctggaatgcaaccaagaaaacactgttttgcaactgaaatatcaagtcaaagaaggataccaaccattgaggataaaggatgatcaaagcctgcatttctacatacaactaaaactgaaggaacccgacttcacaacatacccattgtgtgtgaatgtcatcaacaacccaccaacaaccatcaatccatcgttcttggaaaatagtaacgcattaattgcacatacaaacgcatttgaaacgatggaatacaatgcagcaacaacagaagactcaacaaatcaacaacatacaattgaagctacaatactggaagatgggggagaaaatttcgacttcatggactatgcaaaacttgtggtagaggaaatggttgagcaactgaaaaacaacaaatacagggagccagaaatcacagattatgacgaactactaatcacagatccgcaacatcctgaaatagaagaagcacaaatatacaaagacaaagaaacactccagagtgtgcttggtttctatgcaa

SEQ ID NO: 348945 - DNA, 729 bp, Cannabis indica
ccattattataatacaatcttaactgttcacatcactttaaaatttataatttaccaaattcagtcattcgggtaacttttttggggcctccctgagtgtcaatgggagagtgattcttcatgtgctggctatgctatctctaataaacccgaccaaattagtggtgcatggttgtaggtcatgcacacttaattccattttctccaaggttgtcttgtataataagttcacgctactaccgttatcgaccaggactctcattaccctcctgttggggatttgagatgctatcactaggggatcattatgtggactttgtacatgatgggcatcctcattggaaaatgttatggtttggtcttccattcggctttgcttgggagcacgttgttctggtatgaaaagagtcttatccgagtttttgagctcattaatgtatctcttttgagccccattcctagtccttgcaaagtgtggtcctcctgatatgaccaaacgtcctctccttccacaagtggaggaaggtccaggttatgtcccggtcgtcccccttgtgtttgtgccgaaggattaggagcattgtttcctggtgccacttatggttgcacattggcacgtggggctacaggatgttgtgcattcgctccttgtgggttgtattcaatcttaatcgtaagtgaattagtataaaaagaaaagaatggcctcatagatacactatgagtcat

SEQ ID NO: 348946 - DNA, 527 bp, Cannabis indica
atccagttcttatctatcattttgtattgtatcttccgataaacacgatgaattatactacaagaaaaaatatttaatattaataattttgataaatactatattgtatttgaaaaaatatatgaaataatataataataaataatattatttttgttgtaactactagtgtttaggttggagttgaataatataatatttatatataatatatataacaagtgttgtactaacatcaaattttgtgatatggttggagatcagctaaacatggatgataattttatcccaaaataaattagatttttttgtttgggttgctctagtagtttatatgtgaattttggttgcgatttaggttgttcaattactatgggggtttctaagtgaaattctgtgaaaatacaaaaaaaaattattttcaagtgtcaagttaaaaaaatcctatcaaatattctttagttattaataattggtgccgtttggtaacacttttttaatcacttttctgtttttaaaattagaaa

SEQ ID NO: 348947 - DNA, 1228 bp, Cannabis indica
aaagaacttgaagtttgtttggactgatcagtgtgagaaaagtattctggagttaaagcagcgcttgattaccgctccagtactaactcttcctttagataaggaaaagtttgtggtttattgtgatgccttgagacagggtctcggctgtgtgcttatgtaagctggaaaggtaatcgcctatgcttctcggcagtaaaggagtacgaccagaggtaccctactcacgatcataagagtctgaaatacttctttacccagagggatttgaatatgagacagagactctagctagagtttatgaaggattatgattgtgagatcctttatcactctggtaaggccaacatggttgctgatgccttaagtagaaaggggcagagttagataaatactgtgaaacaaatctcccagcagttagcaaatgagatgacctgagctaaaatcgagttggttgtagggcagttggctaatattactctacaatctacgcttttagactgaatcaaagaagcacaattgcatgatccagagttaatgaaatcccgagatagggtttcggctgggaagactagtgactttacaatggatgaaacgggaatgttacgatttatgaatcgtgtttgtgtgcctatggatgatggtattaaaagagagattatgaatgaatctcatacaactccttactcagttcatccagtgtcacaaagatgcatcaacacctcaagtccatattctggtggccaggcatgaagaatgacatcgctgagtatgttgctaagtgtcttacttgccatgaactgaaagctgaacatcagaggcctgtagggttgttgcagccattgaacattccagagtggaaatgggaagacattgctatggacttcgtggtaggattacctagaactacaggatagtacgactctgtgtgggtcatagtggacaggtttacgaagtcagcgcacttcttacctgttcagacaaacttctccattgatcagtacgtggagttgtatgttagagaaatcgttcatcttcatggtgtcccaaagtccattgtttcggatagagatccgaaattcacatcaagattttgggagagtctacatcgagctatgggtactcagttaaagtttagcacaacatttcatcctcagacggatggacaatctgagaggactattcagatcttagaagacaagcttcgagcatgtgtgcttgactttga

SEQ ID NO: 348948 - DNA, 484 bp, Cannabis indica
aggcccatcatcgttagatgggtgctttttgaaaggatattgtagggggtatgttgcttgtagccattcgtattgatggaaacaacaacatggttcctcttgcatatgctgtagttgaaaggaaaatactgatagttggacttggtttgtgcaactactaaaagaggacctaaatgtacaagacacaggattctttactttcaattcagacatacaaaaggggttggaaagggctttaggaacaatttatgaaggttctgaaatacgattttgtggaagcaacaattatgggcttgtgctagagctactacagtggaagaattcaaaaggagaatgaatgaattgaaggagactaatgcaacagcctttgagtgtccaaaaagtcacaatttgaatggaccaagtcccatttaggacgttcactaagtgtgatatgttgttgaataatctttgtgagagtttcaactcagccatactggatgga

SEQ ID NO: 348949 - DNA, 571 bp, Cannabis indica
agcttgcggcatacaataagagggagtgtatttatgtacgtataagccaattactttgtattttgagatctatctaatgaatcttatatcttggcatgaccacgtggactagtgccaatctgtaaggattattgataccttatacaaaactcttgtgtgtttttatttttcaactactacaaaatagacttttagtgtcagttcgaatgacgctttttttaaacttgacactaaagaccaccccaaatcttcggtctcgatttataactgacacccataatgacttttagtgtcgattagtacactaacactaaaattataactgagaacccaaaaaactttaaaaaaaattagtacatacaaattgagcataagtgtcaatttataaccgagactaaaagatcttttggtctctgttataaactgacactttcaatgcattaatttaaaataaaaaagcccaactaaaaaagctcatttcaaaaccctatgctaataataaaaaaccaaaattaaaaaccctacccacatctcacatctcaaaactactcagcctctctctctctctctc

SEQ ID NO: 348950 - DNA, 813 bp, Cannabis indica
aaactaagcggtctttacagcctggttatctcagtgactggttggtttggctaatgtgctgaccggcaccattaacctggttagaattgttgggtatgacttctcccgataaattactagacaaggtcttcccgcctaccacttaacccacaagcagaacctgtgactagggatttgacggctgatcgtttatagtttgggaagtattcatcgctagatcttcatctgttttgcccaagggaatgacattcgcaggctactgcccgtcagtctgataggctttttgtatcagcacaatgggttgcctgctgcgatcgtcaatgactgcttgctgagcccttaacatttctatctctttgtccctccattcggcaaacatgtgcctctgctcttcaaatgtgtgatttatcgcagcacggagttcctcctgatcatgatgtagggtgtttgtatggccctgcatgatcccaagagcagcacggaggttctggatcttagtgtcatcttcaatggttgtttgaacattggtagcgggcgaaatggctgtgttatgaatgctctggttgactgctgaactggtattcccagtctcttgcacaccaggagtgatttcatccacaggagtcgtcacaccatgacccgtagttggtggctgttcaggatttatggctcgcaaaacccttggtttcttgggttctgtagtgcagggtccaccacctatggattcgctggatcaaccacgcccgtacgagtttgtaccatcatcgtacttgtgattaaatttggaataaagagcgatccttgattctgctc

SEQ ID NO: 348951 - DNA, 533 bp, Cannabis indica
atgccttttatggcttctgtgtcttttatggcttttggtgccattttttatggcttgtccctatttgtttagggtagttttgtggtatggtcaatggccatgagaagtgatccttgttatcacatgatttatacttcaacgactttttcacttttaatagataagtttttctagtcttttaagttcttatattttgttatggattgatttaccatcattcatattgtgtggtaatagaaaattatagttttgttattttgtatgttattttgtagaaagtcttcaattacgaagaatcactgataagtttaattttaaatataatctgtttgatattgatttcagcagttttaaattagggtgctagtatgttgttactagccaaaggtaaagctttagctagttatacttagaaatttgttggtcttttagtttttttgtaatgttgagctagtgatataagttatgcgttaatttctaagtttgcttttttttttttttttaaagtattgtcattctaatataactttgtt

SEQ ID NO: 348952 - DNA, 1175 bp, Cannabis indica
gaaagaaaaagagggggaaagaagagaaagaaagctagagagagaaaggggttttgccattttgcattgaagatcaagtggtggattcttatccattttagctcaaattttgggtggtgaatccttgcaagacgctctacccatctaccggttccgatttggcgattgtcctctctaaggtgctcttctacaatacccacttggtgagacccaaactttttctatttgtgtatccatcttttgagatgatgatgaaagttgtattgatccaagattgtttaatcttgatgttgttgtgagcctctagttttactagagaagaactttgtaatcccattattgaactttggtgatagtggatgatttgagcggactacggtcccgtggttttttcccgcattgggtttccacgtaaaaatcttggtgtctcacttttattcttgatttgtgtattttatattgcttgtggtgctttggttgatatttaataattgcttgttgtggtgtttgataagtatcccatttttgacatacaaagagggaaaatattgtggttaattgcaataggttttcccaacaccatcttatatctcaatgtagaaagtacattatatatgggaaaattttaaaagtttacttttttatagcataaataaataaagctatggggatatggatttttttgtatttttacatttatatggttttttttgtgtcatatttttgtaaaaaaagatagaaatcctatatttgtaaacaataataagctttgccagagaagtcgccgaaaaagtcaccggcgccggagaagtcgtcgaaaactatcggtgctagaaaagtcgctggaaaaatcaccgctactggaaaagtcaccggaaaagtcatcgttgtcggaaaattcactgtcgcgcggaaaaagttactgaaaaagtcaccaaaagtagatgtctcaaatataaacaaaaatagaaccggttataattgaaatataaccggttctgtaacacaaagaataaaaacaaataaaataaaataactcaaacaaattttaattaaattataaccggttataactaaaatagaaccggttatataacataatgaatacaaacgagtaacacacaataattcaaaccgattacaattaaaaataaaagggaaatcagttcctaaaa

SEQ ID NO: 348953 - DNA, 587 bp, Cannabis indica
tgatcaatggttgaaagctcaaggaaagggtaacattcccttgttgtctcctctcaaagatggagatggttcggagctttggttaaagccgagtataggtatcaaactcaatgtcgatgcagccatttttgaacgctcttcaaagcacggttttgggtgtgttgttcgagataccgagggcactttgattgctgcctttgctggtgtgaaacctggcagcgtttctcctgagttggccgaagtaatgggcatacgggaagctttgagttggctgaaaaatcactccttctctcaggccatcgtcgagacagatagcctcgtttgtgctgaagccattcgtagtgcagaggtgtttgtttcttctttcggttcagtggtggaagattgcaagaaaattcttgaaagtttgattaatgtttcgcttttgtttgttaagcgttctgcaaattgtgctgcgcattttgttgcccggcactctatttcccttgctgaacgcatgttttctattaatagtgttcctatggatttgatgtctattcttgagagcgattgctcgacttaataaagaacacttctttcaaaaaaaa

SEQ ID NO: 348954 - DNA, 522 bp, Cannabis indica
tggacaagccaacctggcagttaacaactaaatttggacggaagtgttaaattgctaatagaatcgtagttttggggttttaccgcctaaatttggattttgggattaagtgaaaccaaaatgaaaatttcaggggttttgccgctatttacccttaataaatttaaaattcaaaaacttaatcggttgctatttttttaaccctaatctttcggttgccgtacatcacggattacaatctataaaagtacaataacggaacagaatcgtgtcccataacttatatatatattatgctataattatattcttttatatacatattatgttataataacatttatttatataatttatattaaatttataattatttattacctattatattataagctcctacttatatatctttatatattaaaagtgtctatttaacggcaattcttggtttaacgattcttggtttaacgatttcttttttttttttatttagccttacacgattaacttaacagttaa

SEQ ID NO: 348955 - DNA, 1137 bp, Cannabis indica
atgtcattgagagatgctacattgagttcaaaagctactcctctaagggttcctttaacacctaaaggggctaagcaaggtttaatgcaagcataaaaaccttgtactagtctaggatataatggagtattgatttgaatgaaagatgtccatcctagggtatcaaagtgatgactaaaatcaacataatcaaggctagagagatcacaaattttacctttgagaatcttcctagaagagaaatcattgacaaatttgttatgatcctcatcattgaagaatagagtgggctcttgccttgcttttgcccttatttccctttgttgaattgcactagccattctcttgtgagctcttgaggagggatagaagccatgaagaacacaccccctttttttttttttgattattggaagatgaaagtgaggttttgaaagagagaatttgagagaaaagggaggagtggctgctgttttaggttagaaaatctgaatggggaatgaaaatttcggtggtagggtttttaaaagggaaaaatcgcactgaaatgacgaaaagggccttattttctggtcctgcgccatccggaatccggatggtacaacggaattccggttggtgcagcagaccagaaaaaaagtccccaaaatcgtcctaaaaaatccaattttgacccaaatgaccccaaaccaattctaatacctttaatatgataaaacaaaattgctcaaacaagaaaaactgaaaaataatgaaaaatgacgatttacggtaagtttttcgaaaattgccaagaaaactagaaccgtaccaaaaatgagttttatgcaacgaaattgaaaaattctttttccagcagttttataaaataaaatgtgaggtgtacaaacttacggaatcgaaaaatgttgaaaaatgagagagtttggcgaaaacactcttttaggcctaaaaatctaaaaattcaacaagtgaggtaccaaaaatttgtttcatgcaaatttcaatcaaggcaaacctataggcatactaaatacattcaatttcacatattcaagcatatagacacacaagaaaatcaaatatgcaaaaattcacatgttcacttgtttaaaaacaagtccaaagttcaccaaa

SEQ ID NO: 348956 - DNA, 507 bp, Cannabis indica
tttttctaagaatcaatatcatgtcattttgcattggctcactctctaagtgttcccatttcatgcatttcatgtatatatttttaaacaatgaggatattgtctaattttagttgggggtggtgagcatattcaagcgtttttcttaattttttgtcatattaatattttcatggtcaatttttttaaaaattattcatttattcttgtaaaatattattttcaagccaatttttactatctttattgcttagaatttttctagagttatacaaagcacatgccaaactttgtggtaagatggttgttagcacatatttgcttagaaattttgccaagtttaagtgttcatatttttttttgagtggcgagatttgggaaaacaacttttgaattttcattgattcttagaaatggttgtaattattttggacatggtactacggtttggatcttgctttaagggatgagttttctatagaaaaatcttattagggagcctttttg

SEQ ID NO: 348957 - DNA, 795 bp, Cannabis indica
tcaaaatatcatcaacataaaagcctagaaatactaccacttaattatccttgagttggtaaacacaagggtcatcttccttttggtgaaagttgtaggttttgattatttcatctaacattttgttccaagagcgagaagccagcttaagtccataaatggacctattgagcttgaaaactttctcttcctatcttggaagcttataaccttctagttgctccatatagattgtctcatcgagaattctattaaagaaagttatcttgacatccatttgccaaatttcataatcgaaagtgagagctattgagagaagtattttgatggatttggcaggttatcctaaagacttctcagtctcgaataatggaatgttactttacaaggctcaggtttgtgttacgagcagtgatgagctcagaaaagaaatacttgatgaggctcataatacgccttattcattgcattttacaaccaccaaaatgtaccaagacttgaaatcctattattggtggtgcaaaatgaagagagacgtatttgaatacgtgtcaaggtgtttaacatgtcaacagattaaagcagaacatcaaaaattggcagggttattacaaccaataacactccttgagtggaagtaggacgacgttacaatggactttgtggttgaattaccaagaaccacgggaatgtatgagtcaatatgggtcatagtggaccgtttcccgaaattaacacattttttgctggtaaaaataacttatactgtggattagtatgtggagctataagtaa

SEQ ID NO: 348958 - DNA, 689 bp, Cannabis indica
aacaactcagttggaatattatccatactgaaaatacaatcaggatattataaagatggtctagcaaactcatgagcaactctattagctgaccgcttaacaaaacaaaaatacacattacttaaactagccaacatggctttgcgctcttgaatcacacaaccgacgtgggaagacaagttagtcgagcttcttaaagcttgagcaactaggagacaatcgatctccacccaaacagagctattcggttggtttttaatccaacttagagcttcccgaaagctcaacgcttcagcaacagccagagcaatattgcccatgtgcaatttcgaatggccttcaatgagcattccattatggtcacgcacaacaaaagcacacccaaaatgattatgtccttcgatgctattaatctgtggtttaagtccaacgctccatcccatcataatactcaagatcagcccactgatgactcaatttgagttttttgagttttttagttgtgtttatttttaattaacaattctatgtataaattttttatttttatttaatagtttaatctattttaggaatatagagaatacaaaattagacaaataggaatataatttttaatattaattaatgattataagtatctaacatagtatatttgatccaatggtcaagaataaaataatctatac

SEQ ID NO: 348959 - DNA, 511 bp, Cannabis indica
acatgcatatatatatatatacatgcatatatataatcacgatcggtccatggttttgttttttccatttttcatttttcggtgtttatttcgaattctaaatatattactatattcgtatagtattatagatcgatctaagcattgaaaatctattgaaaaacttaaggatggaaaattttttccggttaaaactttttcggacccgattaatttcgtgatattaaagtatatattttttcgtgttttcgtgcataaaatctatgtggatctctttattatttgatttagaacattttagatttgaaaacacgcaatttggtcgtcggaaacgcaatttccgatcgggtttgggtcgggttcgacggacccgcgtgcagaaaaacgggtcaaattcgacccggtttggctgaagaagacgacgcaaacgacatgtcgtttgtcaaaaaacgacgtgtcgtttgtcaaaaacgacgtgtcgtttgaatggcttcattgcagctgtcgtttg

SEQ ID NO: 348960 - DNA, 791 bp, Cannabis indica
atgttttaaccatataattctttatatcaacatacataacacattattgctttcatactcacatatattctaggataataatcttggaccatataattactaaacttagagtaataaccctaatctcgattttttgcataatatataaacacatacatgagtgccactgtgctaatttctttgtgctagtttactatcttacttggtaatccaagtatgtagagattccaaatctttgagtgttcctgagcaagcacatgtaattctagtcacacattcttgagatttcacaaatagggttaatcttaaactcatgttcatacatatatatgtaatttgaactctaattatagattaacacatagacgccaaaacgagctttccaacgatatcaagaacgtccaaaacgaaattctaaatcaaaagttatggcaaaaatgagaaaacacaaaaactaggaaaaataaggccctcgttgcggcgaccaaagccctcgctgcgacaaccacaacatggtggattgttagtacactggatttatactgacatgataattagtaataatgtatacttacatattggataattgttatgtcctttctagggcattggaaaagtatgtagtatcagatatatggggtatacatcgtattagaccaatattgaacttggataagatatcataaacttattgttatatctttctaagtcaacatcactggttgatcttaggtctatagatcttaatcatgagatggttaggttcaatcttaattgtattatttatgttc

SEQ ID NO: 348961 - DNA, 532 bp, Cannabis indica
cttttaatttaaaatatcttaaatattaaaatatctaatcttataattaaataataaataaatattaaagaacttaacaaatttttaaatttgaccataataggaaatatttaaaattggaaaaattccaaattgaaaatatttaaaattggaaatatttcaatttagaaatatttaaaaatggaaaaatgaatttttggaaacaatcccttgaaaaaattgaattttggggaaaaatcccataaaattcgattttgggaaagtggccgcccaggaggctgcatgcagcagcccaggaggctcccaacagccccatacgcgcgcggacggagtgacatgggcgagaaacttcgacgggagcagggtctttgtgggcgaggttcggcgctggcagggtaatcctgggcggatcagcagggtgcccgcgcgcgtagcccaggttgtccgagtgcctggtgcgattgatgcatccactcgacagccttgaatcccgattttccaaaattcataactttttcaatttttatcggaa

SEQ ID NO: 348962 - DNA, 357 bp, Cannabis indica
gtttttttttaaaaaaatattacataatcgattttttaacaaatttataattttgtacttattcaaaagatgtaagttttttttaaaaaaaattaacagagtaaatttttgtaaataaaattaaatgatttaaccccataaactatatttattattaataatatatatatatttataactaattgtaagagttgagaaagaaagaagaaagcgaataaacaaagtgaatgagagaaaaagctcaactaattatatagtgttctttcaaagctgctatttgttgatctgtagagagatgtctaatgcaagggtgtgatcaagcactttgtccctgacaaagtgaaggtccacctcaat

SEQ ID NO: 348963 - DNA, 1052 bp, Cannabis indica
tggtgatggactgtcgaaagcttatatatattttaaacaatgtttctttattttttattaaacgatctgctaatatgactgcgcacagctttgctagagcctcatattcttttccaggcgacggttatagaatctgacgacaatactttaaacgactgtttaaaagcgtcgggaaaacccatttttgtagtagtgtgatttagcaaattaataaaattccaatttgcattaaaaaaaaaacactattatttttttttattattttataaagttaatttatagtttgacaaattcaaattataaaatattactaaaataataaaatataaattaaaataagaaacataattgaagaaacaacaataaaaataactctctattttaattaaaaaaaaaatagaaagtaccactagaaataccctatcaagcaaatgaaagtggcacctgttctcttttctcacttcttaaaaggaaagaaaagtagttatacagttaaaaacatcaatatatatatatatatatatatcaatatatatataaaggaaagcacaaagggagtttaggtggcaacctattatttttcttcttattttttctattttatcacacattctcttattttatttgagaaatacactatacatataaactaaaagtcctacatcatttaaaaatcgtttagaagttatccatgtaggttataagtagtaattttatcataatactttcttttgtctaaaaaatattatttttttatgggtgattgattaatttcttactcaagtttttattttgcctgaattttttcaattttttttttgaaaagaatacaaaatatatttttatacttttcaatatctgtcaagttaaaaataattataaaaaagtcctttaattatttttcaatatgaaaagtattttacttattttctatgtgggtgattggtgaacttaatcttgcccattacaaattttttttttaaagtgaatgcagaatataattttgcatttttcaatcaatatatatatatataaaggaaagaacaagaaga

SEQ ID NO: 348964 - DNA, 594 bp, Cannabis indica
gggccttaagcttataataaatttatttaaataattattttttttacaataaaatggctcttgagctattttctaaaaaggcatttagacatgagtttaatggtggttgccctaaaaagttagtgaaattatcttatgagattctcaaaaaatgtcgaggcttgccacttgcaataggggccatagctggtttactatctagaaaaaagaaggttcaatctgaatggaaaaaagttcttaatgatattgattttgagtttaaaaaaaatcctcaactcgtaggaatttttgaaattctctctctcagctatgttcatttgtctttccacctcaaatcttgctcattgtattttggaacttttccagaagattattcacttccgaatggaagactgtgtactgtcagctatggatttttgagggttttgttcagttagggaaggaaaatcattaaaggaagaagctgaaggaaaatgaacgtaatctttcacatttgtggaatccaacatttcctctcttctttctcaccataatctatcacagtttcaaaccatctgccattaagtccctctcttctttctcaccataatttat

SEQ ID NO: 348965 - DNA, 616 bp, Cannabis indica
gcaaaagtttaaaaaaaaatcaagtttgagcagtaattaatcatgagttaagcacacaaatcatgagaatctatcattttcctagaattataactagaatttcatcatcaacaaaattattttccctaagaccatgcataagacatcaaagtaaaaacacatatcaaacacgagcaatcattgtcaacagaatttcattcaatccacacttactaaaattaaagcaagaaaataatataaactaaaaaaacgataaaaataaacaaataaataactaaacaactaaaaaaaaaattggatagacacgacagttaatctccccccacacttaatataagcattgtcctcaaggctcaatcaaataaaatcaatgcaaaataaaaagaaaagggtaagaaaaactcccgtaaggttgctttgtttaacgtcgttagctcgactgcatgttgtgctcatgtggtcttcacgttgggtcttctaacaaagacacattctttatgtatttatgaatggaatctaacacattgaatttgagtgtttcaccatcaaattccattctaagtatccatgcttttgtatccaacttctcactcgcagtgagtaagaagggtctccc

SEQ ID NO: 348966 - DNA, 519 bp, Cannabis indica
acacttggcccaccaaaatcatgaccaaatattacaattccttaagggtctcaatgattcatatcaggctgtgcgagatcacatactccttcttgatccttgccctgccttgaataaggtcttttctatggtaatcaaccaagaaagacaaaggtctctaggacatcgattacttcctcccttggctgccacttccagttcatcgaatcctcaagatactgctcctgcagccaatgcggtttcaaagaacaaaaggccacacccacattgtacaaattgccaaaagccaggccactataaagacaaatgctacttcttaatcggcttccctcctggctatggcaacaagaaatcagattccaccactacaagaaaatctgatatgaacaccactcttaccaacaacccacaagcttctcaaatcacctcttcaacacctgatctcaacacacagcttacaccagcacaatgccaacaattaatatcgatgttagcacaacaacttcaaccaacagatgc

SEQ ID NO: 348967 - DNA, 1247 bp, Cannabis indica
aaataccgggcaccggaattacaaaataggcaagctactgaataacataaatattagtataataaattatttaaatagctataaataatttcataaataatcacaattaactgataatttccaaattaactaagcgggctttacatttggctaccatttcaatagaggacacgtgtaaagttaagggaaatatggatcgatgcgtggaacaataatcacttctaatggaataactcattaaaatacgtaagtaatagagtatacttgcaactcgctgactatagggtcttatgcgaggtaacgatatacaaattgttgcctcgggtattaacgagaaaccatactgcattgaatgcataacgtgagacatcaacttctttatacctaggaagacaaaaagctacgcatattgactgtgaaaacacttagcgtataatgtacaaactaagtataacagtagggtggattcaagacctaataagcgaggcacatatctcgctataggaaggcgcattcttgttactttcactaattaactttaaacatctttcaatgagacttatagtcttggcaagttagaagctgacattgaaatgactactgaggtactctctgttaaaaagaactgtgattgtcaaaatgaagcgttaagccttcaaacaaagaagcaacaaggtgtacatcatcgacctcgaaaagataggggagaaagctccagctcgctatcaaggtcattggaaccaagttcctgtcgagacatcccagaatgctacgatttatgatgtgtttaaacacacaatcattttgacccagtaaaagcggataaatcacagctctgtgatattaaaataataaccgcatttatactacgtgatatgtaatcaaaccccacaattttaggggataaacgttgtaaagattacattcaaccttgtaattaacagcctactatgtgattataagtagtggcaagttagattaaaaaggggacgaaaaaattataagagcaaaagatcctaaagaaccatcagaaatctaataatattgacttgtggactatggagaattttaactacaaaatcacgtaaaaaatcttttgtgttcatacattttcctttattgtttttatttttttgtgtgagattatcactatttggctcatattttggttaacaaaaatatgcgttaacagtttggagctttcattgagagccttcttgaaaaaagctcaaaaaaaaccgtccctt

SEQ ID NO: 348968 - DNA, 926 bp, Cannabis indica
tttttctaaatagtctatgggattagaagtacctttgtattttagggatttagataaccggaaccccttggggagtcgagcttgtcgcacttctatagtgaaaggagaggtcccatgcagcttgtatatggattttctctgctgctcgagcatttttaaggcctgcagaagcataccttgatacatattcccatctaggggagtagtgacttgtgttgccgcaggcgttgttactactgcggttatatttgctaggatattaaccctagtagtcgcagctggtgcggtaggcggattgatgcgattatttacaccctgatcgcccattcggggatcacggggctcttcgacatcacgaggcatctgggagcgcgccctaaagacagcgttaaggtgatcgcgtagatcgcccctgtgaacctgttatcgtcctccttgcagtgtttccaccgaacccgatctagtgtacttgttgggtgtgtgaccatgcgaggatgaggaatcagattcaatgtcgttgtctcgcgactgaggcctgctgcgaggattgcatcgttcagggtcttcctcagtctgtgcctcctgatttgggtgtcttgcagattggtccctcaacgttggttggttcaaatcgagtccttccgggttggccctccattccctacgaatacggttattacagtgtctagagttagttacctaaggattttttgtgcgagtagcgggtactcgaggaggacgttgagccctgttttgtccatccacctcggcatgtaaagcgcgtagctggtcttggattgcagtgaactgatcggtggtcagttggataataccttcggataccaccgctggagtaaaaggtggaaaatgtcccgtcgtggctgccggtgtaacgtttccccggcgtgagggccagtggtttcagg

SEQ ID NO: 348969 - DNA, 730 bp, Cannabis indica
ttttccagcagctcaaagtgtaacccaagccaaggtataatttctagcaacctcttttttgttttcttgagttgtaaggaaagatgatagttttgcatgttgtagaattttagttgttgttgttgctgttgatgtttgatggttgtttcagtagttagtttatgtttgtttgagttgattagaagtggttttaagggctgttatgttgtttgagcaggctttggagttttgaactcaagcttggctcattaatggtggattttgtttctgtacttaggtggttgttttgttgccttgaaaatgttctctagggtgtatagaacaggtttggaaagtttgaattggattgggattgatttggtcgagttatgaaatttttagtgttttctgcactgaacaggaattccagttcagagaggcctgtaggaaccggaattctggttggggaaccggtctaccggttggggcaattttgggaaccctagttttttctatttttgtgttatttagggtattaccatgttattcatcgatagggaacttttggtttaagtttaagtccccgggaagtgatttagcgtgtcgcttattagagttgtgattgatgtgatttaggcgcctctaattcgccgaacagattgttccactcaggttgaccggcacacctgaatttggaatcgaggtaagattagtataacaatatgcatatgtatttacatgtttagcgtgc

SEQ ID NO: 348970 - DNA, 589 bp, Cannabis indica
ataatagtatagtcttagcttagatgattttcgaccaatcccctgcctagtgaatatacatcactatttatagggctaggaagtttgaggaggaagagtttcctctctcgttacaatgtattgatgtcgcccaattagttatactgcggtcgcggtagtaaacgagctatatgtcgtatccacagggaggtaaattacaactaaagattagtataaatagaaaatgatagaaatgtgaatgaattaaaaataatgaaatggtgagtgaaaggtgatgatcagataaagagcttagtaaggtagagatttagttatgcaaattatattctaataccgatattaattcagaacacatttgcaattctacaccattaattacaaccagaagatatatatgttatgagcccaaattaaataatcttaaataaattcaatctcacctctaacttaccagtatatcatattatatattataaatagacaaaataccactgttggtagaatgcagtaaacgacatacaatatagtaaatacaccaaaataattaatagtctaacttacataagaaaagcatgactgaacttatata

SEQ ID NO: 348971 - DNA, 502 bp, Cannabis indica
tgatacgtacattttggaacatggtagtgcgattgagtgggagtgctaaacatagatatggaatctatagcttccatctggcaaatagaaagtaaatgatgatttccttcgagcttggctaaacagagataaatgattgagtactcatttcacttcgctgaaatatcatttatatggggctaagtgttttaaggataaaatacattgaagggtgttacggtaatttaatccctatacaatgtagatcatctatatagaggatcattgatcaaattaggattataacaatagataattaatactatatggtggaacatatagagcgttctatatagctgagagtgcaattctgagttctatgcatggatgcaacaaagaattaataagtcagtgaacttaagtggtaagttcttggtctgcttatgtctagtttgtgaattttctactaagcaagggtaaaattgtaaagaaagagtttttagggtacatttgttaattaaga

SEQ ID NO: 348972 - DNA, 1442 bp, Cannabis indica
aatcacttcctggggacttaaacttgaaactaaaagtttcctatcgaagaataacatggcagtaccctaaataacacaaacatgggaaaaactagggtccccaaaatttccccaaccggtagaccggttccccaaccggaattctggttctgggaaaaaattcttggaagccaatcggaattccggttcctacaggcctctctgaaccgaaatttcggttcagtgcaggaatgattaaaaatttcataacttgaccaaaacaaccccaatccaatccaaactttccagacctgttctatacaccctagagaacattttcaaggcaataatacattcaccgaaaaacagaaacaaaagtcaccattgatgagtcaagcttgagttcaaaaactcaaagcttcctcatccaactaattagctatcaaaacctgctcaaaccactctacaataccatcatataactacagaaaacacaatctaatcacagtagtaaaaccaaagtttgagtttaaactccaacttgaataaaaccaaccaacaaccactagaacctgcttaaatctccatatctaaacacaattaagctttagaaatcaacataaaacataaaacacaaccacaacatcaaaatcaccaagcatgcaaaatttcacttccttaaacttcaagaaaatacaaaggaggtgcaagagctataccttggcttggatttactaacaattagctgagaagattgaattattgaagaaaaatttaaccctagcagcgccaagaaaaattgaaagagagagagagcttgagagaaaatgaatttctttacttttgtctaacttttgattttttcataaaaatgaataaaagacttgattttccttattttatcaaattgtttcagccaaacaaagctaagatcccctagatatacaaatagaatagatgttcatggatagacaaacattccattgattctgagttttgcggttgaaaaagctcgtcgatccaaatccacaaaagacaaagcacaaaaatcagattaataatttaattaaaaatccacaaaagacaaagcacatatgggcaaaatgacctttttgccctctcacatcaaattgacataaaaaggggaactaagggtattttgggaaattctaaattcccgactaatctcaacattctcaatgtctaattataccgccccgctatactaaaacaccaagatgtgattctactgagccatacaccgcgttccaatgttgctgggcactgaacatgcaaaaatatgaaatttctaaatataacatatagaatacattctgaattcaaataaattatcataaataattaatttaatattaataaataattttcataattaaaccctaatcatttgctaatttccaaatttaaattaagcagtctttacaactatcccccccttaaaa

SEQ ID NO: 348973 - DNA, 1015 bp, Cannabis indica
aaaattactaattaaccttatttatttaattaatggtaaaatttcaattaaatatcacgtaatttaatgtaataatttttaaaagtattattaaacaagggtaacgaaacgcgtcaataaagtattaagcaagtgtccaataacaatgttctatatctatttatatttatataattctcttattagagcatctttaatgaattaccaaaatcgtaacgtatgactatattttaacatatttaagaaaaactattactcattgttataaaaagtgtattaaatttgacttatgctaaaagttgtaccaaatttaagacaaaatataatattgtattaaatttaacccacaataaatattaactttttatttactataatactactaattataatgattcattgacttctactaaactttaaattctttatttactatattatcattatttaaataataaaagaaaaaaatagtgatttttatatattctcaataaaatattaaacaatcattaatataattaattttttttttttattttacatcttgtacattggagcacaattataaatagtagaccaaatataatacaaatttattttttttgtgtcaaatttagtacaaattttagatttttcattagagatggtctttagtaagtgatttggcattctccttttaaacttttattttctccaatttatgattttttccacttttttaaattagattctttttagtaaattttttttaagggatattggcggctaaaccacctaaactttacggtttgtaacacttaaccaccaaaactgaatttttggcggctaaactacctaaactctggttccgttttgctctgcacacctccgtccaaaaatcagcgttaagtgccacggtggactgtccacgtggcaaatttttagtggtccacctaatattaattttaaaaaataattataaaatattaaaaaaaaattaaaaaaaaaataaaaaatattttttttaacttttttt

SEQ ID NO: 348974 - DNA, 1121 bp, Cannabis indica
cctgagtacttgaagattttatcaaaacttttgtgcgtgttccgcctagaaggccattcacttcagagcaaatgttcttgtgtttcgtacatgatatggtcattcgacctggtccttctattggtagtattgtcttaaatggtccccattccaatactgtggtaccagaacgagttgcattttttcatcatacttacccaatttatatgcccctgattctagaacttcgaccacctgatatggttcttcctagttaggtccgagcacacctaccatactgtctttggtgtttaaaaatactcttcttaggaccatatctcccacaaagaatttttgagccttcacttgtttgttgaaataccgagctactttttgctgatgagccatcagttttaagtttgtcgtggtttgcttctcttcaatttcatcaagtgattcggcaaggagtacatgattggcttcttggctatacatcaatcttctgtgggatggtggttcaagttctatgggtagcattgcttcatatccatatgccatggtaaatggagtctgttcggttgccgttttctagtagtctggtacgaccatagaacttcaggaagttcctccggccattttcctttagcatcctcgagtcttttctttagtgtatatttcaatgtcttgttgactgcttcaacttgaccgttttcttggggatgcgccactgcagaaaaacttttgatgtaccatggttcgtataaaaatcagtaaaggactggctatcaaactgtttgccattgtccgaaactattttgtatggcaattcgaaccagcagattatgttcttcacaacaaagtcttgcacttttttggacgtaatggttgttaatggttcgacttctgtccatatggtgaagtcatcaactgcatactgcacgtcacctttgcccttgggtaattgtccgatcaggtcaattccccatatggcgaaaggccaaggactttgcatctgagttaactcgttgggcggtgctcgaggtatctttaaaaatctctggtatttatccacattttttaacataggccttagaatcttcaatcctcgttggccagaaatatccttgccttagaattttctt

SEQ ID NO: 348975 - DNA, 611 bp, Cannabis indica
gttgcaatctttgtttcaaaaagaaaaaaagagatattttttttgtaatgatttaagctctctatttgatgtattttttagtttattgtccaattttcctaaggtgtcccttattcatgcatatcatttcggactttatggctacgcatgaattagttgtgcacgcacttagagtggatggtgagctaatttgaatggaggatcttcgatctcttctttatgatgtactcaacgctaatttttttcctcaatgaaattttattcattgttcaaaaaaaaatattggtataattttttgttttttctttcttttacaggttgcttccctaattcatgcagaattgcagagtgtgtggctcttatgatgacattaaatttgatttttttttttctatattgctaatgtaattagtatcggttgcctagcaattaggtaggcatttatttttggctaattaggtttttttttcccgaactttgacatgtaccaaatcatgtcccctgaactttttgggtcgttgaaaattccccctgaactattgagattattggatttaaggacttttgtcaaattttagtaaaaaaaactttaacatgaatgaaagttcagg

SEQ ID NO: 348976 - DNA, 498 bp, Cannabis indica
ttcaggaggcatgatttggtacatgtaaaagttcaggggtcaaaaattttaattattcaataaagaataatcagaatcaatgagttattcttgtatgtttcaattgtagtggacacaatttagaaaacccgaaatgagaaggttcataataactctgtttgtaacattaagatatgtattgactctatttctatgtgttacgctgattatctttcttgcttgcttgcttcgccgatgacgtttggttctgctggttgatccccccccccccctccccctcccaaaagactggatcaagatcaactatgacgtcaaagttggttgtgattcaatgtgtgtggtggcgatggctagaaatcacaaagagtcaatttgtgggtggctaccaaacggatttacttctctaacctgcttattggagaagttgtggcttatttgttagccttggagtcagcggtcctttggaagcattcttttgtcatagtggaaagcgactct

SEQ ID NO: 348977 - DNA, 550 bp, Cannabis indica
ataaatattatttaaactttctttctaaatctaacattttataagtttatctattttttttttattattttctttctttcttatctatttccctacttttcttattatgtttttattttcttatttattttgcttcgatcaaaattacatttttaatattatgaaaacaaaatcattaatcaagctataatatttaatttcaataataataataataataaataatttttttcttgaatattatttgaagtgattttaatttatatatttttaaatatcttattataattatagacgatgttgcccctgattttgcctagtatacgtggaccaaccggacagggacacatggatcaaaacatcttgatacatgaattatttgctaagtcttatgaaagaaggcagcatccgggacatgcctcccggagaaggtatacagagccccgtatgctcccggaagcctaattaacatcaaagcatctccgcgaggcgtcagacttcccctgagcagtcatttcgcatttaatgccgcatgggaggaaacgtgttg

SEQ ID NO: 348978 - DNA, 559 bp, Cannabis indica
tattatacaacaaaatctatatagtaacaactcataaaaaattaaaaaatcgacataactttaaaataaagaagattttaacaaaattaatatagatatgctatacactttaaataatatttttctaataataaataatataaaaacattatttttttatttacatattttaaaatgaaaatatttacttgtatagtataatttctctcaaataaatatgtgtgggtggatattgaaactgtgtgtaacacgtgttgggtagttaattaaaataaaacaaaaactttcaatagtttcatcgcaaaagtccggcatgtcaatcaaactagaaattaagacaaagatttatcaaataaataatatggactagtatgattgaattccaacaaagtggtggattgaatataaacaattttcctttatgaagggaggattgatcattaatatataggctaattagtaattttctcccggtaattttaactatgtactatatcatgcactctgaacttttttggtctgttaaaaattccccataaactattaagattgttagatt

SEQ ID NO: 348979 - DNA, 1014 bp, Cannabis indica
atattgaattatctctaaaaaaataatgtaatgtatacatatatttgttcttatatgaaaaaagaataaaaattatattgtaaaaattgataactttgtaatatatagtgcggtgcagtttgaaccgcaattattaatttaaaactgcaaaccgcgctgtatggcggggtttggaaaaaatacaaactacaatcgcaccgcaaaagattttaaactgtattttttatgcgatgtggtgttgtaacaccctactagcttaggcatgttatcgtgattttataataactgtttagtccgttgctaatcagtaggtttattaaaattgtgattttttaaaactttatttaaatactccttaatattaaaagaaagtaacttgtatataactgggatcccgtattttaatttttttacgactaagttacaaaatatatttgatacaaaagttgtcgcctaacgacattacaaaatatagtctgatgtctcaaagatcgtgcgctccgggcctaatcaccccaacatgtacaatctttatccgctcgagctcactgctgttcagccttagccttgcctcttacctacacatgcaaacaatatctgtgagtcgacaaactcagtaataaaaccataattataatcataaatataacccggattgcagttaggcgcccatacacccaactgtaaccctatccctacatcctagggggtactaagtctagaacgttcatacgacagtactattggccataatatcagcctatactcggtagtctagtcataccgatgtgataatgtcaaatagtacttgagccaaacatacatttatcggtatccaatacaattctatgtatattaataccgctatcaatgtaatctaacaggctttacaaacatgtacactaaacatgtaatcacatatgtacagtagaacccctatttaagaatactctattcaagaataacctctaatttgtgataaaaaaaaatcaagtcccaattcgggccagttat

SEQ ID NO: 348980 - DNA, 826 bp, Cannabis indica
aaacaaggtaagaaaatcagttaggaatgcaaataaatcttaccataaagtaaaaaatattttgacatctaacttaccaaaaaaggactttacagggtagataaaaaataaataaccattaactacgacccaaaattataaatagaagatcaaaactctaaacttttagaaaatcgaaaaatccccaagtttcttgaacataaaccttaaatcctcaaaaaatcaattaaagatggctttgctgccactttttatatttttttatcactcataccaatatgcaatatcaagattaatttcatagatatacatattacattttatttaaagtgtaaaaacatagatctaaataaccccttagttgattcaaagagaagaatatgaatagcgggagtgtacttcaattccttgatagagataattaatttagtgatgtccatatgcatactagatctttcggcaatgatcttctaagaatacaagacttagggttctctaattttttgtcttgatggggaaaaatgagaatagagttgctcttgtttcttaaggtcactaccattatataacctaatagattattaattttaatatttataatttaacccctcaataaattagaaatatctcttaaggtatctacacatttagcccatgacactttaatacctaatgacccacaattcctaaaagaggcttttacaaaaatataagaatttgggtaaaaatttataattttacagtcacacgaatttttttacaaaaatactgtctttttataaaacaaccgtaaaacaacacagcagaacaattaaaataacagtaa

SEQ ID NO: 348981 - DNA, 1121 bp, Cannabis indica
atatatttgtatgatagtattattgggctgatgtttatatacatagataaattaattaattaagatacatgtatgtagccctatataatatattcaacagaatattagcactaataacggtggatataaatctatttgtacaatatgctgactaaatatatataatatcaattagaaaacaatctgcccttagttatttataaatattagaggagaagtgtcaatctaagttatttatgaaactgttataatgctaatcatattgttaatttgtcctaatcctcattagtatcaattctagtgtggtcctaccgtagttgttagaattatgttaaacccacaaagtatcttaaaaataaacctttatctctcttttcttcttaaaaattgtccaaacttagtgaaaattctcaaataaaacatagtctcattttagaattctaattgatttattaaatcagttaaattgagtctacaaggtagtatcattatatgaaatttaccaagtaaatttcctaccttattaatttttttctgactccactatatatatatagatttgaaattgcatttttaattacataaaacgctctatataataattatagatacactatgaattatccattgttttaatctaaataatcaatgatcctctatagatggtcttcatcgagtaggaataaatttacctttctaccctttgatgtattttatcttaaaacactttgcttcttataaatgatgtaatttctgctttttcttctagtttcttttctgccaataacttctcgtctccaaggatccccttcagacttatttctctccatagagtgaagtccccagttctattaaacttctccaatttgaatctcgccattgatgacactcaagtcttcaagattgtagcggaaagaatcttgattctgcgttcttgatcaattacgtaccaagctttgatttgtgcgaaaattaagactaatagtgcagaatcaaatcaatgaaactttaaacaatcaaataattagcaatggcaaaactaacaacaagaacaataataaaaaataaacaggggcaaacagagtgttaaaaaaccagaaaatactaaatgtagaaaataa

SEQ ID NO: 348982 - DNA, 512 bp, Cannabis indica
attcggttactgatatttatgagagaatctctcaactacttaagagaaaatctctataaccttgaaatatctataaccactttcaaattagatattacctaattgaatttattaaatatttaattaaccaagaaagacaaattcaatagggacacgaacaagcataggcgcctaccactgtctttataaattttgtctttttccctatttaattaatttaaaaaaattatttatttattacataaataaataattacaatttcgccaattcaaaatagattttcttcgaacatctttatacgacgctttatccctacccttgacagtgcttcaaggtagcaattcggggaccatagacctataattctaagctccaataaactagattatttattgagtctcaccaaccaaataattccttgtttattaattccatgattactccattacaaatatagaattgcattcttggtaattatagaattatatttactaagtttaactacagtgtc

SEQ ID NO: 348983 - DNA, 748 bp, Cannabis indica
attaataaataatataaatggcattttttttataaataattataattattaaataaatagttttggcatttatatgattgaaattagaaaatatggtattattgaaagaaaaataagtgatagaataaagtggcaaaattacaactagagagaggcccatgtatggttgaccactagtgtgcaattttattcatcattttattcttttttaatccatataaatcaatcctaagccctagttgaaatactataaaaggaacatgatgctctcatctcatccaattgaattaattattcatttcaaccaaactaaatctacttttcattctctgacaactagtagatgagagacaccttctatagtgatttcgaaccctccttcattagtcttcatactcgagccatagtgatagagtgtcatgcccacacatatcaagtcaagtactcaatcatagtgcggaagacggtggtaaccaacccaaaggagagaaggagatccaggcttagatcttgttattactctctgacaaaaagcaacaagggttagagatctgagcagaaggagtcatattattccgctgcgatcaatgtaaggtattctaaactcttatgtatttaatttcatcgtattagaaaattcatatttagaatgttaatgaaacatacttgttagtaaatctagatcatggtaaaataaattccaacaactggcctcagagccataataatgatttacattcatgaaata

SEQ ID NO: 348984 - DNA, 735 bp, Cannabis indica
aagataagatgctcaagcgaataaagagttggcaaggtcaactattatcaaaggctggccgtgaggttttgctcaaaacggttgctcaagctttgccaacctttgcgatgtctgtgtttcttcttccggttaagactgtttcacaccttgagagcttaatgtcaaagtattggtgggggtcctctaataatagaacaaaaggtgtcagttggtttagttggcgacggctttgtagaagcaagaattaattcaggtgggattgcctttcgtaatttgcaagattacaatctttccttgttaggaaagtagggatggcgtcttcttctgtatgaggattctcttgtgggacgtatttacaaggcccgctacttttcaaatggtaatttccttacggctgagatatgtcctatcccaagttttatttggcggagtgtgtttgaatcacaacaactggttcgtgatggtgctagaaggagaatcgagtctggtgtgtctacccctgtgcttaatgtcccttggttgatttcaaatgtgaacccttgtgtcatttctagacatcttgtgttggctcatagcacggtctcgcagttgatgcacatcgatcgtaagcaatgggatcttgaggtcttgcatgatttgtttgaggcaagggatatcgagttgataatgtaggttcctctaagtgataatgttaatgttgattcttggttttggggtaaagagtcgaatgggttt

SEQ ID NO: 348985 - DNA, 1602 bp, Cannabis indica
aaaatataccgagataaacatttaacagttgatgtaattttttttattatacttgagttggattgtttgagaactccaattcaactttttgagatctacatttcatggatctaaatattgaagtcaagatattagttttatgcgaattaaactgaatttctagttgaaatttagttttgtagtagtttctctgtactttttttttttcatgaattcgaaacaacccatgttttgattgattttagttgccttctcaagtaaagtcgtcgaaattaatggtagttctctttctaattaggtttcatttcggttttattagattgttgggttggtcgattgaaggttgcgtgtgtgaggttgtttgtttcgtttcgtgcggctgaagtagtaaaaaaaagtggtattttagtaatatttaatttatgggttgtattaatattcatagagccgaccttaaatacttttgtaatttaattacttttttaagaaactctttacaagtgagagcatcacttttgctctcacttataagagtactttttttgtattttaattggttaaataatgaaggtgcatacaattaaaatgagtaagtgcacatataaatatatatactattagttgtattagaatttttaaaattaattttttttaatcaaaattatggaaatcttttaaaagtgtgtttagtaactgaaatttattttttattttttaatttaaaatcaaaattagaaacataaatttgatgcttttaaaatttttaaaaatacattttttctctcccttactttattttatttttattttattttgttttactttcatttttatttttagtttttaagtggattttacacttaatttggtgctttaggtatttttagaacataatttggaattttgaatgtgatttggaggtttgaagtttttgctagatttttgattatattttgctacagcaaaatatgaacaaaaagcttttgtcgttgatttggacaagttcgcatgttgtagcaattctctagcaaaattttagcataagtagtacaagttaaatgagcaatcaacaatatttttgctggatttttgcaaaaattttacaacaacaggcgtaagttagaattctttacgagatgtgaaggaatttttggaaaaaaaaaaaacaaacaaaaccaaaacataatttcttaaataatattctaaccaaaataatctcaaatactttgaatttctttttctcagaaaactctattttctcatcttcttccttttccgtcctaaccaccatagctaccttgtctctaccttccccttgccttaaccaaccaccctgaccaccatctacccttctccacctccattcgccagaaactccattatcagaccccaatcacatttctcttctcttttttctccactatcaccaaacccagaatttgacctaagcctaaaaaaccctccgcccaccttcactctcatctcatcatcatcctcaatttctcttcacctaaaccatagcctcatcaccattttcgcatgaactcagttgtaccagttccaacctgcctcgttcttcatcatctcattaaagttagcaaa

SEQ ID NO: 348986 - DNA, 583 bp, Cannabis indica
ccacctcctccatagcaagaaaagtagaaaaccaagaacattgttcctaatactacgagtgttttgacaatttttggcaaatctcaattaatttgtattattttttggaactttttattcctgttcattcttgatttttcttcttagccccaaaagaactctattctatttatataattttcttgtgtactttgacatatgcccattatttcttacgagttgtttttacatattttgacaagtgtcatttattttatcttaagtgttcatgttttatctcttctattcaagacgtgtaactttcttaagtaggatatttaagtctgttgtcttgtatatgtcttctattttgaatgtaagtcatccattttagatatatattttccatcttggatgtaaatcacccattttggatgtatcttctatcctagatgtaagtcatccatcttgtttatatttatgtcatcatgtctgaagtatgtcatgctatctaagatatgtcatcacgctcgagagatatcaaaccagactttaagatctttaaactttagtcgctctgataccatgttgtaacgccctgtcc

SEQ ID NO: 348987 - DNA, 1520 bp, Cannabis indica
taaacatagttgtaatatataaacgcttaaatcaaacaaaaaaaaaaaaaaagccacgcctaaatggaatatagccatatagtgattgaattccatctcatgtccataaatgaataaagccatataggcggctggaaaaagccacacgcgaatagtgttggtttgggcttttagttctttctttgattttgggcctgccatttttatcatttatttttactctaaatctgaaaaataacataaaaattaaagtaaattaaatatttctaactaaaataaatttaccaattaaacaaagaaatatttaatttatattaattatatatgcataaataaaggcttaaaatataccaacttgagcattaatcacaacccccaactagcttattgctagtctctagcaattcaagataacaaaaataatgtcaaaatgattttcatgtcaaaaaaagtttaaaaatacacaaatattcaagcaaaatattagtaacaagccaataagaactataaaattaccttgaataaatctagagttgtgagtgtgtgcaccaaacttaaaccttcttaccgcaaactgtagcacataaatgctttcgaaaaatataccaagtagaagtctcaactccattagcctcacaggtatttgaaaatatttattcatggctaagaatatcactcatggagttggaaattaaaaagtgagcactcgaaatagatagatcaatttaggacaaacatttgaataaacattgaaacgaagataggttatgaattatttggacaaaccaccataagagtaccacaaaccttcgggatttttgaacgaaaatagacaatcatttacatttattctaggagccaaaaaaatgaaaaataataaaaacattttttcttttcttttcttttcttgtcttttcttttcttttcttttcttttttgtttatatttctttctttctatattttttttttgaacaagagacatatataataataaaaatgttgctcttgtatcattatttttaacaagaaaataattacaaaaaggctccctaataagatttgtctataaaaagattatcccttaaagcaacatccaatcaaactctagtaccatgtccaaaataattataactatttctaagaatcaatataaattcaaaagttgttttctcaaatctcgccactcacaaaaatataaacacttaaacttgacgaattttctaagtaaatatgtgctaacaaccatcttaccacaaagtttggcatgtgcatttataacactagaaaaaatctaagtaacaaagatagcaaaaattggcttgaacattttacaagaataaatgagtaatttttgaaaaatttgaccatgaaaatattaatatgacaaaaattaagaaacatgcttgaatatactcaccacccccaactaaaataagacagtgtcctcaatgtctaaagatataaaaattaagagaataaggaaagagaacacctggagagcaagcaaccatggatagc

SEQ ID NO: 348988 - DNA, 1260 bp, Cannabis indica
gtttataagtattatgatcagtgaactaaaaaaaaaaatctaacaaatagtttctacagatacacattctcattttaacattttttagtgcaattaattgcacgttagttgaatatgattttgcttacacaatatcataatattacaaaaacaaggctcgaaatatcaaatacgcgacctgaacagataaaacatgattgttgttatattcatttatattaaatatgtggaattattaattgtttggtggttttatgttattgcattacagttgtcttgaagatgacttcttctttttctctggtcgtcgaggttgaaatttttttttaagcaaagtcgtcttcgacttcttcttcactagacgacgactacctttagcaattggaggagcaaaattgaagttatcatcgtcgatgactgggcgtttccctttagcgcttgttaacaactgatttatgatatatttttgaagctttttttgacaatagagatggagaagcagaagatgatatataaaaaaaattgataaatgaggtagttggaagaagaacacgacgaaggttatggctgagaggtagttttcctaggttttgaacgtgggttttaaaaaggtaatgactggaaggtggtttgggcaaacaggaatggatatgtgtaagtggtattttggtaaataaaacttattaaaaataaaattgttgtctacaccttctgaaggtacttttgtaaataaagtgccaatttatatttttcatgtaataattcttagattttttttataacttgttatagtggattattacgaggtgaaaattctattttttacttaaattaattataattaactataaaataaattaattttttaattataatatttaattagaccttcttaacacttgatatttataattttttttatttattagaaaatgcaataaaattagttagtattaagttataaataatttattatctatttttattttatttataataaaaattttgtgagaatgtaacgcttacttactctcataattaaaatatatataatttattataatatttatattttcacgaaaaataatataaaagcgacataatataaatgtagcaccatatgaaaatgtgaaaaacaacctaaaaatagtactcttttgtatttttgttaaaaaaaaaaccccttcaaatctgtaaaagtaagactattaaaaatactatatataggaaaattctacaatgcacctccttaaaatagat

SEQ ID NO: 348989 - DNA, 513 bp, Cannabis indica
aaactacaatgcaattgtcaaaaccatttaacattgcatgtttattgaatttaaaacaaaataaagacaaagtttagaaagcttgggttgcctcccaagaagcgcttgatttaaagtcgtcggcttgactttttgagaagcactcatcaaagagcggcttccgcccatagagagtggcatatgccctcacaaatgggtctttgtcatgaacgccctcaagcttggcgagatatggaattgaaaaggcaaaatgctcaacttgacttgaattcgatgaatgcacatgatggatgccaaggtaccatgccaatggtggaggaggaggtggtggcaaaaaaggatcttcataaacataatattccattaccatgagctctttgacttgaggaatgcaaaaatgctcttgctgaattttttcaaaaactggacagttttgttgcaaaaatgttatagcattatgagcagagacaacatttgacaaacttgaaatgcttgcttcctcatccttttctt

SEQ ID NO: 348990 - DNA, 646 bp, Cannabis indica
aataccctaaattacataaaaattagaaaaactagggttcccaaattcgccccaactggtagaccggttcctcaatcggaattctggttctgggaaaaattcctggaagccaaccggaatttcggttcctacaggcctctataaaccggaattcctgttcaatgcaggaaacacaaaaaaattcataactcgaccaaatgaacctcaatccaattcaaactttccagacctgttctatacaccctagagaacattttcaaagcaacaaaacatccacccaaacacagaatcaaaatccaccattaaagctccaagtttgagttcaaaactcaaacttggttaaatctaactaacatgcaacaaaacctgctctaatccattcatctgaacataattaagctttagaaaacaacaataaacacatacagtagctacagtaagcaaaacctcaaagcatgcaacttttacatacttacaaatcaagaaactcaagaaaacaaagtcaaaagcttacctagagcttaagcactccaaaaccttgaagaatcttgcttgaaaagtagaaaattacacccaaacccttgctgttctaaggcgggccaaaaagagagagagagcttgagagagaaatgcttttttggcttct

SEQ ID NO: 348991 - DNA, 547 bp, Cannabis indica
atgaaacaactctgtaccgccttcaacaaagaaaccactggaatctctcgccacaaaaccaactccataggcagaagaatcattaaacacagccgcatcaacattcaccttaatactattaacacttggagcactccattgctcagccccatcccccggaatgaacccgatgaacaacagctcattgtttgaaatctgagcaacacgccattgattaaggtagtttgttgcagatgcaacgatgccttcgatccccataaccttatcttgccaaactttatcattcctagcattccagattgcccagcacaaagccaccaacaagtttgcattatccaaatcaagtatttcaaaatgatacatgcaccaacccaaaaaagagaactcctgctgcaatatcgtgccaatacctacccgatcccacacagctgctgcaactggaaaaaataaaagagcatgttcaatggtttctggagccatattgcagaccagacaagtggaattcacatgtactcttttcgattgcagctgggtcattgttgggaga

SEQ ID NO: 348992 - DNA, 646 bp, Cannabis indica
taggtgaggttggattttttgtaatatattcaatgtgggctgtacaaatgttgattgggccggcccacagtattgttgtaatattttaccctttttagaatttttctatttttttcccaataatcaaactgagaatattaaaatacggaattttaaatttaattaattaagagttaattgacgattgttttttttatatatattttttttaaaaaaaaaaaactaatttacttcgatccacatatctatttctgataagtattaaagttttaactatcacaatgttattaatttgaatgtataaagaaagtttctaactgtgaaaattataaaagaagtattattactaaatttgttgtgtaagaaattttattctccttttcttttatttttctttaagagaaaatcttatcgttatatataaaaaataaagtaatttctgtataaattcttaagtttaattttcgattttaaataaatatttaaatttaattttaatgggaataatatttaaattataattttaaaacttatgtaggtaactagctgttaagcgttaagtaaattactacgtgataatttttgattggtctagatcattaatttttttttttcaaaaaataagtttaaatataccaataaaaaa

SEQ ID NO: 348993 - DNA, 527 bp, Cannabis indica
caataaaccaaaaagtaagatgttaatgtttgaggttgacactactttacaaaaactgcatgtaattttgtatgaagagtttgatatagaccttcttgtgtataaacttaaaatagaggtgtgttacatgtacatgaaaggtaatatgataccaccagaagtttaagtcaaagatagtcaagtaagattgttcttaagaatgaaggtaaaaatgagtgtggagaacttgctgccactatttgtgactaaggttaaaaggcatgcgattttggggcctactccgccaactgtcctcccaagaagtgttgttgggagttttgtcccagaaatagatccagcggtagggatgaatgagcaggcccctactaatatagatcaggatagggttgataattttgaccagtttgatgagtttgatggtcccgtttacaacaatgatcctacagtagatttgaacgaggatggtgatgcggagttgcaagttgatgaagctatagaggtacctgctttgaggttagaactacctc

SEQ ID NO: 348994 - DNA, 762 bp, Cannabis indica
gctttagttgggattttggaagtgtcttgaatccatgtgtttttaaggttgttgctgctggaaattgattgaattgagtgagttgaagctctagttcaagagcttgaattttgcaagtttgaagcttgatttttgtatgtttgtgcaatctgaattttgagagttgttgttgttagctctctattgtgatgatttttttatctgtaagaagttaattttaggtatggtttgatcaaggttcaaatatatggaaaagtgagcatttttagaccttaaaatttggttttctgggtttttcgaacctagtggccgcgaccagatttatggtcgtcgcggccataaaacctagcagagagccatccctttttccgattttgttttagccataacttttgacttgagactccgttttggacgttctttatatcgttggaaagctcgttccgagctctatatgattacttgtattttgattgccaactttatgttatgtgaaagtgaaattagggattaaccctatttgtgaaatcccgaattgtgtgactaggattaccggcacctgatcaggagaactcaggggtttggaatctcggttattgcagaacaacatgtaagacagtagtttgtacgtacagtatgcggcgcggtggtgcttatgttgaatatgatatatgtgagtaattgtaaccgggattagggttattaccctaatatgagcggttaatagtttaggttattaccctagtgaaatgtattgtgtaa

SEQ ID NO: 348995 - DNA, 2754 bp, Cannabis indica
gcaacagtgaggtgtacatagagttacaccgagatgccatcagatatatgctaggctatcagatagtatgatttaactgctactacatcagtacgattagagtactgagtataggctggattcgcggttagtcatactttgtcaagaacgttcctgattcagttagggttatggttaggtgtatgggcgcgtgatgataacccaggatttagtatgtttattatgttatgcttttcttactgagtctgtcgactcacagtgctattgcaatgtgtaagtaagggcaaggctaaggctgaggagtcgtgagagcgagcaggtgaagattgtacatgtcggggcagttaggcctggagtgtacgatcctcgggacattaggccttttgctatctagtcgctgggagaaaaatcttttgtaaacgagtagcaaacttttgtaattatattttgtaaacgggatcccagaattttaaaagtataatatgttatattttaattaaaaagcaaaattttaattattcacgtttttccaataacctcgttgattagcaacgagctgcacagtacgttcaaaatcacgttaacacgcctatgctagttagggtgttacaatttggtatcagagccgccaggttgttttccgaagatcgtcacgacatgtacaatcatcatcagcagttaactcgttccacggttcagtaagcttttattgctttagtagtttatttgagtaatatgatttaagaaaagcttgttatgaagcatgttagtagcctgatagtagaataggtgtacatttttaatttttaaataagcggcattagtaagttctttttgatcatgatctgactagactagctcttggttacgcatgctattcagattagatggacgccaggcgaaataccaggattcagggcaactcggttgggtcaaatgaaggtcagggagctcaaattcccccaaatttccgtggccgaggtagaggtcccaggggcagggcacgtggttggggtgatgctaacccgccataggttgcccaggctgcccaagctgctcaggatgccgagaactgggaaaacaggtttgcagaaatgcaaactaaaatcaatgaacaagaagaagtgattcgacagttaagacaacagggtgttcctgcgatgactattccagaaataccagtggcacctgcccctgctgtgcaagccgaaccgatggttgcaatgaaccggatggaacccatgtatgaaagcttctgcaagcaggcacctccaatttttctgggaggtccagatgttatgaaagtcgagcaatgtctaactatgatcaccaggatattgaatttcatgggcgtctctagaaatgatagagtggtctatgccacttttcaatttcaagaagatgctttagtttggtgggacatggtgtccatgatgcatgacgttaccacaatgacctgggagaagttccaggaactgtttaatgccaagtattataatgaggcagtcagaagtgccaagagaaaagaattcacccatttgacccagaaggaaaacatgagtgttactgagtataccactcaatctgatcgcttggcaaggttggcctcgggaattgtgccaaccaattttagtaaaaaagaaaaagatcaggatgggttaaatgtgaatattcgacatgatttgatcattacaactgacgacagaaccacctatgctgaaatggtggataaggcactgcgagctgagggcgtagtgggatgcatgatagagtctggtgggactccagctgttggcggggctcgtacccctcctgcatcaggttttagcaggggaggtagtggttcggccatggaccagaaaagaaaggcatccactgtaaccagtggctcgggtcagaacaagaggttccgagggaaccagggttgaagcaatcgccagagtggcaccgaaacctgatacacttacccagagtgccccagttgtaaaaggcaccatctgggggagtgtaaagggcaagggtgctttcagtgtggcatgccagggcattacaagagagattgtccccaactcagaaccgaggcaccaaagactgcagtgaaatccactccagcaagggtattctccataactcaggccaatgcagaagccagcccttctgtagtaacaagtcagctctcggtcaacaactcttatttctctgtgttgtttgactctgggaccactcattcttatgtggcagccggtatctttagtaaattggatagaccgcatgatagttatgaatcagggttttgaaccctattacctggtggagagttagttatctccaaaaggtggattaggtctatgccgatcaggattgacgatagggagttaagtgctgacctaatagaaatgagtttagcagattttgatattatactgggaatgaatttcttgtccaaatattcagccagtattgtctgtaagaggtagatggtaatcttccaactagaagaagaagaactgtttgtttttgtcggtttggttcagggatcttggatcccgatgatttcggtcttagcagccaaagaattgttgtgtactgggtgtctagggtttctggccgtggtattggataccacacggcctgacactgttcggccagaagacatcgaggtggttcaggaatttttagatgtttttcctgatgaacttctgggtttaccacctcagcgagaaattgattttgtaattgatttggcacctggag

SEQ ID NO: 348996 - DNA, 407 bp, Cannabis indica
aatcatgtgaaccattcaacattaaatgttatttctaatctatattaataagtaaatctgattatattgaaatgagtttcatttagggcataaaacccaacagttatatatactcaagaaggcaggcgtgggtgacgggaattgaaggagcgggcggctgctacagtcagctccacaccaatgagaaaaatgaagaaaaagaagaaaaagaaaaagagagagagttttattttggattttaatttaatatttttattttggagaatggcaaatattcaaaggaagaagaagagaattttggcaaagaaagcttggagtattgtgacaactccaatgtgagtttttctttttctctttctcttattttaaactttgtaatttttgcacaatttattatgagttaattt

SEQ ID NO: 348997 - DNA, 658 bp, Cannabis indica
ttcttttccctggggattctttccactttatagtccgcgaactcgtggagcagttcccggactattgctacatatgcggccattctttctccgtgcgtcttatattccctgacacttggtttaccaccagttgggaatccctgtagacttctacttttttagcccccacggtttttactaatcttagcactgctatcaaggcttcatactcggcctcattgttagaagctgagaagtcataccgtagggttgcttggagtcaaagtccgctcggggatatcatcacgagccccgctccggatccattctcattggaggctccgtcttcaaatactttccatgctgggactgatggtgtgggtatgtttgcggtagcttcagcttcattgcactccgtgatgaagtctgctagcgcctgcccctttatggaaatgcgtggaacgtagtgtaggtcaaattggcttaactccattgcccatttgaggagtcttccggacgcttttggcttttgtaggacttgccatagcagatgattggttaataccttgattgggtgagcttggaagtaggatctcaactttctcaaggccatcaggaggcaaaaaactagtttttcaatcactgggtatcgcgtctccgctcctatcatgcgcttgct

SEQ ID NO: 348998 - DNA, 580 bp, Cannabis indica
gtgaatagaatggaacccctgtatgaaaggttccgtaagcaggcacctctggtttttctgggaggtccggacgtcatgaaagccgagcagtggataacagtgattacgagaatattgaatttcatgggtgtcaccgggaatgacagggtggtgtgtgccacctttcagtttcaagaggatgtgttggtctgatgggacatggtgtcccagatacataatgtgactacgatgacctgggaaaagttccaggaactttttaattcaaagtactacaatgaggaagtcaaaagtgccaagaggaaagagttcacccatctgacccagaaggaaaatatgagtgtgacagaatacacaacgcagtttgatcagttggcaaggttggcttcgggaattgtgccaaccgacttcagtaaaaaggaaaagtatttggaaggactaaatgtgaagatcaagcatgacctaatgatcaaaacagacgacaagaccactatgctgaggtggttgaaaaagcactacgagctgagggcgcagttggatgtatgtcggagtcagttaggactctaatgagtggcggggctcc

SEQ ID NO: 348999 - DNA, 783 bp, Cannabis indica
aaaacttgaaatggaactggacctggatcttggaacaggaccgggacctcggacccgaacctgtactcacgaaccggaccaaacctcagaccctaaccgagaccgaaatccggacctcgaacctcgcctcggacccaaatcaagacgtgaacccaaactcggacccaaacttaataagaactccgtaccccgtgacttgaaactggaaccgaaaccagaagcggatcgggaccccggaccaggacctcgacctagacccaaaactgtaactgggctagggctcggactcaaacacaaacccaccccgggatcgggtcccaaacttgaatccaaacccgaatcgtgactcaagacccaaacccacacctaaactcagacccgaacatggaataggactcgagacatagaatagggattgagaccccgaactgcaccctagtgtcggtcttgggcctagaccgagacccagaccttgacttgggacatgaaccgagacaagactaggacccgtgattgggatccaaatcttgttcttggatccgagaactggggcttggaaaagacccatagttcgtgtcttgatttgggagtcggacaaggacgcgaagctggaccaggacctggacccagacccagacatgggacccgaaactgaaacttgaactagaacatgacaaggaccctggaataggaccgagaccgtgaccaggacctggacctgtaccggcacccagaactagccataaccaagcctaaaaactcgagctcagaccaagtcccgaa

SEQ ID NO: 349000 - DNA, 830 bp, Cannabis indica
aaagtaatcaagattatgtgattaaataaattccttcgatttatctacacacaagatttcactgatgtgataatctacaatgtagtttacttgcacattggataagtgatatgtcctttccagggtattggtaaagtaagcttggaattgatgtatggagtatacatcggaagggactgatcttgaacttcgataagatataataaacttaccgtaatatctatcaaatttaatatcacctagttgatcttagatcaaatcatctcaatcctgagatggttatgttctagtttaattgtattatttatgttcgtcaatttttttttgttaaagttgaccaattggatcttctaatgacatacgaattaagaacatggtggttcaattgagtgggagtactaatcgtagatacaaaatctatagcttctataaacgtatagaagtgaaatgatgatttcctttgagcttcctttgagcttgacttaatagagataaatggtggagtactcatttcagtaattatattagtttattcaagtatcatttataggtagctaagtgttttcaggataacatacattgaatggtagaatggtaaatttatcttacttgatgtagatcatctacagaggatcattgattatttggattataacaatggataattcaaagcgtatctatatggtggaactgttgggttttatgccctaaataaaactctatttaaatgtaatccagattattcaatatcaataaagtaacagaagtatcaatgatcaatttatcttacttgatgtaaattcactgacatattaattcttcgttgaatc

SEQ ID NO: 349001 - DNA, 1587 bp, Cannabis indica
tacaaaaaaaaaaaaaaatatagcctaagggcgcgtttggtacgcaggattggattggattagacagattaatttgtcaaatccagtgtttgggcatgttagaagtctggataactaatccagctaacctcatctgtttgggattatttatcccatctagcagggtgggataaataatccaatttagccctgcgtaccaaacgggccctaaaatctctatttatccatactctatttaagaatgttaattagaatttttactctaaaattttacatgtactaaattatgcctctgaatttttctgagcattcaaaattctctctgaattgatgaaattattatatttaagaacttttgtcaaatttcattcaattttattaattcggtgattgtccatgaactaaatcatgttctccagactttgatatctaccaaatcatgccctttgcattttgacatgtatctaatcatgctccttgaacttttatctatgttagacttttcttgctaaaattaaacaaatatcattaaatccaacaatctcaatagttgacggggaatttttaacattcttcaaagtttagaaaacataatttagtacatattaaaattctagaggtaaaaatcataattaatcatttaaaaataacctttaattttataaaaaaattaagttccaatttaggtcagttataaataagattaaccgttaatatatacatatatacatatattttataaatttatttaggttgaagtgataattttattctaaattataatacatgcataaatattatatttaattaaaaaataattttattatgatatagtattcaagattatttattgttattgttgttacattgatattttttggtattttaatatttttttctagtgtaacttataacgtctcaattaaaatataatttgtttggtctcaaatgtattcttggatagatgttctactatagtaaggctaattaggatttttgcccccccaaattttgacatatatcaaattatgtccccgaaacttttaaggctgttaaaaattctcctgaattattgagttgttggatttaaggatttttgtctaattttagtaagaaaagtctaacatgaatcaaagttcaggggtcatgatttggtacatgtcaagttttaaggggcatgatttggtagatatcaaagtttaagtttggagagcaaaatttagtacatagacaatcaccaaattagtaaaattaaatgaaattggacaaaaatcattaaatctaacaatatcaataatttaatgggaatttttaacgaccaaaaaaattcgagtgtatgatttagtacatatcaaagtttaggaggaaaaaatcatacttagcctatatatcgagctgtgactacgaccgagtaagtttcaattaaaactcttgaaactttatttaagggtgcgtttggaagtaactgtgtaattactaggtagggtaattactagggtaataattacacagtttagtaattacactatattttaaaatgcaaggtgtgtttggatataaggtggtaattacatataaattcctaat

SEQ ID NO: 349002 - DNA, 735 bp, Cannabis indica
cataaaaaaaagttccaaaaattggtacctgagtgtctggtacctgagtctctggtacatgagtatctgcctcagcttctgtgtcatccacaccatcatcaaccaagtgttctacaccatcgtaagagatggtcctcacaaatgtcttctcttctgtccgtggaagtagccccttcaccacttcaagattctgtttaaggttcaaaaaatatcagagtaaaacgatttagcatttattacaagcatttatgttaaataattactctaaacataagtgaaactcatacccgtctagaaaataatgaaccgacttctttctttcctatatcacccttgctcgtccagctaagcatcttgggaaagtgaatcccataattcgtgccatacttcttcccaacctctaaaatggcctcatacgcccaatattgtactgtaggtgcgaagccataagatgtgtatttgtactcatgctgaacatccgaactcagcttcttcccgtagttggccttctgttgcaacatgtccttttgaagcgagtgcatgagtctggcgaatgagtgcttccccaaggaatctggaagaagaactcaagatcttcgacatatctaagtatgtcaggcataatcaacgcgttagcctcgcgacctagaagcactgcctcaacaaacaagcacaagccaagcttgacaagtcttccgggtctgacagtttgtgaacctatcttggagtgcttct

SEQ ID NO: 349003 - DNA, 527 bp, Cannabis indica
gtctttcacattgagataaggatagcaattaggtattaacgcaggtagcttatcaacaggattcacctccctaatctctcatcttgattaatcttcgtttattttctctttaatttctgagttatttacttttaaattgcaatcttgttattttaccgaatagaatcataagtatagtttagtagtacttagtccaattctctgtggttcgacctcacttgcgtgggatactacttgatacgtacacttgcgtaataaacagaattttcgtaacaatgtctcgctatgcactgtccgtagctccctcgggattatgccttccaaggcaagatggtttctcgtcaatacatgaattgatagtttgtgtatttttgtctcgcctcagactatgaagtcaccgagttaagaatatactccattaattctatatttaatgagttattccattttgtatttaatgatataattatcatcatatctgctggttcatatttcacgagattgacacgtgtcactttctgaagtac

SEQ ID NO: 349004 - DNA, 556 bp, Cannabis indica
atattttatggttaggatactaagaattcaaaaaaataaaataaaataggtttgaaaaattatatggttagaaaccctaaaatttctattcaaacctaaactaaccaatttttcaaattttcatgttatttttgccaaaattaattttaattaaaaaaatatctaataagataaaatgttaaaactaacatttattatgatatttaattaaactaatataatcactaaaatgagcgctctatcatttatttctatttagcctagctcgaaagaaatcatcgtttcacttctatgtccagataaaagctatagattccatatctatgattagcgctcccactcaattgtacaatcatgttcccaaaatgtatgtattaccctgaccaaaacgtaggcttaactagatattaaattgaatagatattccggtaaatttatcatatctaatccaaataaaaaattttaaaaataacaaatttcaaatttcaatttagacttaataaaatatatttcaaataaaacaaatttgaaaaaaaagatatggttagcaaatttt

SEQ ID NO: 349005 - DNA, 542 bp, Cannabis indica
atggcatctagcagtagcaatggagagagcctacatgaaaagtgggctgatatgtgccttgaggaagaagaagctacagaagtggtttttgaggatgaagatgctgatgaaagggaacccgaccttgacgatcgttggtgcttgatcggtcgactcttgacaggaaaggtatccaattttctcatttttcaaaacatcatggctgatctttggaagcccggcaaaggcatgtatgtgaagatccttgaacaaaatcgattcctttttcaattttaccacgaaattgatattcaacgagtaatcaatggcagcccgtggacttacgatcggaaacaacttctcattgaacgcctcaaaccaggggctaatccgaagaatgctctgctaaacacccttgatatgtgggtgcaaatacacgatctccaaacgggttttcggactgaaaaagcagtattagaggcaggccgattcataggggaatacttggaatctgacccgaataatttcacaggcgtttggagggaatatttcagagttcgggt

SEQ ID NO: 349006 - DNA, 631 bp, Cannabis indica
tatttatcataaaaacttttaaaaatctcatagtatgtgtaatttcctcaaaaaataagtaacaatattatgaaaatacttttagttggttaaataaacaaatatacaatccaaataaaaaaattaaacaaatatcacttacacacatgcaacccacgaaccatgtttcctgggattgaaaccttcgtctgatgcaactttcaggaaaaaactcagcaacccaacacaaccgaaacgaaatccaacaagaaagagaaccaccattaattgtagcgatttcacctgagaagacaaccagaattaatcaaaacaggagctattttgaatatatgaaaaaaaaatgtatagatcaaactactacggaactaaaattcaactacaaattcagtttaattcgcataaaattaatgtcataactttagttttcagatacatgaaatgcagatctcaaaaagttgaactggagttcccaaacactccaactcaagtataatctaaaaaaaaattacatcagtactatagtaaaatgttaatcccggtgtattttcgttgtttttgaaatttctaatgaagaatttgtacatattaaatcacaaagagacatgtagatagagttacgtatgtggaaaca

SEQ ID NO: 349007 - DNA, 987 bp, Cannabis indica
agggcataaaatcccaacactgagtcatgaaccagttaactgaactatttgggatggcatcaattcaagctcgctttgaggcgactaagaatttcatcaatgcacggatgaaacctcatcagagcgtgcgtgatcacctactccagatgactagttacttccaagaagctgagaatcatggagctgttatagatcaaacaactcaagtgagtttgatcttgaacagtttgactccagcctttctgcccttcacttcaaattatgtcatgaacaagttggagcttgacttccacgagttaatcaacaaccttcagacatttgaaaatttgattggaggaccacagaaaggaggaactaaagctcctaattctgggactgctaatggtacggctaaggctgaggcaaacattgcctctgcttcgaaacccaacaacaagaagaagtggaagaatagcaagaagcctgttcaagctgtgaaaacagttaaaaagaaaaaggctgctaatcccgaaggaaagccaaaaggaaaatgcttctattgcaatgaaaagggccactggaaaccccaatgccctaagtttctagcaaagaaacaaggtatttctttttatgctataaactcatgtgttttagagaattattatcccttgggttattaattctggatctactaaccatgtttattttcttcttatttcagctccagctacttaaacttggattgctatcctagcgagttgagtcggatggttggacagaagggtggagattgtccaagaaagaagatgaagctagaatttttatttttttttataattttggaattaattgttttaatttatgaaaaatttgatttcagtattgtctcaactagtatggggaccatgggcctatacaaccgagcttccaataagcagaactagaatttaccaagtaaatttcctaacttattaattccttattgcatccaccatagaacttggaatt

SEQ ID NO: 349008 - DNA, 880 bp, Cannabis indica
ttctccacatattactattaaggcactcacaaaaaaaaggcttatctcggcagccctatctcggtgggctcgcgtgtgcgtgtcgagctaagcctaatttttttttaaaaaaaattctgagcatagcaataacggcaggcctatataggccaaccattattgttattttttaaaacttaaaatttgagcaatctcggcgagcttgtgtgtgcgtgtcgagataggcctgaatctttttttataaaaaattctgtaaaacttaaaatttgaccaatctcgatgggccaatataagcctgtcgttattggtccaacccatttctgctgtggttgccaataacggcgagcctatattggcccgtcgagattggtcaaaaaaagcccagcccaccctttaacctctccctttcatcttctttccattacattttctaaccagcccttttcttccccaatttgaaattggcagtcatttttctctaatccaaaaattcaaagaaaaactgatgttctcttcttctatttcatcacaaccacttcaaaaaaaaaaaggcgagcttaaatgtaaactattaattttttttttatattcttatcctaatagttattaatttattttagtctaaaaagttagtaaaataataaaatgttagcttgtatttgaatgttttagattaatatatgtttgggtaagcttcataaaacataaaggaagcttgatattgattggagcttcattttggtgagttttaatttttttttctttgtctttttttttgccgaaaatggtgttctttgactaaaaattgtgttttttctttctttaataaaaattgttagtaaaacaatgaaattattgttataaatattaataattatgt

SEQ ID NO: 349009 - DNA, 797 bp, Cannabis indica
tccgaagtacacgatggattctatggcaatcatgccgccggacaaagcttatccgagaaaattctaaggcaaggttacttctggccgacaatgattgaagattcaaaagcctatgttaagaagtgtgacaaatgccagagattttcaaagataccaagagctccacccaacgagttaacacagatgcaaagtccgtggccctttgccatttgggggattgacctgatcagacaattacctaaaggtaaaggtggagtgtagtatgcagtggtagcagttgactactttactaagtggactgaagctgaaccactcgcaaccattacatcaaagaaagttcaagactttattgtgaagaacataatatgccggttcggactaccgtacaaaatagtctcagataatggtaaacagttcgacaaccaatccgtcactgatttctgtgcgaaccatagtatcatcaaaattttctccgcagtggggcatcctcaggcaaacggtcaagttgaggcagtcaaaaaaaccttgaaggatacactaaagaaaaaaacttgaaaatgccaaaggaaactggccagaagaacttcctaaagttctatggtcataccgtacaacggaaaaaacagcagccagacagacaccattcgcaatagcgtacggttacgaagctatgctgtccgtcgaactcgagccaccttcccacaaaagattgacgtacgatcaaggtaccaatcacatactccttgcagaatcacttgatgaatcgaagaaaaacgagcaactgcaaacttaaagtt

SEQ ID NO: 349010 - DNA, 549 bp, Cannabis indica
ggtattggtaggaaacacaagaactttaatagatgcagcagctggaggagcctttatgaggaagagtgctaatgaggcttatgatctattggaggagatggctctaaacaatcagcagtggccaactgaaaggagtcaaactaagaaagtagctggtgtgttagaggttgatgccatcacaaagttgacagctcaggttgaggcattgacaaagctaattgcagggcaagctaaacaagcccaagttgtttgtgagatatgtggaggaaatcatcacttttcagagtgtcaagcagatgtggatgatttgccaatggatgaagcaaaagccattggaaatttttcgcagaacaacaacaacaattttgggttcaaccaaggtggtaaccgaagaaacagtgggttctatcagcaacgaaatcagaaccagacacagaaccaacagtataatcagcaacaaagctctagtggaaattctagtttgcaaacagatttactgctacaattcatgactgaaactagatcttccattaaagacttgcagactca

SEQ ID NO: 349011 - DNA, 513 bp, Cannabis indica
atcaatgaacgcttattttcaaagtatataatgtgatctaaatttagcacatactaaaagttgtgccaagtttagctaccctaaaatatagcatgggctacaatattttacaccataataaatattatttttttatttattcttttgccactcactagtacttttaatgactttttatattttactgattttaatacacttttaattaaaatttaatgcacatgttgacttttttacatatttgtatcaaaaataaagttaatttacctctctaatgcatgataaaattgtaaaatttagactaaatataacattaattagctcatttttaacccaaatttaacacaaaatttactctacagatgatgtaagagtgtattaatacaagaaatttttcattaaatatgcttaaaactttaccccacttctaaatatattttccaaaataatttaatatcaatctatatccttagtttattttaacatacacattctaccccttttaattaaaaa

SEQ ID NO: 349012 - DNA, 624 bp, Cannabis indica
aaaagacgtatcacaaaccttttcaagaaagaaataaaaaagaaaagaacacaagtttcaataattttttatccatctatacataaaagttactttaatttcctaataactaacaaggaaagaatatgacacttataattaaaataaagtttaaagaaagaatggcacgccttgttggtcaccataaggtataaaataaaattaatatatatacaaacctcatattgatgactaatgactatggagatttagttctctgcaacttgttacatgtcaattgaagcatattaatatctgcaaaattggattgtcttaatagcccatgatatcatttgtgtaaatttccaaattatactgtttcatgtatataatatatatttaagttaaatataattatataactgagtgttgttctattttaaaacattataatttcaatttaaattctacatatctctcttgttttttatcttttatattaattgtatttttttaatattatatttcaaatttaaatttattgtacatatttaaaaaaatatctttttgttattattattatttttttttaaaaaaaaaagaaaagtatataatatttttaaaaactaaaaagaataataaaat

SEQ ID NO: 349013 - DNA, 856 bp, Cannabis indica
ttttctttagtctaagttaggttttatagatgaatttagggtttttgttgctgtatgaattatgagtgtttgattgggtattctagagtttatttgatgttgtgtgaggtaatttaaactagaattatgggtggagttgaggtttgggcaaaagtttgagtttatgaactcaaacgtagctctttaatggtgaattgaaaattggtgtgaattgttgagttctattgcttggaactggtttattatagtgcattcaggtattctggaaagttttggaaagtttgggcttgaattgatttaaggggatcgaatttttgttcccagctcagaaccggtcgaccgggtctgggaagcctctagcaaccggtcgaccggtcggtacccaggaactggggttccggttgggaaccgatctgccggttgcggctttttcccgagccctagtttttgcctttttacgtaatttagggtattggcatcctatttatcgatagggttaatcttagtttcgattttaaattcccgataagtgttttagcatgtctctcatcaaattctgaacattatggtttagggccctgtaaagcgtcgagctgcgtttccactcaggttgaccgacacgcttgagcacgaaatgaggtaagatagcataagaatatatatatatgaatgtatgcttgttttggatgtttgcactactagcgctaaaatgaatgtgatttaagtgtgttagtatagtgtgacatatttgtatggctacaatgttaccaacacgagtaccagggggtacgttgtgcctgtggtacaacacttagtagtttccaggagtacaattaaggctctaccaacacgagta

SEQ ID NO: 349014 - DNA, 565 bp, Cannabis indica
ctctctctctctctctctctctctctctctctctctctctctctctctctctctctctctctctctctctctctctctctctctcgacgctcggtataaatatatttatttatttatataattttttatttattatgtatatttattttgttattgtataaatttaatgtgttttaaaggtagttgttattgtaataaaattaatttgttatttaattttaatttaggtaaaattataagactaatgcaggaaaaaaatgggggaaattgtagaaaaatctgtatttttttctcttttttttttttacattcccgacgatttaaaatcatcaggaagtccacatattttgcccgttttgcgacggtcgtctaggcaacggttatagaaaccgatgggaatacttaaaatgactgtttaaaaacgtcgggaatatatttggcttctctagttttttttttttttgttagaaaataatctgctattataaattaagtgagtcattcacaacaacagagaaaatggcaggagagatttcttctaaccaaatacaatcattatccaacg

SEQ ID NO: 349015 - DNA, 806 bp, Cannabis indica
atcttcgctattgatgacaacagagaaaatgtttgggataattctttggaaaatgcttggaattggctcaggttgatgaaatgtcaacctaggcgttggggccctagccccaagtcatcctgggtgctaagtccttattctggccagtagatgtccttatttgtttctcgaaagcactcgtatcttaattgttgatgaaaataaagaatatgaccagaagacttgttagaattgttgttggaaacgacccaggtcgacaaaatgtcaaccttggcactagtgaccatgcccaatgtcaacctaggcactacgtcacttgtttggcctccgagttgatttgtttgtatctcgaaagaatttgtttcctcatttttgatgaagatgaagatgaagaaaattctcgggagacatattcaaaaacgtggttggaagcaccccaggttgacaatatgtcaacttggacgatgggtgcccaggtgcctcaaatgggaagtgttctaattctgattctggtacctctatcatgtttatgacatgtcttattcatgtctaagtacaaggtttgagaaatctgtactaagacaaagctaaaaactaaaaccataggtccaaatattaacctaggcgctgattgaaaccctaggcgcccgagttggcttctaggatgccaaatgacatcttctagttctcaggctatatagtggtaaaattgtactagagatttgcttactttaagtgtacaaccatagttgtttttttgcccaatattttattcttttttaatccatataattcaaccctaagcc

SEQ ID NO: 349016 - DNA, 825 bp, Cannabis indica
gctgtaagagaccgagctagaggtcgggggcgaggaggtgctcgcggtcgaggtcgcggtcgaggcaggggaaaccagcatgtccctgccgaggcggtgatccaggagaatcaaaatgcccctgtaaatggacaacaaccaggtcaaggtgggggcaaccacgaagtccctgctggggtagttggtcaagaacaccaaaacgcccctgtagtggtgccaccacaacaagaagatttggcgcaagaagttgctcgtctcagggaagaaattaggaagcgagatgaagaggctcacaaccgtcaggaacaacccaatcaaggacaacatcaatttttgccggtgcaatacatgcctgtgccggagggtcgatgggaaccaatatatgaaaggttccgcaagcaacacccaccaaattttgaagggggctcagatccaatggaagctgaggaatggttaagaacagtggaaggtattgttgagtacatgcggctcggtaacggagatagtgtagcttgtgctgctagtttattgaaaaaggatgcccgcatctggtgggatgttattaaacaaacacgggatgtggccgcaatgacctgggctgactttgtacaagtttttaacaaaaaatactacagtgaagcaatacgctcagctagagttaatgagttcacgaacctgaggcagggtaagtctacagttacagagtatgctcgccaatttgacagattagcaaagtttgccacagatctggttcctactgagtttctgaggattcatcgtttactgaagggctcgactcccgaactaacgtcgggacatagcgat

SEQ ID NO: 349017 - DNA, 760 bp, Cannabis indica
acagcgcatgatttttcaatttggatgacttgacaaacgacctttctatgtcttgctaactcgagatcttctgctaagtctacatgggactcgcaattggttggcttgccaactcttggcctcatccctacaacataatactagcggccaggtttagttgtggtgcttgagggctgctctacgttggtccttcctttagtgggggcgccagtggatggtcctctctaggaggcatgggtaaattattcagacctacaagaatggttgtgtctacctggcaagctgtggtgactagattcgtggtgcctgccgacgtggtagggttggccacatctgtcgggtttgtggagattccaaatgtgactagaatatgaacatcaggatctgcagtcattgggtcttgaggaagactagatgaggctgaagttgtagctagatttctccttctattaaccattgcatttgatcagataaattgacaactcgctctaaatgaaagcaccaaactgttgacctagaaatttggcctactgattggggagtcatatttaatattgatgcttgccacatattacacaataagaataataaaaaaaaaataagacacaggattctataaaggttcgaccccctagttagcaagtaatgaccactcccctttttgtagtattgatactgttgaccttgcttttagccaacgacagtgagtcttatttagtaagtgataagtaattgatagcaatcgatatatagtaaagca

SEQ ID NO: 349018 - DNA, 727 bp, Cannabis indica
aatggcaaaaattgaggaaatgaaaggcccggggaaccctgccaaaaccggctaggtttgcacgaacgtgtaaaactgtttcccggtttgcaccatttcacccaagaaatttcatttcttgctcaaaactccaccaaacgtaaccaaaccttccagagtacctaattagggtatatacaatacatcaccaaagctttaacttcaaaactcaaacttcagcaatatcatcactaaagcccaaaaccagaagctagatcatcattctaactcaaatcacttagaaaataaatataaaacatcttaaccctaacagccatcaaaacacaacaaacctaaactcgaacttacttaaagcttcaagaacacttaaataaaggtactagggttttacctttgcttgattccctttaaaatcttgctgaaaacacaaaatgaagcgacaatctccttggtccaaggctggttcgaagagagagagaaagggagaaaagagttttctcttgattttggcattttctttaattttccttttttctttctaaatgaataaggattaattcacttaacatttggctgaataaataattgctaggtgtcacaaggttaggcagccacctaactctcatttaacaaaaagactaacatgcccctttacttataacttaagtatttttaagactaggggtaaaatggtcaaaaaccataaccccgctcgacctcgatattt

SEQ ID NO: 349019 - DNA, 665 bp, Cannabis indica
ttgcagaaattgagagtatttgccgtgcttacttatggaaaggttaggccgcaacctctggacccggagcaatatggcctggaacacactatgtcaaaccaaatccacgagggggattggattcaaggacattcaacatggaatacaacatcgatgatgaaatatatttgggctatagctaccaaaaaagatagcctatatggctaaaataggtaagtcgtgtatatatacaagatgatgactggtggcaatataaaacaaactctcaaagcaactggtactggagaaaaatagtggaggtcaagaacaaagtgatccaatacatggacccaatacagttcatggcacagaaataccaaattgctgatgggtataagctgttacaacctccttaggaaaatgtgagacggtgcaaagaagtttggtgccgatataataagcctaagcattattttattttgtcaattgttgtacttaacaagttcaaaactagagagagattatatcggttccacattatagattgccccacctgtgttctttgtggcttacaggaagaatcggttcaacacatattctttgagtgtgactttactcgagattgcttggaccaagtaaagaagtggctacaatgggaagcttgtacaaactcattgcaaagacta

SEQ ID NO: 349020 - DNA, 655 bp, Cannabis indica
cttggtgaggattacatggtgtgttctgtgatggaaaccattcccttttagtttgattcgatcagatcaagctataatgctcaaaaggagcaatggaccgttgaggagatgactgccattcttgctaaggaagaggatgacttgaaaaagggaaaagcaagaagcatctctatggtaacgaacccaagcaattctcagaagagagagtccacttccaacaactctagtgaccaaaagtccacttagagaagaaaggcagtgacaaatcgaagaaggtcgaatagttcggaagagtacatggaagacgatactaaagtcagaatagtttttgggactgttagactacagttaaatacaagatatttttttggaatttcaagatgttgcttacttgccctctattcggaggaacttaatttttctatctattttggatagactaggttatagtcttcttttgaaactggaaatctaattttgtatcatgactctatgttggttggtaatggaagtttatgtggaaatttatataagcttgatttatatgatgttgcttctgttacttctccctattgcccttcttcttcttctcttaatgttgttgttggttccaaacgtgcaagattagaattgaaatctttcatgctttggcata

SEQ ID NO: 349021 - DNA, 579 bp, Cannabis indica
acataaaatcaacaagaaaacaacataaaagtaacatgaaaataacatcaaaaacaacaaaaaataacatacatataacaaaaaattaacaacaaatgaacacaatttcaacataaaaagactgtattttatgtaaataaaataaaaaaaatcgtaaaaatgtttaaaattccgtgaaaccgtatttttgttgtttttttgttatttttgtgcaacagtgaaattaaccctattatgttttgattgtaattgtatatttttctaagataaaattgtaattgtatatttttctaagacgaagaatctgtacaaatacgtaatgctttggggtaatagtaggtcattattctatttatataatcttaggcattaatatatattgagaatgaactaaaatgaccacacaaacaaagaattaactaaaatatttgaaaagatattaaacaagaagcattgactttctcatattgtgcagaaattgtggtcatgagaaaaagtggactcaatatagaaataataatcttataccacacaacacaagcatttcaaaataaaataaaaacataaaatcttaacaga

SEQ ID NO: 349022 - DNA, 874 bp, Cannabis indica
agtggtgttgcactacggattctagagcagaagaacgttcactactcacctaccaatcttcaaagctcgaattggaaagtccgtcgctcgaagaagacggactgacacgaggacgatggtgatcctcatacagaagttgaagcaggtcctgatcaattcggtgttcgcttccccaaaattcactagggttcatctacaaaagacaacacgcgaaatgagtgtttgaccgagatatcaaacaataaataggcaaaaatgtcaaccaggagtactcaacatattaaaagaatgaaaatattcgaaaataagtcaaaacccagaagtttgaaatttttgggcttagggctaaatttcacgaagctttgaataagcaaggtgaaagacggacaatgtgcaaacaaaggccaacgtcatgaactgtgaagttttacagattattacaaagaaaatcaagagttttaaacctagattttctacctatcttctacaacaaagtcaagaacacatgtatgaaacccagaaattaaacatgcaaagtaaaaagaggaggaaattgaaaacttactcattgttcgacaactaagttcagtccagatgaagctgctcggatgctttggatggaaatctcacggcgaacttgaagtaaaaatcttttttgctctgagttttatttagtgaagaaattagtaaaagtaaatttgtaaggaatacttagccttatttatagggagagtagtgaaaaaggcaatcatttcaaaatgccttcagatgcatcggttcccccactaaaaagcaaatattggaaaatcaaatgtaatcaagtgtaaccgtcaaacgtgatgaggaaaaactgggtttcgaggcactaattaag

SEQ ID NO: 349023 - DNA, 1210 bp, Cannabis indica
gcaaaaaaaaaaacaaaatgaaagttagcaattttgtagcaacttaaaaaatatcaaaatttaaaacccatcaaacaaacattgggcccacattggaccggaatcaggttcacatcagacccaacctaaaaaacttatattgagcacaaacacatgtaaatcgggcacccatcagacggcatcgggcctgacctttaaaacctagaaaaacccaaataaaacctaaaatcggtcacccattgggcccgaccttcgaaacccagaaaaaatctaaactcgtgtaccatcgagcacaccatcggacgggcatcgggcgagcccgacctttaaaacctagaaaaatctaagcttgtgtaccatcgggcacaccatcggacaggcatcgggcctacatcagacccgaccttcaaaacctagaaaatacgctaaactagtgtaccatcgggcacaccatcagacagcatcaggccccacatcgggcccgacttttaaaatccagaaatgagctaaattagtgtaccattaggcacatatcggacgggcatcaggctcgacctaaaaaatccattttcgacagaaaattcataccattttcaacccgattaactaacagatctcatcctaaatctaaccctaactaaaaaatttcatagaacgttgcaacatattaatctatttgatgtcgcccaattagttatactgcggttgcggtagtaaacaggctatatgtcatatccacaaggaggtaaattaccactaaagattagtataaatagaatatggtagaaattgaaatgaagcaaaaaaattataaaattagaaatgagaaagaagatgatcagataaagagtttagtaaggtagaaatgtagttatgcaaatccccggcaatggcgccaaaaattgatgtcgcccaattagttatactgcggttgcggtagtaaacgggctatatgttgtatccacaaggaggtaaattaccactaaagattagtataaatagaatattgtaaaaattgaaatgaagcaagaaaataataaaattagaaatgagaaagaggatgatcagatagagtttggtaaggtagaaatgtagttatgcaaatcatattctaataccgatattaattcgaacacagttgcaattctacaccattaattacaaccggaagatacatatgttaaaagcacaaattaattaatcttgcata

SEQ ID NO: 349024 - DNA, 576 bp, Cannabis indica
ctcgtaattcttcttgcgcgtgctcttttcttctccatgctttcatgtagttcattctcatcccatacttatgtttcatttctccgctgatgtcttgtggcctttgagttgtttttatgttggtaaaccgtggcttgatgtagtttccaatcaacttcattgtagcttgtctttgtctgcaaattgtatgtttagatcacaagtgtgaatcacctttctgtcatatttttaaattatgaatgactttgttggtctgtttctagatgccgttagtgcccacgtgtattttggatccaagcaataaattttgtatgtttttgcgcaagactttttcactttgaattggaagttgtttctaattgcatagaaaccaagcacactttgaagtgcttctttgtccttgtatatttgtgtttttttttatttcaggatgttgcgaatctgtgattagtagttcgtcataatctgttatttctggcttcctgtttttgttgttttctagttgctcaactattttctctgccacaagttttgcatagtccacgaagtcaaaattttctcccccatcttccagta

SEQ ID NO: 349025 - DNA, 1219 bp, Cannabis indica
tcgccgttctaggtcgaatactcacacttattcatcatattattattatcattattatttctattatttattttggtgttgtaatattccttcaacaacatttggtgccgtctgtgggaacacaatacttcttgctgatttagaaggaggatcataatggctggaaaccaagaaaacagaggtcttaacaatgaatccatcaatatcagaatgatgaacgtcccactatcaggaagcagagtgcctcccgtagatgtgatcaatggcggagtaggacaaggcaatatgatgcctcttaacctattccctgaaaccactggccctcacgctggggaaacatctacaccggcagccacaacaggacattttccaccttttactccagcaatggtatccgaaggtatcatccagttgactaccgataagtacactgcaatccaagaccagctacgcactctgcatgccgagattgatggacgaaacaagactcgacgtcctccctgcgtacctactactcgcacagaaaaccctcaggttactaactctagaagtcgtaataatcgtactcgcagggaacgaagggccaatcatgagggacttgacttgaaccagcccatgttgagggaccagtccgcgagaaacctcaatcaggaggcctagatggaggaggatcctgaacgacgtaatcctcgcagcagaccctagtcgcgtgacaacgacattgaatccacttcctcgtcttcgcatggtcgcacacccagtaggtacactagatcgggttcggtggaaacaccgcaaggagggcggtatcaagttcataggggcgatctctgagatcaccttaatgctttcttcagggcgcgttcccagacgcctcgggatgtcgaagagccccgtgatccccgaacgggcgatcagggcataaacaaccatatcaacccgcctatcgcaccagctgcgactactgggttaagatcccagggaacatcgccgcagtagtaacgacgcttgcagcgacacaagccaatactcccttaaccgggaatatcgatcaaggcatgcttctgcaagccttaaaaatgctcgagcagcagagaaagcccatatacaagctgcatgggacttctcctttcactacagaagtgcgacaagctcgactacccaagggattccggttatcataatccctaaaatataaaggtaccactaatcccataga

SEQ ID NO: 349026 - DNA, 514 bp, Cannabis indica
aaaaccgaccaaaccgaccgttgttcacccctaatgacaagagtgtggtggccgagtttactggatgttctttgataattagtgttgaaatccccttatgttttaattttatacgcttaactcctgatcttttttggtagaaaaatcctcttaacttcactttttttttttttgcaaatttgagtcgccagtgaaatctcaccgttaaatatcaactagattgccactgtgaacacatgtgtatatgtgacatatttttattgacttcaaagttttactatcacgtgtatacaggtgtacaatctcagttaacatttgacagtaaaatttaaccggcatcttaaatttgcaaataaaaagaagttaagggagttaagtgtataaaaaatattaaaatataaaagtaatttatttattaaatataatataaaaattattattctaaataattattgcaaaattaataattaaaaataaaaaaatcaaataatctatcaacttaaattaatttata

SEQ ID NO: 349027 - DNA, 541 bp, Cannabis indica
tgccacaagttttgcatagtccacgaagtcaaaattttctcccccatcttccagtattgtctcttgcattgtatgttgttgagttgttgagtcttctgttgttgttgtattgtctatgcaactaatgcattactattttccaagaacgattgattgatagttcttgatgggttgttaatgacattcacacacaatggttatgttgtaaagtcaggttccttcagttttagttgtatgtagaaatgcaggctttgataatcctttatcctctacgattggtatccttctttcaattggtatttagttacagaacagtattttcttggttgcattccaggacctctttcagcttccgttgtaattcttcatacttacaatttattgaaatgtattgtccactagcttcataattttcataattcatttgatcatcaaataatccattgcaaaagactaggaatggaatttcttctttttccagtgattttgaaattattattagtgtaagacaccaattttgaaactgttttgattctattat

SEQ ID NO: 349028 - DNA, 1425 bp, Cannabis indica
tgctcctttggagtcagttcgagtaagtttcaggttttatcttcaacgcccgaggaattgaagccaattcagagaagattcaagccctcctggatatgaaattgccaacaagaaccaaggaagttcaaagtttgactggtcaaattgccgcgctcagcagatttgtttcaaaatcaacagacaagtgtgttccattctccaacatcctgggaggaaataaacaatttgagtgaatggaggaatgtgaaaaagctttacaagagctaaaaatgcaactcgcaaaaacctcctgtactctcaaaacctctggacggagaagaacttgagatatacctagctgtcacaaagcatgctgtgagtgccgtattgatcagagaggaaaacaacattcaacatccggtctattacatcagtaaaagactcgttgaggccgaaagccaatatccattaatagagaaactcacttactgcctaattctagctacaagaaagttaaggccctactttcaagctcaccctatttgggtatgcactgaagccagatattacaaaaactggatgcctctggacagttactcaaatgggcaatggagttgggccaatatgagattatcttccaaccccgaacagcaactaagggccaggccttagcagactttgtagtagaatgcacaggcaaggaagaaagcgtatcagaaaacaaccccgagccagaacaaatacctcagtcaagtaatagtgaagacaagccaacttggaaactacatgtggatgggtcggctatagatcaactatctggtgtaggaatcgcccttgtcacgcctggggtgcaacaccagcacgctacagtcaaatttggttttaaggcatccaataatgaagccgaatatgatgctttgatcgccggtctaaaactagctcgagaaatgaaggctgagcatattgagatctgcagcgattcacaactggtggtaaatcatgtatctggggaatacaaagctcagggagaaaagatgatagcgtatctgagaaaaatacacaatctgctcgcacagttcaaaagctatgcactcaggaaaattccaagagaagaaaacacgactgctgacgcattagctcagcttgtaagtagtaatgtaagtgatagagcaaatctgattcctattcaatttctcgaagaacctagcatcattggcatgtaagagattgaaatgattgatacatccccaaactggaggacaccaatagcaacctaccttaacactagggaactcccaaataatcaaaatgaggctcgaaagatgagaaggaaggatgcacggtacatcatagtagagggaattatgtatagacgaggattcttcatgccattgctcagatgtgttacctaagaagaagctggacgacttttgtctgaggtacatg

SEQ ID NO: 349029 - DNA, 1081 bp, Cannabis indica
atttcagcaaggaaatcttgggaaatcttgggagattctttagtttttaagttttttgctttggtttgggtttatgattttgagaattagtggctgttaggtttatgtatgcttagggttcaaattttagggttctttgagttggttttaacttctagtagctgatttagtggtgttgtgttgaatttatgcaagttggagctttgaactcaaagctttgatctttaatggcaagttgagtttcattgattttttctgtgaaatattggttggaatacattgtatataccctaattaggtactctggaaggtttggtgacgtttggtggagaattgtgcaagaaatgaaatttcttgggtgaactggtgcaaaccgggtaaccagttttacacgtagccggttttaacagggttccctgggcctttcatttttttcaattttcatcctttccgtgccgtggttggatgtttccctatttccagagctagattaatccctaaaaagtatacaaaaacctagggttatggttttggatttctcgggattagggttttgtgcttgtaacttacccggtttcataatgtgattagggcatccatctagcacgagacttcccgttcaggtcggccaacacacttgaattcagaaagaaggtaagaaatgaatataatgtgtggtattaataagtgagtgtatgtatatgttatgtgtatatgcatgcttaaaatgttagttgcactaccaacacttatacgattaaggtatagagtgtattggtatagtgattgttatctgagagtaccgtgataccagcgtaagtacggagaggtactgagtatgtgtggtacatcacttagagtaacaaaccctaccaacactcgtacagagaggtacgtagtgtatgtggtacagtggctataccctggtatggaacgttcttactcatctgttgagccttgtaaataggtgtatgggcggctagatacaagtcggtaattatatgatatgttatacgcttttcttatgagtctgtcgactcacagttctgcttccatgtgtaggtaaaggaaaggcgaaagc

SEQ ID NO: 349030 - DNA, 755 bp, Cannabis indica
gggtaatttagtctttttctaggagtggattagtggctgccctaccttttgacacctagcattttaatgaattcagcaaaggattagataaatccttttcatttgagaaattaaggaagtgagagaaaaagccaaaattgaggaaattcattccatttcctctctttctttgttcggccagcctagaccagaaggaaattcagttcttcttctttgttttgctgcaatcaactagggaatcaagcactcttgaagctaaggtaaaatcctagaaccctagaacatgtttatttaagttttcttcttagtttgagcttgtgttttgagtgttagtggctgttttgatttgaaatgcttagggatcaaattctaggtttggtttgggttaattaaggtttataacaactgatttgggtggttggtttaggtgttgtgttaatttgagcataaaaaccttaacttaggtctttaatggcatatcttgacttagtggttatttctgggatttgttggttggaaaacgttgtaaatacattatgcaggtgttctggaaagtttggtgaagtttggttggattttgaggtcaaggggagatttttcgggttcccagcacagaaccggaattccggttctgggggacctgtggcaaccggtcgaccggttggtgacccagaaccggacttccggttgggaaccggcctgccggttggggctttttcccgaaccctagtttttcccgtttttaagtattttag

SEQ ID NO: 349031 - DNA, 957 bp, Cannabis indica
gagctgacaccaggtactcccccttaaaaagcattctaagtttttagccttctaccaggaacatacatgattttggctatgtagatatgtggccaaatcatataccatatcccagagtttctcaaatctgattgtgcaattgtatttgtagacccaaataaatggcaaataccaagtcttgtcccaatccagacaatattgaagatatttacaaaaatgcaaactaagcatcagcatgccaccaacatgcacaacaacatgccccaccacttgactaccacttggccaacttgtgggcatcacctagcttgtaacgtgccatattggcacgaacattacattcgcccccacttcaacatgttgatgccctcatcgacggcccactacaactcttcttgatgtcgactcctaagcttactctaagcttcatttgaatcctaagtctgcacttgtccctcttcctccgtagaaccaccctcttggtgacgatctccctctcccacacatggacttgatcaaagaacctgtgctactgccgttattcagaaccacacatggagtagtgcctctacactagaatacttcccccaacatgaactcctccgagtccctcacaatgtccctccagtcaaccaagtagcccttgcaacactaaccctgaagctaacacctcctctgatagtagctcactccaattgtccaatgcatactccttttgacaaggactaagtatggtgcgcccctacaggtgaggttcgcaaaccaaccgtatcctacgacacctacagattatgcttccactgaatccaagtctctttaaaaactttacacgccaactccatggtgccccatcctcttgatggtaactgagcaagacactctgatcgcaggataaaatttggtgcgtcccacctagacgaggcttgcaagctaactgcaccaagtgcactcttgcac

SEQ ID NO: 349032 - DNA, 610 bp, Cannabis indica
ggacttaaaacgatttgtgtgtgatttggatggtttcatgttgatttgtgtgttatatgatgattgattgatgtttgtgaaattttatgaaaaataattaaattttcgtttctggaattatttttgttggatagtttggaaaaaattaggcaattcacatttttacaaaacttgatttcgattttatttgaattagttatgaatttttgaaaatcgagaaaaaattaggagtggtgacacacccatgtgcgcgcgcagacacgggtgatcacccgtgtacacacgcattaggaaagcttcctgtccgaagtcgctcgttcgtgctgtctgaagggcttctacgcccacggaaatgctacacccagcattcgtgggcgtgattcatgggctgagcacccaaggacgcgcgcgcggatggtatgcacacataccatccgtaccaaatgcattttttccaattttttcattttttcatgcttttttatggaattaattttcgatttttcgtgtagttttgtattttgatttttacttttcaaatttcaaatctaattatcagaattaaattattattttttttttcaaaattaatttaagatattagtgaaat

SEQ ID NO: 349033 - DNA, 829 bp, Cannabis indica
tggtgataattaatttggtgatttgaaaatccataaataatatttcataacaattttaaatataatttgtttgagagttgttatcttctaactattgagaatttcttttattagtttttaatatcatcactaggggattaattcattttttaatcttattttattctctagatgttttggggaccaatcttgatatgttaatgagttggtgtgtagtattcagtgatacaagataaagctctagctctttgggtgtgttgtttgaggacgttataactttattatctaaatttttaggggcagttgtgtcccatattactcgctgactttagcagtttatggtttgataaaacatgccactcgattagacaatgagctatccaggttcaaggaggttcatgcactgtttgcagatgtctacatcgtaaatattcatgagtgactttaatcactacgtcaaaaaaattaataatatgtctgacttgcattctctggtcgactcatgcgagctgcccacatgttgaaagttggtcgggtgttctcgcacaccctccttagatgttctaacttctacttactttgagtatcaaatctccctatatggttcattatgagtggaattttttgtccaaggccataaaatctgttcaacgtatcaccacccagatgaataccatattactctccgttatatatatgttacatatatatacttgaataacaaatatatatatatatatactagcaaaaagttacgtgcgaggcacgtatactaaattttatgttagttttttctacattattaaaagtgatacaattaaaaataaaa

SEQ ID NO: 349034 - DNA, 473 bp, Cannabis indica
tgtgatttggatggtatcatgtagttttgtgtgttgtattgatgattgattgatgtttgtcgaattcagagaaatataattgattttatgtttctgaaattatttttattggatagtttggaaaaagttaagaaatttacttttttacagaacttgttttcaattttatttaaattagttatgaatttttgaaaatcgggaaaaatcagggtggtgatcacccttcccacgcgcgcggaatggctgcttgcagcctcccagcgccgtggaaacttggcagatcaccccatatgtgtgcataccatccgtacagcgtgcaattttcttcattttcttcgatttttcatgctatttcatggaattagcttccgattttttgtgtagttttgtattttgatttttatttttcatttttcaaatctaattatcagaaataaattaatttgattattcaaaattaattttagatatta

SEQ ID NO: 349035 - DNA, 596 bp, Cannabis indica
tcccttgcctttgggtaattgtccgatcaggtcaattccccagatggcaaaaggccacggactttgcatctgagttaactcgttgggtggagcttgaggtatctttagaaatctctggcatttgtcacatttcttaacataggactttgaatcttcaatcattgtcggccaaaaataaccttgccttagaattttgttagataatctgcccggcggcatgatttccacaaaatccattgtgcacctcagatagaagtcgtccagcttcttcttgagtaacacatctcagcaatggcatggataaccctcttctgtaaataattccctctactatgatatagcatgttgccttccttctcatctttcgagcttcattttgattatttgggagttccccagtgttgaggtatgttgttcttggtgtcatccactttggagaaatatcaatcattttgatctcttccatgccagtaatgctaggctcttcgaggaaatggataggaacgaagtttgctttatcacttacattactgcttgccaatcgagctaacgcgtccgcaatcgtgttttcttcccttggaatttgtctgagaccg

SEQ ID NO: 349036 - DNA, 532 bp, Cannabis indica
atgctaatctgatggctatatatttgcctaacatatatctgttggtatctcagtgcaactctatgtacacctcaccgataccttgatatgttattttgacggcaactgacatgtacgctaaacatgtaataacatatgcatgatattatactaatcttacctcaactctgaattcatgtgtgccggccaacctgagtggaacaactgctcggcgaattacagcctcctaaatcacatcaataaccatgaggataagtgatacgctaaattacaaccgggacctaggtttaaaaccaaaaccttatctactgcaacttaaaaatatggcaatatcccaaattagcagggaaacaaccaactagaaacctgaaactggcacgaaacgacaagctaaaaaattggtttctccccctgctgcaaaatccgggtaaccgattttacaagcagtgtaaaaccggttagccggttttacccagaaaacctacaaaaatcaaacccctaacaaaatcgtttccaaactcaaccaaacttt

SEQ ID NO: 349037 - DNA, 658 bp, Cannabis indica
ttcgaatattaacttaaaatggaatattttcaaattaagtgatgaaatcagattggtgatgagtttatttccgagttcttaactcagtttttagtggatagtgttgtgtagagcaagcttgagttcatggaactcaagcttggagctttaatggcactttttgattcttgaagcaataattgtgtttgagctgtggaatatgtttaatatgttatataatgatgctctggaaagtttggtggtgtttggggaagatttgagtaggttatgggggcttaaagattgaaatttttcgtgttgttgctgcccagacaaccggaattccggttggtttagggctgttccaaccgaaattccggttggctgtatcgggaaaaatgctgaattttgttttggccatagcttttgactcgagactccgttttgagagttctttatatcgttggaaagctcgttccaagctctatgtgattctgtgtattttaaatgccatgataatattttatgaatgtggaattgggggttaaccatttttgtgtaaatctcggtattgtgactaggattaccggcacctggtcaggagcatccgaggatatggaatctcttcttttgcgggacaacaggtaaagcagtagttgcacgtagagatatgcacggt

SEQ ID NO: 349038 - DNA, 453 bp, Cannabis indica
acggttactcctgaaaataatgccatgttagttgaactgattatggatgatgaagttcgacgtgctctttttcaaatgcactcggataaatctccgggccccgatggtatgacaccgggcttctatcaaaaatgttggagtacggttggtagtgatgttatcaagtttgtgaaggacttctttattgaaggttcttttcgatgagaggtaaatcataccaacattgtgcttatcctgaaaaagaagcagcctgaggtgatgactgatgttcggcccatttcattgtgtaacgtgctgtataaaattatttccaaggtgttggcgaataggttgaaaggggttctgcctttggtgatttctgacacgcagagtgcattcctcactggtcgtctgatatctgacaatgttatggtctcttttgaaataatgcatttgttgggttttgtgccctaa

SEQ ID NO: 349039 - DNA, 620 bp, Cannabis indica
taataataacaacagcttcaaccgcacaagctccttcaagaaactcatcacctcggtagtcgaaccaaaagtgaagaagctgaaaaacatattcttagaagccatcaaaacgacgtcgtcgtcgtattcgaacgaagaagcagagaaatcaataggacctcgtttggccggaacagaggatcgaatagtggtgtacttgacgagcttaagaggagttagaaggacttacgaggactgttacgcggtgaggatgatcttcggtgggtttcgggtttgggtggacgagcgtgacgtgtccatggactctgcgtataggaaagagttgcagacccttttgaagaggaaacccagtttgcctcaggttttcataagaggtaactacgttggtggtgctgacgtcatcaaacaactctttgaaactggccaattggcccaaactcttaaggtatatcttatcttatgttatctttttatttatcacttgaaatgataatgtggagaagtttatgatgaaaaatgtgtattgttacacttttcttatttagaaaatttagtatgaactataaaagcttagaaaattagaattaccaacaaattatatttgtaaactaagaaactta

SEQ ID NO: 349040 - DNA, 929 bp, Cannabis indica
ttttttcaacataagcttcttgagataaccaaagtttcccattcttcctatcacgggaaatcctcattccaagtatctgtttcgccgatcctaagtctttcatagcaaaagacttgctcaactcttcctttagcttctcaatctttctgacatcatggccaacaatcaacatatcatcaacatacagcaggagaataatgaaatcatcatcagaaaacttctttgtaaacacacaatgatcagaagtagttctggtatatccatggctcgacatgaaggaatcaaacttcttgtaccactgtctaggtgcctgtttgagtccatataagctttttctaagcttgcacacaagattctcttttcccttgactttgaaaccctctggctgctccatgtaaatttcttcttccaagtcaccatgaagaaatgcaattttcacatcaagttgttctacttctaaattcaagcgagcagctaaaccaagaacaactctaatagaggacattttcacaacaggagaaaatatttcttcaaagtcaatacctttcttctgaccgaaccctttctgtaacgccctaaacaattaggcacgctacccaaaatatttatgaaaccctaatcccctaatcgagattactaatcaaaatagcacagaatttaaacttttatattaagcagaatgaaaataaaacttgtaatacatttaaaattttcaacagttgggatcccaaaaatatttacaaactttattacaagtcttttcttttctagccgacctaagcggaaaaatagaatttcaaaagttcatcacaggtagacccttaacccgcttggtctgatatggcgcgaacttgtacattcttcgtcgtgctcctgaaactcatggctgatcaactaatgacttaccctttcctgcacagtagagcacc

SEQ ID NO: 349041 - DNA, 903 bp, Cannabis indica
gtaagttgaagagctacatcataactctttaccacaatacttaaaactcacattaataaaactattttatttttgtttctaaataaattatcatactagttaattaacactatgctaattattattaaaacaataagtcaatgtccactataatagttgagtttgcaaacctaatccatccttaggtactaaattattaatggtcaaaaggtttttttggggtgggctaatcttcttcatagccatcttcaacttctctagggtcattttctatcaaattgagaatttcttccaaatatttattaattcaaaatattgtgacccacaatcattttccaaaattccactcaattaaaataaccttgtttttcccttaaataaaataaaaattaaatccaaaaacaaccaacaaattacaaaatattaaaaaagtatattgggtgcttatatagtgaattctaaaaataagtgcactcatatttttttttttgtattttttatatatgaataattttatcctttaattttgttatatgatgatgcatattatatttatttaagataattttaattttaagaaatataaaataatttataatataaaaaataaggtttaaataatttattttacacacataaaatataaaaaagtatgcatgtgtaatagattatttaatactattttaaatcatgtgttttacaaaaattatttattgaattttttgttttgttaaataaaaaatatactctgtatttctcaattaataatttttataaaatacaaaattcaaaataatatttctcattataaatttttcgaaaaaatttatattataccttaaaaaaattacaagatatacagtatctttatatattaaaagtgcctatctaacggcatttctt

SEQ ID NO: 349042 - DNA, 531 bp, Cannabis indica
aatgaaaattttatttgagataattatcttaattattaaataaatagttttggcatttataaggttgaaagtgcaaaaagtggtatttgtgaaaaatagataaaatagctgagaaaaatggcaaaaaccaaacttgtgtggggcccattaagtggccggccaccatatgcctattttgctctattcttatcaatttttatcaattttttattcctaataattcaaccctaaccctatttgaatttagtataaaaggaaagctatggtctcattatccaactaatgcctccaaagctaagaacctagttttctctctaggttgatgagacctcttccttcttcttcctctatttcgaaataccatagctcttcttcacaaaccaaaatttagccattagtgattgagtgcatgcccacacataataagtgagtcataaatcatagtatgtaagactgtgaataatccaaataataagaaggagaatcgggctcagatcttggtgatactctgctacagataggatacaaggg

SEQ ID NO: 349043 - DNA, 698 bp, Cannabis indica
agttatacataaaaacaatatggtgtgatataaattgtggtcaaatggcatcaaaagggaacaagatgaaagctccaaaaataatactcaacaaagaaacaacaaaaaacatgacataataaataataaaaaattgaataaagaaaataagacctagaaaaacaaaattagcatatcgtaattcaaacccactcatttttatgtaaaatcagattgataagataagaaaaaaaaatatacctgtgaaatgctataacttacatagagagatagattgagcttacccaaataaaagtgtgtaaaattctttcccatacccaaattaaacaaaggaaactccaagtcaagttagaggataaatgaaaagcttcataaactaatgggccaacacagaaaaattacatatactcaataaaataaaaattaagatgttaaagtcctaaaaacttcaactcatcttattctaaaacacaaagattcctgtaagaagaaaatcacaaaatcctccaattaaagtaataagaaaaatgcataagagaaaaaatgagagggaaaaagaaagatgagggatatatacaaatcaaaattaattataaaaaactaaaaataaatcaaggaaaacaagtttaagacaataaaagagaagaagaaaaaaaaaacaaattgaatatcattacacattcaaaatagacaaaaat

SEQ ID NO: 349044 - DNA, 657 bp, Cannabis indica
ttcatcatcctccctaaatgagaaatttaggtcataacaataataaaaacatccatgattaattctgaaacaaaactagacataaaagataaatagagggtaaaagaaagaaactagatggtgatatcgctccgggtcttcaagatcacttcctctccttttcattcactttttaggcctgttcttgcttgctttggccttctgactcctgttccttatataggaatgaaaggtgtgcctccaattgaaaaaaatatctgaattaggttaaaaatctcgatttccgtacctggtcgcgaccagcttaattgctgggcgggaccacaggcgaaactcaaaaattggagtttctgccaaatccccattgtcgcgaccatgacgaccagataaaagggtcgcgactaggcttccttctggtcgcgactactgactcccttttagcagctttggccaatttttcaccagtttgtcttgtcttttcgtcaattgactgaatttgaactttaatgccccgagaacctgaaataaggaaaatcaagcgtaaaaccactccaaaagacaccaataatcgagaaaatgcttaactattagacccgaaacataggctaaatgtaacctaacaaaattcccccaaactagattcttactcgccctcga

SEQ ID NO: 349045 - DNA, 538 bp, Cannabis indica
cttaattatttaaattttcttaaaaaaatatatttaatttgaaaattaattttaagaacaacttaaattagaatatttatttctttaaattaaaaattaggtagattttttctagatacacagttagttagatttttttagaaaatatatttaagttgaaaactagttttaataaattttaaatcgacttaaattagaatatttttcaaattaagttgatttgttcaaaatacttaattaattatgtaattaaatttttgaaaattatatttaaattgaaaatttagttattttagaataacttaaattaggtatgttatcccaaatttagcactctgacgtggcatcatgagaatggtgacacatggacactacttagagcacctgttcggatcaatatgccgagcaagatgcctcgctggcatgtccataatggaatactcaacgagccgtgcagaatgagcaacacttagcgaattcagctaaacgcatcgtgagtcaccagctcaattcctataactcagggatcaacttacgt

SEQ ID NO: 349046 - DNA, 583 bp, Cannabis indica
agcatgcaataccctaaaaacctaaaaatttccctatcagtgcaggaaacctaaaaattttcatatcttatgcaaatcaacctctaatcattcaaacatctccagacctctatatacatcccaaagaacaaaaccaaagcaacaaaaccgagcttcatgcataaatacacaaactaccattaaagctccaagctttgagttcaaaactcaaacttggttaaatcccattaacatgcactaaaacctgctcaattcaccatgtatcaccataatataaccccagaaaacaaaccaaaacataatcaacaaccacagcaactaatacctcaattaaccataaaaatcataattttgagttaaaatctctacacaaggttaaaacccaagaactaacaacaaaactagcatgaattcactcaaataaacacatcaaagcttctgaaaacaacaacaacaaatagcagcaagcacaacaccaaaaactaagcatgcaaccattttcttacttgattttcaagaaactaaagagagaaagagtaagagctatacctagagcttggattgtactcaaaatttgcttgaa

SEQ ID NO: 349047 - DNA, 604 bp, Cannabis indica
agtcgagaagcttctatagattgccattagaaaaatgctccagcatcttactaaagtaatttgcttgcattagagtaattaattaaccaggcataccacaagcaagaggtttagataagctcaaacctataatactaagaataggaagttttgttgagtccattgaatagacttactaacgaaatttcctttcttgtccttgttatagaaaatcattagtaactccatatgaatggttttaaccatagttctcttggctgtacttcttagttcctaattctgactatccattacatgtttaagctaacaatggatttttgtcgttgttatcttccaagtcataacagggtgagttccttgaaaccctcccacttcgacaaggtaccatgacttactgtctaagaacactaaatggtattgttctcttcggttgtgtcaagacaacagaggcagtggggccatcttatttcgaataagatgagagaaaatttttggaataaaaaaaaatatctcatctactttgctactttgttttcaaacttagtcattttcttagaaaagtagtattttttgaaacaaacactttcttatctaatgactatgg

SEQ ID NO: 349048 - DNA, 1092 bp, Cannabis indica
tgaaatttttggaaaaataaactaaacccccattacataacccttatttcagccaaataatactaaaaattaaacatttaattttcaaataaaaagtcactaaaagacaaaacactaatggggcaaaaagaccattttgccccttcaccataaaatcatgaaaatcatactaaaggggtatttaatgtctaaaacccgtccccaaaatactaacatactaagttgtgatttctactgagcaaaacgccgagttccaaaataccggacaccggaaatgcaaaatatgcaagatactgaataacataaataaccgaataataaattatttaaatagctataaataatttcataattaatcataaccaactgataatttccaaattaactaagcgggctttacactaaagctgttggaaggattatcgttgaaatattccataatcaacaggtccgaactttctttctcttacatttcttcctcagtaggtccaggcaacaagtttaatccggtcaccaaaccaaactccaccctaccaaatctacatctcttcttcgccaagtaaaaatgtacctcgttcggcttgtcagatttgattttgtgcaatatcaattgatgaatcaatgctcctaaaaattgtaatcgctctctctcaaagaactttgaaagtggattctctcaccctatcccatagtttaaattcttcaaattgaccttaatcttcgagtagtaataactaccgtcgcaccatgtgacacgacctgtataatgctccgacactggaattattagatatgcaggtctcgccaaaaaaaaatcaagaaattgaaggttagcaattcaagatctagcataaaatcggacccatttcggacccaatacaataaacaaaaacatcaaacagtacattcgcaaacacatatatcaggcacaatcaaaccgtatatcggatacaaacaggtcaaaaagtaattatgatcataattatggttaataattttctttttgtaaggtttattattgatattaaatattttgtatttttctaaaaaaaataaaacaattcaaaaacaataattaattaattaaataaa

SEQ ID NO: 349049 - DNA, 868 bp, Cannabis indica
tataaattattataatttaataaattcttttttaataaaatacaatatcaaaattataaacattaatgtatataaatataaatcaatacttaaaattactaaaaataaacgtgacacatagagtataataaacatatgtgaatattattatattgtttattaaattagtatgtttaatgaatagaaaacaaaataaacatatatatacaaagtattttatattattagcatgtttattataattgtaaacataaaaatagacataaccaatttatactatactaaaataagtatattttctttctattgtttctatatattgattatattctaatgagttagtggacgaattttctatgaagtataatcactactacaaaaataggttttcccgacgtttttaaaaagtcgtttaaagtatttctgttggttttcataaccgtcgcctatacgaccgtcgtaaaatgggcagaataggcgacggtgcaaaaccgtcactaatgtgggtttctcgacgatttaaaaatgtcgcctataactaactgtaggcgacggcttataaccgtgccctatactataggccacggtgttaaaccgccgcctatagtgtaggccacggtttaaaaccgtcgcctataccctcgggaatgtaaaaaaaaaaaaaggtattttcgcccatctgtatttttgcccatttttttttcctgcattacttttataatgttacctaaattaaaataaaacaactaattaattttgttataataacaactaactttaaaacacattaaatttataaaataacaaaataaatatatatatataataaataaaaaagtatataaataaataaatgtatttatactga

SEQ ID NO: 349050 - DNA, 1168 bp, Cannabis indica
ggcacaaaacccaacagtttccatgattctggtgttgatttgtccgtccccaaccacgaaggaggttccgtttgtgatttgttactgttcacagtataaaagtaaatatattgcacctggacagtatgaaagaaaaaaaaagggacctgaatagtaaaaaagaaattattgccgtgtgggagtattattgtaaaatttggggaaaaaacaatatttttgtaagtttttcaacccttttaatggtaaataccattccttatttataggcagcatgcattgtggctcagattgacccaggcccgtagagtttatctatgttctaagtccaccaattgggtatacaagtgaacaatcaatgggtataataaggcccaataactgaagtggtaggtgtgagatattgttgaaggtagtgtttgaagctgttaggttattttagtattaaaattagattaattttagtatatttttaatttagttttactcgtgtttggagtaattttatgcttgttatcttttatttttgcatatttaaaatagaagaagactagtaaacatccctcgcttcgcggtggatatataaaatattttaaattatttataaaaataaattgtgtattttaattaataataattacttgataaaattatattaaaattttaatttactattaaaaattttgtgatataaatacttaaaatattaaatttattgctaataaataccgaaattcgaaaatagtaacataaattctcatttatggtttaatttttattctaatgtgtgtgttaaattctgggttcgaattttattgtgtgtgattttaatgtttgagttttaatgttttactggagttctaatgtttgagtttgtgtgtatgagatctgttttttattaatttatttatttattttcatagattttgagaacttgaaatttgatgttgtttatattgattattgagattgaaatttaatttttcttacgggaattaaagtttgcctttcggtttcattgattgaaaaatattagtagaaagtttatggaatgagaattttaattatatgaaaatagaattgaaaaatagcatttgaatcgagaatcaaagtttatagttaatctccttacaaaaaaaaagtttattgttaatctgtaaagataatatgg

SEQ ID NO: 349051 - DNA, 1409 bp, Cannabis indica
tcttcattttttcatactctatagtgatagagtaagtgcccacacacatcaagtggtactcaatcatagtgtgcaaggctgtgaagaatccagtttcaagagaaggagattcggactcagacaggatacaaaggttagatttctgagtggaaggagccattattattccgctgcacccactctaaggtttctgaaactttatatgtgtttatttaaattattttagagattcatatttaggatgttaaataacttacatggtagtaaatctagatcctggtaaaacatattccaacaaaggctacatcagttccaattaagctgcaaagtctctttctgcataaacgtccacacaaggactttggggaaaaatgttatcccaaattttgcccacctgacgtggcatgtctatgtggccaacatcagtgtcacgtggcagtacaactcgctaacaagaaggccaagtcatttactcaacacttcaaccaacaagaagtctgaatactcaagcgggatgactaagtgacaaaccaaccacccccagggtgctggttgaccacccctagccggccgtaataggctggccaggttttagacattttatggccaggcagcatgcatcctgcagatgcatgactagccagcttttggcctggcaggattttagcgcacagcttcaacgtagcatcaagcaagactacagatcgggttttattaatttaatatgtaaaataatagcttattttacatatttctaaaggatttgaagggtttaagctctcatatataaaggctttctaaaaccctaaaaccctaagtgcaagtcaaaagctctaagttctaagtgactaaaaccctagctctaagtttgataactcatatctcttaggggtgagcaacggttggtttggtcggttttttacacaaaaaaaaatcaaaaattcggttttcagttttcatggttataatccgaaaaccgaccaaccattatacaaatgtaaaaaaactgatcgttttaatccacggtttggtcagtttaaaccgaccaaaccgaacttcattttttaaaaaaatataagtttaaatttttataattatttgaaactaaaaaattagagtattatatcaaatatcatataatttaagaataaaactttcttagttaaataaataatataaaataaactttttaaatttagtttcaaattatttgtgctactaatatggtaatgagttatattaaaaaacttagtattattttatgaatgtgtatatataatatgtaaatgcatcaaaccataataaaataaaacaataaataattgggactttaaataaaaagatataagtaaaactagtttaataaaatagtatattatatataatatatatgttcggtcagttctcag

SEQ ID NO: 349052 - DNA, 605 bp, Cannabis indica
tccgaagaagaacacgttcaattcaagttcaggttcatttcagctattaccatatgacgacgtcgttttatatatcacggtcgtttttgcgccattttgttgctttctaagattatgtcgttttatagtattacgtgtcgtttattaatttatataccgtaaaaaataaaatgttttcaattttttaatgtggagttattttaattaaatttaacgcgagtatcaaattattgtgactaatgaaaaaaactatttacagatcgattcgggtcatatttcacaaaagagtatcattattagaaatgtaaaactttcactatttcaattaaaataattattagtgcttgaaaactacttcaaaacaaacatgatatatataatgacatcgtaggaaaatattttttttttgttggtaaaattcctttatatttatttttctttataaatttaaggtgttagttggatatcaccgataaatattgattagattattactgtattagcttaaaagttttactttttacgtgtacacagtagtccagttggtatttaatgataatttttaactaacacttttaaatttataaaaaaaaaattaaaggaga

SEQ ID NO: 349053 - DNA, 509 bp, Cannabis indica
tatttgtttttgttttttttttttttgttactttaggcatttttaaaatttttgagaacgtctaattacagtcgttatgctgcagaaatttcggtagaattaggataaattttactaaaaaattataagtattaaaagaaagtacataacacaaataactagttaattgcttgctagttgtaagaaagtacattccattctcatatccattacattcaactaaacactacactagttaattaattacaatttatacaacttaataacatgaactaaacattgtgtaagtagtaactaattataattagttaataaatactgaattttttttggtatggataaatcatggatgcgtgaggagagagacatattgtaatttcaagtagggttcgatgtatttttagagttctccttaaataattctaaaaatcctgaacatattcattgtccttgtgtagattgttgtaatggatcttaaggaaatattataatgattaaggaccatgtgt

SEQ ID NO: 349054 - DNA, 565 bp, Cannabis indica
tgtatgagttttttcgtcccccccttttttgatcttactttccactatttataatcatatagtgagcagttaattacaaaattgactgtaatctttttacgacgatcatctcctagaatcatgggatttgattacaaatcacgctaagtaaatgaggtttttatttaaatttttacacagctgtgaatatcccgcttttattgggccaaaatgaacacgtattaaagatatatggcaagccttatcccattgagatgcctcactgagaatggagctgagttatatctttgatggcgagctggagctcgtcatacgtcttcccgaggtgtatattgcttttactttaattctgacaattacagtttctggtattgatatgatctttctcgcgtgcatgccctcttacaacgagatgaacgcctcgctatctatctccttgattcacccttctgcttatgcttagttggtataccttgtactatacgctaagtatttctattgtcattatatctccccacgcgacgaggttaatgcctcgtcttgcacacttgcagttacatggttt

SEQ ID NO: 349055 - DNA, 711 bp, Cannabis indica
tagttaaaggttattctccacccacaacaatcattcttaacttacattaatgaatgtaatttcagttttctaatcaaactattaatccagcagataaagctgaagtagtcagattatcacaatctccctattacatgtaatcaaggcgaagcgctcaataattaactcttttacctaagcagtaaatccacaaaacatgtaatttatttaacctaagttctattctttatcacaattaaaaaatacctttgacaatattaaaattgcaatttatcacaaatactgagaatcctatactactatgtgaatattaatcctaagatgacggtagattaaagtaaaacctaatttagtgatcatctatacaagattaaaacaataatcataacattgaacatagaagaatagaaacaataatggaaactagaaattaacattcatcaatgaaattaaaaactcatgtctcgggttttgaaataacccttaactaaaaggaaactacttggaactagacattataatcaaaatcataataaatagtgagtttgaggagaagaaaaagaactatgatgaagaacatttcgaaatcgctatctccgtctcttccttgctctctctctctctctctgagtttctatctcaattttgtagcttaagggttctcaaattcatagcctaaaagtcctatatatagtgcttgaaaatatctca

SEQ ID NO: 349056 - DNA, 1446 bp, Cannabis indica
gacatgtacacattttagaaatatccgtacacagtgagagtataattgtcaaagaaaagatctgggcctaaataccataaatgagtatttcatcagaaaagctataagctctaagggttatatattttattatccatctcacaatactagaactgtggcattaagaattaacttgatcagtgggagcaatctgtaaagaccgcttagtttaatttggaaattagcgaattattaagatttaattatgaaaattatttatagatatttaaataattatttatgttgttatatttgaattctgaatgcatttttatctcatatagtaaaatttcataattttgcatgtttggtgcccggcaacatggtacacggtgtatggctcagtagaatcacaatttagtgttttagtatagcggggcggtttatttagacattgggaatgtcgggaatttagagttttcccaaaatacccttaagtcctctttaaccccttttagtgttggaagggcaaaatagtcattttgcctttatgagatttgtcttttatggatttttaaaatacgttagtaatttgattttctatttttctttggctgaaacaaataagggaagaataaattttataactcattttattcaaaaaaaattgaaaaagaaaatcaaagaaaaagcaaaaccatttttctctcaagcctctctctctctttcggcgtctctttgagcagcagagaggtggtgatttctttggatttcaagcttttctctcaaggattaagtgattctaagctcttggtaagctcttcaatcttgctctttagtttcttgggttttaaggaaaaatgattgcatgcttagtttttggtgttgtgcttgctgttaattgttgttgttgttttcagaagctttgatatgtttaattgagtttattcaagctagttttgttgttagttggtgggatttaaccttgtgttaagctttaaactaaaaactatggtttttatggtaaaatgagaaattagttgctgtgatttctatttgtgcttgggtttgttttctggggttatattatgattatatatgttgaattgagcaggttttgttagctaattagttggatgagcaagctttgagttttgaactcaagcttgactcatcaatggtggtttttgattctgagggtatagggttgttttgatgctttgagtttcttctttggggtatttagaacaggtctggaaggttgcatgaagtttggggttgaattgcatgagaaattaattttttaagtttcctgcactgaaccggaattccgtttcagtatagccctgtaggaaccggaattccggttggtattctgggttcctcccagaaccagaattccggttgtagaaccagtctaccggttggggaaaaattgggaaccctagttctcccctttttgtgttg

SEQ ID NO: 349057 - DNA, 808 bp, Cannabis indica
aataagttgtacaacaaattccataaaaaaaaaataatacaatagtaaaaaaaatcaagttgtaaaactaagtaaaaaaaattgtaatataaaaacatatggaggagttgatattattttgcttattgcaattaggttaatgttttgttatttttttattgctttgtagttatatttttgttactttatagttattttcatgttgtttgttaagttcttctaagattgttttagatttttttttttactgaaatacagtatttttgtaattttgaaactttaaatacaatatttttgtaaaatttgtgtagtataaatgtaaaaaactttgtgttacaatatttttataaattttcccctatttacagtatttttgtaagttttccgtaaaaaaattaagtccacatagattagatgggttaggataaagctcacaaaaatgcacacctattcaaaaaaacccgttttttatacattagccaaatttacctccaaatgaaatttaattcaaatataactctttttatgagtattgtacttaaattatcctcacacactcacataacaaagacataattttaagactaattaggattttttctcccgaactttgacatgtaccaaattatgcccttgaacttttttgaccattaaaaattccccctcaactattcagattgttagatttaaggacttttgtctaattttagtaaaaaaattctaacataaatgaaagttcagggggcatgatttagtacatatcaaaatttgaggggcatgatttggtagatatcaaagtctggggagc

SEQ ID NO: 349058 - DNA, 586 bp, Cannabis indica
acaaattatattgaattgaattaaatattttataaacactctagttttagattggcttttgatttattttgctctctaaattatttaattttataattgtgttttaattatttgttcaagttttatattattcacacttaattttgtatttcttagtgttctctcatttgtattataatctaattgttaaacaaatgatctcatatctatccgtacattcgttggtgtttattacaaaatcaaatctttcccattctaaatcataaagattattatgtaaatatttggaatatgttaataaatttatttattatggtatgacatatcttttttcttgaccggcaccaatcttgagtcgagaccaaatgatctcatgcatgtagttttaattatgcaaagtcaaatgaaaaagaagtcaaatcataaaaaaggaaaataccaaggagaagcccaaggcctctgtagcccattaaacacgtggtgtgccattgataaaggcatgaaccaggcctcctttatagttaggataattatagggcattttacaaaaatactgtatttggggtaatacttttcaattttactg

SEQ ID NO: 349059 - DNA, 868 bp, Cannabis indica
cccggttattgaaaattgaccttcagaggcggttttttttttataaaaatcgtacgtatagaattgcatcataccatttagagtcggttgggagttgaacgacaatgggatatattgattttacctatggcgtcggttcctctataagaaccgacgccatagggtcgtccaaagtataaagctcgtcttcttcctcacaacgtccctcagcttaacccagcaaacccacaaccagcagagagcaaaaccctcgccacaaccacctccaccccaccctttctctcccatttctcaaccatttgagccatttttttttaaaaaatcttccattttcgatacttaatcacatacacctaaaaagttttcattttttaccctctttgagtgtcatccgaaccaaaatagaaaattttgggtttaaaatccagccaccattttttgttgagaaatcattgaatctcaacctcctttaaggtataaatatagtttctattcattgttataatgtacattgttttatttttggtttttgtaaattattttttgagttttttcattttattagaaatattgttgtattgtatgtgtacagtgcctagattttttacgaaattgctcgtcggattgcggttattaggtaaaaatttaaacctcaatatatagtatatatatgtatttgtatattttattgaatatgtgtatatattgtgtgtatatagtgtgtatattttttatgtaaatacaatttgtaattgtattgtatatattctttgtaatatatatatatatattgtgaatattgaaaatgacattgaagggatttaattagtttaagaataaaaaacttaaaattgaattagtgtgagat

SEQ ID NO: 349060 - DNA, 1221 bp, Cannabis indica
ggagtggacgatgcttgatgcccaatcgtgcaacccaaaacccgtgctcaaaatcccgctcaaagatatgctgatttgactcaggtcggccaagaggccgaacaggttagtccagccgtgcaggcacagttggacgaactaaaaagtatgttccaaggcctcgccggtcaaaggaacaacgatcttgagttagaccgagcacgtggaacccctttctcccccgagattaatatcctagaattgccccacagatttaagatgccaaccttaaagatgtatactgggaaggaagatcccttatctcaccttaagtatttcgagatgcaaatggacctgcaaggagtacgaggcgatgtatgttgcagagtttttgccaccctctcagaagccgcccaacaaaggtatttcaagttagcgcacggaaagttcgactcatggaaggctctttcctcaaagttccatgcataattctcctcctctcgccaacttccattacacctaggagatctagtcgaagtaaagaaaagaccaggagagcctctctgagcctacattaacagattcatgatagaggcgactaaggttgcacgggtaaccgaagacgaaaagttgtctgcgatacttgggagaattgaagtccttggagaactttggaaggccataaggaagaacggaccagtagactcgatgagtgattttcttgaccgtgtagaaagttttatcaaacttgaagaagccatccagtgagcagagcagagggtgaacaaaaacctagccagtcaaaagctccttctactgggacatctgtccagctcccccattaccgaagcaattcaagctcaagtggtaaacgatccagcaacaataatagacaagggaatgggaaaaagggaaagttcactggaaaactccaacaagcttcccgggagaatcttgccaagtatactgcatttaccatcctgacggaagacatggaaagtgtttatatagctactcagtcattagccccgtacaagaagcccgcacccatgaaaaaagatgtcaggaagagagacattaccaagttttatcgttttcatggggattacggcgatgaatgcaacaatctgaagcgcgaaatcgaattcctgataaggaaaaataatcggcacgtacagaagtatgtcaaggtcgataagaatcagagggcgataacaaccaagacgtgctaccaccaccagt

SEQ ID NO: 349061 - DNA, 756 bp, Cannabis indica
ttatatgatccttttatttatattacaaaacactaatttaaaagatatggattaactcctatattaataagaaaatattagtaacaaaatcaagaccacttatgagtataaaagaacaataatatttccacatttatgtaatcaccaaactgatagattaaataagtcaataaaataccaaaataatatctaacatccatcattcctcatttctaactagtacatagctaatttaagtcatccagaccatcaatttcagcttaaatacaaaatcagtttcattagagggttaaagagtaaaataagactaaactaataacgacttcctttcccaacggtaccatcctcatcagtcattcactagcatcaaactgagttcatggaatggaagaaaataaggggtgagcttataaagcccaataggaaaataactaatatcaaaggacccttggtttaataaaattcctgcatggttagctttgtaaaaataaaatatctcatcaacagtatcaatatgtataaataaagtagagagaccacaaataatcacaaatcaaacgtcaaatgcatatcacaccgtccactagacccctagctctcaataccaatcatagaaaacgacatccaaaaccgggtagtcgcatctgatatccaccataataccggggctcagatttaattcactccctgtacagattctaggtctttcacctacaggtgagtgcacacctgatctacctatgatgacacagagac

SEQ ID NO: 349062 - DNA, 666 bp, Cannabis indica
ttatacaacagcatcctgatatctgacacctaaaaatctttagcttgaccagctaaaacctcttcttggatcttcaccagttctgaattagttatttgggcagctttaattctgtctaacagatcagattgcaatgtcaaattatgaagttttcctacaacaaactcaatgcatgatctggccatgtcatctactagctgaggtgaaatcttaatcatactagttaccaacctgggacccttcctgctcagggcatcagccaccacattaagtttcccaagatggtaaaggatttcacagtcgtaatccttaaccaactccaaccaacgcctctacctcatactcaaatctttctaggtaaagaaataattgaggctcttatggtaggtataaatctcacacttttctctgtagaggtaatgctgccaaatcttcaaagcaaaaactaccgcgacaagttctaaaaagttttaaatcatgtgttgggtatcattgtttatattcttttaactgatgggagacataagcgatgacccgatcagcctgcatcagtacacaccccagaccttgtctggatgcatcgcagtaaaccacgaagtttgttggatatattttaccaggatctagatttactaacaagtattttttattaacatcctaatatga

SEQ ID NO: 349063 - DNA, 648 bp, Cannabis indica
aacataaatgacttctaatctttcattgataacaaatcagattaggttgaaatgggttttatttagggcataaaatcccaacaatatctagttgatgtcccaatgtaagtttgacccttttgcactaagacagtcctaaaaattgaaaccttagttgcaaatgtcaacctcggtgctgagtaaaaccctaggtgcctaagttggcttccatgttgcgggttcatgtaattttagctcccatggattgcattaggttgctccatgtcttcatggtacataatactgaaagatagtgagttgaattcaaattgttaaagttcgaagttccattccgaagtcaacttgggcatagggctagggtcccctgccaggttaactactatgactcgagtctactcaactctattatatcatccttcttgccatgtttcaaatattgatgtccacatcaccgagaaaagtttccgagttaaaatttgacccccaaatcaactttacacttgtgtagtgttttgatgacgtgcactgagcctgcttcacttaaaactaccagatgggcatcaattttgatattcttagtcaattgtatctgttcttcaagcatttccagctaaattaggactttgaactcttttgcttagtccttgg

SEQ ID NO: 349064 - DNA, 887 bp, Cannabis indica
atgcattcactaacccaaagaaaattacaaaaacacatatttcagctaaaaatgctccagttcgaattgaagtcccttttttatgggatcactagcattgactttccccttatcgtttacagaataagatagcccaactcctagatagttaaactttcatggaggtggtctcatgtcagtattaatttggacttcgacaactggagtttgctttcctagaggggcttcaagatttaaacatcggttaccataagagcttgaagttgaaacaaggtgttttgtatttggcatgtggcttcttcttattcggtcatttttgcctccttgtcaaagattagttgtctaagccgtagaaatttggagcctttcaggggatcctcctccacgtgttatgggttattaaccaagtcatctaagtcatctgggtcatcagggtcatcaagccttcttcctcttcctcatagtcattataacgccctattacataagaacgccacgtgtgtaattttataaactagattaatactactatattaattatttattaaaaattgtgagaatattaaaaacttgactaatataaaagactaaaaacggacattataatggcagtaaaactgtgttccagggatcactgttataaaaagtgttacaaaagcactatatacaacaatgccttaaaaacataaaactaaaatacacaatagatacagccagtctaaaacaactcctggaaacccagcacacaggctggtggggtcaatatgtacattgccggagaagacaatcacctcatggcagctctaacttttccttggccttacctgcaccacatagcacctgtgagtcacaaagactcaacaagaaaatcaataataataatcata

SEQ ID NO: 349065 - DNA, 677 bp, Cannabis indica
atatatatgtatatatgtactaggtattagtaatatcatgcatgttgcttagacttgtattagagtttctattacctaattattcatataaacaataataaaaattaaatctgatgcaattcaattatattttttaaatatatagaatttaatctagttttaaatttatttataaaaaaatatatctaactaattttattaaacaataaaataagtaaataagtttagatattttaaataatatgactaataaatttgttatatagtatgtttaattaattgcattaaagtctaatttaaatttaaattaagatttatatataaaaataattatctaattttgttgatacttttaaataatgatccaagttatattttaataaataaattaaatttagatatttaaaattattttttttaaaaaaaaagttattttagtgattgatttaacgacgttagttttaactgttaattttaaccggaaaaaaaaattgttaaacgaactatttttgttaaattaccacatttaatataagagagatatatttatataaaacatcctatgctaatcaacgctaaagaaaatcctatatggagctcatcaatgctttgtgtttttttttttctttttttaatctcaacacttaggctgtttggaatgggttaatgctagcaag

SEQ ID NO: 349066 - DNA, 625 bp, Cannabis indica
aatattacttgaaaaatgtgaaaaattgagaaaaagaatagtaaaataaagtctttttagagcgtcaaatcaccgcttcatatttctcatttatatatatagattataaatatattatcttatttcatattattataaataatttatttattaaaaactaaatgtataattttattaattattatttagaattatttattaagaagtttaaaatttattatatgtagtaatttaaattgctttgttaaaaaaaattattaatataaaaataaattaataagatggtataaaaaatttacggcgtttttcataatgcattattttcatatctcgatcattcaaaactattgttattattgtatctcacttgttgtctcattgtatctcacttatttttatcaccgtatctcaccccgctgtcatcactgtatcgcatcccttgtcattgccatagttcacttgtagtcgtcactattgtatttcccaaatctacatcttaattttagatttcatcttgaattttaaatatttttaagacattagagaaaattcattagtttgttcttttattattaattaatatattttgaaaaagtgattactatttttaaatatcttaattaaa

SEQ ID NO: 349067 - DNA, 981 bp, Cannabis indica
ttttctttctttgaatttgttatttgttattttatttattttaatgtgttgtacgtcactttggttgcttcatggaatgacgactgaccatacagaccaatgcgagtattttcagcatgaccactactctgaatgtctacttgaacagtggccaggttggtaagatagtcttgtcttgtggtattcgtcaaggagacccgttttccccttacctctttatctgagctacggaaatattatcaacactctatgaggaggccttgacgaagggtaggataaaagggataaatctaagtcggggcggaccagttctttcccacattttcttcgctgatgatctcattcttgtggggagagccaacattgaggaagccaaagccttctaactctgtttggaaaagttctgttctttgtcaagtcaacaagttaacaaggtcaaaacctctattttttccagtaagaacacgactgtgttggaatatgttttaccaggatctagatttactaccatgtatgttatttaacatcctaaatatgaatcgctaaaacaatgtaaataaacacatataaagtttcagaaaccttatagtgggtgcagtgaaattataatggttccttccactcagaactctaactcttgtatcctgtttgtagcaaagtatcaccaagatctgagcccgaatctccttctattgaatctggattcttcacatccttacacactatgattgagtaccacttgatgtgtgtgggcatttactctatcactataaggtttgaaaatatgaagagaggaagagagagaagtgattcgaaataggtagaagagatgactcaaaaatttgactgaaggcaagtgttcatcatcttttgatttgaggccatcactatttatttataggcaaccacctaggtttaggttataattatttagcattaaaatattgaaaaaaaaataaatggtaaaatagggttaagtgg

SEQ ID NO: 349068 - DNA, 758 bp, Cannabis indica
ttcacaccaaaaagaggacaacgaatgcaaattgacctagaaaatgatgatgaagatcaagatgaggatattaacttgaccgcaagtgagagtgaagaagaagaagaagctctacctcaagcacctccaatgccccaagcttctcatttcaatatcgaagagacattttctcgtctccacacctcggttgacactcattttcaaaccttacgagatgaaatgaacacacaattcactaacattctcaacgacatgaccaccttgaggggaaacatggagcaagattttgacaatatccaaggcaaaataacacaatggagggcatacaaggatctatttggacctccaccaaactagccctcttgtatttattttttgcatcttgtctcatgtttatttgttttttagtttgtgtgcaaagacttagtgcattttgagtttatgtgttggatattatttttttgtttgtcttgttggatgttattatcctttttatgtttttgttggatgttatgagtttaactcttttaatttctaatgcatggtatgtgttgctttacttttttctttattttgtgtattctttgccaccctttttgatgatcaaaagagggagaaaaattctatgatttttttaggatatcttgcattttaaagttaagtataaaattgaggaggagtttacaaaatcatgcaaggtaaaattgaaaggtaatttttttttccttgcacactttaagagggagctaatctaatat

SEQ ID NO: 349069 - DNA, 649 bp, Cannabis indica
ctcaacagtagttgatgcacaaacaccccagagaatttcagatcattcgcattccaaaaaactccaaaaggagtttccttcaccctctcggtcaagttaaaggcttcaaactttgctttaattgaagcaaagtacccattttctcgctaagtgatacgcccaggaaaatgctcagccaaggggagaatgagttctggagccatctgcaaatacaaacagaaagattataaatcgcgtatacgtcgcatagaaatcgcacagaaatcacataacagccactgaataacatactagatcgcacaaactcgcacataaatcgcacattaatcgcactaccagaaataatttaattctgtttcctggttggcaacatatttgaatataaatcgcacacaattgcacaagacatcgacaaaaattgcacaaatagaacaactgcagacccaatagtcataaattgcacaaactcgcacaagacatcgagaataatcgcacaaattcaacaattgcagatacagtagtcatttatcgcacataattgcaaataatcgcacagaaattgcacacacaatcccacaacgaaacagaccttaaattgtatcactaatcgcacacatatcgcatacacatcgcacaatgtcgcacaaaa

SEQ ID NO: 349070 - DNA, 578 bp, Cannabis indica
tagaagtcaatattgcgacccacgaacgagatttctataattaagaataaaaacaagaactattgaaattttccttagatctacttgtagaaatgcgtactgagtcgtaaattactaatacagcatacaaacaccgagtgataagatacttcaacaagaaagtgaagaagaggctcttcaacggttgggacttggtgttaaggcgagtatttgcaaatacgagagatgcatctgtaggagtatttgatccaaattgggagggtccttatgtaatcgaagcaatagtaggaactagggttcacaaattagctcagaggctcgctaataaaaaagtactggaacatagaacatttatgaccgtactaccagtaaattgatgttgtaacttctatttctgatgtaatattttgaacatcaattattaataaagttaaatcatttttcaagtaattacaaagtttcagtctttgaaattacttgaggggcatatagatgtgtgtgtatgattaaccggaattcatctggaaatacatgatatcatgatatattgcaaacccactactttaaaaaattttaaa

SEQ ID NO: 349071 - DNA, 745 bp, Cannabis indica
aattaaaggtaaaataaaatttttctaaggcgaaattaactgtaagggtaaaatggtaattttactaaaattctcaaaagtgactcgaagtggattccaagattcaaggaactcaagacaaactccatgaaggtttatttacatttcctagtcttgtatagttattttttgagtccatatttaaaaaagttttatgtacaaattttggcctactaacttgtgcgacaaagttttctcaccaaatgatacaaaaaaaaaattgattgaatttttaaatcacatatcatttaacgaagagaataaaattagaatttctgaaatgggataatcgagtaaagagttatgtgcattttagaacaaaaaaatagaatttgccactgtcctattttcggcctaccattttccaaacgacaagctatttttctcaaaaatggcaggccatttagaaaacgacatgtcgatttcctaagatatttttaaaaaatgtgctaatggctataaacagctagtttttgtttaaatcctatataaacttaattttttctcaaaaattcaagttggctgagcatttattttataaacctaacatattcaagtgagtttaatgagctcccaagtgtaaaatctaacaaacacttttcacacactttgaggcaaaatttgtgtttaattctttaaagtgtgcttactaatcactctagattttccattgtatcatacttctagagtgaatttgcttgtaatt

SEQ ID NO: 349072 - DNA, 824 bp, Cannabis indica
attttattataatatttacaataaaactctattatttaaaattaaacttccaccccttctttttaagttatcgagaacacatgttcaatatctataaccaataacaattaataactttcaaatttgctcagggaaggaagggcctttcactgtctcctttgaatgatggggagcggaactgtgagcatttgattgtacctgcgttaaacaagattaaagttaatgttgaaggggctttatttgaacaagagaggcgatttggagtgggctgtgtagctcgacatcatcatggaaccatggtagaagctttcaagaagggaaaggttgggtatgtccaacccgaaattactgagatcataggcatcaaagaagctttgagttggattgcaactcatccctatgacaatgtagtgttagaaacggatagtttggtgtgtgtccaagctatccaaagtaatatttttatgtcctcacagtttggtcttattgttcaagatgttaggaatttacttttcactactacaaaattgggctttagaggcggtttttaaggggttttggcatcgattttggcaaaattcgctaccgacgctgttccaggtgaataaatacgcatttacattaatctaagtgtttatatattagctatctttttattaatattttatatatgacattatgtgtttgtatttttgtagtatattagtatattttttataatttttttaagttatattttgtataataattagtatattaaataataaataatgtgtaatattttttaatttttatgtaatctcatatttttatatatttaaaat

SEQ ID NO: 349073 - DNA, 912 bp, Cannabis indica
atctccgaaattgagaaattataactctaatgctcatttctaataatggggccaacaaataattaaactcataaataaatataaaaatgtcaaaaattagtgctggttgcctttattaatctaaattactaaagcggtcattacatttgctatcttggaagcctaagtcccagcatcttggaagattgatcaggtggatagaaaaagaaaatgtagaaaatttttgcaagcttatttttgttgatgtaatggcagcactagtttatcatgttgcatgccataaacgaatagtgtggaatttgagtgtttgccaaggaaaatgtgaatctgaataagattaaaaatgatgtgaaaggtcgaattatttggttttggcctaaaaatgttagtgctagagatacacacaggttttctaacttgtaaaaggaaatctttgtaattttaaaacatacttgtataaagactattttcatagatcttttattgaagatgctattagcttgtaaaacgattattggagtaaaaaaattcttggtgattcgtcaaaaaaaatatataaatttattatttaattaatcacataattaaaagtggaataataaatatggtattgaaacaactatcaagtaactacaaaacgcgactctctagaataaacgaaaaaataaaatagtgtagaaaataaaaatacacaaggtttctatacatcatatcaacaatccttggagattaatactagtccacgggatcacacgcagatttaagatttattagacaaatctgaaaagtataaagtaattgactgatgcataaatagactctctcttattgtatgccccaaacttgatgtattccaccttctaactgaatcttggtgaaatttcaagtgctcgaactcccttcgatcttctt

SEQ ID NO: 349074 - DNA, 1018 bp, Cannabis indica
ttctagcttagaggaggcttaggcaacttaaattttcagccagaggttaatgcctttatataggacgcctaaaccctaggtttacaacttaaatcccttgaaaataggatagttagctagatatttatgtagaccaaaatgcccctagattctaaatacttctcagcctatttgttgggcttttatggcccaattcgtagcccattcttgctgtgcacgtgtaggtgtgtcctgtgggacccactaagcaatccttggctgaccatggccttgtgttggccaggctagccaaccatgaagttgtttcctagcttggccgaccatagggctggccaggggtggctggccagcttccaagaacgaactggtttgtcacttgatccccgtttgagtgtcgaggtcttcgttggtttggatgctgacttggccttccttttagtgaactgtactaccacgtggcaaagattctatccccgtaagcatgccatgatatgaagataaaaattgggataacaatttatatcatcaaaaactaaatatattcaatatttgcatatatcactaaattatatctaattatcaaatattataagataagtttgttttaagattgttacacaataaaatgggactaatataatatttgacataaaatacaattaatgtacatttattaatatgcttaattgtactctttacatcaatatatataaaggaaggtttaaacaaatgtgaggtgacatcacataatttttttattgtattatatcttttttcttattttttacatttttaatttgtttttatacttttagtagtgtgggatttcttttgaaaaaagtcccacatagtttataaactattgtgggtgttatatttttaagttatatatagatgattgaactttcaattgaattgtgccaaaattaatattattaatttttatatgagtgattaataaatttaatcttgcccaattaattataatttttgtgaatgataaatttaattttgagta

SEQ ID NO: 349075 - DNA, 596 bp, Cannabis indica
caacagaactcaacaattcaaccaaaatcccaaaccaccattagagctccaacttaagctctagaactctaatttccatccaaacaccaaaataaccaaccaattcagcttaaaacaacaaagacaaacattatctaacctcagattaagaacccaaactaaacacacacatgcagctcctaatttaagcctaaatccatatagctcaattcaaaggttaagtaaaattcaaatagaaaagctagggagatttaccttgattcaaagtgttaaaaacttgctagaatctacaaatttcagcaaagaacacctcccttcttgatgggttcggtgattcggaagaaagagagggagagatgaagaatgctatccaatttctaggttaatttcacaaggaaaactccttattcctttttctcaattaattcaatatcaacctagataaactatggctgcttctagtatccactacaagccaaaatgataaaagacttaaatgcccctctttgaaaaaaaaacaaaggttaaaacaaaccaaggataaaatggtcaattacaaaaccccaaaaattctaacgcctctactatctaacaat

SEQ ID NO: 349076 - DNA, 771 bp, Cannabis indica
tatctttctaagtaaatatcacttagttgatcttagattaatgatctcaatcctgagattgttaggttctggttcaagtgtattattatgttctttgacttcttcgttaaagttgaccaaatggatcttctcaatacttacatcttgagaatatggtagtacaattgagtgagagtgctaatcatagatacaaaatctatagcttctatgagtacataaaagtaaaacggtgattccctttgagcttggataaacgagattaaatggtagagtactcattttaataattatattagtttctgaaatatcatttacaaggagctaagtgtttaaaggataaaatacattgaggggtagaacagtaaaattgtccctactctatctagatcattaatagaggatcattgattatttggattgaaacaatagataattaacaacatatatatatatttagaacatatagagcgttctatataatcaggagagcgattctaaatctttagtggagtcaggaggaattaataagatagaaaatttacttggtaaatttttgaactacttattgggagcttgattatataggcccatggtccccacattagttgagataattggcttgtagactcagttaattggttttaattaatcaattaaaattttaattagaatatatcttatttatgaattttcattaagcaatggtctaattgagaagaaaagagattttaaggtttgtttattaattaagagactttgaaaggtctaatt

SEQ ID NO: 349077 - DNA, 587 bp, Cannabis indica
gggaaagaaccaatgggttctcaaagaccccatacttctgaaacaagacgttcaagaagaaactatagtggtgataataaaaacacagaaagaagttgtaatgactgcctaaatttaatatgtttgattattaaataatcagggtttaattatgagagtgaattattaattatgatttacacatttatggagacttattataattcaatatgtattaataatgctatgtgtgagtttcgtattttctgtatttgtgcttggtagttgtggtacacgaggttgtgccattagagagtcgcgttttatatggttttgaatattattagaagggcatcattgttaggcattggaagtatcgagaaattgtcaggatttggaaaatgaccgaactacccttaggggccgttttgtatacaggtttcatttcatgggaataggttgaacattgcttggagagtgatgaagggaatgataaacctaggaaagcaatattaccgtgttttgttgacattggaacggaatgtgacaacttttttttttacaataatgatatttttttttgtaaaatactaataatttaatatttt

SEQ ID NO: 349078 - DNA, 552 bp, Cannabis indica
tggagtgaacattttgggttgaaaatgaaattatggatgagcgcttgagagaaaaagaaaaagtccttgataaattgaggtagttaggtcatgagcctaaaaatatcatcctttaccaaacccaaacctaaacctcacatctcaagcctattaaagtccttttgatctaagttgtaaagctaagctacattagtagagaggattgcactagtacaacttatggaagcgaacttattaaacttgaggatcgagggtagttgttatagtaattcaaggtgttggtgggaagtatttgcacattttattgattgaattactcttggtaagcattaaggacataaagaacatgcaaaattttgttgaaacacacaagtcaaggcatattcactaccaccaattacacttctattccatttaattttgagagcattttcgtcgctaaaccaagtgtgaaagagcaatattttctctactggaagcatgttagtgtcgctgtcattttctgtttttttttattgtttagttcttgttatttttcattactcgaggatg

SEQ ID NO: 349079 - DNA, 1182 bp, Cannabis indica
gcctctttcatatgatttttttcatcccttttttgatcttctttgtcactatttataattacatagttgacattgaattacaaagttcactgaaataatttaacaggaatcatccctaaaatcgtgggatttgattacatatcacgtagtctaaatgcagtttatgatttgaaaaatcttataactgtgattttaccgcttttactgggtcaaaactacgtgtattaaacacgtctttaacttttgaatctggagatgtctcaacagaaacttgattatagtgatcccaatagcgagctagggctattcttcctttcgaggttgacgatgtatgtcttgtgttgatagcggctatttataaagaattcttcttactcgccagggttgtaagcatcgctcctgttagctagatgaagctataggaagtcttcgcatcgcgagatggtcacctcacttacttgttctttgagccgatctgatttttacactaagtttgttcattccacgcaaaggactttcatagttgatacatgtctctttctttggtgcctcgctattcgcatttagcgacatatggtttctccctaatatactaagtgccagtttgtacattgacttctcacctaagacctttcagttaacgagttacaaatatactctgatacttatgtaattaatgagttactccatcaaagcaatagcatcgattcccattcccttcgtcttgacatgtgtccattgaggcagcaaccaaattttgggtataacaattgcccattaaaaagttctgttttagtaaaaagggctttttaataattagagaggacatttttgccaaaatcctttcttggaaaaaacgcatcctttgattcctccaattgtacggtttcgaggatcattatgaatcgtctctttatattctgcccatcttccaaccattaaatttttcaatctttagctttcttgtcactaaactttgtgtataaaagggcggctcaagcttgtcatttttcacaaacttctggatttttcgtgagatccattttcaagatggatcatctctttcctgctagaatgtcccttctgagtgcaggagtttatccttccaagataatcttacccatatgcaccaaccaatttccatttgttcccaaagacttcaagcctcaactggagccaaaa

SEQ ID NO: 349080 - DNA, 392 bp, Cannabis indica
gataactaatcagattgtaaagagttttatttagggcataaaacccaacactatacacccttttctacacaacaacaaaccagaaaggatgcacaagaacctacaacccctaaaaacaataatacacatctcccatgaagaggcatcgtgaggagaggggcacaaaacgcaataatgcagtcccactttctcaaccgtctcttgctcctagggatattggtgttgatgagggggtaagaaacatgtacgaaaccctgcttcgccaatcacaagtatgttgattaacaacctaaatatgaaccttctcaaacgatgaaataaacacatataaagtttagtaaaccttacattgggtacagcaaaatataatgactcctttcgttcagatatct

SEQ ID NO: 349081 - DNA, 800 bp, Cannabis indica
cataaaatgatttctgatctttattaattagtatatttgattatattgaaatgggttttaattaaggcacaaaacccaacattttcctcaaaattccatacacaattcttgtcctcttgtcaactcccattacatataaaagaccaagtcgaagtaaagaaaagaccaggagagcccctcagagcctacataaggaagttcacgacaaaggctacaaaagtcgcaagattaactgaagagggtaggctggccgccatactggggagcgtcgaggtattcaaagaactgtgaaaggacattaaaagatgtggccctgtagggtctatggtggagtttctacatcgagcagatgggtttatcaagctcgaagaggctattcagcgagcagacgtcgagcttaaaccgagccaaccacatgtcccctcagcaggagcacctacttagagctcacaataccctaacaactcaactctgagtggaaaaaggtccaataacaatggcaagcaaggcagcaggacgaatgaaaagttcacaggcaaagctgaacacacccgtagagaaaaagcctccaagttcactgcctttttttttcctaactgacgacctagacacaatatacacgataacccagtctatggtcccgtataaaaaacctactcccatgaagaaggacgtagataatagagatacgtccaaattttttcgttttcacagactacgtccacgaaatgaatgagtgcaacaacctaaagcgggaaattgaattcttgatcataaaaaatatcctgcacttgcaaaaa

SEQ ID NO: 349082 - DNA, 492 bp, Cannabis indica
attaatggactaaatttgtacaaattaaggaagggtataaattttgatatggcttgtattattaaggccaaaaattgaaatttccctttatatatgtataggaaaatacttagagttacaaaaaatgttacagtcatttttttttcattatgtatcattcctatatttaattaattctttttatattattctttttaataattttgtgatatctataagaaaagttacttgttttttattttttctttttgtgatatcaatacacaaaaaattcattcctactggttaatagttaatatacaaattattttgttttgttattctaagttttattttttattaaaaagaaaattaaaaataaaataaatttgttgagatatgattttgtcccgtgatttactttcacggaatgtattccgtggtacattagatgagtctcagggtacgtgaaataagtgttagggtacgtttctactttttaaccctaattac

SEQ ID NO: 349083 - DNA, 698 bp, Cannabis indica
ttcggaatcgaggtaagattagtataatagtatgcatatgaatttacatgtttagtgtgcatgttagtaagcctgttagattacattagatatgtatgttggctttcgtgctatttgacagtatcacatcggtacgactagagtatgactagcgtaccgagtataggctgatattatggtcgatagaaccgtactatttgatagtatcacatcagtacggctagagtatgactagcgtaccgagtataggctgatacggtatcacatcggtacggctagagtatgattggcgtaccgagtataggctaatattatggtcaaaagtaccgtcgtatgaatgttctagactcagtaccgtgtgggacacggggattagggttatggtcaggggtatgggcatctgatcataatccgggatatatatattatattatatatgctcttcttactgagtctgtcgactcacagtgctatgattatgtgtaggtaagggcaaggctaaagttgaggaaccatgggaaggaacagatgaagattgtacatgtcggggcggttaggtctggagcgtacgatgctcgggacatcagggcttttgttgttagtcgccggacgacaaatattttgtagataaatagcaaacttttgtaaagtattttgtaaacgggatcccaaaatattatgtacgtaatactataagt

SEQ ID NO: 349084 - DNA, 1234 bp, Cannabis indica
ttgaacttgatcaatctcaaaagctagtatactgagatttctagcacaccaaccaatgatggttgctttctttcttcatcatcgtcattcttttaatttaaagtaactaggtggaatttgtggcatagttcctccaaataaaaaggtctccgcactcgtcatttctgtgagttgttcactcacagttaccggtcccgaaaggagtttcgagggataatagtcaagtctggaagggagttcccaaatttctatcttatcctctccgagttcagcctttaggataactagcccttccttgtaaaggagttccagctggctagttatcccttttggaatgataagatccggatagtcgactatagcagactttatcatattcaaaagtatcttcagcgagagtccgtggtccttgagtctggaagctcttaggtgttctcagaggccctgttacttaagttgacgtggagactttgctcaaagaggaggtaattaagttatttatttctaactaacttattaacctcatttcttgcagccaccgactttaggatttgatcctaagcctataaatactgtattcgcttatcattttaggtacgactaagaattgagagtttgagagagaaaagatcaagaggtagagatggaggtgcagagaaaggagagagagattgagttaaaacactgtagatgaagaagattcttgggtaaaaagtgtgagagttaaaacactttgtgaggactcaacagagaatctcgtcttaactatattatacctatttttgcccaaataataaagaaagattacggtggtgttccagaattggagtagagccatagatcacattgatctattgaacttgaaccaatatatatcttggtgttgatttctttattttctgcattttgctatttctggtttttacatactctgtttgcccttgttttcttgtcaattgttgtttacgatttgataatcttgtcaatactaattgtttgattgtttaaagtttagttaatttgagtatgcacatttagacgtaatttctcacaccttctcactcctagatttaccctcaagaagtgaggagcgcaacacccccaactaagttatgcaatgtggttatttgaacctgatatgtatatctggataagtatgacttgtgacctatagaaaaatgcatgtttccacctctatcctgttagactttttatttgggcttacattaaattt

SEQ ID NO: 349085 - DNA, 917 bp, Cannabis indica
cttttttcagttcctaataccccattcttttacgtgatcctcctttatatatcctctacgtcttttttgcttgcatgggttatttttcattttgccattgttctgctgacacgtgttcttttttattctttttgccctctgccacgtgtttgtgttttagtagcttaactctctcgctacacgtgttagtgcttttagtgggtttttagagttattactcttcctaacttaggtgttgtgtccgtcggcatcacattcctgaatttattaatttcatattttatgctttagttttcctccccctcgcgacgggatccttgtctgcggagatccaagctctcatccgtcgggggtctttattccataagttgtgttacctcggtccccctttgttgcgctctagttactttctccgtcggcgttttcaggtatttcttccgtcggaaaggtatccgggtgtctcttctggtcctggtatactatttttcttgtagttaatccttgattcgtcggcgtctgtttccttcctatttctccttctacttccgtcggcattccctttactcgttccctggtttttgtcgttttcctcctttttgtccgtagtgcccccttatggattggcaattggtggtttggtcgtatcgggttgggcctatttttatattcctgggcttgggtatatttattttaatgggccctttcaatgtgggccttttggtagtcctttattttgttgggccattttatttccaagtccagttttttccccccaaacactactcccccagttccaattatagttttataatctggaactgcccctgataactgccttagcagttttaatgtcagtttttgtttgttattactgatttttcatcatataccttttttagtgtacagttccctaattt

SEQ ID NO: 349086 - DNA, 491 bp, Cannabis indica
aagtgaagcaaaaaataagactatttgcgtctacggttatagcgtcggttacacaaacagacacaaattctttatatgtcacttaaaatctgaagcaaaagactatttttgtagtagtggatctagttgtattcgagatccattgagtaaaacgactttcgaaaacgtattctattcgtaaggatcttttagatctctttgatagtttttgcaagctttcccttcgacggtagacggccaccatgtgcggtggaactctggttagctcggggactggagtgtggcaagagataggggtgggtcggggtcagggtgtggctagaggaagaagacgaagttggggtggtgtggttggaggaaaaaaatgatataggggtagtgggggtggattgctggaggtagaagacgaaggagaaaaaaagaaaagaaaaaaaaattatattttaaaatattttttaatattttttaattaaaattattatttggatcaa

SEQ ID NO: 349087 - DNA, 1186 bp, Cannabis indica
actagaaccgaactaggactatgaccaggacctaaacccaaatcagaacaaatatcaaaaccgagatagagacctaaacccgaaatgagactaggactcgaacccgaacctagaacgagactcaaacccacacaataaccgggacctgaactaagaatcaggatagggacttgggaaacagaactaggacatgaacctagtacccgacccaaacccgtacttgaacctaggacccagctcgtgtcccggtatcagaaatggaaccagacttggacccgagattaggatctggatatagacccagagcttggacaaaacctgtagtcggtgtcttgatttgggacacagccctggacccgaaccctgacaaggacctaaacccacacccggaccaaaacccagtcccaaacctaaaagtggacccgaccgtaccctgtgacccaattgaaaccaaactggaagttgagcgggactggaactggacttcgacttggaatcataactgaaattggacctagatccagaaccataaccggattaggacccggactccaaatcagacctagacccgaattgggagccggacccggatccgagcccaaatttggactcgagacccgaacccgaacttgaactcagacccaaacatggaattagactagggacacagaaccaggttcaggaccttgaaatatcgagctaacttttgtcgatgggtcatcaactataagtttgtaatggctcgtctttcttcgatttcatcaagtgattctgccaggagtatgttattggtatcttgattgtacatcaatcttctgtgtgaaggtggctcgagttctacaggtagcatagcttcatatccgtatgccatagcgaatggtgtctgtgcggttgctattttctcgtttgactacttcaggaagatcttctggccaatttcctttggcatctttgagttttttctttagtgtatccttcaaggtcttgttgactacttcaacgtaaccattcgcttgaggatgcgccactgcaaggaaacttttgatgataccatggtttgcacaaaagtcagtgaaggattggctgtcgaactgcttgccattatctgaaactattttgtacggcaatctgaatcggcagattatgttcttcacaaaaaagtcttgaactttctttgatgtaatgg

SEQ ID NO: 349088 - DNA, 588 bp, Cannabis indica
ctcgcaaagaagtcctctcatcttgaatactgtttacctcagtagataagatctcgatggtctcctcaaaacggtcaccaacctcgagatccttagtcagcacgaagatattcttctcggcatagcttcttgttggcttctcccaacgccgaccgaacagctccggcttttgcccggcttcttcagcttccttcttggccaagtccacctccgccttcaaggtgtcggacagagtcgcgttcttggaagcaacagacttagcccaggagtaagtgtaggccaacttcagaacaacctacacagaggattaactttagcatattgagctaagtgtggaaaattaaagggaagtatcaaaaaagacttaccctggttaactccttcaagactccgcccaccagcacatctaaagacgagtcattgttagcaccagccagttgctcactgacctcaggaactagccggttcatgtagtgggccagcatctccttgccctttttggcctctggaagcactggcaaaggtggagttggtgcctgcacccattcaggatcactgctgaccagttcagacctagccgttggtggt

SEQ ID NO: 349089 - DNA, 791 bp, Cannabis indica
cacttaaggcccgtccccaggccgttatctttttttagagcttttagttgggtttgaacaatttacatttatgctggaatacatattctgctatttaactttgttaaacttttggcttattttacatttgtccgtatggtacgccttactacccaccctgagtgaaatgaaaattgtttttaggtcactcagttttacaaacattaatttagaggttgcatatacttgtctggtacaaatttactttatagggcataaacttttatttttcgactattggtaatactttcggaggtgatcagcattccaggccctaggcaccatagttccgtccgttctttttagcttgtaggtcccggagccgatttcatcctcaacttcatacagtccttcccaattaggcccgagtacccccactccgggttcttgagtagctgagaagacccttcttaagactagatcagcaatagtgaattttctatttttgaccttctagttgaagtgtttggccaccttcttttgataagctgccatgcgtatttgagactcatcccgaagttcgtcaatttgatctagggctttttgtaataaagccttgtttgctgctggatcgtaagtcgttctcctgtgagatgggaataacgtttccaccgggaccattgcctcgcaaccatataccattgagaatggcgagtggccggttgtggttcttgggtttgtccggtaggcccataacactcttggcagttcttcaggccaattaatttgcaagccagcagctttttctttag

SEQ ID NO: 349090 - DNA, 736 bp, Cannabis indica
atcatttggtaaagataaaacaatgacaattagtgattataaatagagaatgaaatacattaaagataacaaaagcacgtaataccgggattaaaagttgcccggtcagcctattgtctgtaaaatgaaaaataattccaagtttaaagaacggttggccggtcatgatgtcttagaaaaggtcttatggccgaataagataagataaaaataaaaggataaaaaagtagtatttaaacagctggagtcccaggctcttggttcgggtccttttggctggcaagagctggaggatatgttgtttgaacgggaggtacatcagcattctggctagaggtagaagcagccgcctcagtttcacgataagccaattgggaagcgcagaactcaaggtacatgtccttggcttcacccaagtagtcgaagtttgcctgagtatgagccttccaaaagtcgcagaagagctcaagaccggctgtctccaaggcatgaactttctctttcaccttcgtcacctcggtcgtaagctcctcctccttagacttcttctcctcctccacccgacgaaggactgctcgaagagatgtcctctcatcttgaacacagttcacttcaacagataaagtcccgacggtttcctcaagtcagtcagaagccccatgatccttagtcagcttagctattttcttcacggcggtaaaaagcttcttgttggcttcacccaactccatccgaa

SEQ ID NO: 349091 - DNA, 538 bp, Cannabis indica
gaatttgggaaatatctagcttttagcacatgacacaacaaagagttaggttgttttaaaattttccaagcctgctttgcaagcatagcctgattaaaatgaattaaagaacgaaaacctaaccccctacacatttagactgacaaagctttttccaagatttccaatatatttaattgttattaccagaagatccccaccagaatctagccatcgcagcttcaattcctttacacaatttaacaggaagcctgaaacaagccatagcataagctggaattgcttgaataacagccttaaggagaatctctttaccagccttggaaaaccatttacctgaccaattagtaagtacagacaaaactctatccttaaggaaggcaaaggaatgatacttagacctagcaagacattggggcaaacctaagtacttactaataaaaggcctatcctctagatcaaaagtagcaaagaaaaggcttctaatgtcttgggaagtattaggagagaataatatggaagatttagcaaaattaat

SEQ ID NO: 349092 - DNA, 483 bp, Cannabis indica
taatactaaggatggaaaataaattttatttattttcagatctacctaagtatataattttatagatattaaaataggtatcaaataaaaatacaatttttttaaatactgagctttagtttaaggatatttgatctctattgttggttctacatggttcttgttttaatgtgactcatccctaatagattttcattcattagcaatttaacaccgtagaatctcaaaagataagtattgttgtaaatcttttattcttagtaacgatcaccctaataatgactgctaagagtagggtttacaaagtatgaaacaatggcagaagaatgaccttgactctcgcctaaacgggataacgtcggattcttattttgatcgaatagaaggttgttaaaatggtaaaggaaaagtttaagtgttggcagatgtaacaataaggctcgttacttatgctgtctagcatggttgataccttgaaaaata

SEQ ID NO: 349093 - DNA, 504 bp, Cannabis indica
atacatacttaacgaaataacttaaaaaatatagttaaataatttattgtcatatatataatgtattaaatgattatattgaaatatactatggtcgcacatagtcgcataaaccaatattaggatatattttgaaatatactatggtcgtacatagtcgcacatggtcgcacagggtcacatagaccaacattaggatatattttgaaatatactatggtcgcacatggtcgcacagggtcgcatagaccaatattaggatatatttttgaaatatattatggtcccatatagtcgcacatggtcgcatagaccaatatcagaataaaattttaaatatattatggtcgcacagggtcgcaaagaccaatattagaatacagttttaaatatactatggtcgcacatagtcacacagggtcacataaacacatattaggatatactttgaaatatacttggtcgcacatagtcgcacagagtcgcacaagatccataataagt

SEQ ID NO: 349094 - DNA, 871 bp, Cannabis indica
agatgattaaacaactttaatttcacctatacataatttcacaactttgaaatttcatatacttaatttcacatctatatatatagtcaaacaactttaatcatttctttaattttctgtcaatttataatgttctttctaaattatttttcaaccaaataaaattataaatctaatttagttagtaatcaatttcaatttccgtgagttcgacttcacctatgtgaacattacttatgatatgtgcacttacataattctatatatatttgacaacacttgtgtaaaagtttaaaattagggtccctatataaaaacaaattatgtgctttaagacataattacattgctaagttttttttttttttttgtctaagatgcagttataatttttttttatgtataatagaaaaaaaaaccaaaaaaaaaaaaaaataagccttttctttctaaaaaaaaaaaaaagttaggactttctgcaattctattgtacacaatatttatatactctattagataaaatgacactagtcccttttattttttaaaataaaaagaaaaaagtaaatatcattttagaccttgtgttttgcaaagttactaattagaccttctgttttattaaataataaaatagatcttgtatttttttgaaattgtacaaataggactctgaactgattttttatcaaaataaaacttaataataaagtgatctatagatgttatgacaaaactagttatatattctgtatctattcgtgttagaaattgtcttagttgattatattaaaaaataaaattattgaaaattgagctcagggtcctatttgtacaattttagaaaatacagagtctattttgtcattta

SEQ ID NO: 349095 - DNA, 1087 bp, Cannabis indica
tttatttaacctaaaattgtaacgtacactttgtaacatgtagaagagttacaagtttaattgcttttgtaacttttttttgttgatcacattttagtgttataaaagagatgttacacacaattgatgatattattcaaagttatgaaatatagttgttacaaactatattaataatcagttatacgagagaaattaggtattgcgtatttgaattctaagtgtgatcacctaaacattataaaaggaggtttttggagctcatttgagatgaaccaaattttatatcaaaaaaatacattgttagaaaatcttaaggcttgataattcccaaagctatttccacgagagttccctttttttttttttagaaagaactcggaaagttcattaatagagataattgggtatcacataaggggacccctccctttgaaaacaactagccaaatggccattaattcttacatcttttgccaacctatccgcatagtaattgtcatcacgcttgatataaaggaacttacaagaatcaaagctactaacaaggacccaaacctccagagttagcggcctcaactcccagtagtgggaaacttcttcttttccaatgcttgcacaagtagtaaggcatcagaaataatggccactaaggacagatttgaatcaattcccagccttagtgcccaactgatcgcctgcaactcaccttcctccagagaactagcagagattcgccttgctttccaggaccaccttccagaatccctatccagcaatcccactgaaatacctgcaactccatctttccgagatgcatctgtgatgcagacagtcttagtagactccgagatcttcttcctcaggtacgctccttgtccccacgtcttattgtccaccaagtcaaattctaaggaagaaacaaattcttgatatctaagaataattctgctcctagccgccccaatgtcaacaggtttagctttgaacatgacttcattcctcgatctccaaatttcctcaaacagaacaaaattcgtttctaacctcagaatgggtatgaaggagaatattgttgggttttatg

SEQ ID NO: 349096 - DNA, 985 bp, Cannabis indica
ttgtttatatgatggttgtaattaggttgttaatgagatgctttcgtgggttaaaatgaatatataaactaaaaatcaaaaactagttacaaacataaaaccaattaccataaaaaacacttgatagaaacaacaacttgtctataattgtcaacataatctgatattaaaaaaacaaaagctaaataaaaagtactatttccaacaacaacaaatagataactaagacaaattcttctttggaccctttggaggagcctcatcttcactatcaataaaatccacttctttcatgcgagcatacttatagaacaacacagcaagcctatcacggtgtttctcaacatcaaatatgggaggaatcggtttcatatcaataaagtattcggcaaacgatgcaacgaaacaaccacagtcactggcaaaacaaccaaaaaacaacagcagaaaaacttaaaaaaggaaaataacataaaaaattttaaaaacatttgaaaataaaaaataaaaacaacttacttcgaggtttgttgaggcaaaccatcaaccttaacaacttcgaaagggtctaaacaaaccggtttgttttcctttttgaactcatcaaacaaagcaaaaaagtggggcaacaacaccgcaaatggctgacaagctttgatagcagcactatctttcatagcagtcgacaaggagttgtacatgtacatacgcctttcctcaatattcaatcgaccaagaatccaatgtgattcagtctccatatggatgataaacaaaacatgatcgcacaaatgccaaggggaaccacataacatttttctacctctgatataatcagcaatggcatgctgggcagttatcaaagaaagattttttttctgtgcaataaatttttcatacaaagcatgaatggttttgaagaataagcaatcggtggttgtgaacttaacctttggctcctttgcatactttccttttttacgta

SEQ ID NO: 349097 - DNA, 1349 bp, Cannabis indica
tgaagaacaattaaggaggtttgaaatcaatatagaaggtgtctctcatcttctagttttctgacagagaaaactaggtttgatttggttgaaggcatcaagtggaagagtgagcgcatcatgttccttttatagtgtttcaaatagggcttagggctgaattatatggattaaaaaagaataattagcagttaattatgtttaattatggaaaattatttatagatatttaaataattatttatgctgttattattgaattctgaaatgcattttatgtcatttagtgattttcataattttgcatttccggtgcccggtaacatggaactcggtgtttggctcagtaaaatcacaacttagtatgttagtattgtgggacggttatttagacattgggaatgtcgggattggtcgggaatttagaatttcccaaaatacccctttagtgctctttatgttattttagtgtgaaggggcaaaatggtcattttgccccatttatgttttgtcctttagtggacttagaaattggaaatttgatattatgctatgtttcttttggctgaaataaatgtttattatatgaatttattctcatttggttcaaagtaagaaaattagaaaatttggaaaattgcttttctctcttcctctctctttcggccacttcttgagcagctggaattggagtttttcttctgcatttccagcaagaatcatcttgattttgaggtgcttaaactttaggtaatttccttgtagcctttcttggtgttttcttgtgttttaagaaaaagttagtgaattgcatgcttgattttagagtgttcttgctgctgtatgttgttgttgatttctgaagtttattcatgagtatttgtgtagattagagctacttgtgttgcatgttggtggtgttgtttaaagttatggaatttctattcaaaagctatggttttcaaagagaaaatgtgaaaatagttgctgtaaagtttggttgtgcttgagttcagtttctgcagtttttatatgcatgaatatgtagttttattcaggttttgatgcttgtaggtgagctttagccaagtttgagtttgaaactcaaagcttggagctcacatggcatttttagtatctgtgtgttctgggttgttttgttgctttggtattgttctttggggtatttagaacaggtctggaaggtttgatatgctttggatttgaattgaacaagttatgaatttttgaaagtttcctgcgaggaaccggaattctggttgtgcatccggaattccgaatggggttcaaaaattccctagattttctcgtttttatgttatttgggg

SEQ ID NO: 349098 - DNA, 788 bp, Cannabis indica
agatcaaggttcagatcttgataatactctgcgacagaaatgatacaagggttagagatctgaacggaaggagtcatttaattccgctacacccactgtaaggtttcctaaactttatatgtgtttatttcatcgttttagaaagttcatacttgtgagtagatctaagatcctggtaaaataatttcccacagttataaccttgccatatccaaggccaagaaggaagtatcctctagcaaaaccttggacaagggaaaaaatatctctaagtagggaacttccaaaggcggggatgaagatgtggatcctcgacttggcgacccaagcagcaatgttggacctatggaagaactagaaaagattgagattggcccagatatttcggccagaaaacttaaaattggaaaaggtttgttgctcgaagtaaaatcagcatggataaaatttctgagaacaaacctggaaatttttgcctggtcacatgaggatatggtcggaattgatccttctgtaatttcgtacgtcctaaatatcgatcccaacttctgaccaattcaaccaaactgaaggctgttggacaaggagcgagccctagccctgaaggaagaggtggagaagctacgaaataacaacttcataattgaagctttctacccggcttgggttgctaatctcgtactggtacccaagccgaacaagaagcggcgagtgtgtattgatttcacaaacctcaacaaggcgtgccccaaagactattttttgcttccaagaatcgatcaacttgt

SEQ ID NO: 349099 - DNA, 922 bp, Cannabis indica
gttagttttggtatttttgcaaacatatttactttgcttgttattttctaaacttgtgtatgaatttattgaaccaataatttatttctgtttattgatatttgtagtgtcaataatatacaacccacacccgaatcctcatctagaatatgcctttaggaatgaacttcgaagtgtgtagatgactcctggtaagagtatcacttcacacttgcttatgatgaacatgaaattctagaaagcagctatgctagtaattattttatctggacagcaaagagttcattttgttctcaatagcttatcacgtgagtttaacgaattcgttattaacaattggaactcgtctgacatagacaagctggacgctgaattgcgtgcttatgaatggacattgtcacttgcatggagatccttctccagtaatgcagataagggaaaaagggaagctgaagatattgagaataattcctccgacaatcctactacttcaggctcagttgaaaaggatagagaaagtgattcaacttcctcagattatccttcagaatagattgaaccaacaataagaacaatccaaaaaccgttaagtagtcatattaatggcaatgctttagtttttgaatcatgcgttttagagaatgacaaatccatctagattcttgattctggatctactaacaatgtctgttattgattgcaattgcttgaaaacttgaattatttaaaattcggagagtttaaacttataatttgtaatggcgaaatggtatcggttagagctagaggaaaatccaaactcaagtttcagaatagaattttggatttagacaatgtcttatttattctaaatttcagtagaaacttgatttctgtttcatgcttacaattgcaacaatacaaattagatttttcgagttct

SEQ ID NO: 349100 - DNA, 909 bp, Cannabis indica
tttagttgtgcaccaaatggatgttaggacagcgttccttaatagcgaattagaagaagaaatatacacggatcaacctgaagggttcgtgatcccaagccaggaacataaggtttgcaagttagataaatctttgtatgatcttaaacagtcaccatgagaaatttgacaatttagttatctcacatggctttgctttgaagtgaatgaaagtgacaaatgcatttactataaatctgagaatgacatttgcactattatgtgcctatatgtggatgatctgcttatatttgttttaaatatccatgttgtgaatgctgtgaaattattattatgtgctaactttgatatgaaagacctcggagaagctcatgtaatccttggtattaagattactaggtcagaaaagagaatttctttggatcattctcattacattgagaagattctcaagaaatataattactttgatagtaaacctgcttgcacactatatgatccgtgtaaagctatttaataacagtggtgacagtgtgagacaatctgaatatgtgagcatcattgccagtctttgatatgccactgattgtacgtgacccgacattgcctaggtcgtgggattattgtgcaggtttactagtaggcctagtatagagcattggcatgctattgagaaggtaatgagataccttaagagaaccatgaaccttggattacattattaaaggtttccaggtgtccttgaaggatatagtgatgcagactggaacactttgtctgatgactccaaagcaacaagtggctatatttttagcatagctggtggcgctgttcttggaagtcaaagaaacagactattttagcacaaatccaccatggagtctaaaaaatgatagcactagcctctgc

SEQ ID NO: 349101 - DNA, 625 bp, Cannabis indica
ttgactactatttatatttctttatccattaaatttcgacaattttttcttttttccaattatttatttttcaataaatacttttcaatttttaatcatgcaaagtagtatgtatataaatagagaacaacacaaatcaattttatattaaaagtaagtattcttgatcactattttttatttgttatatatatatatatgaataattctctcttatatattttttaagttagattttcattttatttgaaggtctgctataaaaatacacatagagattcatgcaaaaaaaaaaaaacaatatatatacattgaggaactaaggactaaattctctattagaaataaagtttaacttaattgtggtactcctttaataaggaaataatatatatatatatatatgaaaagtaagtcgtatttttttgcctatttatatgtagttttaatatttaaatatttttagtattaatttgtaattctattattttatgtgtaataaaaaaaagttatatttgttgtcctaacaaaaaaatatattttagtgtgaataaaatttaaaattattatacatgccgcacgaagtgcggctttgttaactagtttagaaataagagtgactcgt

SEQ ID NO: 349102 - DNA, 1202 bp, Cannabis indica
acaagaatcagaatgaggaccttggaactggaattggacctggacccaaaatcagctcgatcctggaatcgtaccaagacccaaacctggaaccatttctacaccaggacccaaatccaaactcggactcgggacccgaaataggaacaagaatcagaatgaggaccttggaactggaattggacctggacccaaatcagatctagatgcagaaccgaacatgaactcggacccaaactaggatcgataccaagaccgaaacccgaacccgaaccgacacttgcgccaggacctgtgacccagaatctggaaccctggacccgtgacccaagacctggaatagaacccaaacccgtaccagaacctagacacaaacccaaaccaagacccagaccaagacccggacccaaactcagaccaaaaacttggacccagacctagacccaaaccaagaccaagagtcggactcgtaccagaactcagacttgaacccaagactcagacccagaccgagatcaggactgggacacagacacagactaggaccgagccctgaacctcgactgggaccaaacatggattaggatcaggactcgggacccgggaccaagacctgagacccaagactcaaacctgggacctaagaactgaaccgtgacctagatggggactttggccccaaaccagaacctggaccaagacttggacaaaggatacaaacctagatgggggacttggaccgaatactaggactcagaaccggggtctgagacccaaaatttgaccctagactcgagacacaggacccgaccttagacttggaacccaggacctcactaccaggacacaaccccaaactcggaccaaaactaaaacttaggactcggctcgagacccgggacccgaactagaacaagactgagatccaagaccgagattcgaatctgaacttgaggcttcaacatgacccataatcagtgtttgaatccaggacccacacccatacccgaaccgggatcaagacccaatcttggacccagaatctgaatcgaaccaggactgggatgagaacccagacctgggactataacaggatccaaacctaaacccaaactcaacctgaacccataccgagacttggacccagattgggacctgtgacctgggacctaaaccaagacctagacccaaacccaagaact

SEQ ID NO: 349103 - DNA, 523 bp, Cannabis indica
tcttatattgataaactttacacagggaacgagagtagatgcagtaattttcgtagaagatattgaaggtttggaggacactttgcatgagttacacacctactacatcagtgatgcccgtgtcaacaaatcacctgcaagataccttaaaaatggcacaaattaccattttggttggacgctgaactcaaaaatgcaagttgctgaagtccaagaagaaggcaaacaaatttctaagccagtccatgaatttgtttcgtttaagaacttgtcatctgacaaatactccaacacaccacaaggtaacttcggatcccaacaatataacacataacaaataatttacgaagttttaactaacgtcacattcaatttttagatatcataggagtagctgtcaaaataaatccagcaaaagtggtgaacacagtgtatggacagcaaaccatacaagaaatatatctaatcgatgataggtatatataatataacatacaaatacataatgataatctttattgga

SEQ ID NO: 349104 - DNA, 432 bp, Cannabis indica
acatcctctttcttaaagttgacattaggatcccaaggtttcatgataactggccttcggttaaaaaagacatagcccccattaatgacttgatctctatattcagcagaatgaaaacgaataatgaagataccatgagacaaaagtttcactctatcaaccttatcctgccacactctttttgcaaaaccctcaagaacatgtaatggaggattaacaccaagcacgtaacataccattgagggtttccaaaacagaacctcctcttcaatatcatcaagagtaatcttaactttcccactgccctgctctgtttctttaaatgaattttccaggtttcttatcacagtgttagaacgcaatataggggggatagaactcataccttgtcttaggttactgttacattgcacattagccgtgaggaattga

SEQ ID NO: 349105 - DNA, 550 bp, Cannabis indica
aaaaaaaaatatttttttcataaatattaaataatttaatattaaaaagtaactaatctaaaacaactgatccaatagatttttttgttgattggattggattatatttgagctattgtgcggattggattaggtccaaaaaatgaaatccgcacttaatgcggatcagatgcactaggagcaaaatagtgtagattggattggatgaacactcttttttatttataagagagaggggtgtattttctaaaaattaatataaatttgtatttttatagtcttagtgttagagatattattacaatggaagaaaaatcaagatacattacaactctattgtaaaataatacaaagattagaataagagattgattaaatatatgttacaatacatatatatacactatatatattacacatatatatgaaaggtagaagagaagatagattacacaatattatataacacacatatatataatatgaagaaatatatatatatatactcactcacaaccttgagtgtagattagtggggatcaccatgact

SEQ ID NO: 349106 - DNA, 423 bp, Cannabis indica
ggagtatgtgattggtaccttgatcgtacgtcaatcttctgtgggaaggtggctcgagttcgacgggcaacatagcttcataaccgtacgccattacaaatggtgtcagaccggttgttgttttttccattgtacggtatgaccatataactttggggaattcttctggccagtttccttttgcatcttcaagtttcttctatagtgtatccttcaaggttttgttgactgcttcaacttgaccgtttgctttaggatgtgccactgcggaaaaacttttgatgataccatgattcgcaaagaaattcgtgaaagattgactgtcaaaatgtttgccattgtctgagactattttttacggtagtccaaactgccatatgataatcttcactataaattcttgaactttctttgatgtaatgg

SEQ ID NO: 349107 - DNA, 834 bp, Cannabis indica
tgaaaacaacaaaatgttgttttctgttttaaaaactaattcacttttggtcaatgttgtttttaaaaatcactaaccaaacgtgacgtgtgttttaaaaactttaaaaactattttttgttctcatttctaaaaacaattttttaaaacaaaaaacagaaaacaataccaaacatgctctatatcccttgttcagtttttggtttgtttttccatccatttttgaccataagtacacacaaattgtaatttgtgataaaaacacgtttgaattgacttgtaaaacatatatccatatctaaaatattcttacataaattcgattattatatctcagtcttcaacacaagtccagtcaaataaagaaatctatagcaataccataacaactaaagccaccacctaaaaggtattatatgattagaatatcatattcccaaaaccataggatatataagagaggctactcctccatccaaaacccaaatcattactcatactactcgacccttcagtactatatataattgacacacatttaatattataattcttaattatcatctaatttttaaacgctacagacatgtctcctcaactcaacaccactgaattttcggttgtgaaggaggaagttgagcttgtgaaaccatctaaagccacacctttggatgttctgtctttgtccactcttgacaatgaggccaacctcgaatgcttctccaaagccatctacgtatacaaggcccaacatgatcacactgctaacagtgttgacccggctgagatgatcaagcaagctctctccaaagctctcgtctattactaccctct

SEQ ID NO: 349108 - DNA, 652 bp, Cannabis indica
aaaatttaactattgtaagaccaacaatggagatcgaatatccttataactaaaagctaattactttaaagagttgtatttcatttgatatttattttaatctatttattttaatatatatttaattaaaattaccaatttagaataaaattctaaatataaattttaatataatttttataaaattatacttaaggaagatttggaaaagtaaaaataaagtattttccatccttagtattaattttccaataaatataacgaaaattatttgatttaagttgatccacaattaattataaattttcaactaaaatttaattttctataaatatataatgcaaaattcgaaaaataatgcatttaaaataaataccattttcgaaaatgctataaaataaaataaaataaatcttgaaaaattattctaattaatccaaaattaattaaaaattaattttcaacacaaatataattttcctatttaattaaatattaagaaaattatcaaatatttaagtatcatgataaaaatcaacttaaatattaattttctatttaattaactatcactagaaaaatactataagcaaacagacaataactatctagactttcatggactaattaattcattttctaattaaatata

SEQ ID NO: 349109 - DNA, 1467 bp, Cannabis indica
gtcttgaataagatgttggaaaaggctcgattatctatcatggttctggctaccatcttgttggctatctggacttccacgacaaacgggtcgttgtgcggaaatctgatcttgacagcatcttcatcattaaatgttatggtgggttcccccgctcgtgggatcttcagcttcctcccttctacagccaggactacttcttcttgctcgtgatgtattgttcgggtattcctctcatgggcttcgcttgaatctctagctatgcgcgaactccaataatgacttgcagatgtcgatctactggtggtggtagcacgtcttggttgttatcgcccctctgattttgatcgaccttgacatacttctgtacgtgccgattatttttccttatcaggaattcgatttcccgcttcagattgttgcattcattggtgtcatggccataatccccatgaaaataacaaaacttggtaatgtctctcttggtgacatcttttttcatgggtgcgggcttcttgtacggggctaatgaccgagtagccatataaacactttccatgtcttccgtcaggacggtaaatgcagtatacttggcaagattctcctgggaagcttgttcaggttttctattgaactttccctttttcccattcctttttctattattgttgctggactgtttaccacttgagcttgaattgcttcggtaatgggggagctggacggatgtcccagtagaaggagcttttgactggctaggtttttgttcaccctctgctcactgaatggcttcttcaagtttgataaaaccttctgcacggtcaagaaaatcactcatcgagtttactggtccgttcttccttatggccttccaaagttcgccaaggacttcaattccccccagtatcgcagacaacttttcgtcttcggttacccgtgcaaccttagtcgcctctgtcatgaatctgctgatgtaggctcagagaggctctcctggtctttgctttacttcgactagatctcctaggtgcaacagaagttggcgagaggaggagaattgtgcatggaactccgaggagaaagccttccatgagttgaacttttcaagcgctaacttgaaatacctttgttgggcggcttctgagagggtggcaaaaactctgcaacataaatttcatcgtactccttgcaggtccatttgcatctcgaaatacttaaggtgggataagggatcttccttcccagtatacatcttccaggttggcatcttaaacttgtggggcaattccaggatattaatctcggaggagaaaggtgttccacgtgctcggtctaactaaagatcgttgttcctttgactggccaggccttggaacatactttttagttcgtccaactgtgcctgcacggctggactaacctgttcagcctcttggccgacctaagtcaaatcagcatatctttgag

SEQ ID NO: 349110 - DNA, 639 bp, Cannabis indica
atgacacaagattatttcccaagtaaaaacaccctccagtggtacttttcctatcatctagactcccagcccaatcagaatcactgtatccaacaatggacatgttggtatctctggaataccacaaaccaaattctgaggttccagataggtatttaaaaatacgcttaacagcagacagatgagactgtttgggattggcttgatatcgagcacacaggcctacactaaagcaaatatcaggtcgactggctgtcaagtaaagaagactacctatcatccctctatatagggtgggatcaacagactcaccagactcgtctctgctaagtttggtagtagtacttaaaggggtaggggcatgtttagtgtgatctaagccaaacttctcaagcatttttctaacatatttggattgtgagataaaaataccctgatcagtttgcttaatttgtaaacctagaaaaaaactcagatcccctataagactcatttcaaattcactagtcatgagatcaacaaacttgacaacttccttttcacaagtagacccaaaaatgatgtcatctacataaatttgagctacaaagatacctggttgcaagagtttaataaagagagtgttatcagcagtacctc

SEQ ID NO: 349111 - DNA, 549 bp, Cannabis indica
tgattgtaaggctttgttggccgatgttagtagtgtttcttttaattttgttaagcggtctgctaataaggttgcgaatgttctggcgcaatcttctcttgtcgagactgaccgtacttttagtagtgttactttacctagtgtaattgcttccctggttttggaagacttgaattaatgaagctttttcatgattattcaaaaaaaaaaacttgtaactaaaagtaaaaaaattgtaactaattataaattatcattcctatattgtgattaaaaggtctgtggttaaaagtattattcagaaaaattacaatttattgtgactgtatatattttagtcacaatacttgttgtgaataaaactaaattagtgacatattgtatctaaatactataatttagtcacaagtaattttttgttgtgactaaaaatcaaattaagtcacaaaaaaattatgttgtgaagaaaaaaatgtcatttaaaataactattttttgtataagaaaaaaaagaaaagtacattctctatgggattttaaaagttattt

SEQ ID NO: 349112 - DNA, 752 bp, Cannabis indica
aattctccgtcgtgaccaacccccgacgtcaaggtccttcttgtcatatgtggcgaaggtcttagcccgttggaggaagagctgagtaggcgccgtctgctcataagaagggatcctaacccactccgtgagaagctccgggtgttccacagccaggaacccggagaagaagaagaagcggtgacgatactccttgacatgcttttgctgattgaaggggatcggaccctcattcaaagggtgggcccggaagccataaaagccatccttaagtttataccccttcttgggaacagaaatgagttcataaaaatacaatatctctgccggactgggggagccccagccccgggcagagtaaaaaataaataagcctgaaagtaggcggtaagcttgtggaataaattggtatggcgcaaggtcgacaaatacaaggaaattaatgaaataatcctgaaggggaagcatagccccggtcatgaaatgtttttggctccaagctccgaagcccccgtagttttgattgggcatctccgcgtcgcggggcggccggtggtacgtcccggaagtcgcaggcttgatgccagccaccaccacaatgtgctccagctgatgagggaagttaaggtagagtgaagctcggccgcttcccaccccgtggcacgaggcttaaacccctcctgggaaacgagatctctcatcagctctttcagggtggccaggcgttttcctcccttcttggaagatttgga

SEQ ID NO: 349113 - DNA, 627 bp, Cannabis indica
tattataatgtggattatacgctaagtctttcaacagccgattcgcctcgtcaatacttccttatgtgtagcgaggtagatgtctcgctatgcattgtccataatttttacgggattatgccttctaaggcaagatggtctctcgtcaatacatgaattgatagtttgtgtatccttgtctcgtctaagactatacagtcagcaagttatgaatatattctatatttaatgagttattctattttgcatttaatgatattaacattattatatctggtggtacatattccacttgattgacacgtgtcactctcagaagtatagtgaaattttgggtataacaattgccccttaaaaaattcttttttaataaaaagtactttttaaatgattacaaagggtactttggtcttaacccaatttaaaaaattgcatgcttttgaatttggtggttcatggtttcgaggcacatcattagcatttaatgacccatcttttccaattcttccttattcctatctgttggatctctattcttcatcatctgatgattacggtaacttcttttaagtgggaatttatttcccattttcccctttatctgtttttaaataagtattgatgcat

SEQ ID NO: 349114 - DNA, 640 bp, Cannabis indica
catagatcataagtggacaagttttggattaatattacaatagatgcatgattacaattgtcttttttgatgtgataatcatgttaatgcgtgtgtactctatatcacattattgttgctaccaaaatttgaagatggctaaggtataattagatgacaattttggattgactgaattctaaataaattttccacgtagtaacgtggatggcttagtatcaactttgaacaacaaatgaaaagaatagacgaattaaagtcttgtcttatctaaagataaaacacatgcagatcatataagttgtttgtccataaggttttcatgatctacagtaccatgtataaaattttaagagatatcgagtattcgttactcttttgttaagatctttctcataggactgtcttaaacatagtctctcaaagttttgactcatcaaagtttgaaagcttttatgctttagaaagctttaaagtggaaaacacctaaagagattaatccatgcatgcacaataatatgctgtcattttttatgtgtattattttttcaaagtgataagtacacaataagactgagatatggtcttaaatgttgtactgcatgcattctggtttaatggttttatgccctaaataaaa

SEQ ID NO: 349115 - DNA, 500 bp, Cannabis indica
aaaataagagctataatattctagctatatggtagctatcagggttatgttttgaattaaaatggaataaaaaaaaaagacaaaattgactttatttaaacctcattggttgaattcttcatgggcccaatgagtttcaatttggccattttattgaaacttatctttcttttcacaaataccatcttttaattctagctctataaatgtcaattctatttgtttattaattataattaattatcaaataattttttttatttaatttatttattaattagacctttcaaagtctcttaattaataaacaaaccctaaattcccttttcttctcaaataagcctatagattaataaaatcaattaattgagtctacaagacaatattatctcacctaatgtgaggaccatgggcctatataatcaagctcccaataagtagttctagaatttaccgagtaaattctctatcttattaattcctcctgactccactataga

SEQ ID NO: 349116 - DNA, 415 bp, Cannabis indica
gataactaatcagattgtaatgagttttatttagggcataaaacccaacagtatatagagtctgatccaaaaaattttataggagtatggagggattttctttgcatcagagtaactttgaatattgataaaccattacgccgacaaatgaagctcactaaggatgatgggaactggttctggatcaattttaagtatgaaagggccccgactttctgtttcatttgtggtataattggtcactcggaaagattttttcataagttgtttcatcagccaaattgaagaaaatagtaaagccatatggtgagttcatgagagcccttccccaatgatctcacaagaatattggttctcgatggctcagaactagggggtggagcctgacgacggtggttggtgttggaaattattt

SEQ ID NO: 349117 - DNA, 644 bp, Cannabis indica
aaataaaatatttttttgggcccggtaattgtggaaatttagcgatgtggtcagaaatgtcatgacgttaatggaagaattattttgggaatattccggattaggttagaaattttagaatgtcggtttaatggaattagcaaaattacaaaaatgccctaggttattttaaagtttattttttttcattgggggtaaattagtctttttcttttaggttttagtgtcccttttatttttggggtaagaaaagaaaaaaaaaatgaaatgaaatgaaaatgaaatgaaatgaaatgcatgaaaccttatttaaagggaatagcttccaaggcaagaaactaagtttcttcttcttctccctttcgtgtgaaccaagaccagccagcaagaggattgaaagctcaccatttcacttgaattgaagcagcttgtagaacctaagtccaacctagaaacaatcaaggtaagttctcaacaatttttggattgaaaatcctagttttgagttagttttgaagtagggttttacttctttgttactgtaggacttaaactaggtttggggtgtgtttagggtaggtttttgagcatgttgggaatggttttaagtggtctccatggctgcttgaattggttttggtttg

SEQ ID NO: 349118 - DNA, 624 bp, Cannabis indica
cttcttcttcaagtttgatccttcacagtcttccaatctatgattgagttcgtaagtgtcgtgttttatgcggcaaattatatattactgttgtttggtaattctgaaactgtatttgcttttctaacatcttctctgtagttagttgcatctgtcttcactaatttcattttagtgccatgtcagctttctgtaaggttgttagtttgtgccagctgtaccttgctggttgtttagttagttaggtttattatcttcagcatataaattctgtgagatctgtgatactaactaactctcttctattagaatcttctactggattcttgctctgctagggcatttttttctgtgtttgtttcttgaatgtgcagattgttattttgaagatcttcttgaggtcgaagatggagatagaatctgcctgatctgaagagagttcagatcaatctgctgaatgagatttagctgtctgaatattcagaattcgagtttacagagatcttttggtgattagatcttgatacttgagtgtgttcaagtattaggtaacattgtataaaagtcaatttagattacattgtttgatttgtagaatcagaactggtatttgtaattgaattg

SEQ ID NO: 349119 - DNA, 597 bp, Cannabis indica
ccataggccatagcgaatggagtatgtctagttgctattttttcagttgtgcggtatgaccataatacttctggtagttcttccggccagttccccttagcatcttcaagtcgttttttcaaagtatctttaagtgtcttattgactacttcgacttgaccattttcttgagggtgtgccactgcagagaaactttttatgattccatggttcgcacagaaattggtgaacaattgcctgtcaaactgtgtgccattgtttgagactatcttgtatgggagcccgaacttgcatattatgtttttcaccacaaagtctaacactttcttagatgtaattgttgttaatcgctcggtttcagtccatttagtgaaataatccactacaaccactcatacgatactccccttttacctttaggcaattgttacgactacggttaaattcccccgaattagcaaaaaggcctaaggactttgcatctgagttagttcgttgggcggtgcacggggtatctttgaaaatctttggcatttatcacatttcttaacataggcttttgaatcttaatcatggtcggccagaaatatccttgcc

SEQ ID NO: 349120 - DNA, 664 bp, Cannabis indica
ttttctttgataggctttgcccggctgcgtggttgccgcagaatccatcatgtacttcagatagaagtcgtgcagcttcttcttgtgtaacacatctaagtagtggcatagagaacccccttctatacatgactccttctatgatgatataccgtgcaacctttctcctcatctttctagcttcatttctgtcatttggaagttccctagtattgaggtaggctgctattggtgtcatccagtttggagctgcgttaatcatttcaatttcttttacacaggagatgattggttcttcaaggaattgaattgggattatattagccttatcagatatgttgctgcttgcaagtcgggctaaggcatcagcagttgtattttcttctcttggaatttgcttgagaatgtagttcttgaattgtgcaagcagatcatgtattttgctcaaataggctatcatttttcccccaggcctcgtactctccagacacatgatttattactagctgtgagtcactacaaattttgatgtgttcagcatgcagctcccgagcaagttttagaccgacaatgagggcttcgtattcagcttcattattggaagctctgaacccaaatttgaccgccccgtgtaggtgttgcccccaggtgtgataagggaaat

SEQ ID NO: 349121 - DNA, 547 bp, Cannabis indica
aatgtgaggtgactgttcaaataatgtccttttcccccggaggtcccttggcgttcctctggtctccaggagtacgtggagcttttactttcctccgggagggtatattcttggtgacactcctgaagctaagagacttagtcaattgatctaagggttgcgcctcttagatccacgtgtcattgtcatactagcccacgtattttgggcgaaaataggggcaacagaatccaaataaaatattttcagtacgaaaataaaattattttcctggaaaaatttcgtacttcacatacattaatcaattaacacataaaccaacatgaacacatccaaatcaacacacaaataatattaatcaattttaaatccctatttcatgaaagtaaatcataaccatgcctttgaggccagttgttgggaatattttaccacgagctagatttactaacaagtatgttgattaacatcctaaatatgaattctctaaaataatgaaataaacagataagggttaagaaaaacttacattgattgcaacgaaata

SEQ ID NO: 349122 - DNA, 757 bp, Cannabis indica
ctttatacctaatttgggcagcaacgtttaaacttaaagattctggtttaaagcttgagcaatcttcattcagttaccttttgcaaaatattattcccaagagctatttcccttaggcgtgtgcattgacaagataaattgcatcctatttttgttgagtacctttgttgagttcagttcttttgttttgaatttttgttgggctatatgtttttctagttgttgtggttttgttctcatcactcgaggatgaacaatgtcgtaaatttgggggtatttgataactcatgagtaaagagttatttgatatcactttaaacatgttttttatgtaattgcgtgtcattgtagttattttgtcttctgatttgtgaaagtttcagtgttttatgtctatgagtgtaatttgaagctgttagtagaaataaataacttttgtgtataaattggcaaagaaaatagcaagtcagacaagttgttaattttgctgaaattctgtgaagtttttgctgcagcaaacaggtcagtagctgattttgtaaatttcttgagaaaaagatgagctggtacttcattaaatttggtggcatttgtggagatgacatggtgttctaagagtggtggctggagaaaatacttggagaggctagatgcatgccatgtgtagggtttatgttgggcaaatggtataaaatctaagaggttctcaaaaagaggcagcctccattttcagaaaagaaggcagcacgaaaaaaaa

SEQ ID NO: 349123 - DNA, 746 bp, Cannabis indica
aggggtggaagaagttattgatagatgcagttgaagtcacttttaactttgaactctagagtatactcaatcaccacagtatctctatgacacacatattttgattagacatggatgtaatataatgaacaaattagcaaattattggaacttattcttgaccttgtaattgttccaattaatattttactgttgtaataaaaattgatatcaatgaagttcttggacatagtatcacagtatcttatctgagtgggagaattttaaaattttagcccatctttatttggatgacaatagtgatagatcactatgttaagatcatgataggaactttagaatataactgagaaagtaaatctaaccattcatatggatagaaataacttatcagaattatgaggattagataggaaattttgcaatgtctattcgaataacttaggcaaaattcctaatccttatgaaaagttttatggtatctttaatgattacttatttttaagcaagtattttacattaatgttaatactataatgctatgttgatgacttagtctaaaaggaacttatagttttagactaggacaatatgtcacagtaagatgtccctaagaaccaatagtaagaggctaagtgtacacttgtgtacgaacttaactagactcctactattgagtgggagccatctaagatgtaatcaaacaaggaacattaggagagaatcaagaaagaatttctaaaagt

SEQ ID NO: 349124 - DNA, 1161 bp, Cannabis indica
gtattttgaaactttttcttggctttcttgctatggccgaatttaatatggttgattgggattcttggattttcttatgtaatgtgagtgtttgatgcttggattttgtagtatagatggtgggtaatgtgtttttggctttgatttggtataatttggtgaaaaatgaggaaatttgaaacttttaggttggttgtgttcttgaatattgaagaacactatgaacatgaaaaagtttcaattgacctccaattttccaattttgattctcataaaatgggtaagaatgtgtttgtggggatgtgatacacttggatttttttttgccttgaaaacactttgtatttcgaggagggtatggagctcccccccccccccccccctcccttgctgaccaccacttgtggcaccatattgagggtcggggtgtgtaccccgtgaatgggtgttacgtatttgctaatcaaagagttttttttttaaattgtgtcaaattaaattttttgatctaatagttaaacttcataaacttttatatatttatttacaaaagtcgagatcccgaacttaaacttttacaaacttaattaaaatacatttataatctggtcgttcagcgactacaaaatacaaccccagctgtcccgagaccaaacactccaggtcgcgtcgcctcgacatgtacaatcttcatccaagcccaaagctcattcctgtttagcctttgttgttcctttacctacatatgaaagtagcatatgtgagtccacaaactcagtaagtaaaacatacaacaaaccatataatcacgacttgtgtctaggcgcccatacacctatccacaaggcttaccagatgacttaagaacgttcttaaaaattggtgctactgaccatgatatcattcattatcaacactatgattgcactgcgggactgacactatgttcgtgccgctatgacagcatcaatagcacccaaaagtataataggccacgatatcactcttaaccagtacgatgcttgtactgctgaactgacacaatggttgtgtcgctatgatagcgccatttaattatttcaaaggtgaatatcattcttaaccagtacgatgcccgtactgctgaaccgacacaatagttgtgtcgctatgatatcaccc

SEQ ID NO: 349125 - DNA, 651 bp, Cannabis indica
aatgaagaatagaaaatgaaatgaaaacaaaatgaaaaaagagagggaagagagtatgatttgattgatgatgcatggggagagaacacgtgtatgcatggtatgatgagtaagtggtaaatgtgtaataaaaataagtttgtaagtataaatgtagtaataggcgtgtgagggtaattatgtaataaagtgtgtaaaaaggatttttcatgtaaaaatttctaaattttattggaaaaaatataaatttgtggagataaaataaaaatatgtaaaaataaatatgaaaaaatataaatgttataaagatacaaaactaaaaatatgtaggataaaaataaaaaggattatttaataaatacataaaaatgacaaaaaaaaaatacaaaaaaggattgtacggaattttaaataattttataatttaattttatgattttatttataaaaaatacagtattttaatgcattttatattaatttattgttatttgtatgctattttgttgttgttgatttgatgttatttttatataatttttttttattattttcgtgttgtttttataaaatactgtataaaaatatgaaaaaatcattaaacgtaaaaatgtaaattttttacaaaaaaaaaaatagtactttatataa

SEQ ID NO: 349126 - DNA, 614 bp, Cannabis indica
gataccatcggactgatgtcaggcttgcatcgggctgcatacgagacccgacaaaatcaaacctaaccccgattttgcttaaatcacatactgacgaaaaaaaaagatttgaaagcttacctttgacatctccgttcgaagttcggtggtagagggttggagtcgcatctcacggtggtcggtggcctgagtaggcggtgatttggtgctcggtggtggtgatttggtaatttggtgagggtgagacggtgagagaactacgagagagataaaggaagagagagagttgaggtttgaaaaatgagagaggtatttttgagtttaatgtaaagtggtcatattttttaattttgaaatgcataaatttagggaaataatttttccccattaatatgcatatataatcaaatttcttttatgtattgggcctcctatattttttaaaataatatatgtagagcatacttgcaccaatcaaaattaaatgatgttgtgcaccttgatttcagtataaggatgataagggctcgagatatataaagggtcatttctaaggtggttaacaaaaataatttcttaattgatctcacctaatatattttttaattttttaa

SEQ ID NO: 349127 - DNA, 542 bp, Cannabis indica
gctaagtgttagcatgttgttcggaccgtccactgcccaactaggaagggttcgtccgtgcagatatgtacggtgtattgttcggcatatctctttcgagcagatatgtgaagtcgattccacgtgtcactagcatgtgatgccacgtcagagtgccaaatttggaataacatttgccccccaagtctgtacgggactttcaaagttgcgtgtagacttcatccgagctgcctttgcatttgaatgggtgacatgtgttaggcgcgtctattcgtgattcgatgtgaggctgaccaggcgtcttttcggttttcgactaattaatgctctgacttaattagtgcctcgaaacccggttttctcctcaagctttgacggttacacttgatggtttttaatttcccaatattttcttttgggggggaaatcgaagcgtgcgaggtatttcgaaatgattaccccttttcaccaaagtgcctataaaaaaggctgtcttttttttcatatttactttattgatttctctactaaacaaactcaga

SEQ ID NO: 349128 - DNA, 793 bp, Cannabis indica
atttttaaatataatgtgagatatattatatttggcattatttaactatttttataaaataggccttaattaaatttaaaataagatatattttaatttaaataatctagaaaattttaaaaatctgaccagatattttgtcaactttcaaattatttttattttatttaagttaaattatataatcaaataaatgatacttatttatcattttattttattagacatttaattttattttcttttaaaaataacttcaattttgaaaagttagttggtatttttgaatagatatttaggtttgttaacaaaatataatttttcaaatttataggtttaatttaaaatttaattatttaatttaattttattatttttcaaaaataattctttatttattttcaaaaataatttaattatttaattaatttaaattaaataaatcttatatccatctatccagtttgtttcatgtgtgtgttttacgtaaggtttattatcaaaacttgttttataaaatctattattgtttaatctaaattactatggttatcttgctgacagatctaatgatctaaatttaaccaatagtttaattgtcaataggtcaaataaataatttgtaacaggtaaattttgtaatcttctttcatctgtgtacaaacctagtaacatgataggttccatctaaatcagtgtgtgcctgtgcctatatgttttctttgggcctaaatgcatatagggagcccatttaaattttgaaaaaaaaaatagactaggttgctaaaataaa

SEQ ID NO: 349129 - DNA, 1009 bp, Cannabis indica
cccaactaggatttcagttttgggatcgtcttagtgtaaatgggtcaaaaattgcattgggacatcaaatagacataccaccgacatattttcagaattagaatcagaatcagagcaaattcatttttgagcactcagagccccgagcaccccaacgcccaggttgataatctattaatctaggtgccttccaagtaccagatcgacggtccgacttttccaacttctttgtattcatcaaaaatgggaaagatgtccttttagagaagaaacaatacttcataagttctagaaatgaggcctagcgcccaagttgacacctgggactggcctagcgcccaagttgacattttgtcaacctgggctgtttttttatggtgttttccaagaactcttccgagcatcttctctatttttagaaaatattgatattcaactattttgagggacaaaactaaatttttgatgtgccataactgggacctagcgcctaggttgacacttggtgctaggcccacgcccaagttgacatattgtcaacctggtctttttttgatcaagttcactaaaaagtgttttggacattttttctgtcattagaaataatgatgatttaagcaaactcgtcaagaaaaccacaaactagaggccctggaaacggggcccagtgcccaggttgacctggtgttgggcctagtgcccaggttgacaatcaacccgggacgctgccttcaattgctcaaatgcagaatctaatttgaccaatgaatttggatggtcaaaaacagggtaggagacctcgtcctcaagttcaagaaccttggaaagtattaaaatgagatcgttaggagcttgggaatgagcacccatcgcccatgttgacaaatggtccggtgcactagtttttggtatccgattctgatttgttttgaccgtctctctattttatcacaataaataagatccatgaagtcagaaaagttaaattcacaacttcacatttctcatt

SEQ ID NO: 349130 - DNA, 508 bp, Cannabis indica
aagtcacatttagtcacaaaaaaagtatgttttgactaaaaagttgtcactaaaagtagtagttttttgtagttgtcctaaaaaatatggtgttgacagtgcgaaaagaatgtttgcggattgcttgaatagggaactaggaaacaactgaacaatgacgcgttgggaaaacatgcttaatgggatcaattttatttttttctataaattaatatttaacgtaaatattaatttcctataatagagtatagaatatgtacatgtgtagcacatcagaatatgtctcctttcatttagtgatctaaccctcgtttctttctgctatagagtatcaccaatcactaaacctggatcttctcttgaacaagaacacaatctttaatctttagtttctccgtagtcttccacaaatatctaggtattgtaacagaatcatgtgggcaattctcacaaccactaaggtgctatttcgaaaacacaagaagaaagagagagagggagagagaga

SEQ ID NO: 349131 - DNA, 520 bp, Cannabis indica
attttatttattagtttttttttttgaaaagaaacatttattagatagaaagttagaccttatgatcattacacaatatgttcttaggaatagaggaagtagataatcgaccaaatcagttgtgggtaaacgctcacttagccacattatgggccatataaatacaagttctaaaaatattacaaaataaacaactagcgaaagaggatgactctagtaattttcaatctcccacctagggtccaacccagtgattgtattgtttattgccttagaatcactttcaacaataataaatttgctttcttgttccattgccacttctaacgccaagcaaacaacaatcgactcaccataaagagcatctgagaaatctaattttgctgaagtcacctaaatcacctcaccaaggtggtttgtagaaataaattcaatgcacatgtgctccgaacctactttgacgtcatagttcagtttgagccagtcttgaggaggcggacaccaaacaagagagtggctc

SEQ ID NO: 349132 - DNA, 609 bp, Cannabis indica
acagaacatgcttccactgaagccaagtccctctggacaagtccctccagaaacttcacacgccaactccatggcgcaccatcctcctgatggcaatcgagcaagatactcctatcacaggataaaatttagtgcgttccacctgaacgagactcgcaagccaattgcacccaatgcagcaccaagtgcactcttgcacaaaatctctttgcaaagttctcaacattggccctctggccctaccgcacacccacggcttcatgcaaaaggtcccactgacccactacatgcatgctcctctgagcttctttcacgcggtcaatgatctaacaatcacccaaaaccacgaattttccctctggctcctgcttgtgtcggctctcaaaactattcacaagtctatcttccaaaatcaaccttgtatcctctgatgactcgctaacttttgacaaacatgataacacccagtcttactcttaagacttgaagtcatcccaatccactatctcccatcggcatatgctctctaaaccattcagcttacagtgtcccataaaacaccagtgtccccattaacacaaaacatgcccataacatgcagcaaactag

SEQ ID NO: 349133 - DNA, 707 bp, Cannabis indica
ctaaggctagcatactcacggacaggagggacgtaatgtatcattaaaggggacttaccagaaccagaagtgctggcatcgggagcccccgtattcggcacctggaccgcaggccttgatctgggggtccttctctccaccgggctcccgatacgaaggggccttccagcggccacctgagccttattataagcatgctcctgggccttctggaagaggtacttctggtacttatcctccgccgtggcgatgatgtcctcccggagtaccctctccgcagccggaaccctcacgttcgagcagatgacttcggaaaggttggattcatccaccgactgatgcccctggatcagcttggccttcccgcagttctttgtcgtgaccaactccccgacgtcaagggccttcttgtcatatgtggcgaaggtcttggcccgttgaaggaaaagctgagtaggttcagtccgcgcataaggagggatcctaacccactccgtgagaagctccggatgctccacagcctggaactcggaggagaagaagaagcggtgacggtactccttcacatgtttctggtggttaaaggggaccgggccctcattcaaaggatgggcccggaaaccataaagccgtccttaaatttgtctctcctttttggggacagaaacaagttcataaaaatacagaatctctgccggactaggaga

SEQ ID NO: 349134 - DNA, 725 bp, Cannabis indica
tgtgcttgactttgagggatcatgggtaaagtaccttcccctaatcgagttctcttataaaaacagttatcaggcaacaatcgggatggctccttatgaacttttatatggaagaaagtgtagatcgccgattcactgggatgaagtgggtgaaagaaagttcttgggtcccgaagctgttcagaaaactagcgaggcagtcgacaagattagagcacgaatgctcgcggctcagagtaggcagaagagttatgctgatccaaagcatcgagatattgatttttaggtcggggacattgtgtttctctaaatatctccgatgaaaggcattaaacgctttgggtagaaaggaaaacttagcccgaggttcattggaccatttgaaatccttaagaggatagggcaagtagcgtatacagtttggctatgcccctagcgctggcagctggacataatgtgttccatgtttcaatgcttcgaaagtatgtctcagactcatcccacgttctgagttatgaagcgttggaactctagccagacttgtcttacgaggaacaaccagtgcaaatactcgatagaagagagaaagtcttgagaagcaagatagtggcactggtgaaagtactatggaggaacagtaaagtagaagaggcaacctgggaacccgagacggatatgcagcagaaatatccggagttcttcaggtaaatttcgggacgaaattt

SEQ ID NO: 349135 - DNA, 1132 bp, Cannabis indica
atgatgtcacgacaatgacctgggaaaagttccaagaacttatcaatgctaagtactacaacgaagcagttataagtgctaagagaaaagaattcactcatttaactcagaaagaaaatatgagtgttactgattatacaacacaatttgaccgtttgccaaggttagcctcgtgaattgtgccgactgacttcagcaaaaaagaaaaatacctggatgggttagagcgaagatcagacatgacttgatgattactactgacgacagaaccacgtatgctgaaatggtggataaggcactgcgagctgagggcacagtgggatgcatgatagagtctggtgggactctggtgcttggcggggatcctacccctcttacatcaggttttagcaggggaggtagtggttcggccatagatcagaaaagaaaggcatccactgcaaccagtggctcgggtcagaacaagaggttcagagggaaccaaggtcgaggcaatcgtcagagtggcactgaaacccgatacacttagccagagtgccccaactgtaagaagcaccatctgggggagtgtaaagggcaggggtgcttccagtgtggcatgctagggcattacaacagggattgtccccaattcaaaactgaggcaccgaagactgtagcaaaacccactccctccagggtgttcgcaataacccaggatgatgcagaagcaagcccttcggtggtagcaggtcggctctcggccaacaactcttatttctctgtgttgtttgactctgaggccactcattcttatgtggcggccagaatttttagtaaattggatagaccgcatgatagttatgaaacagggcttctaaccctactgcctggtggagagttagttatctccaaaaggtggattaggtctatgccgatcagaatagaggatagagagttgagtgctgatttgatagagatgtatttagtggattttgatattatactgggaatggatttcttgtccaagtactcaggcagtattgattgtaagaggaagatggtaatcttccaaccagaaggtgaagaatcgtttgtctttgtcggttcggttcagggatctcggatctcaataatttcagtgctaacagct

SEQ ID NO: 349136 - DNA, 684 bp, Cannabis indica
gtgttagctttaccatcagatcgcaaaaatttcattgtttaatgtgattcattctgatgcaagctgacaaagtcatagcctatgcctcccgtcaactaaaagattatgagcagcgctacccaatgcatgatttagagcttgctgctgtagtatttgctctaaaaatatggcgacattatctttatggtgaagaatgcaagatttacaatactttttcaccctgaaagatttaaatatgaggcagagaaggtagctggaattggttaaagattacgtctgcgggattttgtatcaccctaggaaagccattgttgtagcagatgcaatgaatagaagaggtcccgggcaggttttcactactgtagtgatagctcctcaattggcctcagagatggttaatgcagggattgagtttgtagttggaaagttacataacttgacactccaatgtcacttgctttatagaatcagaaaaccgcagtcggaagatcctaagctaatcaagattcgagataaggtgatggttggtcgactaaagacttttcaatctcgaataatgaaatgttactgtgtaaggctcgggtttgtgttcataatattaatgagctcaagaaagaaattctcgatgaagcccacaccacactttattcactacatctgggaaccaccaagatgtatcaggat

SEQ ID NO: 349137 - DNA, 519 bp, Cannabis indica
tcgtgtattttgctcagatatgctatcatcttttcccccttgagcctcgtattctctagatacatgatttaccaccaattgtgaatcactgcagatctcaatgtgcttggccttcatttcccggactagttttagaccggcgatcaaagcgtcatatttggcctcattattggatgctttaaatccaaatttgactacagcgtgcaggtgttgccccctaggtgtgacaagggcgattcctgcaccggatagttgatctatagccgacccgtccacatgtagtttccaagttagcttgtcttcactgttacttagctgaggtatttgtacaggcccggggttgttttctaatatgccttcttccttgcccgtgcattcaaccacaaaattttctaaggcctaacctttaatcgctgttcgaggttggaagataatctcatattggtcgaactccactgcccattcgagcaatcgtccaaagccgttcgtttttttcaatatttggcgtaacggttggtc

SEQ ID NO: 349138 - DNA, 537 bp, Cannabis indica
atataaccgacctacgactaagtacccatacacctatcacctatcaacaagtcataaaccatgccaaatatgtataattgagtctcgaacgttcttgaccataataccacatgcactcagtactctagtcgtactagtgttggtatcatcaatccatattataagtataactagctataataccacatgcactcagtactccggcgtactagtgttggtagcaacagttcatgctttcgaaagtataaccaaccataataccacatgcactcagtaatctggcatactagtgttggtagcattgattcatactttctgaattgccaaacacatacattcacgatatcaagatgcaatcacatatacaccaactatcattctaacgaatatgccatacatatagcaaacaaaagcataaacataaaaatgtacatatgtatgtgtgttatactagtcttacctcaaatttaatttcaggtgtgccggtcaaccttaatgaaaatagttgctagtaatcgaaggccctaagtcacattt

SEQ ID NO: 349139 - DNA, 484 bp, Cannabis indica
gttctctgcccagacaaccggaattccggttggttcacggctgctccaaccggaattccggttggagtacatcgggaaatgctgaattttgttttggccataacttttgactcgggactccgttttaggagttctttatatcgttgaaaagctcctttcgcgctctatctgattatatgtattttaaatgccatgaatatattttatgaatgtgaaatcagggattaaccctatttgtgaaaatcccggattgtgtgactaggattaccagcgcctggtcaggagcacccggggatttggaatctctgcctttgcggaacaacaggtaagacagtagttagcatgtagagtctgcgcggtggcgcttatattgaaattgatatatgttagtaattataaccgtgattaaggttattaccctaatatgagcggttaatagcctaaggttatttgttgggttttatgcactaaataaaactcattt

SEQ ID NO: 349140 - DNA, 1251 bp, Cannabis indica
atttgatgccatgcttaaaatgttatatgataaatgtttatttaattaaaatgaatagttgagttagggttttaaggcaataagtgcataagtgtggtattggtgcttaactcgctggagttgttgattacaagggtacttgtaaaaatggaccctccgcaatcatctagacctagggcgagcaagtagagcctggtgcagaccaaaccaatccactggcaccgcctgcaccttcgcagaattaaagggataataggaggttggcaatgctaatccacctgctgactagcagcagatgtttcaagaaatgcaaggtatcatacttcgtcaagaggaagaattgcatcgattgaggcagccgacatcggcagctcctgtagcaccagtgttaccattagctcctatgctagtggtgggtaaccaggggttcatgttgccacacaaagattccgtgtttgagcggttcgtgaagctgcaacctccaacttttttgggaggtactgatataattaaaattaagcagtgaatgagtacaatcacccatatccttgataatatgggggtaacgggaacagagagaataaattgtgcagcttttacgttacaagatcatgcccgtgtctagtatgatattgtggggcagactcatgatgtcagtgtgatgacttgggaagagttcaagagtctgtttgaggaaaaaatttataacatcgccgtgaggacctcacatatggaagactttatgaaactgacttagggaaaaatgtctgtggccgaatacactctggagtttgatcggctatccaaatttgttggtgatctggtgcctacagatttcaacaggaaacaaaaatatgtgagaggactaaatgccacaatcactcgagacttgaagattaccactactcatgacactttgtacaagaaagtggtagagttagccttaattactgaggaagctgagcaacatgtaaaaaaggagtagattgcaaaggatgctgccacaacatcgaatcctcctgtaagtggtaatatcagtaaggggactgacggtggtaaccctgatcaaaaatggaaggttgatgcttccggaacatcagggggtaacagaaagtttcgaggaaacagaggtggccgtcagggccgtggatcttcattccaatcttatcctgagtgtccgaaatgcaagaaacaccatcagggtgaatgtcgggccaagacttgtttgcaatgtggcatggtgggccactt

SEQ ID NO: 349141 - DNA, 1221 bp, Cannabis indica
ttctcccggaacttagcaagagcctcttcaggctggggatagaagtcaagcttgatactctggccatttgactgccaggccatgtagacgccgtcatcaaagcgcttggcgcaatgcttgcatgagatgggggtcagaagctcatctcttttggccttcttcaaggcctgatctctgaagtccctcagctccttcacctccacggtcaggttggccgtagactacaagtctgcctggtgcaactcctctaaggacttcaccttggcagccatctcgtccatagcttccctggcctcccgaagctcacgtctggtcgtggctaaggcctcgtcctccaccttcagcgcctcctggtgcctcgcctccacctcagcctccctctgcttggcctcctctcggaacttcgcctctgcaagggcctccctttcttgagcctgctcttggaatgcctgcctttcagcagataagtcccgcaggatcctcacagcctcgtctatgcccccgaattcagacatgacgaagccatgatcaattaaggtcttagaaaggcggccggtctcggcaataatctgaaaaaagagacaagagtgagatcagatgccttagacaaaatatcaaaggagggaatagattacaaacactcaccgaggccatggcagagctaatatcttggacctggtaaatagagttcagagaggcgcaagcagcatatcttttaggcatgaattgagtcaggtgggaaacaaactggctggtcatctccgaggcaaagggagctaaggttggcctgataaagcggttaaaccagtccgtcaccagatccatgttcaggtcccacggattccgaaaggcgtcctcgtgaagagtgttctgctgctcctcccacaaaatctccttcaaggcctccacctcagcatgcccccgactgtactcgtcaagggcgtagttgtgtttggccactcgaagattttgcctctcctcgtccgcgggaaccgctatcaacactatgccgtgcggcacagtgtattcctccgcttcggaaggaattccagaatcattgctcggcgccggagtgtccccccttcgggtccgcttagaaggttcagcctccaccatcttgccctttcgcttacgctcaagggcggccgcgtctgccacctctacttcctcgacttcctcctcgtttatcaagacgatcgcgcctgaaggggcattggagga

SEQ ID NO: 349142 - DNA, 1101 bp, Cannabis indica
attataggtttaatatataagttctattaaatctcaaacatatagttgttcaaaattatagtgatgtcatcacagtagaaaataattgtgattatatgcttcaaattattttgtctcacgatttataagtgcactgaatttacgctgacgcgataatcatcgataaggtttacttacacttagctgagtggaatgtcttttctaaggtattagtaaagtaaactaggatcacgatgtgtcatctatatatcacactggaccgatattgacagtggaaaaggtttcataaacttactattatatctttgctaagtcaatatcacttagttgatcatagatcatttgatctcaatcctgagatggttaagctctagctcaaatatattgcctgcattttttgacttgttcattaccaacttaccatagaaccgtctcaatacttacatcttgggatctcgatatggacatctatagcttctatgtttattagaagtgaaacaatgatttcttagagcttggcttaacgcattaaatgatagagcttccatttcgataattatactagtttcatgaaatatcatttgcaagtagttaaatattttaaggataaaatacattgaaggataaaatggtaattttgtatccctactcgatgtagaccatttatagaggatcaatgattgttgtgattgaaataatagatatgttataacgtatatattcttggagatttccatgtaagcaggagtgcaattctaaatctatagtggaattaggaggaattaataagttaggcaatttactcggtaaatatcaagatctgattattaagagcttgattacatagtcctatgttccctacattttttgagataatattatcttatagactcaactaattaatttatcaagtcaattagaatttgaaaatagactgtcttatttgagaattttcaccaagtttggataattttaagaagaaaagagatataagagtttatttattgactaatacactttgtgagtctaattaataaatatattcaaattgtattttatttgacaattatttataattattaaaataaaattagtatttaa

SEQ ID NO: 349143 - DNA, 557 bp, Cannabis indica
ttaaataacttagatatttttgtaaaaatttaaaaaatgcttaatttaaggtattttatcatttattttgaaaaattatcatttatttagtattttattcttaaaataataattacttagccatatctattttaaaattattttattttattatttttattttattaaattataagattagaaaatgatattgaaaatatctatctggttatttttaaatcatttatcttattagatatttaatttaatttgacaaaataattcaaataaacctagatattttaaaattagtttgaattttaaatttcgaagagatattttaggttgttttaacaaccctaaatttttaaaatttaattggttagttaaatgataatttaattatataagcataaatatctcaacttcacatattattacatggattgtttgtttttttaaattgattatttaaaaactctttctaacaaattattatttatttcatctaaattgctatgattaacttgttgatagatctaatgatatgattttaatcatagtccaattgtcaatag

SEQ ID NO: 349144 - DNA, 926 bp, Cannabis indica
aagccttcatggatttccttgatgatcttgtttgcttctgcaggtaatacacacggaaggagaggcattggatagccccttctatacaatttgccctctactattgtgtaccgaggcattgaatacaggagtttttgtgcctcgtttttgtcaattggaaattgtccgttgagtagatagttgattatgggtgtcatccatgtgggcgagctatctatcatctcgacatcttccttttcatatatacttggctcgtttagcatttccaccagaaccaagtttagttcatctaaattattctgtgaggccagttttgctaaggtatcggcgttagagttttgttctcttgggatttgatcgattttgaaataattgaaattttccaagttcttccaaactttctctagatatttggccatcttcaagcccttagcctagtattcccgagaacttgatttactatcagttgtgaatcactatggcatatgagatttttgaccttcaacgcttcagctatcctcaaaccagcaatcaatactcagcctctttgtttgacgcgtcgaattgaaatctcaaggcataatcaaacttaaagccttctggtgaaattaatatcacccctgcacccgagcccttcttaatggatgcaccatccacaaataatttccaagtattcacgtctcgctgaacatgcatattttcctttgtagttattctttctattaggaaattttccaaggcttggcccttgatggatgttcgtgggtgataagttatgtcaaactgccccagttcaattgaccattttatcaatcttccagaagcatctggttttcataaaacttgtctcaggggttgatcagttaacacctttattggatgtgcctgaaagtaaggtcgtagcttgtgagatgcgtggattaggc

SEQ ID NO: 349145 - DNA, 765 bp, Cannabis indica
ataatgacaactgttttaaaattatatatatgataaattatctataaatttatcaattgttacattttttttaattctaattaagttttttcaaaagatatagtattttaaaaactaactttataataatatatattttaataactaattaattaagaattattatatattaagttcaaatcatttataatattaattaatttttcttattaaaaggaaaaagtaaaagtttttagttgaatagttactcattttattaatatatatttatatagaatattaaaatttgaacttttatataattttacgacttaattattattaaactaaatacaactgcacgcgaagtgcgatttattttctaattaattaataattttatattcatttattgttaaactatatatgtgtatatatatatttatatatatatatatatatattgaaaataagaacaatttaatgttgaagaagttaaacctcaaatacccaaagggtaaaaaaaaatatacataaaatattttcaatagtgcaatatatgcaccctcattcaaactctatcacattaataggccactaaatcactaacatcaacttatgacaaagagaccaataccatactattaaagataaatgataaaaacttcacacaaaaagataaactaactaaactcataataacgagacttgttaaaaaaataaaaaatacaaagaaacaaaaaaataaaaataacatagcagatcctattagattaagtggttagg

SEQ ID NO: 349146 - DNA, 981 bp, Cannabis indica
gctcaacatcagcacggggctgagaagtctcctccaccatcctaacttgaacccttgttgccactcttaccacgtgagggtcatatggatgtgtgctactgagggtctgtttcgttttggccatacatacgaagtaaatgcgagacatacgcaactgtcacctctcctattatccacccagtgctacctggatggaagaaataaggggaggtgagcaacctgacaaagctacaaacacatttaagtcaacggtatccaaaggtaccttccaggtaaaatgtaatataccaagtcatcgcttgaattttagtgcaactttagcctttcctgacgaaagctaaagtctgacacataaaattcaacatgactctcgcatgcacataatttttctgtgtgggaaagataactttgggtttgatacgtcttcaaccctcattctaaaagaaaaggactggttgcagtctgtcacacgcctagtgaagtttcaccatttggtcttctaaagcgaagtcatctcttgagttttagtgcaacttctgcctttctttgcaaaagccgaagtctgtcacataaaattaaacatgactctcgcatgcacgtaatttttccgtgtgagaaaggtcgatgggggttcgatacctccttaaccctccttctcaaaagagaaggattatttgaagtctgtcacacgcctagtgatgtttcaccctttggtcttttaaagcgaagtttttgcttaaattttaatgcaactttagccttttctcatggaatcagaagtttctgcacctaaaattcaacctacctctcgcgtggacgaagtttcatcgtgcatgaaagaccactggggtttcgatatgtcttcaaccctccttcccagaaaagaatgactacttgaagtctgtcacatgcccagtgatgtttctgttggaaattattttaccaggatctatttactatcatgtatgttggattaacaac

SEQ ID NO: 349147 - DNA, 953 bp, Cannabis indica
tcaactatgatataccgtgcaactttttctcttcatcttccgagctttgttcctgtcatttggaagttctctagtaatgagataagctcctataggtgtcatccagtttggtgttgtgtctatcattttgatttcttctgcacaattgatgctgggttcttctaagaattagattgggactaggttggccttatctgttattgtgctgctcgcgagccatgctagggcatcaacaattgcattttcttctcttggaatctgactaacggtgtaacccttaaattgtgcaagcaagtcttgtatcttgcttagataggccatcattttctctccctgagccgcgtactctcccgagacataatttactaccaactgcgaatcactactaacctcaatggacttggcatgcacctcccgagcaagttttagtcaagctatgagttcttcatactctacttcattgttggaggccttgaacccaaatttgatcgctccgtgcaggtgttgcccccaagtgtaacgagggcaattcctgcactagaaagttggtttgtagatgacctgtccacatgtaatttccaagtaggtctgtcttcattttttttctagtaggaactcttgcactggctccaagttttcccttatgttactttcttctttgcttgtgcactgaactacaaagtttgccaaggcctctcctttaactgctgtacggggttgaaagattatttcttattgacctaactctattgcccatttaggtaatcgcccagaggcattaggcctttgtaataattggtgtaatgattggtcggtgtatacccgaatagggtgagcttagaaatagggccttaactttcttattgctaagattaggcagtaagtgagattttctattaaaggataccaaccttcagctttaatcagtcatttgctgatatagtagactggat

SEQ ID NO: 349148 - DNA, 835 bp, Cannabis indica
cacctgaattcagaatcgaggtaagattagtataacagaatacatatgtatttacatatttagcgtccatgttaggaagcctgttagattacatcggtacgactagagtatgactagcgtaccgagtataggctgatattatggtcgatagtacagtactacttgatagtatcaaatcggtatggttagagtatgactgacataccgagtataggctcatacagtaacacatcggtatggttagagtatgactagcgtaccgagtataggcggttactatgtcaaaagtacagtcgtacgaacattcgagactcagtaccgtgtgggacatgggggttaaggttgtggtcaggggtatgggcatctggtcataacccgggatgtatgtatgttatatgatttatgtttttcttactgagtttgttgactcacagtgctatgtttatgtgtaggtaagggcaaggttaaggctgaggaaccgtgaggacgagcagatgaagattgtacatgtcaggatggttaggcctggagtgtacgatcctcgggacatcagtgtttcggctattagtcgttgggcgacaaatattttgaatatgaatagcatacttttgaaaagtattttgtaaatgggatcccaaattattttgtttgtaatagtataagtatttaattaagtaagaaaattttaattaaccacaatttttattaacctcgttgattagcaacgagctgcacagtatgtttaaaatcacgttaacacgcctatgctagttagggtgttacaatatgcctatatccactgacagtataagcatctcattcccagatggatgta

SEQ ID NO: 349149 - DNA, 757 bp, Cannabis indica
ggtaccattttttttttaaaaaacaattgattttaaatgttcaattttgctagatttttgtggattacttgattacttgtgatttatctttgttcatgtacattctgtggattacttgattacttgattctgtggattgtttatggcgaaattatatgtatgtacagggttttcgatggtttatcgataatttatcgatatgatatcgatggacttatcattgtttatgtgaactttgactatgtgttgttaatgtatatcgataggatgtcgtagggtgtgtcgataggttgtcgacacaatagttttggtgctttatgtgacctttaatgtcgaaaatttgtcgacggtatgttgacatccaatgtcgacacaatgtcgacaatgatttgttatagctaagttgataatgtcgacttcatgtcaacatgatgtcgaccttgtgtcgacacaatgtcgacaatgagctgtccacatagctaagttgataatgtcgacgtcatgtcgacatgatgtcaaccttgtgtcgatattgttgatttgcacaaattatgatcctttttcttggaatatcgacaacatgtcgacaatatttcgatatgttgtcgaccaaattatgttgttgtttactgtttgataatgtcgatagaatatcgacatgatgtcaatgtgatgtcgaccattcttaaattttttgacagtaacatttatttgttatttattttttcagatggctcccagactcataattccagca

SEQ ID NO: 349150 - DNA, 683 bp, Cannabis indica
agtgagttatggttgttttactgtaggcagttcatgacttagcgcccaagttgacatccagcgcccaagttgacatcccaacgcctatgttgacatatgacatcaactggatgttgggtaagtgtataaacgtacaagggatgtcctttaagatgcctaagtgatagtctgacactagttagtccatttatatgctctggcgaagctgatcactgattttcagagatgtcgctgttttgcagaattgagagactggaaactcttcatttctgggtgtattgggaataagaaatgaaaagttgtgaatgtgattcctttgacttcatatatcattgtaattatgaaaaactagacggatggtcgaaacgacatcaaatttggataagcagaacccaacgcaccaggcctgttgtcaacttgggcattgggctatttctctcgagctcccgggatttcatttttgatactttcaaggcttttgaacttgaggaagatgtctcctaccctatttttgaccattcctacttcaatggtttcatcagagttgacatttaagcaattgaaggtagtgtcctaggttgatagtcaacctgggcactgggcccaaccctaggtcaacctaggcactgggcattatttccaggttctcaagattatggttttctccctgagtttacttgaat

SEQ ID NO: 349151 - DNA, 675 bp, Cannabis indica
taaggatgtgtgttccgctgacccacaaatggttgatgttccagatcgaacccaatagtagttaaggctaacgatctaatagaggcattggaaggaatgtgagcatgactaagacgatttgttgaagagttttcacaggctcagcgcaatagatcaccaacactagtagtggaacttgaagcacataatgaaatgtaccaatagccaactaagtatcgatgcatagaattgcacctgtctacaaatggttaaagatgaagtctctacacctagttatgaaaggaagcccaacctatagggagtagggaatgatttaagatagtggatgctatactagactagatagggtattttatgaaactcacttattaagaaagatgaaagaatagacctataaggagcaagtactgtcttgatggatattctatggatacacacccctaagttagatggtaagaagtatgaatattgtatatgaagactttagagaaaagtctattatacaaattagtccaaagaggactatgccatcacgtagaaaggagtgtagcgtactgaacagaatctagaataagaagttagaaagaaacctgatataatttttttaaagtaatgacttatgaaggtatcttgaacaccaagagataagtagagcatcaacaaatattagattac

SEQ ID NO: 349152 - DNA, 962 bp, Cannabis indica
acctatagaaggtgctaggtaccactggtgcccaataacaatgctaataaaactaggcaatataatacacaaactttaatcatgttccctaaagacactctttaattgaaataaggagtgaaatttgaaaaaataaactacaactatataaaaaaatgattctttataataaaaaataaataaagtgttctagaatatctctaatggtaatttctatatttatctaaattttagctaaaatagttaaaaaaaactaaaataaaaagttattttattatttttgctctaaacatgctccctactttagttaatattttattattttaataatattttataatttaaatatattaaacataaattaatttgactaaacaataaaaaatgtagtaatatttttgattaaactaatattaaaaaaaatttagcaaaaaaaaaaaaaaaataagctccctatatttagggagcttcttatccattctattatagagagtcattttttttcatggttagagtttatttttttttaagtactcactctcaattttagttgaagagtatgtttagagagcatggttgaagatgctatgttacgagctccctaatttttttaatagtattttaatcaaaaatattattatttttctattattttataaattaatttatatttgaaattttaaattataaaaattattaaattatttaaatactaattatagtaaagagcatacttagagcaacaacaataaaaatgactatttattttgactttttagctattttagctaaaaaaaatatataaagtatcataggagatgctcttatagttagttagaacatattgatatcacagagtacacatcactatgaggtgatgcactataaatagttaggacatttatggaaagtggtgatataattagaggtaattagacattttggtatatttgattgacata

SEQ ID NO: 349153 - DNA, 552 bp, Cannabis indica
tagtatttgttgaaacaaacactttcttatcttaatgaccatgtgatggtccacccctaatcacttagaatagctatcaaacatgcaaaccttagttaacagttctagctttcgtaaggtcacgatcaggacatccgtgaatctaataatggtttaaattaagtatacaaccattccatcattcagaaattttcctatcactaaggtagttcccttgaaggacttaggcctttgctagtaactaatcataacctttcactatcatcaatatgcaaattgaatttctggggaagtaagtttgagtataattcaaaattcaacttaatgatctttgaactgcatatctaccaaatatttctctacccctatcagttcgcaagatctttaaccacttaccttaatgtttttcaacattgctagaaattcatgaaatttctcaaacattttaaatttcttttcataaggtaaaatctagagtgatggtcttaagaatataacaaaaactcatatcatccacaaaatgtacatccatattcgcatatagattacttt

SEQ ID NO: 349154 - DNA, 619 bp, Cannabis indica
gatcaagaaaaagggaagaatgattttagggtttaaaattttttaatgaatagttttttttaatttttttttttttggaaagattttaacattcgatttttattttagtggtgagtatacttattaaaaaataaattaataaataaagaaaattaaagatatatattttggtcattttataaaaaattaaatttaactatatatttttgaagtgttattaaagttttatggggtgcaaatataatttccggtttagatcttatattaactaactaatttaggttaactattttcttttttttttttgtcaaaaaaaaactaattttaactagggtttaagtcttatctcatgtatcgagaaagaaatagtattctcatagataatatagggttaagtaaaaaattatccttaatagatagattaattaggtaattatttatttttaaatttttttagcaaaataaataaaatataataaattagataataaaaattataatattacatttatttcatatcaatttttttatttttgaataataataataatatgttatataaatttgctagtattgcatattattgcctaaaatttcttccaaaatacgtggtagttca

SEQ ID NO: 349155 - DNA, 541 bp, Cannabis indica
gggcgtggccccgtggactagtaacaattaatctgaaaggattgttgaaatcacgtagaaaaaccttgtgtgttttttctttttctacactgtttctttttctcttttggagttacagagttgtcttttgtagctacacaaaaactgttttagtaccagattcattattccgtatttaattaagtattaatataattaaataataaaattgagaatattaaaatacgaaattgacacaaagtgctttttctgccaggccgaagaagagactttgcagtacttgttctttgattgccccttctcgtcaaactgcttaaggaaaataaaacattggctttcttggaggatgacttccaattctttgcatcgaatagtaaggtggatacgaaaaagcgaaggttagcaaggttaaaaacactacaaaaaactgctacttttagtgataactttttagtcacaacataatttttttgtaactaaatctgacttttagaaaaaattatctgtgactaaaacatagcatttagacacatgttgtcac

SEQ ID NO: 349156 - DNA, 668 bp, Cannabis indica
aatgtatatatttgtataaaataacaccatgttttttagcataaaatgtcaaattttccttatctaatgatctcaactatattcattgttagatcgttttattcatttgtagcttttataacatgactgaaacatataaacaaagatataatggataagaacaataaaaatctttgcattgaccgactttattaccattggtattcctcttataataatgactaaattagagtatacagatctttacccccttccaatgccactttacaattgcatgtccacctcatcttttatgtgtcaggatatagacaagaaatagacttgaacttgtgagcaatattggtaatagtaagattttaaaaaagggtaaattggtcatcaactatcacaccaataaaccatatttataatagtaagatattctttcatttttacggtgacacgaaaaaaaacattacttctttttataccaagtactgtcttttgtaattatcgggtgccctcttgggtgtctattagtttttttctttttaaccacctttgccttttaactgtaatctttaggggtgctcatccaatccaatccgcactattttgctcatagtgcatccgatctgcactaagtgcggatttcattttttggatccaatccaatccgcacaatagct

SEQ ID NO: 349157 - DNA, 730 bp, Cannabis indica
caatatgaaattactttctaaccacgaagagcaatcaaaggccaagccttagcagattttgtgctagaaagcacaggcaaggaagaaagcataccagaaagcaaccccgagccggtacaaacacctcaaccaagtaatagtgaagaaaagccgacttggaaactacacgtagacgggtcggctacagatcaactatctggtgcaggaatttcccttgtcgcctgggggacaacctgcacgctgcagtcaattttggattcaaagcatctaataacgaagccgagtatcaagctctaatcgctggcgtaaaattagcacgggagatgaaagccaaacacatttaaatctgtagtgattcacaggttgtggttaatcatgtatctgaagaatatgaagttcggggagaaaagatgatagcatatctgagcaaaatacatgactttctcacacaattaaaaggatacggtctcataaaaattccaagggaagaaaacacaactgtggatgcgttagctcgattggcaagcagtaatgtatgggataaggcgaacttggttcctatccagttcctcgaagagcctagaatcactggcacggaagaaatcaaaataattgatacttccctaaactggatgacatcgatagccgcctacctcgacactggggagctcccatataatcgaaatgaagctcaaaagatgagaagaaaggttgcacggtatatcatagt

SEQ ID NO: 349158 - DNA, 537 bp, Cannabis indica
aaaccacaccaaaacttccagacctgctattttgaccctaaggaacatttctaaagcaacaccaagcttcatgcataaaatcacaattcaccattaaagctccaagctttgagttccaaactcaaacttggttaaacaccactaacatgcatccaaacctggtttaaactactcaaatatgcatataataacctctgaaaacaacagcaggcatcaacaacaagtgcagcaacagatttcatcaattccctttgaaaccatagcttttgaatcaaaattcccaaacttgaacaagggtaactagcatgcattaaaacctatctaatctcacttaattaaacattttaatcacagaaaacaacaacaacaacaactaacagcagaaacaataccaaaaaccacacatgcaacaatcatcttttcataattttcaacaaatttaaagaggaaaagattaagagctaacctagcttggttagaacaccaaaaagagcttgaattcacaaagaaaaatccaagaatccttgttgctcaagg

SEQ ID NO: 349159 - DNA, 595 bp, Cannabis indica
aagggtgtaacggtaattttgtccctatgcaatgtaaattatctatagaggatcattgattattgggattataacaatggataattaatagcgtatctatatcgtgggacatatagagcgttctatgtaactgagagtgcaattccaagttctatagtagttaaacgaggaattaataagttagagaatttacttggtaaattctagatctgcttattgggagctcggttatacaggcacatggtccccatactagttgagacaaactgcttgtaagactcagttaattgattttagttaatcaattttaattctaaaattagactaggacaattttggccccaatcgagtccccaaggtcgcaaaactcaaaaatatttttattccactaaaaacttgtattatattcacacatgctatatgaatgttcgtaattaataaattatgcttatttatccacttataacaaaaattaaaatttatgctaaagtagattcgtaagaccataatctcacttattacctgattagcccataatatatataaactctaattacttaccattagacttatcgggatattactctctctctct

SEQ ID NO: 349160 - DNA, 536 bp, Cannabis indica
ctaggtccaatttcagttatgattcaaagtccaagtcctagttccagtcccggtcaacttctttttttggttccaatttagggtcacagggtacgggttcgggtgaacttttgggtttgggactgggttcaggttcgggtgtgggttcgggtcctcgttagggttctggtcttgggttggttcccaaatccagacaccgactacaggtattgtccaagtcttgggtcaaaatgttgatcccaatttcgggtatgagtcttgttccatttctggtgccgggtcacgagctaggtcctaggttcaagtttgggtctttgtcgggtaataggtccatgtcctagttctgtttccaaggtccctatccttattctgggtccaggtcccagttattgtgtgggtttgggtcccggtctaggttcgggttcaagtcctagtctcggttcgggtttaggtctctgtcctggtttggatttaggctcgggtttggatttagatcctggtcctggtcctggtcctagtcctagttcggttctagt

SEQ ID NO: 349161 - DNA, 455 bp, Cannabis indica
tttttacatttaaagaatttttttacattaatttttatggttttctttagaaacaatgcgaaaacaataagaaaactacataaaagtaatagaaaaatataacatctaaataacatcaaaataacaacaaaaaatagcatatatataacaaaaatcaacaacaaattaacaagagtacaatataaaaagaccttattttctgaaattaaaagggaaatttgattttttatccttacattaaggggaaattttttccttaaacctaaaatatcctatataggtaaaataggacaatatttacttaattctcacattaccccctcattcaagtctgactcatcacactacaagaattcccaccaatagcggcgggcctattagcggcggagctcctccgccgctaataatggggctattagcggcggagcccctgcttggccgctattggggggcag

SEQ ID NO: 349162 - DNA, 491 bp, Cannabis indica
taaagaaataaaaatagaagtaaaaatcaaaacaaataaagtaaagtgagtatacaatgtaattttctctaaaaacttacatgaagttctgttttttaataataaagggaccaaattcatagccaatatatgtatatgtatatctttgttgtttttggctttatatctattagatatttctttctaacaattcaatgatgaaaatgacatgttgatagtatttaatgaaaaaattaaatctgcagtgctacttattactacccaattcaattaaagcctctctctttctctctatctcattcaccattattgtttgtgagagatttgttcatcttttgacatgggaggtgttaaagagattcaactcagcatcattagaggtaagttttctttctttcaactttcaactaattaagtgaaatggttactagtaaccaattttttggtactaaagaactcaattgaatgattcttttcataaataccattta

SEQ ID NO: 349163 - DNA, 771 bp, Cannabis indica
ttttatttttaaggtatattctgttaaaccaagaaatgccgttagataggcacttttaatatataaagataataaaaaatatatattttaatcgtatttttactggatttttttattgaatctgtaatattttgttattttgtatgtttattttgatgatattttattctatattagtacttaacagtgttattgttttagttattttaaatttttagttgcattacacttttatggagtattaaatttaaataaatagtgatatttaatttttacgtattttttcatattttttaaattaatattaaaaattaaatgtattataaaaaatctaattaaaaaattgattcaaattagattggattttaaagtctaattgtataatggttttctaaatttaattaaattgaatggaaaaaatatattagattgaatcaaatattcaattcatacaccatatatattttaggataattctacaatgcacctccttaaaatggatatattgatgcacccctatctgttttagcatctgaaataattttttagtcaaattttttctcatggtcatgtacgttatagttatttaaaatatcttgcaaaattttaaaaaatttggaaaagtttaacacgccgaaaaatatgttcaaacagtgtattgcacgtgtgactattttattttatacgcgtgtaaaatcgactgtttgaacattgttttctatattgtaaattatttcgaatttctcaaaattttgtaggatatcttaaaaa

SEQ ID NO: 349164 - DNA, 704 bp, Cannabis indica
taaagcaagtaaaacaataaaatcaacaccaagatatatattggttcaagtcctatagatcgatgtactctatgactctactccagttctggaacaccaccaaattctctttattgattgagcaagaacaagggtacaatacaatcgagatcgattatatgttgaattctctcaaagtgtttcaactcacattcttacccaagaatcatcttcatctacagaagattcttcatacaaaatctaaacccaatctctctctattcttagtacctcgttctctccacctctcaatctttttcctctctcaatctcgaaaaatcgcctctcgaaactcgtgtgaaccctgcattcataaaatgataagtgttggtggtatttataggctcgggataaagatcctaagctcggtggctgcaattgataaattgttaagttagttacgccataactaacttaacaacttcctcgtaacagaatctccacgtcagcacaagacagagtgcttctggatgagacataggttcccgggacaaaggactgaagcgtatgttgaagggacttctcgaataggaagcgagctagcaggagtcgactatccgaaactccctttcaggaggaagattagccatccgaaatttcttttcggagtggacatgatagtcatccgggaactccctttcggatgacaactatcattccacgag

SEQ ID NO: 349165 - DNA, 1655 bp, Cannabis indica
gttaagtagatatttgactatgggtgtcatccatgttggtgaggcgtctatcatctcaacttcttccttttcgcatatacgtgggtcactcaaaacttcaactggtactagatttaacttatcgagttcattttgcgaggccaattttgccaatgcatgggcatttaagttatgttctcttgaatttgttcaatcttgaaataatcaaacttttccaagttcttccgaaccttctttaaatattttgccatctttaatcctttcacctggtattgaactagaacttgactcaaaatcaattgcgagtcactataacatataagattcttaacttttaagggttcggctattctcaagccagctaacaaagcctcatattatgcttcgttatttgaagtatcaaattggaatcttaatgtgcattgaaatttgaagttaacaagcgacatcattatcactcctgccccgagtcattctcatgcgaagctccatccacatataattttcaaatttcaatatcacgcttgatgagtggatcttcttttgagattatccctttaattagaaaatcagccaaagcttggcctttgattgatattctcaggtgataggttgtcccaactcgattgaccattttatcaatcatcctgaagcattaggttttgataaaacttgtcttaatggctgatcagttaggacttttatgggatgttcctcgaaataaggttgtagtttacgagattgttgttaactaaaaataataagcctctatgtgataaatagatcgcaataatagtaaataacaattaaagaactccagggattttacgtgattttgcagttaaatttgcatactccacgagtctatcttattatgatatttttctgaataatagatacaattaacaattgatgatcattttctctccaaaacattcatcctttttgtgtggaatctgcccctatttataggaatataggttggtagttatttacacttgagatcaatttaaaatgtaaccgttcatgaaacgtggacaattctcacgtttcatataaatgcatgtgggataatatttgataactgcttaactgctttttattcttatccttatagatggttaacgctgatgtggacaattgtatcttgcttaacttcgagttgttatccttgtctatcataatgtagaaagaatgctaagtgttagcagatggttcgcctcatcaagtttctttagctagaattgcgaggtggctgtctcactattcataacctgaggttgctttgtatgattgtattcactattttgaattaataaattatcttctttggctgtgtaccctgagacaggtgtgtgtctcgtcaatataagtttcaatagtcctttatccttgtatcgcttaggactatgtagtcaacgaattatggatattttctattaatcccttattaacgagttattcttttttgtattaaatgatataatttcattatatcaggtggttaatattccattgcaagacacgtgttactttctgaagtgtagctgaatttcggatataataataatatatattgtggagaatttttagagggtgtgctttttaattaatcaattaaataatgaatgaataattataaatttaataaaaat

SEQ ID NO: 349166 - DNA, 558 bp, Cannabis indica
ggtttggaccagtaatctcttgtctcagtgattggaagccagggagaccgagcccagccacttagactgagcactcatccattgtcgaagagtggtatgagccagccaaataacatcagcagcactacagcttctaccattccaaagcatatcattctgagccttccaaattgcccaaccaaccatgacgacttcttccaccaacctcatattgcccactgccaccacttctataaaccaatcaaaaaaaattatttgttgtggaatggcctacacctaacgcagatcggagccaacataaatgagcaaatggacattgaaccaaaacacgaaaaattgactcgtccccatagctgcacaacacacaatgtaactccaccggaacatgtttactataaagttgagtacgcgtaggcaaacaacctgaaagagctttctaagcaaaaggtaaaaccttagaaggggctttaatcttccataacatcttcccaacatcatcctccatagaggagttccaactaccattgattgactgtagatgattataggaacttttga

SEQ ID NO: 349167 - DNA, 557 bp, Cannabis indica
ttgtctttcttctcgttttcttcccccaaggtcgtcatcaactaatgatcgacttttctatgttgttactctaagcgatagcaatcgcgagccagcatctggtcaccacgcactactcccacgccgtctggtgtttggaatttcaaggataagtgtttgatcgaactgactgcccctagttcaattagtgctggacgacccaacaatatgttgtaagccgagggcaggtcaacagctaagaaatcttgcataacagtagcagttaaaggtgcctcgcctatggttaatgcaaactcaattataccaaggctagcgatgctgtctccggtgactccacaaaggtttactatacaaggccttaacttggctttttcgagcctcattttctttagagtttccttataaaggatatttaccgagctcccattgtttattaacactctcttgatcctctcattggcgaattgaatggttatcaccagtggatcgaggagaggatacctcacattttttttcatcctcctttgtgaatacaatggctgttggaaattatttta

SEQ ID NO: 349168 - DNA, 600 bp, Cannabis indica
gagataactagaatcacacttttaaatttagcataaaacttgtggtctcgtaactgctgtaatactgatatgagatgcaactcatgttcctctttttattcagaataaacaaatatgtaatcaatagacacaatcacacatctgttcaggtaatcctggaacatctgattcaaataatccatatcaaatataatacgcagccttagcccgtcattcatgctgatggtgttcttacattttggacattctagatatgatctaaaagaggatccgtgaccttgatggccacctccgtttccccaaaacttcctaataatccctgatgttctagaagcttttgccttctgtttgtgatcagggttaccaccgtcggtccccttaccgatattaccactaacaggaggattcgatgccatggcggcatccttttcaatctgctcctttaacatgttgctcagcctcctcaacaattaaggctagctctactactttcttgtacaaagtgtcatgagtagttgtaatcatcaagtcccgactgtttgtggcattcaatcctcgcagcaatgttataaatttttcctcaaacagactcttgaactc

SEQ ID NO: 349169 - DNA, 779 bp, Cannabis indica
gggagcaaggcctggctctgattatatcctggagtagcggagaattgtgtaccgctcatttgtggagtaagcggaggtagggttcccgggagttgggctccaggcacgtaccctgccactccggtcagatagtatcctccataagccactatttgggcttcttctaagttgatgtacttctggactctcttctggaaatcttgaaggtttgcggctctttcctactgtaactcattccagaatggagtacatgtacggatcccagcttaaaggagtgcaaactattgtccgtcttcaactttcttagtcttcgaggcttcttccttgaacctctttatgaaatttttcaatgtctctgtgggtagttgcttgatgttagccagagcactgacttcgaggttaatttttctcacggcgacaaactgtctctggaaactaacttgcaacttgttccagcagtccacggatcctggttccaattttttgaaccattcctccgcggacccgcttaacgttagtggaaagcataggcacttggcgtcattgttgactctcatgaccgtcattactcggttgaaccgagacaactgatcgctcgggtccgtgtccccggtgtaagcttccatttcgggcatcttaaaatttttggggagttctgcctccaaaatgtgtcgcacggctcccgatcctcacagtcagaatctgttggaaattattttaccaggatcttagatctactcacagtatgttgtttaacaccctaaatatgaactttccaa

SEQ ID NO: 349170 - DNA, 501 bp, Cannabis indica
tggtctgtagggtcagtcatcaatccaagaagcagccagcgtggggtactcgtgtataagagccattagtccgtgggtgtaagggcctaatggaggcttgaaacggggatgttacagctccttatataggagagctttcacccttcaaatcccttagaaataggtaaaataagttattatttacatattatattaataaaatactaaagactaaaatacccctcaaaaatagatattttccctctattttcgtgatctgttaaagcccaatctgttgtctgccttacagtccacgtatgaagctgcgaaccaatgtcctgtcaggccaaaggctggtcggccatgcacctacaggatgcatgctggttgccatgagatgcccagaacctggctagcctatgttggctatagggccgacaaggggtggccggccaggccccttgaggtgactagtttatcactctttttatcctgcttaagtattcagacttcttgttggtt

SEQ ID NO: 349171 - DNA, 576 bp, Cannabis indica
aataattgtttaagaaataacaattattcataaacattaaattgaaattcaaaatgtttatgtggtattatctctttacatagaagaatataccataggttttgtagcaataataaaatgcaaacacatacatacatgataaacatacaaatataattggtattggcatacataagataaagaaatatgaagctcaattcataaatgcaattcattactaaaagagaaaactctattaatattctcaaaaattaaatgaattgtctgcataaaattgaaacagggaataaaatcccaaaccaatagttgaaatcaaattgttcagaaaataaaacaattaattcaaaaatttaaaaaagaagatttcgagcttcatcttcaatcttggacaatctccacccttctgtccaaccatccgactcaactcactaggataacaatccaagtttaagcagctggagctaaaataagaagaaaacaaacatggttagtagatccagaattaataacccaaggggataataattctctaaaacacatgagtttatagcatagaaagaaataccttgtttcttt

SEQ ID NO: 349172 - DNA, 616 bp, Cannabis indica
atagaatttcgggattataatcatatgcgtcatttaatttcttaagagaaaatataaaatgacataatatgatatatagaatgaccaaattgctttccattgtaagagactatcattggatgaattagcaatttgattgcgaagaattcactgacttctgcaaccaacacggagtcgtaaaaagcttctccgcggtggcaaggccgcaaacaaacggacaagcagaagcagtcaacaaaattctaaaggtcaccctgaaggaaaagctgatggcctgcaaaaacaattggcccgaagagtttccaagagtgttatgggcctaccggacgacccccagaaccacgaccggccactcgcctttctcaatggcgtacggtgttgaaacaatggtcccggtagaaatgttattcccgtcccacaggagaacgacttacgatccagctacaaaccaagctttattacaggaagcgctagatcaagttgaagaactctgggacgagtcgcaaatacgaatggcagcttatcaaaagaaggtgaccaaatattttaactccaaagttaaaaacaaaaaaatcactattggggatatggtcttaagaagagtcttcccagccac

SEQ ID NO: 349173 - DNA, 584 bp, Cannabis indica
ataaatacctaagtttaattttagcggtaataatacctaagttttaatttagaacttctgttggtacctaactgttaaatgttaattaagtaaattgccacgtgacaatctttaattagtccaaatcattaacttattattttttgaaaaaaattagtttaaatatactaataaaaaatgacacgaggataatgataatatttaacgatcaggtacctacaaagtagatatttatactgcaaattactctttgtggaaacatgtacacatagctctgctcatacttagcatggttctttataataatcgagtctgtcatgaaagctgtgttgttgttgcagtaagtagtaaccagtcctcctctacttccctagaagaagaaaattagtatatttaggtaaactcaagtagaggaagtttctcatcttcaaaatcgaatgctacattgctttagatatttgagtattaaagctataaaatgaagagtaattttacggcgaaaccctcttatgttttaatttgtatacatttaatctccttattttttttttgtggcaaaatcctcttatatttatttttcttta

SEQ ID NO: 349174 - DNA, 461 bp, Cannabis indica
tagcaaagattgcacaataattgaaaaagcactgtagcgtgccttagcattagggcgttacactataacattgaaagttgttcttgaatagagtattcttagatgaaagttctactgtatgtagtacaattatctagtttgaagaactctttagtccatttcttttggttagtggagtactctcgtcaatttcttattacaatcttttaattaatatttgtacttgaaaatgtttctgacataaacttttttaaaatattttttacaacaatatttgttattcttacaacattatccttgtaaatttttaaattattttacaatcaattaaaataaactaaaaaaaaaaaaaaacctaaattaaaatataaaccgtccaatttgttaattagaggattaaaaataaatccaacctattcaattaacgcgatcaactggaatatgtagtttttttttttttt

SEQ ID NO: 349175 - DNA, 621 bp, Cannabis indica
agtcgacttgtcctcgcagcaaatgtatatattcgactagtcttcaggacccttaaaaccatggctgctctaataccaagttgtaacgccatatcccatagagacgcgtgtgtgtgattttataaactagtttaatactaataagttaattaattattaaaatatgtgataatattaaaaatttcaccaaaataaaattctaaaaacgaacatcataacgacactaaaactgtgttctgggtatccatgttgtaaaagatttacaaaaatgctaaatacgacaacacgtcaaaatactaaatcaaaatgcatggcagatacagcccaaaaaaaactcctgccaactcggcacgcaagctggtagggtcaatatgtacattgctggagaagattgtcacctcatggatgctctagcttttctttccctttacctacaccacatagcacccgtaagtcacaaggagtcatcaagaaaggtaataaaagacaatacatggaataactaattattaattttgctattatggaatgattgaataataacatttaaaaggggataacataaccagccatacgcatggaaataaaagcaatcatatattgtattgcctaatcaggcaa

SEQ ID NO: 349176 - DNA, 463 bp, Cannabis indica
ctcatcctcctgctcaaaatattcttaagcatgttgttcggccctgactcctcccttcaacttagcctcgcacttaagttgaataagctgcttctcctgctcagaatgctcctaagcatactgcttggctcttgcacctcccttcaacttagcctcatgcttaagttgaatgagctccttctccagttcagctccctcaacccgcccagcattggacttcctcttcttctccttcatagggtgaggaaaaaatctgttggatagagcccgtactccacaaagttgtcctctaaggtcaacaaagtgatattccgagcatcatccgacagctgaccaatcttttgagctctgtccctaagagctagcgtgaggggtggacggtattatatagggatctactgaaaccaagtataagtggtgcccatgccttccaccatgtaatgctctgttggaaattatttta

SEQ ID NO: 349177 - DNA, 1498 bp, Cannabis indica
tatgtgactacctgacacacatttccttactgagtttagtagctcacccttattaaattaccatgtgcagaccaaagtaactaaaagtctagaatgccggtggcgagtggaactttggacgcttgtgtgtgtgaactcgctgagggccatataactgcgggcggtctagggcgctctgtttatttatttatgttattaaacttatgtcgcaattattttagttattaattattatgtttttttttacgaaaactggccagttgtgaacattttcaagtattaaataaaaatgcgacattacgattttccgcgtttaacgcttgtaaataaaattaatatttttataaaagtacgggcgttacaaaaatattatttctgatctttattaataagtaaatctgattatattgaaataggttttatttagggcacaaaacccaacaagatacactgttaattatccattgttataatcccaatttgatcaatgatcctctaatagatgatctacataatatagggcacaaaacccaacaattactactccagaatagacacaacccgccacttctaccgacttaactttccaacaaagcccaatctaacccgcatcacctcaagaaccaaatcagtcaacattgtttccgacaaaaaaacaacgtctggcgaaaactctttgatatgggaactaagaatttggaacgtctgatcattcccaagaccctgaacgttccaagccaagcaattcataatgctcggcggccctgatcctcagggtccaccgaatctacaccgaccacaacatctctcccaaccacagcaggtaaaagagaagacattaactataacgccctaatggtaaggcacgctacagtgctttctcaatcacagtgcaatctttgctaatcaaagaatttttctcgataatcgtgtcaaattaaaacttttatattaattaataaactttataatgtaataaaatatttacaagtatcgggatcccattttcaaacttttaaaagttaatattccaaaatacacaaattacaggtcgcacagcgactaccaaaatacaatccccagatgtccaaagaccgaacactccaggtcgcgctgctttgacatgtacaatcccacccgagctcaggttcgctccttttcagccttcacctttcctttacctacacaaggaagcagaactgtgagtcgacagactcagtaagaaatgcatataacatatcatataatttccgacctgtaattaggcgcccatacacctatttatagggcttaacagatgagcatgaacgttcaatactagggtacaaccactataccacatacacaacgtatctcactgtacgagtgttggtaggttttgttttgtaccctgagtaccactgagtgatataccccacaccttagcactctcccgtactcgtgttggtatcactgtatcgtactcacaacaacactcactataccaatgcactttgta

SEQ ID NO: 349178 - DNA, 2140 bp, Cannabis indica
actttgactttgactttcgggttgacttttgacttttagcttttgaagtcctcttttggatagggtcttgaattcttgatctcttgataaaacttttgatcttatgaagtatgaagtagttgatatacttgttgaatccacttctttgattatgtttgactttaccgagcaaatattgatactttgtgaatttgcttgcaaaatggtcaagaaaatattagtaacaaataataatcaaatatttgtttatcttcaaaataagtgagtgattgacttttggtcaacaaccatattaggtggttgaagttctagaatcagaagcatacaaactgggaccgtatgacgaaaacatgaaactcgttatggtaccaaggtattggaatggggaacatttaagaaaatactaccagtaaaagtaccaggtcagatgtccactctaagtacaaaatctaagaacattaactcttaagtaaatggccttttaggcgaaccacacccaaaggttcggatgaaatgacaaagtactcaggtcggatgaccacctctgaaagtacaatttctttttaatgcaatttgttttgtttaaaattaagctaaagatcggtttagatcaatataataacttttatgtaagttactacggtaccaaaaatatttcgaccaataaatgaataaagatgtctatttaaattcagattgtgtcaattttattaacaagttatgaatttgccattaaaagcgtacaaaggtctgctcgaactcaaagaaccgaacatacaaaaataatacttgtgaaatggaagtgaccaagagtcaaaagtttgctcgatcacttaggggacaactatactcgtacaaagcattggtaaaaataaacaagaagcacgaaaaaacaaaacaaacacagttgcacagataattatcataacaaggaatggtattcattagaaaaatataacaaagcacagtaaacccgggattaaaggctgcccgataagctagttgtcttaaaaatgaaagcatattctaagtttaaaaacagcttggtcggtcattatatctcaaaagaaggcctatgggtcgaacaaacacatatatatatatatatataaaagaaaaaacattcagacaacaagagtgacaggctcttggtacggattgttttagtctgaaggggctggaggatcaacagtctgagcggcagggacttcagtgctctggtcgactagaactgtagaggtagctgccttggggttttcttaggccacctgagccgcacaaaaatcaagatacatgctcttggaatcaccaaggtaatcaaagtttccttcaggattgaacttccaaaaatcataaaaaaccttaagagcagctgtctcctgaacatccacctccctctcgagctcctccaccctggactgcttatctctaacctctttctcaagttcctcctccctggtctatttgttcttgacatcctatcccagtttggaaagaagagtctggagactctccctctcatctttgagaccattgacctccttagacaaggaaacattgtcagcctccagctgctcggttaaaggcatatcttgtagctctttggtcagctcctcaaccttggtgttagcagcaagaagcttcttgttcacctccccaagttcattcctcacgtccttgagctggctccgcatgtccttagagtcatttttggccaaatccacctccctctgcagtgtgttggtggtggcaaggttcttagcagtaactgatttgactcgagaataggcataagtcatcttcacattgacctgcacagcaagcgtgttaaaatcagagctacataaaagagaatgaaataaaaaagaaagatatttacctgagtagcttctttcaggactcctcctaggactagtcccaagtatagttaaatgtctgctccggacagctgatcactcacttcgggaagtgaccagatcagatagtattagaacatgtctttgcccctcttaacctccgtgcacagtgccacggttgttgaaggggtcctagcttgttcagacccgtccgagctccctcctctggaactcttggatttcaagaccttctgaactggaaggtccaccacgggtctctcctc

SEQ ID NO: 349179 - DNA, 724 bp, Cannabis indica
gaatcactttaaactaacatcacacaatccataggatcattataaaagaaaaagtagtaccaaatctttggagatgaaagatacggaggcggttttgacagatagattagcagcatttagaacgatgaatcttgttttggagagaacagtgaggtcgacggagacggagccggtgaatttgcaggagttgagattgggtttgagattgatacggtagaagaggagcctatgaaagcaaaacccttattctcatcaccacacacactctcctcttcattagcaagaatggcattcatctcctcaacggtccattgttcctttcgagcattatagcttgatctgatcgaatcaaactcagagggaatggtttccatcacaaaccacaccatgtaatcctcaccaagatccaatcccatgcccttgagcttttggtagcaacccatcagtttgtcaatgtgagatctaatgtcaactgaatcagcataattagtctgatggaacaaagtcaggcattcatttttctcatactttgagaatttctagtacttcttcttgatcacattgagaaaatcttttttaatctcagtttggggaatattatcacgaatggacccatccatgtgatatctcataagtatcagacaacaacgattggaatgctcccaatcctcataggactttctattcttttcagtggtatcattagtaggtttcggaggtgcat

SEQ ID NO: 349180 - DNA, 403 bp, Cannabis indica
ttttttttctaaattattattttgttgttttaatatggtatattccttatctgttgactttgttatgtggtatattaattaattaatatatattagtatctcttttacttaattattaagtatacaatgggttctaaatttatagtttttgttggttttttttaggacttgccatcaaattattcttaatagttaagaataataagtttttaaccactaaaagattgttacagtaataatttttactattatcttttttaagcagtagatttaaatgaatataagtaaccttgataatgcaatatttatcttattttatttttaatatttttgtcaaatgatctggaaattaaaaggttgattattttgttcatttttctaattttaatcttgattgtgtctc

SEQ ID NO: 349181 - DNA, 681 bp, Cannabis indica
tctctctctctctctcgtttttctttctttctctctctgcgtttagctcggcccgagaagaaggagagattaagggaacccatcccaaatctgactgaccccagtctagatctgaccagactcaacctagatctgagtacttccttcccagatccaacaaccacctgcaagaagaagaagaaaaaatatagtgagatgggctgggcgagaagaagaagaagaacaaaaaaagagatgagattaatgcttgtggatggtacggtggttagtatgtagtggtggtttcggtggatgttggtggtggtggttgggttcctcgatctagcattagcgtggctcacgcacggagaaagggaaagacgaaagggagcaggccatattgagagagagagcttcgaggttctaggtttgtattgcacgaagaaaggggtgtgcagttgtttcgacagtggtggtgacagtgggcagttgtgagggttggtggtggtgatggtagtcaccagttgtggttgatggtgatggtggcttcgacggggatggcggttagggaattagggcaatgagagagagagaacgagaataagagaaagaatttgttagggaatttgggtttttgttaatttttattttttttaaaattgttttttaatttaaaattttttaatttgttatatgtttttt

SEQ ID NO: 349182 - DNA, 596 bp, Cannabis indica
aacttggacttgggacccgaactaagaccaacatggaaccagactcgggacacaaactggggccaggacctagaaccgcaccccagtctcgatcccgaatcaaaactcagacttgggacctaaaccagaatcagaccgggacccgtgacagggatctagatctggactcgagatctgggaaacagggcttggaatagacccgtaataggtgtatggatgtgggactcagactaggttctgaacccggactaggacccaaactcgaacccatacctagaccccggacccgaaactagaacctgacaaggaccttgacccagacttaaaaccgaactcggacctagccccagacccaaatcgagacaggaactcgggccttgacccggacctaaatctgggacctaatctcagacacaacctctgtcatagattttgatctggatacgaactttgactcggacccagtcccagaccgggattggaacccgagacctacgatctggatagacatcttaaccaagaccaaaacaaggacccgcaccagggacccaaactcagacctggacccgaactcagacccagatcaggatccaaac

SEQ ID NO: 349183 - DNA, 1346 bp, Cannabis indica
attccaaaagctgccgaaacggcattccttcaccgtgttattcagattgaactcctcaaaccgagctatgatttttgcgaaaattcccatgcctctatatgtgacgcggccagtaaaatgctcgggtgctggaattatgagtcttggagccatctgaaaaaatagaaaataaataaataaagctgcctaaaaatttaaaaaacatgtcgacattatgtcgacataccgtcgacattatgtcgatattatcaaaagcaaacacaattcaattatgtcgacattatgtcgacataccgtcgacattatgtcgatattatcaaaagcagacacaattcaattatgtcgacaaaatatcgacatcctgtcgacattcagtcgacaatacaaacctaaattcaacatgttaataccatcgacaacatatcgacaacctgtcgatatgctgtcgacaaattcaatcagataacaattacacaacatgtcgacaacatatcgacatactgtcgacattcagtcgacaatacaacctaacaatcaacgagttaatttaatcgacataccatcgacatactgtcgacaaatcgtcgacaatatagggcagaaatacacttaaactactatgtcgacatcctatcgacatacaagcgatatcctatcgacatacaaattacagcaaaattcaaacagacacccaatctatcgacatcctatcgacatcctatcgatatgtcatcgacaactctgtaatatacacagatttcattgaaacactaacatctacaacctaaagatcacaaaagctacaaaaaatccactaatctgaacaacatgcaataattggcatccaaatctatgaaaaatatattttttcaaaaaaaaaatcttacctttgactgaatttcgtggtgtaggcgacggtttttgctcgtgggtggtgacggcagtttctcctcgtggtggcgacggcagttttgcgtcggtttgggtcgaagatcgacagacggtttcggttcgtcgattgggttcgtgggtttggttcgtggggttgggttcgtgggtggtcgacggcggcgtgggtttgttggtttcgtggtcgacgccgtgggtacgttggtctggttcgtgtgggttcgtgaagagagcgagagagagggaaagtctttgagcgagagagagggaaagtcagagagcgagagagagagggaaagtcagagagagagtgaaaattttattttaggggtattttaggaactttttcaaattagaggaatcaatttgttcaaaaaattaatgagtctaaattttgatattgagtattttattagggccaaaatatgaaatttccc

SEQ ID NO: 349184 - DNA, 443 bp, Cannabis indica
ctcaaagctaagtccaacacccaggttgacctggtgttgggcccagggcccaggttgacaatcaacctggtacgttggtttcgatcacttaaatgataaatatgatccaaaaattctctttggaatggtcaaaatgaggcaagagacctcgtcctcaagttcaagagccttggaagtatcaaaatgacatctcggaagctccaaaatgagtacccaacgtccaagttaacaaatggcctggtgcgttgggttctgcttatttgactcttattcagtttcgaacgtccttctagtttttcacactaacaagatccatgaagtcaaattcacaacttcacatttctcatttccaacatgggaaaaccactaaaaaatgaagagtttcaagtctcatttctgcagaacagcaacatctctgagaattgttaaccaactttccaaaa

SEQ ID NO: 349185 - DNA, 633 bp, Cannabis indica
atttatattaaatattaattcaatatgcacacactaattaattcaaaaaataattataattaattaggcaagattgagatattcaatttcaatcacctgacaaaataaagtgaatgtaagactattttatttatagcttagaaatacaacacacacatcatctgcaaaccatgtgggacttttgctaaaaagaaaaaagaaatcacaaaattatactaaattcactaattctaataaaatagatacaataggtgaaaaaaattataagatgccaactcacctaatactttcctttatgggctgcttcctaaatttctgacttacttgaatgcattatcacttcatcccttgagacatttttctctctctatttttttcttggtgttcttcaaactttgatgacaccaagcctccattattccatcatccttgacatacacattaccaagaagaagagaccattctctattcttgtctccattagtttattattcccaagaacattacaaccaccattcttatcaagtttatgggtattgggtctctcatgagccttttattcacaagctttgatatagttttacctagaatctccatttgtagtgttgtctacacactcttgagaacataact

SEQ ID NO: 349186 - DNA, 615 bp, Cannabis indica
gaacataactctggtgtgttagaattgattaataaaagataaaatagacgtagcctcattaccatcgagacaaacagacgtagcctcataactctgggggtgaactactataaatcttagtgtccctttttatttttgcgattttatctagccaaattgattcagcatagtcctttcattttttacgatttttttagattagttgacgaaaattgcattaacacctaactatatagacttcatcatcaaccagagacgaaacacattttgaagaaaaagaaaaagatcaacgcattattttttaccaattttatgtcataatttgttagagtatctccaatggtattctctattttttttttttggatatcagcggctaaactacctgaactttacggtttgtaacacttaactacaaaaactgaatttttggcggctaaactgtaacgtccccgcttcaagcctccattgggtccttacacccacggaatcatggctcttatacacgagtatgccactctggctgcttcatggaatgacgactgaccctacagaccaacacgagtatttccatcgtgctttgtcctcacttgcacgcttcctgggaaaacttcc

SEQ ID NO: 349187 - DNA, 519 bp, Cannabis indica
tattaaaactaatgttttacattagactcgaaaccaggacctccaacacacacccacccacctagagtcacttgagctagccttgttgatggtattttttcttattgggttgtttattggatcaaatcatatggatttaaactcaatctatctattcaaattttcttttaagagaaatctctctattccaattatttattagattttgaatagttaactgatctaatccaatcgaatcaaatcaacttgtctaatttgattaattcaataaatgtataatatttaatcctgactattcaatgctttcaatgcattaactggttgtcttaaccatagggctaaatttcactaaaagaaaaaaaataaaataaacacaatttaaaacttatttttcataattagtgataatcacaaattcgatatgtataatataatttttatgatcacataatcaacatacatcaatataattcaaaaatctaatctaacgtatataataatgctattataatttatata

SEQ ID NO: 349188 - DNA, 720 bp, Cannabis indica
atatataaaaaagtaaagcatgattacaagttcggatttgaacacgggatgttctatttaagaaaagcagactggtacgagaaaaatacagcacgaattcgagcacaacatgaaaataccggacttatggggcatgctggcttactctttaaaaatagtggcaaaacacgatacgacctttatttttttaagggttatttgcggcaaaacctcttaaagtgggcaggtttttgcaactaacctcctaatctaaaattttggtggtaaaactacctaaaccactagtccgttagcagttagccctttccatccatttttggctgttaactgccatggtggaatgttcatgtgtacacagtgtacacgtggcaaaattttattggtccacgtaaataaatattttaaaaaataaaaaaattaattattttagaaataaaaaattaaaaaatttattttctttaaaaatttaaaattaaaaattaaaaaaacaattttttttaaataaaaagaaaaccctaattctccttttctcttccgcccttcttcttcttcttcttcttcctctatctttttctcttcttcttcagccgttctccgaccacccccaggccaaaccatcctcttcttcttcagccgttctccgactcgtcaccagtctcttctctctctctctctctctctgtttttttcatctacagacctgaccaccactaccaccca

SEQ ID NO: 349189 - DNA, 570 bp, Cannabis indica
cctgattccggacacagaatctaactagcactgggacaggaacccagacctaggactgtaacaggacctaaactcaaaccaaatccatactaggacttggacctggaccaggacctatgacctgggacataaacctagactgtgacctagaccaagactgggacccggacccaaacctagacccaaaatcgatattagacccaggaccgaacaaccaaactcggacctgggacccaaaacccagactaaaactagtactgggacccgaactcgaacctgaacccaaaccgagacctagactcgaatcgggacccgagacctgaacctgaaccggaacgtaaatttagacttggatcgggacctaggacccgaacatagatgggggacccaaacctaggaattgggcccccaaactgggaccaaaacttggatcgagatttggggacccgacccagacctaaacctgaacctaagacccacctcaagacttgggatccgggactatatgcttggactcgacccgtaccccttgagttgaaactagaactgaaaccagaagcggatcgggac

SEQ ID NO: 349190 - DNA, 684 bp, Cannabis indica
aggtgtaagccaacttcataccgacctgcataaaggaaaaagtaagcatatggagctaagtgtgaaaagttaaaagggaagtatcaagaaagactaaccctagtgagctccctcaagactccgcccaccaacacatcgagagatgagtcgttgtcagcaccagccaattgctcactgacctcaggaaccagccggttcatgaagtgagccagtacctccttgcctttcttggcctcaggcagcacacgcacgggtggagttggtgcctgcacccgctgaaggatcctcctaaccagtttggacccagttgttggtggcccagactccttagacttggcaaatttgggagtggaaggattcgcagcagtcaactcctcggaaaggtcaataacctctccagaaggtctcttctctgaagacccctctccgcccttagactttttcgccggaggggaggcgttagaacttccgtccatcctcttcctcagagcatcaatcatctgtcgagacatgtctgcacagaataaaaacagcgtggttagcacaaaccagcagaaaatacaaagcatgaaattcaagaagctgaaaaagaagtaaaacgcagagtgactggccacccaaaaagtgagaagtccatcatcacctgatatctcagacataacaaccttcccttttccagcatag

SEQ ID NO: 349191 - DNA, 560 bp, Cannabis indica
aatctttagttcctttgttactcaattgactcacactcaccatattagactttttaccaaacaatttacaacaaaagcaatatactttattaaactcttttgaatacactaaccaccttctatcatatttttctccatttgacaatattcttgtataataagaagttgaaaagtgtctaccattttcatctttaattaaactaaaatcaattattactctaattggacccttttctactaacaagtctattagtttattatcaagattttcccatcttcccggatcataaatataatctaaatcttcattgaaatttctagcttccatgacctcttcaatattttcttgacatttttcttcaaccatcacatcatcacacatttcataatctcctaaattatctaaatttatttgttcttgttcgttagtttctttacttgaattgctttcatcttttttcttagtgataacaaatttttctaaagctcctctttgagatttaatcaaactttctattctccttttctttttaagtttttcattacccgacatatatttt

SEQ ID NO: 349192 - DNA, 879 bp, Cannabis indica
taattaaaaaaagataaaaaattattttatgttgcatggttcacatgatttatttcatgattatatttcatgtatgaattctattaagttcaatatatatatatttatttatgattatagtgttgtcaacacataagaatataatcacggttatatgttcaaaagtttaagtcccatgatttgtcagtacactggatttagactgacatgataattagcgataatgtatacttacaccttggataagtgttatgtcctttccagagtattagcagagtatactagtatcagatgtatggagtatacaacggattggaccgatattgaacttggataagatatcataaacatactattatatctttctatgtcaatatcactggttgatcttaggtctatagatcttaatcctgatatagttaagttcgatcctaattgtattatttatgctcttaaatttgttcgttaaatttgaccaattggatcttctcgtgacatacagattaagaacatagtacttcaattgagagggaacgctaatcatagatatggaatctataatttctataagtgtttataagtgaaacgatgatttccttcgagcttggcttaagggagataaatgattgaggcttcatttcagtaattatattagtttactgaaatatcatttataggtagctaagtattttaaggataaaatacattgaagggtagaacgataaatttgtcccttttcgatgtaggtcatctataaaggatatttgactatttggattgtaacaatgaataattcataacgtatctatatctttgtacatataaagtgttctatataattaagagtgcaattccaaatctatagtggcgctaggagga

SEQ ID NO: 349193 - DNA, 863 bp, Cannabis indica
aaatcaaaatgcatccaccagaccaagaacatacaagtttttaagaagatatgggtctctcttgctacaaagtcatgtcgtttggtctaaaaaatgctgcagctatgtacaaaagattggtaaacaatatgtttaaagaccatatcgggcaaaatatggaagtgtacgtggatgacatgctcgtcaaatccagaaaggctgggggcacatagacgacctagacgaatgcttcaaagttctcagaaagtacaatatgaaactaaatcccttaaagtgttcttttggagtcagctcgggaaagtttctaggcttcatcgtcaatgcctaaagaattgaagctaatccataaaagattcaagccctcttggatatgaactcgacaacaaaaaccaaagaagtgcaaagcttaactagtcgaatcgccgccctcagagattcgtttcaaaatcaacagacaagtgtgtcccattcttcaacatcctgggaggaaacaagcagttcgagtggacagaagaatgagaaaaagctttccaagagctaaaggcacaacttgctaaacctcccgtactctcaaaacctctagacggtaaggaattgggaatatacttagctgtcacggaacatgtcgtgagtgtcgtggtaatcagagaagagaatgatatacaacacccagcctattacatcaataaaagactcattgaggccaagggctgatatccgctgatagaaaaactcgcctactacctcattctagcaaaaagaaagttgaggactaatttcaaagctcatcctattcgggtatatatcgaccagccactacgacaaatactgcaaaagccagatgcttctggacagttactcaa

SEQ ID NO: 349194 - DNA, 698 bp, Cannabis indica
agtgcttaactaactaaaaaaaacatagttttacaagtttttcaacccattaaaacaaacaggagtggactcgggttataagtagattgttcaaatagattagcgtaaaagtaaagattgttcaacaaatataataaataaatcatagagaataataaatcatagagaataataataaaaaatttatgttaattagtaaacatattctcaaaaatgcatttaaattacctcgattttgtctgaggtacaactttattgtccatcatttcccagtcgaattttctgacctagctttcggaggctgtcatttgagggaccatcaccatgtaatgggtgtcacatacaccacactggtccaccaatttggataataaaaggcaccaagcatccatcagcgtcttcagttcgtctttcgttagagatccaagactcgaatcgaagacaaatagcttccacaactcaagattcgcctccatagcgatccaatgtttctggttgtccaagaagatggccatgtatatgcactccatacccttccaagacggcaagaattggtttggatccccacgaacgagttccaagagggactcatcccagacaaagccagcatggtcaatattggtcttccaagcgtcccaccgatccttcaacgatgaagaaaaaagatggcatgacagtacacttacgtgggtacaact

SEQ ID NO: 349195 - DNA, 1154 bp, Cannabis indica
tccggatgagttcgttcaggccgcccagcatcggactttcccttcttcccgccacggacttaggagaaaagtcctctgggtaaagatcgtactgcaccaaattatcatcggaggtcagctagatgatattcctgtcttcctccggcaaccgagcaagtttctgagctctatccctaagaggaagggtgaggggaggacagtgatatgtcaaaatctgctgaaaccgagtccgggtgatgttcggatccttcaccatgaagtattcatcaacaaaacgccctattttgctgatggccttgtcatccgtgccgctcaaccacttgaagcctggctgagagaagtaaaaatacgtcgacctgccttgcttgggggtagacttcaggtcgaagaaccaagcgacctcgtgaggggaaggagcaccccatccttgggaagcgtagaggacgaagacagcggacaaatacttaatgccctctagagtaatctgggccgggcagaggccgaagaagtctgccacatccctgaagtacttatgcaagggcatcagcgccccttgctgggcgtgagcccccgaccaggcgcacattcccttatcaggttttgtggcgctcgtgggcgggaatgtagcagtccagctcgcccaggtatccgtcctggtcgagagtgcggaggcgtgcctccaaaatctatgacagaggacttacccacctggcgcccaaagcaccctgcctcctatgaggaaccgcctcggcaagctcctcactgatgtagtccacgccctcaaccaggacgtctctgtcagcatcgactggttgcccagcctcattgtactccccgaagttagggggtccaacctcttcatctccctctgcagtgggaggactgcccggacgcgcctcgtccaactcctcaacctcctggacttcagcgtccccctcacggtcctcctccattgggactgccaaatcctattcggcgtcggggaaagtggcgagcggagccacttgagggtcaaaagcgtcagccagacgtgtggttttcttcgtacgagccatcatcctatggctgagtacggagtcagaagaattttcgtcgctagaaggacggttagcacgaagatgagggtggacttcgtgcagaagttgaagcaggtc

SEQ ID NO: 349196 - DNA, 592 bp, Cannabis indica
ttttattattaaaactgaaaaaatcccttcttttaatttgagaagaaaaaaaaatgaatttcataatttacttttattaatggaaagtttttttttcttttgcaattaattgacaacaataatgttgtttttttttgtttttttgaaaaaaaatggtcacattaaaacttcaagagtaaacctagtgggagaaacctcaagaggaaaaagagtgctagatgtaacgtgcgattcaagatggcacgatacaagctaagtgatgcccacaaggtagccaagtggtggcacatgttggtgtgcatgctgatgcttagtttgtacggcagtaatattttcgtaaatatcttcaattgtccagatcgggacgggacttggtattcgctttatatttgggtctacgaatacaatagtgcaatctgatttgagaaactgtgtgatttggtatatggttatgatcatatgtttacagagcaaaaatcatatatgttcctggtaaaatgttaaaaatttagaattctctttaagggtggacctggtgtcaactctccaccaccctctgacaccttggtgctaagtgagctactactagtca

SEQ ID NO: 349197 - DNA, 614 bp, Cannabis indica
gggactagtagggcggacatatgaggaccacgaggggacacatttgtctccatgagttggaatactcatggacaccatcgagccaaatctctttttctctctatagattttgaaatatgtagtgtaaagaaagtctactgatttctcaaatcaggcttctatttatagtagttaaatcccttcaatcagatcattatttaattgcttaaataaataaatatctataactgaattcggcaactgatatttatgaggaaatctctcaaccacttgagagaatatcttaacaaccttgaaatatctataaccacttttcaaattagatatttacctaattgaattaattaactaattaattaacccaaaaagataaactccataaggaatgccataggcgcctaccattgtcttcaggacaaagttggtgtcttttgtcttgataacttttgtcttgacaaatcttgtctcgacaaattttgtcttaacaatttttgtcttctccctatttaattaatttgaaaaattatttatttattacaaaaataaatagttactattttgccaattcaaaatagatttttccgaacatctttatacaaatctttatcccgacc

SEQ ID NO: 349198 - DNA, 548 bp, Cannabis indica
ttctgggaattactggaccctcatccggaattccggttgcacaagcttgactaaatccctctaacatgcaatcaaaccagatcaaacctacataatcatgcataactaagcctctgaaaatgaaaacaaccaactacagcaagtaataacagattccacatatattttcaaaatcaaagcttttgaacaaaaactcataaacttgaaccaagtaactagcatgcataaaacctacttaattccaatcaattcaaacatagaaaatcatagaaaacaaccctaaactacagcagcaacaaactcaaaaacatcatgcattactcaactttttcattaaaaatctcaagaaaacaaggcaaggaaatcaataaagaaatacctcaacaaaagattacttgaatttaggttgaaactagctgaaaatcaaaggaaaatccaactccatgcacacccaaacccagccgaaaagagagagagcttgagagctttttctttgaaaatttctaacttttttctaacttgtgatttttataaaatgaaaaagaatg

SEQ ID NO: 349199 - DNA, 869 bp, Cannabis indica
actcttaattatcccaatacctatattattaactcatcataatattctcatcaattatatcaattaaactcattatgataatttttggccctcgatcgggtctccaaggtcgccaaaccaaaaaatatttttattccttatatagctcatcttacattcacacatactatataaatcttcgtaatttataaattacgcttatttactcacttatagtgaatttaaaatttatattaaactagattagtaggatcataatcccacttattatctaattaacctataatataattataaaccttaattatttaccattagacttatcacgatattacacttggggtacaaagggccgagttttacttgggtgaataaaagacaaggtatttcacatgtccaagaataactagattgctttgtgtgcaatcaagcttggtctgagttgtatcctttagtctgagtgtgtcatggtaatttttttctttctgatcattgtcctatagtcactaaacttgagaatgttgtattacggagtcatgagcgagttaaacgacagtttcgctttgaacctcattggcttaaagacaatgattgtcgatccattgtgttggaggcatggtaaagatatacgttagatgtggccgacactttgggacttcaggactctcttgaatactgtgcaaatcgcctttcaacttggaataagttaagatttaggtcattatctaagcaagtagtggaaactcagaaggagatagataatcttttgaatgctaatgctctcaatgtgcgaatggatgaggtgaaaactctagaacttaaattggatgatcttatgtgttggacaccacaacacgtgaaaacgtaat

SEQ ID NO: 349200 - DNA, 920 bp, Cannabis indica
ttgaagcagctcctggtcaatttgatgctcgggctcccaagactcacctgggttcatctacaaaagacaacacgcaagatgagtgttggacggagtatcaagcgaaaaaataagcaaatgtgccgaccaggagtacccaacagattaaagaacgatcatgttcagagaaaagtctaagctcaagaagccagaaagtttttcttgagttagggcaaaaaagttcatgaagcttgaaaaaagcagaatggaaaacagacgcaatgcagttctaaaacgagccttacggctgaaagctaacacaaggacatggaaaagaagagtcgcagaagtttcaaaccctagggtttcctacagtgttctttctacagcaaagttacattcaaagcacaagcatgcaaaggaagggaatcagaaacttactcaaagattcaagtgtctgggttcaagcaagccagaaatcgtctgtaaactcttcagcaactttgaagcttgaaagctttctcttttttctctgaagttttcttaacaaagaagggtgatgaaatggggtaatatgccagtactccaagtatttatgggaaaaagggtaattgtacgtaaaggaaccttagacgcctcgacttcctgccttgaaagcaaatatgggaaatcaaaataatcgagtgcaaccgtcagccgtggagagagaaatttggattttcaaaatatcaattgtcagagcattaattagctgaaaactgaagggacgcccagtcaacttcacatcgagtctcgaacggtcatgctcgacacgtgtcccctttcaaagggagagccagctcggaataggtctatacgtaacctcagaggtcccgcacagacttcgggggcaaatgttatcccaaaatttgcactctaacgtggcatcacaagaatggtga

SEQ ID NO: 349201 - DNA, 1932 bp, Cannabis indica
ccacagtcaaccaactcgaagaggagaaagtactagacgagctaatgatacgagaaagcatgggaaccagtaaatctgcaagtcactcgaggacgaggtccatgagcaagacgaggtccgtgagtaggacgcaatctgtgagcaaaacgaggtctgccaataattactcccaaccggatctgcgagagcacttgactcggaagaaacctgatcttcgccaacaactcggtccataacacaagaggatttctatccaattgcgaatagatgagttggaggacaagtttaggagatatcaagtgggggaatttgggagacaatctcgatacgacttagacgaggagctcgagccgtactacccaaatatcatgaatactccttttcccttggatttaagaacccacatgtctcatcgtatgatggaaccaccgatccggtttcgcatttgaacaacttcaacacaataatacgagctagtaatgtgacaaacaatttacgttgtatcttgtttcccacctcactagttggagcagcaagcagctggttcaataagtttactcaccattccataacttcttgggaacatctgtccaaagatttcaaaaaacaattccaagttgtaagggatagacgacccaaggcggcctcactaaccaatataaagcaacaacccaacgagacacttaaggcatacttaagttgttttagcacagctgctgcaagggttagaaatttggatgatagaacacaacttacaacccttcaggcggggatctcaactgatccatcaaccgttgggggcgagcactgggacgacttacaaggtcgtctagtgaagaatatcactgagttcaatgaaagggctcaggtgttcgttcgaaaataggaagcccaaaaagaaatgaacttgttaaaaacaagctcgggaggcaaacccaacagtgttccaacaagtactatctcaatgagaattgataactcgggggcttctggctcgaagagaaaggacgattttaaggaatcgttaaaggataaaaagaaacagaagaaacatgacaagtacgtgccagtgtatacaatttacactgagcttaatgaaactcaggagaatatttacctctcacatgagcaaaaggttgccttcggtaagcctgagcccatgaggcatgcaaggaacaaaatagatcctaacaggtattgtaaataccataaggacattgggcacatgaccgatgaatgctgctagttgaaagatgagatagaaagtgtcgtcgctcgaggccacttcaaacaatatgtgaagagacagggcaatggacacaactagcccagtctgcccaacaacccaaacaaccaggggctacaacctcttcttgttgaaggaggggacatcctgattatttagggagggccgcatatcgcaagggagagcaataatgcccaaaaaatatatgtgaaagaggtaaagaacgagcagtcggcattcgcccaggaaccttccaaaaaggtgaaaactgaagaacctccaatcatattcagagagaaggacgagaaaaacttaagatatcctcacgtcgatccatttgtaattaccattcaaatcgacaataaaaggataaagagggtgttaatagacaacggaagcttagttaacatcctttataaggaaacactgaggaagatggggctcgaaaaagccaaattgaagccttgtatggtaaatctttacggcttcactggtgacaacattgccagtctaggcataatctgttggaattattttaccaggatctagatttactaccatgtatgttatttaacatcctaatatgaatttcttaaacaatgaaataaacacataagggtttaagaaaaccttacattgatagcagcggaatataatgactcattccattcagatctctagccctt

SEQ ID NO: 349202 - DNA, 897 bp, Cannabis indica
gtaaaaatgaaaaaaaaaaaatccatttttttcaaaagtttttagtttgtttaaattatttattggattttaataattttggttcgattttttaagatttttgtttataaataaaataaatttgaaaatattaatatttttttggagaattatttaggtttttttaagtaaatttaatatatattttttattttttaataattttatcaggcttttctttataaaggccttaagtctaacctagaaatgctaagtttaatcttagcctgcaaaccactctaagcctgaaaccctaatctctcctctctctctctctcttgtacacgcccgaaggggctctctcctcctctctctcacacgcctctaaggctatagctttctctcattagagatttgcctacttgattcatgctttgtaactttatagagagatatattagatcccacctatagtgatttgaatagtattatctttaagtatcaatacaagtgttttacttttttatgacataaataaatattatataaaaattcagagaagttgatttaaaaaaagaataattaataattttattctttaaactttcgacaatagtattgatcttactcttaaaatatacgacttgttaagaatttcttctgaacttttacatttacaaaaatttagtccttttgttagattttatctcattattctatttaaatgctgatgtgtctttgtaaattagtaactttgtctcttaaactttgacaactattaaattgtacaccctcaaaattaaaatgagaaaactttaacattttttagtaattcttaaaaaattaatttagatcttaaaaataattattttaaatgattaagaaaatttaaaaaaaaaattaaaattttaaaattaa

SEQ ID NO: 349203 - DNA, 973 bp, Cannabis indica
attgaagttaaggtctctgatgatgagctagctttgttactttccaaactttgaaatgattttggtggcattatcaagttagaacatgcgtagaattcatttcagatgttaatatagtgtagattttcgagagagatatgtaataaaatagatatgatgtgtgaatgaagtgcattcaaacaaacagtatatttcgaaaacacaaaaggactaaactcttgcattgtattaatattttagggaaacccaaaaatataagatgtgttatttttttaactaatttttttaaaaaaattaaaaaaagtaattttttttttaaaaatacatgtttataaattatttttacttttaattgagaatcaaaatttttaataaaaaaaattactttttaaattttttaaattaattttttcttaatcaatattttgactttgattccaacctaatcttagaatttggcagaccttggcccccaccctgaacctagactcgggcttcggacctgaactcaacttaaataaatcaataaatgaaaataaaaagaaaatttacagaacataatctaaatttttctccttatccgatccaatctaattagtaattggatttggaaaatcatcatctgatccaatctaattagacctcaaaatttaatctaatccaattaataatttaattattaattggtttggatcggttttttaattggatatctaattacacacctaattttcaatattaacttaaaaatatgaagaaaaatacgtaaaaattaagtatcacattttatttaaatttaatacattataaacatactatttttaccagtgtaatgtagccaaaagttttaaataattaaaacaagaacattctaagtaacaaaatagaacaaaacattatgaaaataaatacacaaaacaatcatgtgttacaaattcaacatacaaaaaaaatctaataaatatatattata

SEQ ID NO: 349204 - DNA, 796 bp, Cannabis indica
cctgattataacccaggatattagtttgtttattatgttatacttttcttaatgagtttgtcaactcatagtgttgttactatgtgtaggtaagggcaaagctaaagttgaggagccgtgagagcgggcagatgaagattgtacatgtcgaggtggttagcctggagcgtacgatcctcgggacatcaaggcttctgttgttttattgctaggcgactaagtattttgtaaatgtgtagtaaactatgtaactgtattttgtaaacgggatcccgaaaggttgtaaaagtcatatgttatgttttaattaaataagcaaaattttaattattcacgttttccaataacctcgttgattagcaacgagctgtacagtacgttaaaaatcacgctaacatgcctatactagttagggtgttacatccttcttccttcatgttttggaacactcgtcgtagtacccattctccttccctaagttgtcagaccctaatgttcttattaaaatgttgggccaccttttgctggtatgctgctattctgataagcgcttgttctctcttttcatctaataaatcaagttatgtgttgatggtctgttgatttagatcatccgttgagggttcatattgttgggttttgtgccctaaataaaacgcatttcaatataatcagatttactaagaaaggttagaaatcacattttatgttgcatggttcacatgatttattttatgattatatttaatgtataaattctattaagtccagaccatatgtatttgttaatgattat

SEQ ID NO: 349205 - DNA, 606 bp, Cannabis indica
attttttttatttataatttattttttttttttaaattaatttaatttatttttttaaataattttttacgtggaccaataaaattgtgacacgtgtacactatgtccagtccaacatggcacttaacacctaaaatggacggaagtgttaaattgctaacagaacacgagtattgggggttttaccgtccaaattttggttttagaggttaagtgaaaccaaaatgaaagttttgggaattttaccgccatttatcctttagataattattttacccttacgtgttaacttaccaagaccttactttgacataagtctattacttcctataaggtgtcttttctttacatatatatgagagtcatcctgtctgaccgagtgagatatgagagtcattccgaccgatcgactgagatatgagtcatcccgaccgactgatcgagctgaatttaaagcatttgatggagctcaattttaaactcttagctattttattttaccttttagctattatacctcgcttattgtgagtgctctaagaaactcttctctacatatagctcaatgaatagtgaagaggtaaatatattttatattttttcttt

SEQ ID NO: 349206 - DNA, 524 bp, Cannabis indica
aatctatatcctggtaaaatatgtccaacaacatgatccccacagaagccttcatgaatttctctgatgatttcatttgcttctaaggggagaacacaccgaagttggggcattgaataccttcttttatatagttgtccttcgatcattgtgtagcgaggcactgaatacaatagtttttgtccctcatttttgtcatttggaagttgtctgtcgagtaaataaatgataatatgagttccacatatacttggctcgcttaggatttctatcggaactaagttcaattcatccaagtcattctgcgaggccagttttgctaaggcgtcggcgttggagttttgttctctcgaaatttgttcgattttaaagtaatcgaatctttctaagttcttccgaactttttctaaatacttcgccatttttaagcctttggcctggtattccctgaggacctggttcacaatcagctacgaatcactatgacagatgagattttttactttcaatgcctctgctatctt

SEQ ID NO: 349207 - DNA, 984 bp, Cannabis indica
gtttgatcaaaaactttaaaaatttcaaaaagaaaattttaaagttgtgggtttgcactatatcatgtattcccagatgaattccggttaatcatactcaaatgccccttaagtaattttaaagagcaatgctttgtaattacttaaagaaaagaaatgattcactttattcataactgaagtttaaaatattacatcagcaatgcgagttacaatcattaatttactggttgtaaggtcgcaaatgttccacgttctagtagttctttattagcgaaccatttgcccaaccaatttataaaccccggttcctactattgcttcaatcacataaggaccctcccagttcaggttgaatactcccgcagacacatctctcgtattcgcaaatactccccttagcaccaagtatccaacgttgaatagcctcttcttgactcttttgttgaagtatcttgtaactcggtgttgatacgctgcattagtgacttgtgactcagtttgtttttcatcaagcagatccagggacatttttaggagttcttggttttcttcttggttatagaactctcgcctatgagtcgatatgttcacttccacaggtaacattgctttcgagccaaatgctagcgagaagggagtgtgtcccgttgctgttttcttagtagttttgtgagcccaaagtacttgagccagctcgtcgacccatctacctttggcagcgtctaacttcttgttgatagtatccttcaaggttttattaacaacttctacttgtccattttcctgaggcctagatactgatgagaagctcttaattattttgttcctttcgcagaacacagcgaacaggtcgcgattaaactgagttccgttatcggatactatcttcatggaaattctaaacctacaaataatatttttgacaacaaagtctaggactttcttccaggttacggagacaagaggctcgacctcagtcca

SEQ ID NO: 349208 - DNA, 996 bp, Cannabis indica
tcgataacataaggaccatcccaattggggttaaatactcctgtaggaaatgcagatctcctattcactgggaaaaaatgagagaaaagaaatacctaggtccgcaataagtgcaacagactaatgaagccatagaaaagattaaggccagaatgcttgcctctcagagtaggcaaaagagttatgcagatccaaagcgcaaaaatgtggagttttaggtagggtatcatgtgtttctacgggtgtctctgatgaaagggatcagacgtttcaggaaaacaagcaagttatgccctagttttacaggaccgttcgagattctcgagaaggtggggctagtggcatatcgtctagctttgcctccagctcttttagcaattcacaatgtgttccatgtttccatgttacgaaagtacgtttcagaccctactcatgtgctgagttatgagaatcttgagctacaaccggacctatcatacgaagagcaaccagttcagatcttagacataaaagataaggttcttcggaacaagaccatagctttggtcaaggtactctagagaaatagtaaaatggaggaagccacctaggagttagagttcgacatgagggctcagtatctagagttattcaggttagattttgaggatgaaatccttttaacgggtagataattgtaaagaccgcttaactttaatttggaaattagcagataattaggaattaattatgaaactagaatacttacgatttaacattttatggagatttacttgaattcagaatgcattatatatgccatatatgaaattttatatttttgcatatttttgtccagcaacattggaacgtgacgtttggccagtggaatcacatcttagtatttttgtaatagcggagcaatataattagacattgggaatgttgagaatagtcgaggttttagaattgaccaaaataccctaagtaattagaagcttttgttgggaatatttt

SEQ ID NO: 349209 - DNA, 628 bp, Cannabis indica
aaggttagacgaaatttaactttgaaagggtatatacggccttagtatatagattaagggttgatgtggcagctataacttttttattctatttttccaattttgtaaggtttttatattttgtctaataaaaaaacacataaattataataattatgtaacaattaaaaattatgtaataaattttctattatgctaattaattattttttattacattaaacagttttttaattaatttttaattgacctttcgttgattgtagtaataattatttgatatatatatatggaacacttcttaatgggtaatacccattgatgggaactaaaagaaattaataaggtaataatccaataacctttttatggcaagtttctaaaaattatttttttttaaaaaaattatatttattttttataaaattggaaataataattacaactaataatttgaaaaaaaattataaattatttttaaaaattaattaaaattactactttattattttatgaaattatgagtttatcaataatttattattgtaaaactaaaaatcatttacatgtatattaatgtgtttttttttattagaagaataggagcttgattgtggaatccaattgt

SEQ ID NO: 349210 - DNA, 522 bp, Cannabis indica
catctggttttgataaaacttatctcaagggctaatgggttaacacttttatggggtgagcctggaagtatggccgtagtttatgagatgcatggactaggcacaacgctagtttttctaaagggggatatcttgattctgcccctagtaacctttcacttacatagtaaattggttgctggtgcttgccgtcttttcgcactatagctgcactaatcgcatcttccgagatggctaaatagagaaacagtgtctctccagttattggttcgccaaaactagaggcgttactagatgcctttttatgttctgaaaggcctcttcacactcttttgtccattcgaactttttgttgcctcacaatatgttgaaaaatggcacacacttatcagctgacttcgaaatgaatctgttaagtgcagccattcttcctgtcagggcttgtacttccttaggctttgtcggtgatggcatgtctattgatgccttgattttttttaggattttcctcaatacccctcg

SEQ ID NO: 349211 - DNA, 1361 bp, Cannabis indica
gagatacaatgagacaacaagtgagatataatagtaataatagcttaaaatgatcgagatatgaaaataatgtattatgggaaacaccgtaatttttttctacaccatcttatttatttattttctacaccatcttatttatttatttttacaaaaataattttttttaacaaagcaatttaaaattctacatataataaattttaaacttcttaataaataattctcaataataactaataaaattgtgtatttagtttttaataaataaattattaataataatatgaaataagataatatattaataattttactatatattataattatatttttaagtaactatttattataatactctaaaaaattaaattaacagccgcgcaaagagcgactatattacctagtctttatatattaaaagtaactatcttaacttcttttcttagtttaacggtgcttttaattttctccgttaactccttattacaaaaaaaaaattctccgctaaagttaacaaaactgttagtttaattaattataattattttattactttaatattttcaaataaataagattaataatattaagtattttttttaacgtattttatcgaaagtcatgtagatagtacaagtttatcgccagactcaatgatttgtatagtggggttttgtgatgaagcgattcttcaaagaaattcgatacaaatcgaatataatcaaataaaccctaaaattttctcgaagcgactctttatagtttccttctttcaagacacagaagcaaccagtagcaagtcaaaagatgaattaattttgattggattctgctatagagagtaaataatgccatggctgtgtccattgctcccagttacgtgttattaaatacttttgaatttttcaatccgaatgatttttggatacaccaatatactttccctattttttatttgttttggatacctgtatgatcgaggagaagattccaaagtagcaggttttagagcaattgtgttttgcaactgtcggtaggagattcgtcaatgctacctcccctattcaaatatttgtttcaaaccatgtaattttattgctcattagtctttatgttgttcatacaattgatgtgctttttaatttgttatgtgtatatttttattgtgattgtagcgataccagataatatggaatttcatttaggagatacgttcaattacactacttcagatggatttgtacatattcatgttctcatagctattaataaacttatggttatataatttattattttgggtgttaataattcatcttgtagacttaaatcattgtcttggatcttgaaggtta

SEQ ID NO: 349212 - DNA, 794 bp, Cannabis indica
tttttgtttctttaattaatttttattctttttttattcatttgtgtaatgttttttttatttttattaataaactatatgtgaagatataatatttaaatgacatagagaaaaatataaagaagctgatgtatggtgtaatgtaaatgtgtgaggtaaaatagaaaaagtgaaattttaaagaatagaatagaaaagttattgggagtgctcttagagtttggaaatatgtataatagttaagagtttaaagcatttgatggagttcaattttaagctcttaactattttattttaccttttaactattatacctcaacttattgtgagtgatctaaaatcttttatatatataccaacaccattatatatatatatatcatgttattagtacattaattcaacattaatttttcatattttattttaaaagctattacgaaaatcactaatatttaaaagtacaaaacactagctgttaatggtaatgttcttaaaatttggtttgcaagtagtcccaacccaagtactgacgctttttgatgtatatattgtatatttaagcaaatctgcatttatatatatctattctatataaagtgtgcctatataactaaaatttatataataaaataataaaataataattccattaatatttgaactgatatttgatgctaaatattcgagaatcacaacacatttaaaaaaaaaaacccgagatttgatactctgagactctcaattaaaaaaaaaaaaagtaatatgctcatcaaatttgtatttatttttaa

SEQ ID NO: 349213 - DNA, 846 bp, Cannabis indica
ttttattgtgactaaaagtaaaaaattttgtagtatacagagcaaccactctatacaattcttctccaaattattattatcatcaaatcagaaataaacaaggtgaagagccggcaatattgtttataatttcgtatcatgattaatatcaacaacaaaaatcaaaagccaatatataattaaataattaaacaaaaatacatatatatatataaaactatattacctctatgtatttttccatctttgtatacatcaatgggacacacaagaaccaagaaaaaaaacaagaaagcaaataacccgtttgataattctaataattaacgttgtttactatatatacaagaagaacacctaaaataattaattaattattaagaaaacacacacatatatatatatttatttataaaagaaaatacatgacttgatcaaattaagtgtccaaaaatggaggtaagcatgttgatgattatgggtgtaatatccacagttttggtttcaattttgtttgtgttccaaattttgttttgggcaacaccaaaagatatggaaggcattcctggtagattggggtggcctgtcattggagaaagcttctcatttatttctgaattttcaagcccatctggtatattcaccttcatgaacaagaggcagcaaaagtaattcatttctattatatatttcttttaattaatacaatgccatctctattattatttcaaattaatttcttaagaaccttcttattcagtcaagacagaatgataatgataatgataataataagctaattaatatatatatatatatatatgagttttttcatttttatacttt

SEQ ID NO: 349214 - DNA, 662 bp, Cannabis indica
ttgatatggacatgatccttagtccattaaaatgttattcaactaattttaggcattttgtttgtgccggaatctttttcttattgctgttgttgtgtaatgccttcaacttagaaagaagaaaagctctgttgtttgtgtgttggatgtgatgtggtaatggttcgagtttctgaatttcaacaattagtcgtgtttggaatattggattggattgaataatttttataaggtggctttgtaatgaaattgaagagaaaatattgaaaaaattaaatcaaatattctaaataatccctagtataggataacttgggatttttgtattcaatttaatctccatttacatgcatttcaattcattggtagaactcattcattcttctatgtttgttttttcccatctaacaattatttaaaggctaattattatttttgccctctaaattttgccatgtaccaaatcatgcctcttgaacttttttggccgttaaaaagtctccttgaactattgagattgttgggtttaaagaattttgtccaatttattcaattttactaattcggtgattgtccatgtactaaattatgcttcccaaactttgatatctaccaaatcatgtccttcaaattttgacatgtaccaaatcatgcctcttgaa

SEQ ID NO: 349215 - DNA, 675 bp, Cannabis indica
tggcgagaaatgtgagatatacactgatcacaagattctaaaatacttctttacccagagggacttgaatatgagacagagacgctggctagagttggtgaaggattatgattgtgaaatcctttattacactggtaaagccaacgtggttgctgatgccttgagaagaaagggtcaaagtcagtagaacactgtgaaacaaatctctcagcagctagcaaatgagatgacccaagctaatattgagttagttgtggggcaattggctaatattaccctacaatctactcttttagagcgaatcaaagagcacaaacgcaagatccagagttggtaaaaacccgagctagggtttcggctgggaaggctagtgatttctcaatggatgtaacggggatgttacgatttggagatcgtgtttgtgtgcctataaatgatggtattaaaagggatatcatggatgagtctcatacgactccttattcagttcatccagggtcaacgaagatgtatcaagacctgaaagccagttttggtggccaggcatgaagaatgacattgctgtgtatgttactaagtgtcttatctgtcagcaagtaaaggctaagcatcagaggcctgcaggattgctgcagccactaacatacaaaagtggaaatgggaagacattgctat

SEQ ID NO: 349216 - DNA, 554 bp, Cannabis indica
agggcataaaacccaacaagcacgtcgaacaacacttggggcaatattgtaacaccctattagtttaggcatggtacaatggttttcataattactgtgcaacctttgctaatcaaagggtttataaaaagtgataaaatttaaactttaataaataaacatatactgtattacatttataaaatctggggtcccgtatctacatttttcaacatcacataatcaaaagatgttgcacaacgactacaaaatcgtgagccttaatatgtgtttggtaaaatttaaaaaatagttttttcaaaaatttaagtgaaatttatagttttaggaaaagttggcctaccctagctttgagattttagcttttaaaggaagctacaattttggtttaataattttttcacttgacccaattgccatcatctaatattaaaatttcccatttaccaattaattttagggcttcttacattctttcaatcttatccttattgaaaaaaaacccttttatgatcaaaaactactcaacagtcatcttattattattattatta

SEQ ID NO: 349217 - DNA, 881 bp, Cannabis indica
attctaaaaattaaaaactaaaaacagagtcgaacaacctgttaatatttttttttagatatttgcaccgaaactctcttaacatttacaattgttacatatgactctattaaaaaaaataacagtaaaagtactttatcttacgattttgttgcagttgtacatttttttggtcatttactgtcaactcagaaacacatagcgacatattattagactacgtattaaataagctaaagaaatatatcgccgcatatttttcagctgatacttaacaagtttaattgacactttataaccaaaaaaagagtacggctgcataaaatcataaaataagatacttttatcgccattttttttttatttaagtcatatgtataacaattttaaatgttaaaagagtttcatcataaatatttttttttatagatttttaaatctatttaaggtacctattgccaaaatgttgaattcaaaaaagaagaaaaaaaaaaaatgagaaagaacgagcacaaagaatagttatatttttatttaatatttaactagttataaatatatttctccacaaataccatattaatttcaaagttagaaaactaccacatgataatattataaatccaattcaagattgttaaaatgttaatatatctacaacaagcacttaaacgaaaattaaagaagaatgaaaataacttcttggatttataaacctaaaaaagatttttttagcaatgtgttctctttgataaaacatatgtattagtgaactaaagacatttatttatagactaattaggatttttgcctcctgaactttgatatgtaagaaatcatgctccctgaacttttaaggtcgttaaaaatgcccactgaac

SEQ ID NO: 349218 - DNA, 509 bp, Cannabis indica
aataggaaaattttatacattgtgaaattaattatttaaataattaattttggtacaattttatttaagtatatttttccttgaatctcgaaagatatgtactatttgtaagtattttattcttagtaatgtccaccccaatagtggctgctaagagtaagatttacaacacatgaaacaatgacgaaagcttataagatagaatggccttgactctcgcttaaatgggaaaacgccagattctagtcttgatcgaataaaaggttgctagaatggtatccattttagatgagttgactactcttttcaatgaatgatatctttgactctcgcctaaacgggacactgtatcagtttgttagaaaccttagaaattatttaagatatgataagttttgcattttcacatgtctttcttgcacttatatgataatttctatatgtgtatgaatttatattgaaccttgttgttttatgttattaattgttgtagtttaattttgaatctt

SEQ ID NO: 349219 - DNA, 588 bp, Cannabis indica
taaaatatttccaacaactgcctcagagccatggtaatgatttactttcatgaaatatgaattaaaacgatgatttgtgtatatttggattgtttcatgttggtttatgtgcttatttgttgaatgtatatgttgtacgaaatttttccatgaaaaacattttttttctttctcaaaatattttatttggattccttgtgaaaaattaagcaattttcatttttacggaacttaattccgatgaaaaacgagaaagttatgaaggtttgaaaactggggtgcattgggtgttgagggaggtgctcatgcgcactagaccctcagacaaggaggcccagcgcttgcagacactcggacaaacccgtgtcttcagacagggttgttgcgttcagacacgatcctcggccacgaagaccctgcatttcgcgtgtcctgaggttgcattcgccgagatttctcgatgtggcttctcctgtccgcgcgcataatggctgcgtgcagccttcctgggctgtagtgcagccctcctgataagagtgtatttaatactcttagactacaccaaatcagatttcttgccttagtgct

SEQ ID NO: 349220 - DNA, 1390 bp, Cannabis indica
aaaaaatagtataattacttaaaaaatataaataattataaattccacttaaactatggtttcgaaccaaatcaaactgttcttaaagtttggtttggtttggtttgagaaatttattggtctgttttggtttccaatattcaaaaaactgttatacttatttggttcaaaaaatataaaaatttagaacaaaccaatctgtaaacaccggtatattaatttatcgtatgatcaaagtaaaatccttgataagaaaagtttgattaattcgagattaaagtttttttccgcaaagtatttcaaaattcaaaattaatgcttgttgagcaattttaatgctaattatcaacttacgtttttacttgtgttttccttttatttatatatgggtacatttatatgtataaatttgttggctatatgttaaacattattaatgttgctacaaatatttatatatgtcaaagttgaaaagatcaacctatataattgataaagatgtagtagttacttatttaaaagaaaaccagcaaaaagttagttggatatttgagttgttcaaacatcaaacagtattaaagcactaacaaattattaagtctatagtctacactattaggaattgaattcaaaaagtgtaaagtctacatattaattagtgttattatataataatttgtattagttgaagaagaaaaacagatgaccctccaaaaaaacactatactataataagaaaatgtatattatgcaatgtttattggtatgtaattaattatcatttgatattaatttaaaatgcacactttcttggctttgtatatgtattgaacaaagagttgaagacgtagcagaaatagatcctatgatagtagaattggcatattaattaattaatcaaaccgtagtcaacttatgcaattcttttcttcttttctataataagtaaatgttaaatagtcttctataattatattaaatgatttcaaagggtaactaataatgtaagagcggggccccaattcaccaaagcttatcgcttaaatttattgaatttgaaataatgcccataggaaaatgaatatatactttttaattgttcttttttcttcttaaccacattttatcattttatctttgaccatgtaaaataagtaagctatataatcaaaaataacaacgatatttcaccatgacattgtcatgaacataatcgtaccaccaacttatatagaaaagttccagtaaaaaaatataatagggtgattttacaatgcacgttaatttacaatataataaagtgatccatattcatatacgttatagctatttaagatatcttacaaaattttaaaaaaatcggaattatttacattatagaaaacaatgt

SEQ ID NO: 349221 - DNA, 692 bp, Cannabis indica
ccttgaagaatcttgcttgaaattcagaaaattacaccccaaccctagctgctctaaggggggccgaaaaagagagagtgagtttgagagagaaatgcttttctcttgaattttccaagtttctattttttttaaaaaaatgaaaagaatagatgatgctttactaacatattactaacatcatataattcctaaaatcaaactattaaataaaaccaagtccactaatggacaaaataaaaatggggcaaaatgactattttacccctctcacactaacacaacataaaaggatactaaggggtattttgggaaattctaaaatcccgaccaatctctacattcccaatgtctaaactattgtcccgctatacttaaaatactaggatgtgattttactaagccatacaccgcgttccaatgttgccgggcaccgaaaatacaaaattatgaaatttctatatatgacatataaaatgcattgtgaattcaaataaatcatcataaattaataatttagaatttataaattattttcataattaaccctaattatttgaaaattccaaattaaagctaagcggtctttacaaatcttgtcttttgacttagaaaattaataaaagttctatatttactttcaaaaaaattatacgtgcgtagcacgtgttgttccaactagtattatataa

SEQ ID NO: 349222 - DNA, 625 bp, Cannabis indica
catggttttgtaaactccccctcaattttatactttaagaataaaagattaaatatccaaacaaaattgagggttgtgccaaaaaaaaataatcatggattttctcccccttttgtttcaccaaaaagggttgcaaggaattcacaaaataaaataaataaataaaaagaaagcaacactactcatgcgtaaaaaaaataaaaccataatatccaacaaaccaacatttaacaacctaaaaagaaacataagaaaataccattcaacacaaagtcaaaaggcatgaagcctttgcacacaaaaaaaataaaaaaaaaataaaagatgcaaaaaaaaaaaaaataacaagaaaactagtttgggggagggccaaaacggatccatgtatgccctccattgtcccatctcatcttgaacattttcaaatccttggaccatgtcactcctcatggtgttgatatcattcctcaaagtttgaaattgagtgtcaagaggtgtgtaaagtcgagcaaaagcctcctcaatattgaatttgaggcatggggaggcgcttgaggatgcacttcttcttcatcttcctcttcttcttcttcttcactagcactaggaattgcttggccccctc

SEQ ID NO: 349223 - DNA, 663 bp, Cannabis indica
catttccactctagtatattcagtggttgtagcaaccctacaggctgctgatgttcagccttaacttgctgacacgtaagacactttgcaacatatttagcaatgtcattcttcatgcatggccaccagaacatggctttcaggtcttgatacatcttcgttgaccctggaagaattgagtaaggagtcgtatgagactcattcatgatctctctttcgatattctcatccaaaggcacaccaacacgatttccaaatcgcaacattcctgtttcatccactgtgaaatcactagccttcccagccaaaaccttagctcaggtttttactaattatggatcattcatttgtacttctttgatttgctctaaaagagttgatagcagggtaatattagccatttgccccacaaccaactaaatcttagctcgggtcatctcatttgctagctgttgggagatttatttcacagtgctcaacagactctgaccctttctgctgaaggcatcagcaaccacgttgaccttacaagggtgataaaggatctcacaatcataatcttttaccaactctagccaacgtctctgtctcatattcaagttgttctgggtaaagaagtatttcagactcttgtgatcagtgtatatctcacatttctcgcca

SEQ ID NO: 349224 - DNA, 1233 bp, Cannabis indica
aggtagttttatttgtcattggtgtcgaaaaagtcgccggagtttgctgccagtgccagaagaagtcttcggagttgttgtcgacgctagaaaattcgtcgaaattggcattgtcgtcgaaaaaatcactaaaaaattaccaagaaaagaaaccactttctaggtgatttttccggtgacaatgtcaattttgacgatttttctgacactggcaactactccgacgactttttcgacaccgacagcaaactttaaaaaagtcatcggaatcggcatagtcgctgaaaaaattgccaagaagtttcttgaagaagcaactaatttcttaatgaagaaaccagtttcttggtgatttttctgacgacaatgccaattttgacgacttttatggcgtcggcagcaactctgacgactttttcgacaccgacagctacttcagcaaatttttcgatcgggcagcaaactctagaaaaattcgtcgaaattggcattttcgccagaaaaatcaccaaaaaattagtttcagaaagtttcttgatgaagaaaccagtttcttagtgatttttttggcgataatgtcaattctaatgactttttcagcgccaacagtaactcctacgacttttccagcgccgacagcaaactcaggtgtcttttccggcactggtgacaacttcggcgatcactgtagtttcatttgttttatttttttaaaaaaaaatatgaaagaaattttaatatcttttacggttattcaatcccatatatgttaagtttttattttaaatactatattttttcctattaaattttcttaccatatatatctaaactaactttaattttttccatattatgaagttaccctttattaaacaaaagtgttaataattcataaaaaaaaaaaaacgacgtaggcctaacaatgaggaggttgagggatttgaaggcttaatgggttaggaaaagggagatcacttcagtccatagataacaactcaaaaaatttattggaggcggggcttttcaatggggctcgcctagatcaatgagtttgttttcttggaactgatgtgggcttgggaaccaacatgttgttcattcctaaaagaacattttgttcaaaagaaacctaattttatttttttgtatgagacattatgtcataaagtattgaagcttttgaccaagttttttgacaacttattaaacaaattataattagtgataaat

SEQ ID NO: 349225 - DNA, 654 bp, Cannabis indica
tgcacaaccggaattccgattcctcccaggaagcattcaaaaattcataacttgctcaaatctaatccaattcaaataaaaccttccagacctgttctaaataccccaaagaacatttctaaagcatctacacagcccagaactcacagataacaaaaatgccattaaagctccaagctttgaattcaaaactcaaacttggttaaatctaactaacatgcatccaaatcagttcaaacttacttaaacaagcatattaaaacctctgaaaacacaggaaatcgacctcaataaacacagcaacaaaactcacaaattcatttgaaaaaccatagcttttgaactaaaaattgaaaaactagagtaaggataactatcatgcatttcaacctatctaatcacatttagttcagcattttaatcatagaaacaacaagaacaactaaaagcagcaacaacatcaaaaccatacatgcattactcattttttcatcattttcaacaaacttaaagaaggaatgattagaagctaacctagcttgattagaacaccaaaaagaggtgagatcacaaggaaaaatccaaggacccttgctgcacagtgaggctgaaagagagagagaggctagagaggaaatggtttgattttctttt

SEQ ID NO: 349226 - DNA, 612 bp, Cannabis indica
tcattttctctctcaccactttctcttaaagtaaagcactcacaataatattttcaaaatagttcaaaagataaaatataaagaatatgtgttattaaagtaagatctatcaagcaagataaaatagttcaaaactttacattatgaatagtgtttctatgcatgtagagaaacactatacattcttcaaaattattttaataatttctctctcatctttctattttttccatttaatatttttcacattcttgtttatataaaataaaagattttataaaatataatatttaaatgatatagagaaagaaataatgtaaaaaaatataatataatgtattaaataaaaatataatatttaaatgatataaaaaaagaaataatataaaatataaaagagttgatatacggtgtaatgtaaaagcgtgagttaaaatagaaaaataagactttggtgaggtattctaaaaaataaagttgagaaattattgagagtgctcttatatctccatttgaattaaagaataaaaacacaatttttattttgtttttctttaaaaaaaaaataaataagtaaatcaattacaagtcacattttttaaaaaaaaaact

SEQ ID NO: 349227 - DNA, 738 bp, Cannabis indica
tccaaaattttgctattccataaattatttcagagtttcggagcaacctcacagagaggagctctttccaaggcctgagccagatacgcagatttagacaagaaacgcccggtactttctagcgtccaaacccatctatccgaaccagttccagaagggtggcctcctttaagaatgtcagagactgtttcttggtcgaaatagcctcgcagctatggaacatcccactgcccattatctaacaataagtcagccacacggttaatgttgggggagagacccccaatcagttttgggcagaaacctttacgatgcggaatctagggatctccccaaatcttagtattctcaccattggtaaccaactaacaggcaccttttctcaaaatagaatttgccttaacaacgcttttccaaaaccaagaatcagaatctttatacatgcagttaagaaagtcttttccttttaggtatttggctcttaaaactctgcagcacaaagattggcttccgttgaggatattccacccccatttggtcagaaaggcctgattcatttctttagttttccgaaaacctataccaccaagcgatttaggaagacacagtttatcccaagccctgagatgaatcccatgatttcctttctcaaaaccccaccaaaaatctctgaccaaaccatcaatcctgttaaccatgcgagtagagagtttacaaaaatattaaattttaggcaaa

SEQ ID NO: 349228 - DNA, 638 bp, Cannabis indica
acaccaaaggcaaaaataatgatttccccaaaaccaagcttcacttcaatccaatcttaagcaattgaaccaacaaatttcaagagaaatcaaagagggctagagagagggagatggattgggtaagagagggataaacaacagaaatttttaattcatttcccttaaaattcattttattaaacataaatcaaaggtccaacaagaccgttttgcccctagggttaataaagcttgcgtacacacacaagggaatttaagtcatttcatgctcatttaaactctaataaatttcaaattattctcactaataattaaaatgccaataattaaatagcaattacatttcgggcccgaaccccgttccgcccgaaatacccggttgtgactataccgcgccaacctgtcaaaacacacctgaaaaagacaacacctggatgctatataataatatagtcccataagcacgttaataaattaattttatcattttacccttctcgggtcataattacaaaaaggcccctggctcaccaacgggatcttaacatataattaatcaaataaatcatattaatttacatatactgaattatataataatataattccttaattattcataattatctaattag

SEQ ID NO: 349229 - DNA, 619 bp, Cannabis indica
tttttggaccaagcagatgggtttattaagttcgaggaagctgttcagtgcgtggacaccgacgggcataagaaagggtgaccacatatctccttagcaggggcacctgctcagagtccacaatatcctatcaactcaactctgagcgggaaaaggtccaataacagtggcacgcaagacaattaaaaagggaaagttcacaggcaatggcgaacatcctagagaaaatgcctccaaatttactcccttctccatcctaactgacaacctagagacaatctacgcaaaaatctatggtcccatacaaaaaacctgctcccatgaagaaagacgtaagtaaaagagacacgtctaaattctgtcgttttcatatgaattatggccatgacatgaatgagtgcaacaacctgaagcaaaaaattgaattctaaatcagaaagaataacccgcacttgcaaaaatatgtcaaggccaaccagaaccagagggccacctaacacagacaataatcaagatctactaatggccacaccggtggacgggcatttacaagtcattattgggggcacacatctagctggagatcaagcaaagctcgagaaaagtatgcccgagcctt

SEQ ID NO: 349230 - DNA, 879 bp, Cannabis indica
attgatgttccatcaactttcaacgtcatgttctgccgaccagccctatataacctaaaagctgtcacatcagtttttcatttgtgcgtcaagttcccaacaaagaatggggtagggtgcctcaaagggaatcaaagaattgcccgggaatgctataacctttccctgactaaggtcaaaaaggaaaatacttctagctagagtttgggcaaggggaaaagtattgccaattaggaagtcgcctaaggaggggacgaggatgtggatccccgacttgggaaccaaatacaaatgtagggccagtggaagaactggaagagatagaaatcgacccaaatatctcaaccacaaaacttaaaattggcaaaggtttgcagctcgaagtaaaattagccttaataaaatttctaagagaaaacctagacatttttttctgaacacacaaggatatggtcggtatcgatccttctgcaatatttcacgccctaaacatcgatccaaacttttgtcacgttcaataaaaaagaagactattggactaagaacgggcataagcattaaaaaaaagatgtagaaaagctgcgtaataacaagttcatcattgaagctttctatccggcttgtgtagctaaccccgtactggtacccaagcctaaaaaaatggcgagtatgtattgattttacagatatcaacaaggcgtgccccaatgactgttttccacttccaagaaacgatcaactcgcggatgcaacagccgggcatgagatcctaagctttatggacgcctattcgaggtataatcaaatcagaatgcatccaccagaccaagaactacaagttttcgaacagatatgggtctgtactgttataaggtcatg

SEQ ID NO: 349231 - DNA, 633 bp, Cannabis indica
caacttaaagcttctttgatgcctataatttcaaaaatttcaggttggacgcgaccaatcttaccctaagtaaaggcttctagcagattgccatgatggtcacgagctacacatcccacaccaaaccgatcctcttgctcaaataaggccccatcaacattaacattgatcttatgtaacataggtgcaatccaacgctcagaatatcgccccccatcgttcataggagacaaagaaagaccctttctttcttgagcacatttatactgatcatgttctttgctgatgcaataatatttgaagtagaccaactcttcttttgccaaataaagtcattccgtgcacgctaaatagcccaactcatcacagccgcttcctccatctcacaaacatgccccttgctaaacaaaccagcaaccacttgctgtatgtttcagagtcgctgccaatgtccaccaggcttcgattccatgcagcctttgcaaacacacactccaccagtgcgtgatacagtgtttttagttcttactgaaacactaaaaaaaaattaaaaataaaattaggtgctgtttggtaatagtttgttttctaatttttaatcacaaaatgaaagtaaaatttttgtttttgaaa

SEQ ID NO: 349232 - DNA, 806 bp, Cannabis indica
agccagaattgaagaacaagatcacaaaattcagcgattaagacagcagggtgctcctgcggtgcctgttccagaagttccagtggcacctgcccctgttgtccaggtcgaaccagtagtagcggtaaatagaatggaacctctgtatgaaaggttccgcaaccaggcacctccagcttttctgggaggtccggacgtcatgaaagccgagcagtggctaacagtgattacgaagatattgaatttcatgggcgtcaccaggaatgacagagtggtgtgtgcaacatttcagtttcaagaggacgctctgttctggtgggacatggggtctttgatacatgatgtcacaacgatgacctgtgaaaagttccaggaaattttcaatgcaaagtactacaatgaggtcgtcagaagtgcctagaggaaagagtttacccacctgacccacaaagagaacatgagcgttactgaatatacaacgcagtttgatcggttggcaaggttggcctcgggaaatgtgccaaccgatctcattaagaaggaaaaataccttgatggactgaatgtgaagatcaagcatgacctgatgattactacagacgacaaaaccacctatgctgagatggtggaaaaagcactgcgagctgagggcgcagttgggtgtatgactgagtgagctaggactccagtgagtggcagggctcctacccctcctacatcaggctttagcaggggaggtagtggctcggccatggaccagaaaggaaaacatccattgcaaccggtggctctggtcaaaacagagg

SEQ ID NO: 349233 - DNA, 195 bp, Cannabis indica
atacttggagacgatatcattaaaagtcgattcatattcaaataagaaattcatgtcaatcaaaggaggagcccctttgtagttgacttggatttgcatttagggattcttaaagtcatgaatgcaaagtacataaagaagggaaacattaggcgtttggttggaggtaatgaaatggaatggaatggaaaggaa

SEQ ID NO: 349234 - DNA, 653 bp, Cannabis indica
agggtccgattccttttaattttcaaaagaatgtaaaagagtatcgtcaccggttttcttttcttgcggcttccaagccgtggaacgcccagaattgctcacggagtgggttagggttcctccgatgcactgcaccgcaccgcccctacccaactcttcctcctgcacgccaaggtcttctccacatatgacaaggacagactgaatgtgggagacttagtcacaactacaaactgcaggagggctaagctcatcacagagagccaatcggtggatgatttcaacttatccaaggttctttctcccaacattcacagtccaaaagtctgaaaaggcactccggacggacatcattgcctcagcggaagaccattacgagaaatacctctttaggagggagcaggaattgacttatattaaggcttaggccgctgccgggggggtcctccggatagaagctggtatagagtgggctctttcctagcctaaactgccgttcccggttcccaacactggggctcctagcgccagcacctccggatccagtaagtctcccttagtggttcatcatctcccttccgctcaagattattctcgatgtaggcctatagagtttgatgaacgtctacttagatttagaatgcccctacccg

SEQ ID NO: 349235 - DNA, 735 bp, Cannabis indica
ttttttaatttttgaaatgggatttgagattttaatctttgaagatgtttttttttaactattgcggctatatatacgtagtgagatgtcatggtgaattgtgtccattgggcataattgtctcttattttaattcaaaattaatctaataaagttaaaaatatggttaaaaatatctacaatgttataattttaaatttaaacgaaaatttctttatataaaatatgtacataattgttatttttaaaaaatatatatataataatattattaataaagaatattctattaataataatatattctgttaaaattaacgtagaaaataaaaaaatatccttaaatcaaaaattctattatataatcatattttatataaataaatatgtatattagtaacaatcacattttaattgaaaatttagattctacacaaaattctacttaaacttgatctgtgtaggcacttactctatcactatagggtatgagaatatgaagagaggaagagaggaatgtggttcgaaaatagcaagagtgaaggctcaggaaatttttgactgaaggcttgaatttcatcatcttttagtgtgagccatcactatctatttataggcaaccacctaggtttaggttagaatttattaggcattaaaatattgaaaaaataaatggtaattccctcataattggtcggccataggatgtgggccctgttggatatttattttacc

SEQ ID NO: 349236 - DNA, 779 bp, Cannabis indica
aaaaaaataataatgattagatctctactttatttatttaatgatttttttctcagctcatttcatatttacttttctaattttttaaagaggaaaatcttacataacgtgccaaatggcgcgttctccttccaccaccagcaagctggacccacatgcgtcagcctttatcctaaaaactagccgatactataaaagtaaaaagaagacagaaaaagataaaaaagaaaaaaaatacatatctaattaaaaaaagtaaataaggaagctttttagtcaattcttgtaaatttctctcatagactaaaataagtaattagttaaaaatctattttaaataatgagctttttaggaatttcatgttttggctcaaaaccaattaggtaagacattaaagatcttgcaaactgataggggtgtagagtacatggatatgcagtttaaacattatttaattgaacttggaattgaattgcaatatactgcccctagcactctatagaaaaatggagttgtagaaataagaaatcgcatacttttagaaatggttaggtctatactgagctattcaaccctgtcaacgtccttctggggatatgcaatatagacggctaatgacattctaaatgttgttccatctaaagcagtccctaagacacaggtagaactatggaatggtcgtatacctagattacgccattatagaatctaggggtgccctgctcatgtctaagaaagaaagaaggcaaactaaggtttgcacgtttgttggaaattt

SEQ ID NO: 349237 - DNA, 646 bp, Cannabis indica
ggtaggctcttttgattagcacagtggcttgcctagaacggtcatcaatggctgcttgctaagctctcataacttccgtctcccgatccctccattttatgaattgatgtctttgctcgtcaaaggcaaggttaatagctgctcgaaggtcttcctgatcatggagcaagatgttgttatggtcttgcataagactgagtgcattctacagattttgaagttctgtgttgttgcctcggatttttccaaaaatacgtggatctggctgcgtgtgacacgtagatttcaagagcacctcagtcacaaaaattggctaagtcataaatgaccgagaagtgcacctcacggagtgagcctcccagagaggagcataaagcacgcctttactctttgggagctgaaaatataacaatgcatctacgcgaggagaagagctcgttcgagcagtcatttcgcatttaatgtggcatgggggaaacgtatcagaacctccataagaggatttgacagatggcgtaagcctcttttatgacaattacacgataatcaacaagtctagtgacgactccattatgaagactcacatcaatcaaggaaggataaaagattattttcacctaatccctaagatacctacggcataggt

SEQ ID NO: 349238 - DNA, 559 bp, Cannabis indica
gtttgcagtaagaaggtttaagtttggtgcacacactcacaactctagatatattcgaggttacttgtatagttcttattggcttgtaactaacattttgcttgaaaatttgtgccattttagaatttttgacctagaaaatattttgttgatattatttttgttcgcttgaattgctagagactagcaataagctagttaggagttgtgattaaggctcaaatttatacagtttaagtcattaattatgcatataaattaatattaattaaatatttcatagttttaataataaatttatttttattgaaaatatttattttattttaatttttgtgttatttttcagttttgagcaagaaaatttaaataccaagcccaaatagcaaaaccatcagcgttgaagacatgtcatttatattgggaaaattaatttcatagttttcaagcccagagccaaactcatgtcaaaatttgtccaatatattcagggaaatttacacccattactgcctttttcattttttttttcatttgtattgttgcacggtcattttaa

SEQ ID NO: 349239 - DNA, 1177 bp, Cannabis indica
aaatgcgatggatggctagtttgatcacatgggtaagtttagaaccttatctcttagtggcaaatattttggagaaaataaaataccgggattacgcggggttgtggtttttagccattttagccctacccttaaaaatgcttaagttgtaggttaaagggcattttggtctttttgttaaatggagagttaggtggttgcctagacatgtgacacctagcaattaaaatattcagcaaggttaattcatttaactttagttttattttagaaaaaatataaggaaattgaggaaaaaatcaaaagaaacccttgctccttctccctttctcttcgagcagcactaaaccaaggagaaaccatctgatctttagctatttttctggaaatgcagtagagattcaagggttcttgaagccaaggtaagccctagtaacaccctcctttagtttttgaattttatggttgattgagtatgtgattttgttaattggtggttgttaggtttagaaatgtttagggtttgaattttaaggttcatttgagttggtttaagcttcttgtagttggtttggttgtatggaattggatttatgcaagtttgggtttgaaaacctaaactttgatctttaatggcatgttttgattcagtgggttttttttgtggtttattggctggaatatgttgtgtataccctaattaggtacactggaaggtttggttacgtttggtggagttttgagcaagaaatgagattttttgggtgaactggtgcaaaccggttaactggttttggcagggttccccaagtctctcatttcctcaattctcgtccaatccgtggcatacttgggtgattccctacttccttagttagaataatccatagagagtataatagaacctagggttgtgggttcgggtttctggattagggtattttatcatgtgatttacccggtttcattatgtgattagggcatccatctagtacgagactttccgttcaggtcggccagcacacttgaatctggaaagaaggtaagaattgtatataatgtgtgatgtcaatatctgaatgtatgtatatgttatgtgtatatgcatgcttatatgttgtgatttatacactaccaacactagtgtggttgcggtatagagtgcattggtaaagtg

SEQ ID NO: 349240 - DNA, 601 bp, Cannabis indica
ttagcaaaggtgggacaatttatgagtattgtctggaatcctaggtgaattgaaggtagcgattgtgtagtaattttgagattatgtaggcgtgggactacttatgttagcaagaagcatcttgtctttggtaggccaccatgaaggaactctatggttgagtgtcctttatttggtgtgatttcatttagaaaatttccccatgaagcgaggacgttaccaaggtaacatataaaagaacgtcaggaagagtagtggtatcactaaggtaaagaagattatctgaatacttaaggtgatacggtaatgatggagagtactttataattgactggatagtcaatatggtatataaggagaccattgatattttgggaaaagattactttattatgcaattatatactcacccagaatggggaaaagcttatgaattgagatgcaatttagtagacatgtaattgagtgattggtggatgttggatcacaaagtaggttatttattaataacgagctatataattgagtgtaaaataagttttaaagtggttaactaagtatgaagatagtgatgattgcaaggaagcagtggtagcatatg

SEQ ID NO: 349241 - DNA, 955 bp, Cannabis indica
caaaacgcgagtggtttgagaacgcctcgcaatatattgaccatcatagggcgggcctcatatcgcaggtgactctagaaagtcacaggagcgagatgcaaaggaagccaaggagaagccgctcaccaacgtgaacaatctcagtgagcgaccagagaaattgttcaaaagagaatgcgatgtcatcaccttcatggaaagtgatgcgagatgggtccatcacccgcattctgatgcattggtcattgtccccaatattggcagagataacgtccaccatatactcgtggacaacagaagttcagtgaatctcttgaacttccaagcttttaaacaaatggggttgcatgagaaggatctgcgacctattacgtcaagtatatacagttttaccggcgacgtcattgcattgaaagggatgatcaagctctcggttaccttgggaaccgcccttgtagtagccaagtcgatggctaactacacggtaatcgaccaatattcggcatacaatgtcgtgattggtcgaaaaattttgaaagagatgaagattgtgacgtcgatctatcatctcacaatgaagttccctactcctgctggagtaggttctgtgcgaggagtccagtcagactcgcgagaatgctataatgtagcagtcaagctcgcagagaagaaatcggttaatgtcatctatctgttagaggcaccctcctcgccaagaggtccttaggatagaagaagtgtcgcataaagacggaccatcctaggatcctcgattatgctgcaaccgcccaagccgcggaagatactattgagatatggtcagaatatctccacaggtcatgtgtcatcgcttgaacattgacccagaagtgcgaggtgtccgacagaagcgccgaaaaatggaccccacaaggtaccaagcgctaaaagaagaagtcgaccgcctcctagcatg

SEQ ID NO: 349242 - DNA, 711 bp, Cannabis indica
catgaagagcctgagaggaaggcgttccaggaggaagcccaacagagggaggcttaggcagaaaggagtcatcaagaggcactgaaggccaaggcagaggagttaaaggctcgagatgaggccatggctaaggcaaggcgcgagctgagggaggccaaggaggcagttgaagatttgactgccaggctgaagtcaatggaggagctgcatcaggcttacttgcagacgacgaccaacttgaccgttgaggtgaaggagctcagggatttcaaagatcaggccctgaagaaggcgaagagggatgagctcctggcccctgttgtctgcaagcactgcaccaaacgctttgatgatggcgtctttatggcctggcagactaatggccaaaacctcaagctcgacttctatccaaagcctgaggaggttctcgcccgcttctgggagaagaagaagagacttgatgccctcgccctccaccccgcattgattaagccaaaccgttaaccattacagctattatcacgatttttttttttacatttatagtcccttttcccctctgtaagacaatttatattttttcttaaggggagacatttaaggcccgtagggcttttttcttggtttgaatactttatatttatgcttaaatagatactttgtctttttacctttgtttaaacttttcgcctgttttatatttgtccgtgt

SEQ ID NO: 349243 - DNA, 599 bp, Cannabis indica
ttaatggcagtagggttttgaatcaaaggggatctggtttgaaaaggaatattccttttagatccgcacaaaaccagaaagacatttttacccctattttgtgactgttggggtgttgggtgtaggggcaatttcgggttgctgtgatttcctacagtggtatcagagctcggggaagcaagaagattcaacaacacctggaaacaacgtcaagaaacaagaaagatcatcaaaacattgaagaagccaaatctgaaattatcaagaaattgataaaaaggaaaactctaacctaaactttgtcttgttacattcttgcttttattatcttgttataacaattaaacatgagtaatattagagtggatgttgacaagtttgatggatcgggggactataggatttggaggaagaagattagagctcttcttgctcataacaaattacttagggttcttagtgaacctatagaatggccagaaaatacttctaaatctacacaagaagaacttcttgaaactgctactggtttaatcatttttaatttgtctgatgctattatcaggttagttgacaaagaagatacaccaacaaaaata

SEQ ID NO: 349244 - DNA, 1268 bp, Cannabis indica
gaatagaagttggaaaggtggaaaaaattaattagcattaaatgtccaattgtacacgtgtataacatgcaatgtccattatcgatatgatatcgatagtgtgtcgatagtttgtcgataggacaaaaattccacagcttaatattatcgacatgttatcgatgatatgtcgatatctgtcggcgatgctgtcacttgaaatcctaacagttcttatcgatgagatatcgatggaatgtcgatagtttgtcgaatatgttaaatttttgctgttttttattttttatttttaattttttggtacttttccctaatttaccttttttttgcttaaaattgtaggattgactgtgtttcttattgtatcgtatgatggtgtttggtgtgttgagggttttaattgggtttataaagctgaaggcagtttggcgttgacagttagaactgacacaaccatacaataaatgcgtcaaattttatatgaagagttggaggttgatcctttggcgtatgatttaaaagtggagatttgttccttgtacatgaagggacaaatggttccgctagaggttattaaaaaagaacgccaactaagaacgttcttagagatgagggcaacaatgtcagacacagattttatgccattatttgtgactaaggtgagaaaagttgggaatttggagcctatgccgcctactaatcctctccctcggagtgtggtagggtctttcgttcctgaaattgatgttgggattggtgtgaatgaggaggttcctaccaatgtagatcaacactaagaagcggcaggatttgatcagtttgaggagtttgatactcccttctacaataacgatcctattgtagatttgaatgtgaatgatgaacatgatttggtagtcgatgaagccgtaaaggtacctttcttgaggttagagtgtggaccgaacaaccatggtacacagtgagaacgacaaccctgtaatgaaaattgcaatacacctggaactagcagtagtcgacaaggtagatccaaagcacatgctcctcctcgtcatgtaaccttctcaacgttctcgtcttttaaagtttgtaccaagttcaaagctcctacgtggacaaaggaagatataatggaaaatcatgagctaactacttgtttacaaagtaaggaatcaggggagatacaacttgacaatttttatgaaaagaaggaagaattgagacaagtggtgagtaggtttgtgttggatattattttaccaggatct

SEQ ID NO: 349245 - DNA, 673 bp, Cannabis indica
ggtggccattgacattggagtagaaatttctaaaggagaaaataaaaacaagattatacaaataattatagtttagtgtaaaagtaacacatacattaatactaaataatgaaatttgtgttaactcaaaaacataatcgtttataattgtggctttatatatatgtaaaaaaaagataatatctagcttaatttgattataaacggttaaattttaaaatatggattaaataattaaattatattttgaattcaaaaaattaaaattaagtattattattattagaagggatatttgtgaaaaaatctttttaatatttatattgttataaatatgaccttaataaaaataaatattggctttattttaaaattttgttacaattgtattttttttaatattattattggagcatggattaattaattattatcttattttttattaaaaatatacaaattttaattataagtttattttatttgatatattgtctaataatatttctgatcgagttagcacgagcttacaaaattttaagttaaaatacttttgccgtcatttttttaaaataaaattatatgtaacaaatacaaatgttagatttcacctctaaatatccccttattataagatgagaacttcattcaaattaaaagaaaaaaaagaaaa

SEQ ID NO: 349246 - DNA, 1989 bp, Cannabis indica
cacagtatgtatgtttaaaatcacgttaacacgcctatgccagaatcgaggaacaagataatgaaatccagcgattcagacagcagggtgctcctgcagtgcctgctctagaaattccagtggcacctgcccctgctgtccaggccgaacctatagttgcagtgaattggatggaacctctatatgaaaggttccgtaagtaggcacctccagttttccttggaggtccgaatgttatgaaagccgagtagtggctaactgtgatcaccaagatattgaatttcatgggcgtcaccaagaatgatagagtggtctgtgccactttttcagtttcaagaagatgcgttagtatggtgggacatggtgtccatgatacatgatgttactacgatgacctgggaaaagttccaggaacttttcaatgccaagtactataatgaggccgtcagaagtgccaagagaaaagagttcactcacttgacccagaaggaaaacatgagtgttactgagtatacgacgcagtttgaacgtttggcaaggttggcctcgggtataatgcaatccgatttcagtaaaaaggagaaatatctggatggattaaatgcgaagattagacatgatctaatgattactactgatgaaaaaaccacctatgctgaaatggtggaaaaggcagtgcgagctgagggcgcagttgtatgcatgacagagtctgctaggactctagtggttagcggggctcctacccctcctacatcaggctttagctgggggaggtagtggttcggccatggatcagaaaaggaaagcatccactgcagctggtggctgaggtcagaacaagaggttccgggggaaccagggtcgaggcagtcaccagggtagttctgagacccgataaacttacccagagtgccccagttgtaaaaggcaccatctggggaagtgtagaggacaagggtgctttcagtgtggcatgccagggcattataagagggattgccctcaacttagaaccgaagcaccgaaagctccagcgaaacccactccagcaagggtgtttgctattactcaggctgatgcagaagccagtccctctgtggtaacaggtcagctctcggtcaacaactctttttactctgtactgtttgactctggggccactcattcctatgtggcaaccagaatctttagtaaactggataaaccacatgatagttacgaatcagggtttggaactcttttaccaggcaaagagttagttatctccaaaatgtggattaggtctatgtcgatcaggattgatgataaggagttaagtgttgacctaatagaaatgagcttagcagattttgatatcatactgggaatggatttcttatccaaatattcagccagtattgactgtaagaggaagatggtaatcttccaacctgaaggagaaataccgtttgtttttgtcggttcggttcagggatttcggatcctggtgatttcagccttatcagctaaagatctattgtgtgatggatgtctagggtttctggccgtagtattggataccactcggcctaaccctattcggccagaaaacattcatgtggtacatgaatttttagatgtttttcctgaagaactatgggtttaccaccttagcgagaaattgattttataattgatttggcacctggagcagaaccagtctccaaggctccttatagaatggctccagctgagcttaaagaattgaaaattcacctccaggggttacttgacgtagggtttattcagcctagtgtgtcaccctggggagctccgatattgtttgtcaagaagaaagatgggtctttgagaaattgcatcgactatcgagagttaaataagcttacagttaagaataaatatccattacctaggattgatgatctttttgatcaacttcaaggaaagatggtcttttcaaagattgatctccgatcgggctatcat

SEQ ID NO: 349247 - DNA, 537 bp, Cannabis indica
aagagatcaagccaacctaaagttgtaggcctaccagcaaaaggtcccaaggcacttcaaaaaacaagtcaaggacaggaaattcttcataggagacctagttctccaaagagtgttcctgaataccaaagatctagtagtaggagtgttcagacccaactaggaaggcccctatcaatttacagagataactattaacagagcctacaagctgagaaggtacaatgagaacgcggagctcattttcctaccaagatactggaatggagagtacctttacaaatactaccagtatctagcttacaaaaagctaatttgtagtagtagttctaccaactgattgttagagtgaaaaagagctaatacccacgacctttttggtgtggctgcgttcttcaacagtggcctctgctatgtaagtcaagcaggggtagatatttgatatctagaagcaaaactttgttatgtaagcttgtagattcaatttatgtaagttaaacaacaacaaagaccaattaatgaataaaaataatgttt

SEQ ID NO: 349248 - DNA, 747 bp, Cannabis indica
agttcttaagtttttaattaatttagtaagcttttaattatttttgaatctattagcttttttgtaattttatatgtttttgtgtgtttttataattattttattataatatgttatgtggtatttattttttaattttattttaattttctaattaattttatgtatttttaggtatatttggtagaaaaagattgggattaaattgaagaaatattggagaaatggagttaaaagtggaattttcaaaagaaaatctgatctggcctcaagcaaatcccactctcggtcagctccttgaccaatctgagccgtctgtgaatcgatccaagggtcatggaccacgcgtgatggagacccgaccagaaagcaagtgacggctggaaatccatttctctccagcctgcacgcgtgggtccagctcgtcagcaatcccagcaaaccagctctcgccacgcaagcgtccgcagcctcacctccaatagcagctcgccacgtgtccgcttgctgagaagaaaaaaaaaagaagaagaaaaaagtgaagtgttaattgatttactcatctgaaaatcacattcacaaacaccaaaaatttcattttctcccacatattacacataaatattctatttactcttcccaatttatttcacctaaataacattcctaatttatttttaccatatctgttcactatttttccatcgaaacaaacatttattttttccaatactcttacacatactc

SEQ ID NO: 349249 - DNA, 1076 bp, Cannabis indica
ttatacaaatcttaccttgattctgagttcaagtgttccggccaacctgagtggaacaactgctcggcgaattacaggctcctaaatcacatcaatcataacataggtaagggacacgctaaatcactttccggggacttaaacttgaaactaaaagtttctctatcgatgaataacatggaaataccctaaacatcacaaaaatgggaaaaactagggttcccaaaactgccccaaccggtagaccggttcccaaccagaattctggttctgcggggtttcttggggaccaaccagaatttcggttcctacaggtccctctgaatcaaaattctagttcagtgcaggaatccaacaaaaaaattcataactcactccaaacaaccccaattcaaaccaaaccttccagacctgttttatacaacctaaagaacatatttaaggcaataaaacactattacaagctcagaaacaattttcaccatgtgagagcaaagcttgagctcataagctctaactttgaacaaacctcaccacaagccatcaaacctgctcaaaacaacttaaataaacataatccaactccagaaaacaaactcaaacaccaagagcaaacacaaagctcaaacccctaatttcatgaaaaaaaaattcataactcaaagcttaagaaaactaaagagagaggtgcatggaaccttaccttggattagatcactaacacttgatctacaactttgattacagcaagaaaatcacacccaaagctgctagtccttagggctttcgaataagagaaagagagaagaaggttttctctcaaattccaccttttttctattttcttaattttccaaaaggggtcaacattacacttagactattgtaacatattgtggccagctgccactctaaaattcagccaccaaaacctagggtaaatgactaaaaatacccttccccacatgactaatcacaaaatggactaagggtaaagtggtcatttcaactcacgactattctcgacattcccaatgtccaattatattgccccgctatctaaaaaatactaagat

SEQ ID NO: 349250 - DNA, 570 bp, Cannabis indica
ctttatttttcttttgaatttattttttttttagaagacatttacaagtgttttgtggcattttaattcgttccattgcacttaggagagattgcatttgtaattttacagtaaaaaaaaaaaaagttcagaagtcgcgactgggctattgcccgtcgcgacggggaagcaaagctaaattttcgaaaactttctgctcactcccgtcgcgacggggcacattgcccgtcgcgacgggaccccgttttcagcttttaaaaacccaaattcatccaatttcaccatttaacctaaaatttcaacccaacccgatttttccccttttctcaccctaaaaactcattcaaccattaaacctcaaaattcttctcattctcttcaaatcttccatccaaatccccaaaaacacaaatttctctcataaatcttctcttttcttcaaaaatcacaccacaaataccactttttcacccaaatccaaattttccactattcatcatcctcaaccttgagttctccatggatgtgcaacaatggtggtggatggacgaaattcttgcttagtaagtc

SEQ ID NO: 349251 - DNA, 817 bp, Cannabis indica
acacaataaccgggacctggacccagaattaggatagggacctgagaaacagaactaggaccgggacctagtactcgacccagaccttaacttgaacctaggacccagttcgtgacatggcaacaaaaatcgaaccagactgggacccgagattgggaggcgaatctagacctagggcttggacaaaacatatagttggtgtctggatttgggacccagcactgaacccgaaccctgacaaggacccgaacgcaaacttggaccttaacccaatcccaaacccaaaagtggacccgaactagtaccttgtgacccaaaattgaaaccaaaaccggaaaatgactgggactggaactaggacttggacatggaatcataattgaaattggacctagatccagaaccgtaaaaggaacaggatccgaactcgaaatcagacctagacaaaaattgggagccgcactcggatcccaaccgaatcctggactcgggacacgatcccgaacctgaactcagacccaaacatggaccagagtagggacacagaacaagggttgggacctagaatcgcaccccagtctcgatcccgaacacaaactccgaaatgggacctgggacctgaacgagaaccagacctagacccgtgacaatgatctagattttgactcgggatttgggtagcggggcctagaatggaccagtagtcggtgcctagatctgggactcagactacgaccagattcaagacgaagaacaaaagccgaacccagacttagacctaggacccaaaattagaacctgaacaagaatcgccgaa

SEQ ID NO: 349252 - DNA, 1217 bp, Cannabis indica
ccgaccaaacactcatctcgcgtgttgtcttttgtagatgaaccatagtgagttttggggaagcaaacaccgaagtgacaaggattttcgtgaactcttgtacgaggattaccctcgtctttgttccagtccgccctcttcacacgacaaacattccagctcaatcttcccatacaaccataggatgatggctcgaacaaaacagacatgcgtagggccaacgcatccgaccctcacgtggcctagcacgccacttcacctagtgccaaacagggtttgcctgtccaggaggagggggatcattaaggggatgccgaagtccaagagatagaggaacagggcgatgtctgtcctggaagtccttcctaggccgaggaagaggaggacgctacacctccaaattttggaggatacaacgaagctggggagccagtagatgtggacggtgatgtcctggtcaaaggagtggactacaattctaaggagcttactgctacagttcctcatagaaaacaaggtaccttgggtgctcagtgggtgagccctccgtccaaggttactgaggcacatctaagggatctggaccagtccggccatctgggcgagctggagtgttatgttcctacctcaaacaaccaagccacgaacacgaagaaggggatgtgtgcatggtcgggtgctcattccaaacaaggggcattactgcctcttcacccgtactttaggaaggttgtagacttcttctgtctctgtccaacccaatttactcccaagggcatcaaatatatgtctgccctgttcgtcctctatgccacccagaagtggggtatgccatccccgcacgaggttagctggttctttgacttgacgtctaatccaaaccaaggcaggtcgggatacttctatttttctcagccagacttcaaatggcggacgggcaccggggacaaggccatgagaaaaatcgggaattttgttgacgagtattgcattgttgatggcatgggcaccacctatactcagttctagcagatccctatatattaccatccacccttcacgctagctctcagggacacggctcaaagaatcactcacctaccgaatgatgcccggaatataactttgttcacctcggaggacaactttatggagtacgggctctacccgaaggatttcattccccagcctatgaaggagaagaagaggaaatctag

SEQ ID NO: 349253 - DNA, 508 bp, Cannabis indica
atactaaaaaaaattatataacttaattttatttttatatatatatttttttttaaaaaaaaatgtgataaatgtagttttataatttttattaactaatttattagatttgactattttcttaatttttctaaaaaatggacatttactaacttagtttctaaatttaaggttattttctcaacctatatttttttttttgttattgtcgttgaattgtgacagccaaatctattgcttcatcgtttgctaagctgttattggccattgacggtgctgggattgagatttgtgggtccctagaagtaataacggaggtgcgcatgccctcgcgagatgggggctcagccatgtgtgtgacggttttgtaatttctgggaagtgaaccccattgtgttcactagtattttaatgaactaagttgtttaagggaggagcgttcctttgtgcgcttcggtgttttctggtttaatgaagtttcctttagcctaaaaaaaaaaatgatgaa

SEQ ID NO: 349254 - DNA, 562 bp, Cannabis indica
tgctcagttctttagagaatgagcgtgtgcttagttttccttgattaccaaggcattgctgggcagtcgagtgagtgcattagctattgtatcttctttagggacttttcctctagtaaagcctttgagctgacttaacaagtcttaaaatcatttttaaattctggtaagtatggtttgtatttgagacactaaatttttatcatttttaaaagcataacatgattattgtccttttcatgaaacttagaaagaagcatgcattagaataacttgatttttgtctaaaatattttagtcttatttttttatttcgaaaaaaataataatatttataaaaaaaaagtgtcatgtgaattgactttttggctaagaaaaattggtcatttgtctttcttttggtaagtatcaacatgtgctttatctggtaaatttttgatgagtttcctcttaaaatatgatttcttattctttatattgtgtttaattgttgatcatgattgtttttcagatctaattttttggaaaatcttggtttctttttgtctttggcccttataga

SEQ ID NO: 349255 - DNA, 743 bp, Cannabis indica
ttgtttattaatttatcacatctcaaggaatgttagaaaaatcaaggtgtatagacaactatactgtggaggtgttaactcaacttatctataatataaagtgaaattcttaaataattgtggtttaaaataatcttctaagacatgttataggtttcaaaaatagttatgtctctgttctaaagttggtaataggttaatttatagaattacaattttgaaaatacgagttttttgtgttagaatgtcttgataattttgtaattaaaggaatggttttgaataaagaagaggatgaagattataatattattaagtatgtggataggtatagtttggatttaataccaaaattgctttctattagtaggtataattggtgtaacaagtttgtttgaaaactagcataactctttcaataggaaaaacatgctaaactaaatcatggaccttagatttattaattaaataatattttaaagtttaagttttgtatccataggttcttaactattatataaaactaaagaggaaaattttaaattatatacagacattaattagttttaagttttgtgaattaagaaatttttttaaaaaaaactatgtaacattaattttattttcttaagttttaatagttgtattcttggtaggccttttaaatagggataataaatggtgctcgaaagttgaagatatgaccaagattatcacagaattttatggacagttattcacaa

SEQ ID NO: 349256 - DNA, 526 bp, Cannabis indica
ttacccagttctacacagaaaaatatagcgccctatgtatacgagcatgtaattttcaaacccctaaaagcataaaaacccagaaaatgcagctttccctttcaattagaaaccaaaaatgcaagtagattcgaaactaacctttagttctgatgattcttcctgtggctggtttcaatcacctctgaaactgaagagattcatgagtaaagaagcagaaatctggacaaagtatgggaatcttagtgaaagagagaaagggaagttaagaacgagagggaaaatgaggaatttatttcgtatcaatgagtttaaatacccatatccctcataaattgggattataacatgtggcagccagaatgcctaaggtcgtcctatccaacggccagccatgggcacgcccacacgaaaaccgaagagtttcgtgacgtggcaccataaataggataaaacaaaataattacagccgtcatttttcaaaaccctcgatgggacaaccaaaggtcacctcctcgtgacaacc

SEQ ID NO: 349257 - DNA, 524 bp, Cannabis indica
gggctgaattatatggattaaaaaagaataaaatattgggcaaaattcaactatggtcgtacacttaaagtgaaccaatctctagttacaattttgcaactttatttcaactacttattattcttctaataataccatatgttgatctcgcttttagccaacgacaacgagtctattttaataagcgataaatgatatatagccataaatatataataaagcaatgtaaagacaaaggaattttatagaggttcagccccgagcagttcggtaatagcctaatcctcgttacttgtattgtcttaagataagggagaaaggttccttttcttatagctcttacaacactatctctaaatatataattcttagataatatacttagggtaagtcttagctcaactgctttttcaacctcttgcctagtgaataagcatcactacttatagggctaataaacttggagaggaagagtttcccctctcgttacaatgcgtataaacagaaagatcatgggatcaatg

SEQ ID NO: 349258 - DNA, 664 bp, Cannabis indica
aattggctaagcatgctcataatgtgatcgcatcctaccatgatttttgggattttaattagattaattttttaaaatatctttattcaaacctgttttgaaaaagaggatttggttcaaccacttgggcagtattattatctatttattattttaaaatttttaaaacttattgtttgatgtttaacaggaaaaatgtaaaatttgttaaaccaagaaatatggttagatagacactttaaatatataaagataaagatacatatggaggaggtaacagttacattttttttaagccattagattactattaaattattgtgagtaatttgaaaattaaataaaattaataataaataagttaatctgataatttatttccttataaaactttacttaagattaattatattttgaaattaaattaattataactattaattaatttgttacaatttattactatataaggaccttttaggaatttttctttttattttgcacttaaataattaaaaattttatagaaaaactttttacaatttaaaattatacacatataatttcataatttaaattttattatacttgttatcttaatttaaaattattatacttaattatttatttttttatttaaatatttaaaaagtaaaaagtgaaa

SEQ ID NO: 349259 - DNA, 757 bp, Cannabis indica
acttctgtttctttattgatgttgaataaaattagattacattgaaatgaagtttctttattgatgttaaatcattgtatccatcaacattttaagcatagcaatttaaatcaaataaataataggtttattacaaaaaattttaaataaagaattaaataaaaaacatgtaacaaactagaaaagttgtttgtgatatttctatttttaataaataaatattacttaaaaataaatatcataatttttaaatttcaaattagggagttagataatattaaaaatattaaatctaacaatatcttaaaatatctcaattcaaaataaatatccaactaactttcaaatttctagcttatttaaataaattttaatgaattaaataactaataagataaaattatataaaatcttaatttgaaaattaagatatttctaatatcatatttcaaaccttataatttagtaaattaaactaattaaataaatcaaattagaaaattagatatttattgttaggatattatcatttataatgttaaaaaaataaataattataataaaccctaaaatatctcaattttaagtattttcaaataaaaaatttgatattatatgcttaaaattaatttatccactaaaaatatgctaatatattttgcatcattcaaaatatactcataccatttttctcatccaattttacccctaaacaaatagaaaccaaacatcccatgtctctctctctctctttctc

SEQ ID NO: 349260 - DNA, 618 bp, Cannabis indica
ttaataccctaattatatcacacatataaaatatttgattatttaggagaaaatctaataaatgaatgggtccatcccattttttattttgactggactttagccaagccctcatataaaatagtaaattatatgatatgcaccactatgcttaccatgaatagcttttacattaaatctcttatccttgtattatcaaaattttaatttatctcttcttctattaaaaagggataaagttttaattgttagagattttattacaatagaagaaaatcaagatacatgacaactctattgtaaaataatacaaagactaaaataagagattgattaaatatacattacaatacacatatatacactatatatattgcatatattgttgggttttatgccctaaataaaattctatttcaatgtaatctctatcatttaaatatcaataaagagacagaagtattttcatcacttattgtgtcatttggttcatgttacaatttatatgtttatttgatttacaaattcatccaaatccttatcacatttatgttcttgattattgtgtcgtcagcacagtggaaagtaatcaagattgtgtgattaaatatatattcc

SEQ ID NO: 349261 - DNA, 513 bp, Cannabis indica
tttttgtgactaatacttttagtcatggatcttttactcacaatataacaataatgatttataattattcacaactttcactattacaaaatggattattcacaacggttaataaaagggtcaattataaaaaccgttgaaataattattgccaacggtggagaaccgtgggcaatactaagtgaaattcttttaaaaaatagtgaatcccaacggtagagaaccattggcaatactaaatatagccaacaatttacaatagtggataatacttattattctcaacatgatgataaactgttgggaaatattccttttaattagcattttttaacatcaaactttgttttattttaattaaataaataataaaataattaattatgagtgaaattaaataaggtaaataataaaataattaattgagaataaaattaaatagggtaaataataaaataagagaagttctatttgcacctcattattaaagtaaataaacttaaataattttta

SEQ ID NO: 349262 - DNA, 744 bp, Cannabis indica
tgaatttggattaaactattgtttattattggattattaggttttaaattatattttttcatattttttttcttttgaatgaaatcagcctaaatagtggctaaaatggattggattcatccattgaattcattggatggatccaattcaatccaataaaaaaccagttaaagcatccaatggatggaaccgatccaatccaatacatccattggatcggatcggatcagatgactcaattcaattggattggatcggatggcaaaatccaatatccaataaataattggattggatcggatgggtccaaatccattggatgtgatccaatgaaaaccccctaattatttgaatatcacacagctgtgattagtccgcttttactgggtcaaaataaactgtattaaatacgttgcaaaccgtattatatttggacgtcttgctaggaatagagcagcgataaccttgatagcaagctagagcttttcctatttctttccatggtctataatataaatcttgtcacttttactctggaaacatagcaccctatctaatcgccactttggtgacgaggtgatcttttttcacgtgcatgtcttccaatggcgaggtggacgcctcgctatcgcttgctttggttcacccgtcttctacacttagccttcatattatacactaagtgtcttcacaatcaatatatttcatccatgtaatcgagttagtgcctcgtcttatacacct

SEQ ID NO: 349263 - DNA, 664 bp, Cannabis indica
atcatgattatattccactgtgctgacgacactataatcatgaataaatatatatacatatttatatatgttaaacataatcatgaagtaaatcatgtgaaccatgcaacataaaatgatttctaatctttaataattagtaaatctgattatattgaaatgagttttatttagggcacaaaacccaacagtgtctgccaggatgtaagctggtcggccaagtgcctgccagggtcaaggctacacattaagtgcctaccagctttgacaagtgttggtcaggcttaacatgtattggccagtctcagtaggtgttgaccagcctttatacaactttccttaaaaggtcaggcttccttggtcgaataggccctttttggtctgacaaccgccctgtggccggccagcttatgctcaaatcctgaccaaccagcttgtgttcaaaccctggccggccatacaagcttctcctggccagcctatgtactccccttggtcggccagacatggctgtgtagcttcttgacaacttgcttaactcttttcacatgttgcttaacaatgttgccatgccttgtaaggagactttgttctgctattgacaaggttgtattccacgtaaccttagtcttgacttatgtggacatgctgttgggttttatgc

SEQ ID NO: 349264 - DNA, 588 bp, Cannabis indica
gtacacctcacattttacatcattaaactactgaaaatgaatttttcattttcgttgcttaaaactcattttcggtgaggttttcttggcaatttttgaaaagcttactgtaaatcgtcaatttttaacaattttcttattttcttgtttgagaatttttattttgtcatatttaagatgttagaaaagatttggggtcaaatggttggatgaaacacattttgaagccatttttgggaaaattgcctgctgcaggaaccggttaaccggttcctgcatacctaacgaaccagttaaccggttcgcagcaggtatcgatcccaaggttattttagtcttttcaaacctatactttttcctataaaaccctacctaaatgaaactcgaattcagattttcttaccctaaaaaaaagcctccaaccctcttctttcaaaagggaaatttgattattatgcatactaatgggggaaattagttccctaaacttatacatttcaaaattttaaaaataggtccactttacattaaatccaaaaatactcctctaatttttgaaaccccacttctctttctctctctctctct

SEQ ID NO: 349265 - DNA, 698 bp, Cannabis indica
gcaataacgcctagaaaagatgtgtgacagagataaagacgagcagcgcatcgcccagaaccttcaaaaggtgaaaactgaagaacctcccattatattcacggaggaaaacgagaaaaaatgtgagatattatcatgtcgatccatttgtgattaccattcatctcaccaataaaaggatcaagagagtgtttatagacaacgggagcttggtaaatattctttataaggaaacactaaggaagatggagctcgaaaaggccaaattaaggccttgtatggtgaatttttgcagattcaccggagacagcattgccagtcttgtcataatcgagctcgcattaacattgggcgaggcaccccaatctgccactattatgcaagatttcttagttgtcgacttgccatcggcttacaacatattgttgggtcgtccaacactgatcgagctaggggaattccgttcgatcaagcacctatccttaaaattccaaacaccagaaggcgtgggagtggtgcatggggaccagatgctagctcgcgattgcatcgcatcgagttgcagcataggaaagccggtcattagttgatggcgatcttgacagaagaaagtgaaaagaaagacgaagatcttaacccccgagttcaagatgagagaaacctattaaaaccaattgaggaattggaagaggttattc

SEQ ID NO: 349266 - DNA, 737 bp, Cannabis indica
ttagtagatccagaatcaacaatccagaaggatttgtcattctctaaaacacatgattcaaaaacaaaagcattaccttcattcgaattgtttagaattctgggacatcgttctttctgatgccccttctcattacgatttgaacattgaagagtactactatcaattgtttcaggatttgtacttgaagaagtagcattgttagaagcttcatacttaatccttttccgcttacttaggtctacaaaactggaaggtggcctccttgtaggtaagctccgttcataagcacgcaattctgcttctagcttgtctatgtcggatgagttaaaattgttgatcatataagatacaacaaatccattatactcaagaggaagactattaagaatgaattgaaccgattgttctctagataaatcaattcccagcaaatttgctttctggaacttcagattcatcatcaataagtgtgaattaatgctcttaccaagaagcattttcacactacagagttcatttgcaaaagcatttactaggagagggtcggggtgtgggttgtctattttgacactacaaatatcaataagcagaaataaatcatttggttctgtaaattcatgcacaagtttagaaaataacaagtatagcaaatatatttgtaaaaataccaaaataaaacatatttaatattttccaaggttttcaacaaactgatacagtgtcccatttaggcg

SEQ ID NO: 349267 - DNA, 524 bp, Cannabis indica
aaataaaaatattttggcatctaaattgaccaaaaaggactttacgaaaacttttacttttttttttcataattgttatagttatttaagacatgttttaaattttcaaaaaatttagaataatttgcaaatataaaaaacagtgttcaaaaagattattttacacacgtataaattaaaataattacatatataccacactctttaaattttatttttgacatgttaaattttttcaaatatcttaaaatttttagaacacattaaataattacaatgtatacaattataaaatattctcctcaaggttgaaacaaatagaggatagttcaatgtatcccttcttgctaagagatgcaccataatttagtaagcgacaagtagtttataacgattgaaatatgataaagtaatgtaaagatacatgaattttatcgaggttcaaccccgagtagttcggtaatagtctaatcctcgttatttgtattgactcaagaacaaggagaaaggttccttttcttata

SEQ ID NO: 349268 - DNA, 1640 bp, Cannabis indica
atatcgtggtctaagcgccactttagaagagcatcagtaacacttggcaacagtgtttcggaagttgaggaaagaacagttgtatgtaaagcgggagaagtgctcttttgctcataaaagtatcaagttcctgggtcatgttgtggaacacgggaagatccgtaaggatatggaaaaggtgcgggcgatccaagagtggacgaccctagccaatgtgaaacaactacgctcgtttctctgtcttgccaattactatagaagatttgtggagggctattcgagaagagcgacacccttaacagagttgttgaagaagggtgttacatggacgtggtctgagaagtgcgaagaagtttttcgaagtctaaaagaagccatgattgaagatcctgtattagccctgcctgatgtatgcaagccctttgaaatacagactgatgcgtcagattatgctttaggaggggtactcatgcaggagagccgcaagctttccgaagtagaaaggcagtacactatgcaagagaaagagctcctggcagttattaattgtttacggacgtagaggcattacttgttggggtcgaaatttgtggtgaagacggaccatactgctgttaatcatttcctcacgtaaccaaaattgactcccaagcaggccaaatggcaggaattcttggcagaattcgacttctactttgagaacaaggccgaacatctcaatcaggcagctgatgcccttagtcgtaaagcagagctggcggcactgaaggtgttagcgggcatgtcagctagccaagtgggtacaccaatcaaggagcgcatcaaggagaacctggagaaggacccagttgtaaagaacatcatgactctcgcaagaaaaggaaagacaactcggttttgggtagagaatgacctcttgtgggccaaaggtgggcgtttgtttgttccgaaggcaggcgatctaaggaggacgctgctgagtgagtgtcatgacaggttgtgggcgggtcatcaagggtggcataggacacatgcccttttgaagcatgggtactattggccacagatgcgggaggatgtggtggactacacaaggacttgtctcgtctgccaacaggacaaagtagagagacataagacgcaagggttgttagaacctttgtcagtcccaagcagaccatgggagagtgtctcgcttgatttcatttcaagtttgttgaagactggagacttgaatgcgatattggtgatcgtggaaaaattttctaagtatgaaaccttcattccagtgtcgaagcaatgtccggcagaagagacagctcaacttttcttcaagcatatagtaaagtactggggagtaccccagaatatagtaagtgaccgagatcgaagattcacagggaccttctggtccgaattatttaagcttcttgggtcacagatgaacatctcctcgagctaccatccacagacagatgggcagacagaaagattcaatgggatgttggaggagtatttgcggcactttgtcaatgccaaccagaagaattggccgcaactactagatgtagctcaattttgtttcaactctcagaagagttcttcatcaaacaagagcccttttgaagttgtgaatggac

SEQ ID NO: 349269 - DNA, 821 bp, Cannabis indica
cccaacagacttatggtacaaaccatgtcatgtgtagatgaaatgtgatacctggaaaatgagagtgtatgggataaggggtataccccttagactaatctatcacccttaagtagatgactcacctttaagggagtggtgattgtttaacccgctatggaggtacttgtccatccctttcaagggggttagtcactttactcacactaggggtgattgctagacttacccctgggggtttactgcttgacttatccccacaggggtagtttctccatctcccacacacatataatatacccatagaatgttattactcactttcactcccatatactcaaaatacctcttggggaataattgttgggattttatgcctcaaataaaactcatttcaatataatcttatttgttatcaatagaagattataagtcatttaagtttacatgtatttttcatgcttatggtttaatatataatttttattaaattcagaaatatagttattcacaaatatagtgatatcaacacagtggaagattattgtgattatatgcttcaaaagtttatgtctcataattcattaatgcactggatttacactgatgtgataatcaacgataaagcttacttacaccttggataagtgttatgtccttctagggcattggcaaagtatgctagtatcagattatggagtatacattggactgagaccgatatcaatcttgataaatatattataatcttactgttgtacctttctaagttggttgatattagatcaaaagatcttaattctgatatggttaggttcgat

SEQ ID NO: 349270 - DNA, 950 bp, Cannabis indica
agaatagaatggctcattatgctgttggacaaaattcacaaggtataacattgagatttaccttgaaggtcaaacacattcagtaaaacatctataaactgaaataaaaagaaacaaaattagaatagaattcaactatattgagattaactaaaacagtccccagcaacagcgccaaaaccttgttgtgataaatccaacacgcaagtatacgtatcgttttaacaagtaatactcaggtaagtgagatcattcccacaaggactgtagctaagtaccaatcaattgaattcttgtttctatttggtagaatcaataataaagttgaataattaaatacaggaatttcagtcgggccaggcccggcccgccacaaacccggcccggcccgacccgactccttcttttggcgtagcgggtcaagcccgacccgagataatcgggccgggttacgcccaacccattttttttttagttagaatacttattactttgttttgtttcatttggtaaagtgaatggtatttaattttggtggtggttgagacaattcattatagacaccgttttttatttattatgttattttagagagagaaaatttgatgagaaaatagataatgcatcaaaacccaccattgattattattattatttgccctcttttctttttattttctttctaaaaattattattattattaggaggtggttagttataactattatactattacaatatgacatgccttattaaaagggatttcttttttctttggttttgtcttgttttgagtcatgggtaatgggagaaatattatgttgtttgattacgttttaaatcaatattgtaataattatgtaagtcaatttatttttaatgaagagaattataagggtgtgatggtaattttttttttcaattttactttaataatagataaggttgg

SEQ ID NO: 349271 - DNA, 445 bp, Cannabis indica
actcacatcaaggaatggcttgacactctattcgaataatgaaggatttaggtgacgttgcttatgttcttagtattcagatcatcagaatctggaagaacagatcccttgctctctctcaaacagcttaaattgataaggtgttagagagattctcaatgacaaatgccaaagggggagggatgccttatagatttggtatccatatatcttaggaacaatctcctattgatcctcaagagataaaggacatgagaagggttccttatgcttcactagttggaattctaatgtatgcaatgttatacactagacctgacatttactatgcggtaggaattgtgagccggtattagacaaatctaggagaggatcaattgtaacaccctaactaacttaggcatattacgtgatttttaaacgtattgtgcagctcgttgctaat

SEQ ID NO: 349272 - DNA, 1049 bp, Cannabis indica
aacttgttgataatctaatgatttgattttaatcatagtctaattgtcaatagctcttataaataatttgtaacaagtaaattttgtatttctttcatctatgtaaacctagaaatatgatagggcccatccaaatcaatttaacctgtgtgagcctatatatttgttttctggcttagatgcatataggaagcccatttatttctagatatttaaatagactaggttgctaaaataaaatatcacccatacgatagtttatttaggcccaattagtattagacttattcaatgaataacaattatttaatttaaggttaaattcctctcctttgggacttgtgtgaaaattaaggggtcattagtagtgagtacaacatactggacacagccctccctcacatgagcaaccctaattatgaaggcatatttgccttatttaaataattgtattaggctaactatactagtttaacctaattaaaattcaattagcaacataattaattttaaaataaatagaattaatttttcattggattattttaaattaatttagaaaaatacacttagtttaaagaaaagattctagatagtaatttctagtaaataatttatatttttttatatatttaattaagtaggaaaatatatttaagttgaaaattaatttgttaattaattttagaccaacttaaattagaatattttcttagatattaaattaaatttaataattaagttgattttattctagatacttaatcatttctattttaataaattaattaaatagaaaattatatttaagctgcaaatttttcaatttccgatcaacttaaggataaaatacattaaagggtagaacggtaaatttatccatttatagaggatctttgactattaggattataacaatagataatcataatgtatttatatcgtggtacatatagagcattctatataattaagagtgtattcaattccaaatctatagtggcgcaagacaaaagtaataagttaaggaatttactttgtaaattcta

SEQ ID NO: 349273 - DNA, 910 bp, Cannabis indica
aggatgcctatgatcccactaggtatgtaccgttagttgaattggaaaatcgacaactctagtaacgtggccgagtctaaccaacgaaatgttgagttggaaagagaggcagctgtagcagggcgacttaaggaaacaatgcacaaaaccaacctaatcctggagtaagaaggccacgagatagacctcaagatccgagaaccaggaggctggagacaaattaagaaaatccccagaacacccaggaggagcaacctggcgagactaaagatgttccaaaagacgaacaactgaacaatcaagcatctcgccgaggagtacctcaaagaccccagggatttatgaattaggggaatgaaaacaatgacatgccagaatcttctcgtaggaacgaaaacataaggtagcccagaactagagaacagtagatccctcgtaataacgagagaaatcttgggattcaacctaggaccagtgggttaccaccaagacaaccccaacgtccttctcggaccgatagggaggaggcatacacataccctagtggagggcgtgtatctaacctttctcgaaggagaaggcctgtgcaggacgaggcaagttctagctcaggacattcaagatcccaatagcacagtcaatttggaaggcataaacgatgaggagataaacctcgtcgtcatgatgatcgagagagtaggagtaatacgaggagctatcaatctgagacttactcagaaacaaggtctgtgagaaaccatgaacgaagacagctagatcttcgtgaacatttgaatcgaagacaactcgatttataagagtgcttatgtaacgccctaaataattaggcacgctacccaaaatacttatgaaaccctaatcccctaaccgggattactaattaaaatag

SEQ ID NO: 349274 - DNA, 675 bp, Cannabis indica
ataccttgggtccaaagtctaatcccaaacattcaaaggtggaaaggtccatgttttgtgtgtggcaaacttggacactatgctaaggattgtaagcatagaaaagactttaagggacccaaagtaaatgctatcgaggaggatatcattgctactcttagtgaggtgaattttgtgcaagggaaatggatggtggtatgatacaggtgccaccattcatgtcacatatgacaaatcattgttcaagacctttaaagagtcaaagggtaaccatgagatccaaatgggaaatgaggtcaaatcaaaggtactaggcaaaggtaccattgatgtgtttttcacctctggtaaaaaagtcacgttggtgaatgtgctttatgtgcccgacatgaatagaaacttgattagtggtgacttggaaagcctgacattaaggccgtttatgaatctggtaagctcatacttaccaagtctaatgtatttttgggcaaggggtactcttgtgagggaatggtgaaattgtgcaccaatgatgtaactgttaatgttagaaataataaagcatctggttccacttatatgattgagcatgggtctttatttttgtggcatcttagattagctcatattggtttttctactatgaaaaagagttaaaaaatgtggcatgattga

SEQ ID NO: 349275 - DNA, 1006 bp, Cannabis indica
atttttcatgaattatttatgttattttttaatttaattatgaaaaatacttaggttgcttagaaaaatctaagtttattttctatgattgcatattagttatcaactgttacaaaattgataaattaggtttttgatggtttttgtatttttcatgaattatttgtttatttcttaaatttaattatgaaaaatacctacattattcaaaaaattaaaagttaattatttagggcttagcacatactataaactgtgttagattggttagatttggttttcgattatttttgtatttttcatgaatttatttatttgatacttaaaataattatgaaaaatagttaagtgatgctaaaatagtaaaatatatttttttaatactatttactatctatggtacgaaataaaaaggtttttataatttattggttgttgtaggtatttattataattatttgtaactaattaactatttaattagattttaaatagaataaatagtaaaaattgtgtttactgtttggggaaccttcaatataatgctaagatataattatagtgtctggaaataatttgagactatgttgatatgtcttactatttttggttaattatttagggttttatttatttttaacaataaatttatacataatcatcgatagtatttcacacatatttctaagcagattgaatatgttttatgatctgtataaatggttaagaaatatgctagcttctgaatttgataaataattacataattgtatattttgttaataaatagtattttagtaaaatttcacgtaaaaaagtatttgtatgagttcatgttttacgttaaaaatattcatatggatacatgcaatgtgttggtgtgaattatagtgacaaataattatgtttggtgtgtcatgcaagtgaaattgatttatgtgttacgtatttttacgtaagtttctgtatgagtacaaagatcatacttgaatgtattttgagtgta

SEQ ID NO: 349276 - DNA, 580 bp, Cannabis indica
ttttttgcgttctacgcaaccaatttttcaaaaaaaaaatattgttttgtatactaaattcatgttatgcacccatttcacctaattttttgtgttttaattttgttattttacttaaaataaactagaattcttatttaagtgttagaatcaatgtttataatatttgttaattctaccacaatgaaaattgcaatactaatttccttttatatctcttctaatatttaaataaaatttttagtatcaaatttatacaaatattgtgttttggtatactggtaaagacttattaattaatccttttggtcacaacttcaaatcccaatagtcctttttttgtatttttttatagcttactatatctatccttagcactcaacaatatctatcctatgtattacatcaatgttattctaaaattactcttagtatttaaggtttatctaaatatatataaaaaaatattcttataaaagtaggtgaaagaaagcataccttataccaaaaattatgtacttgtcttctgataaagtcacttccaataaaatcctaacaaccaagtttaagagaaattaaa

SEQ ID NO: 349277 - DNA, 1046 bp, Cannabis indica
atcatactttcaatactccgactaatttctcttggaaggagaaaaacactcattgcataactcggaagtgcttggaccacagttttaaccaaaacttccttcccagcccttgagaggaacttgccttcccattgttgcagccttttcctgactttatctttgaggtagccaagaacaacggtttttttgcaggacatggtgcttgggagccccagatagaaactatcctcaactgcaatactcatttgtagtctctagctaataacatttctgaccgtggtagtagtattagtgctgaagaaaatggatgactttgataaattcacctcttgacctgaagccctttcaaatttggtcagcagttctcgaacccgatgagcttcaacttttgatgcttgacaatacaggtagctatcatccacgaaaagcatgtgagaaactcgaggcgccccattagccaccttgcacccatggatccaaccttgtctttcatactttctcaataaagcagagagaccttctgcacagagaatgaacaaataaggagacaaaggatcccctcgtctgaggcccctagttggagcaatgaacccatctcttggaacccatggataacattgtagttggccgatgacacacattgcatgataagatgtacccaagtgtccacaaaacccaacttcgtaagaaccacttctaagaaattccactcaatgcagtcatacgccttgctcatatccagtttcaaagctatacaccaagtcttcccttggcgctttcgtttaagatagtggagaacttcaaaagaaaccataatgttatcagaaatgagtcgtcctggaataaaggcactctgagaatctgcgactatagagtccatgaaaggttcatacggttggtcattaccttcatcacatcttgtaaacattacaaagagctataggtctcaaatctttcattgtctccgcgcccttcttcttggggattagtgttggaatattttttaccaggatcttagatctactcacaagtatgttgtttaaaca

SEQ ID NO: 349278 - DNA, 775 bp, Cannabis indica
agggcgcagttggatgtatgactaagtcttctaggactcaagtgggtggcgagactcctaccccttctgcatcaggctttagcaggggaggtagtggctcggccatggatcagaaaaggaaagcatccactgcaaccggtggctcaggtaagaacaagaggttccgggggaaccagggtcgaggcagttgttagggtagttctgagacacgatatacctacccagagtgccctagttgtaaaaggcaccatctgggtgagtgtagaggaaaggggtgcttccagtgtggtatgccaggacactacaagagggatttccctcaacttagaaccaaagcaccaaaggttccggcgagacccactccagctagggtgttcgccattactcaggctgatgcagaagccagccctgcagtggtgacaggtcagctctcggtcaacaactctttttactctgtattgtttgattcttgggccacacattcttatgtggcagccagaatctttagtaaattggatagaccgcatgatagatacgaatcatggtttggaaccttattacatggcggaaagttagttatctccaaaaggtggattaggtctatgccgatcagaattgacgataaggagttaagtgctgacctaatagagatgagcttagtagattttgatatcatactgggaatggatttcctatccaagtattcagctagtattgactgtaagaggaagatggtaatcttccaaccggaaggagaagaaccgtttgtttttgt

SEQ ID NO: 349279 - DNA, 571 bp, Cannabis indica
aaaatctcgtttccagaaattttttgctttttgggagttttgaaaaaaacaactatttaattgcttttgatgtgaataaggtatcaattggttacttttcaattaaaatatatatttcagaatattacacatatataaataataaaataaccattcggtctccaaaaaggacgattaatattaaatgaaacttttttgtttcttttttatatttttaggctatattatgttattttattgtttaagatacaatgaggttacctttttttttttttgaataaagagggtagaaattttattcaacaagaaaaattatcctctcttacaatcgaaagcaaatcaggaggagcagaaagctcatccaaaatacaacctgacataaaacaagacttccttgcaatgcaatgagcagccctatttgcagatcgtttaacaaaagaataaaaacattatgtaactcagaaaggagaaaacgacaatcttggacaaggaaaccaaattgagatggcatttgaactgaaccttttatagcctggacaactaccaaagagtcagtttcaacttccacatc

SEQ ID NO: 349280 - DNA, 589 bp, Cannabis indica
tcccaatgtctaataaaccgtacccaacctactaacatactaagttgtgattttactgagccaaacaccgagttccatgttaccgggcaccggaaatgcaaaattatgaaaactactaactgacataaaatgcatctcagaattcaataataacaatataaataattatttaaatagctataaataattttcataattaaatatgattaactgctgatttccaaattaaactaagcggtctttacagtataatcaagatcagagtctgaatgtccttctcttggatttgatccttcacagtcttccaaactatgattgaggtactgtttgctgtgtgtgggcactactctctcactaagtatttcgaaattgtctctcttgtgtgtggaagaagaagagatgggcgactatatatagagaaaagagaaggctcaattttctgaaagaggcagtttcctgaattactgaacaattacttaactcccatatttggtgtgagccaccactttccatttatagataactgctaggtttaggttagtaattaaatggaattaaaaattgaaaatataattggaaaatgcacata

SEQ ID NO: 349281 - DNA, 692 bp, Cannabis indica
ttttatattaatcaatttaattttagaaggaaagttgtctagctttcctatttatggaaaataaggtaaaaatggtaagtttggttactcatttctttcttacctaaccagctattatattttgatcttgtgtgagtttctcattttgttagatcagatttcttgaggagaaaattggagctaaactttcattttctataaaaggaaagttgtacttactgtccacaattctgtaggtacagaaatggaaattcctaggatgattgaaaatttattttagggaattttctagtgggctagggtcttgttcagaccgtgtgtgagctgtcaataaggtgtatattgattataaatacaccttatagcagctaggtttagtacctattttgtatctttgtatttcactcatatctttagaaaaacgagtctttgttttgtagagaaaagcttgttggaatcttactctgtttatttgtattttgtattgtcttgagtctgtatttaagtctacaaagaagaagaacaacagtgctaccttcggaagaaggttttacaaagctttcgagagattgcttttcaagtcttgcattgggaggaagcaagcactcttcaaggagatcgaagggagtttgagatcttgaagtttcaataaggttcagttagaaggtggaatacatcaagtttgcggcata

SEQ ID NO: 349282 - DNA, 667 bp, Cannabis indica
tatggcgtcggttcatataaaccctttagcgtcgccctgatcagcgtcggtagcgaatttcgcgaaaaccgacgctgaaagggcttaaaaaccgcctctaaagggtgtttttgtagtagtgcttgaagactatcatggtatcttaaaaactttttgtacgttgtatctcttaatctagatgatgaggatgatgcaattgaacttgcactagggtcttctaaatagatccaccacacacaaggaatagttagggatattaggataaagtgtataatgttgttcttgttgagttctcaacacatgagcaagaataattgagagaaaaataatttattttcttactctctctatttccaaaatagtgtgtaagtctgatttctcaaatcatgcttatatttatagtagttaaaactctttaattaaattatatttaattatttaaataaataaatatttataatcgaattcggatactaatattcatgagggagccttgcaactacttgagagaatatctcaacaactttgtaatatctttaatcactttttaaatttaaatatttatctaattgaattaactaattaattaacccaaaaagacaaattcaaagggagcctaccatgtcttgtttaggacaaggattatgtcttttgtcttgataacttt

SEQ ID NO: 349283 - DNA, 1049 bp, Cannabis indica
acaacaaatttactatttttttttccaatacttccaattattttagtataatcgtaagtaagggtcgatcccacgaggactatgtttattcaattattcacaaattagtaacagaattagaaaaagagggggttttgatgattagaataaaaattgcaataataaaaattatagaaaagatcaaatttaaagtgagactacggtatgagggactagttagaggttattcgccactctcaacaatcattcctaattcctattaaagaatgtaattttcactttccaatcaaactattaatcccgcaaataacgctaaagcagtcaattatcccaatctccttattgtatgtaatcaaggtgcaacactcaataattaacttttttttacctaaagcagtaaatccatgaagcatgcaatgtatttaactttgataaggcattgagatttatggagattgactaatctaggacacaaatcaatgaagaatataattcatttaacctaggttctattcttaatcacaaataaaaattgcaatttgtcacaaacacatagaatcctagactattaggtgaatagtaatcctaagatgacggtagattaaagtaaaacctaatttagtggccatctaaacaagattaaaacaataatcatatcattgaacataaaagaagagaagcaatttgatataatggaaactagaaattaacattcaataaagaaactaagaattcatgtctcgagttttgaaataacccttaactaaaagaaaactactcagaactagacattataataaaaatcataatatttaatacgagtagaaggagaagaaaagaactagaatgaagagcacttcgaaaccgctctccgtctcttccttgctctctctctgagtttctctctctaatttgtagcttttagacttcctaaatttgtagtctaagagctattatttatagtaatgggaaagttagatgaatcctattagaattaggattctatttatagtggatagataaatccccttagaattagaattctattt

SEQ ID NO: 349284 - DNA, 550 bp, Cannabis indica
atcgaaatgttggacctagatctggaccgagatcttgacctaaacaaaatcttggacccgcactcgggacctaaacttggacctggagccgaacctagacccagattgaagtccagacctggacacaaacccggacacaaattcggacccgaactcaaacccctacctagaatcagacccaaagctagacccggaccgggacccggacccaaactcgaaccaaaaccaggatcagaagaaaggacttagacccagagctgaatccagacaaaaatcggtattggaacttgggactcggacccaacctagaccaaaacccaagacgcaaacccacacccggagcctgatctggacctagactgaaatccggacccaaacccaaactcagaccaggactcgaactccgaccctaactcaaacccaaactcgaactcaaaatcacaaatggaagtaaaaccgaactaggactaggaccaggaccaagacctaaacccaaacccgaacctagatcaaaaaccaaacagagacctaaacccgaaccgagactagg

SEQ ID NO: 349285 - DNA, 666 bp, Cannabis indica
aaaaaatagagacactgcaatctttcaaataagtaactccataattttttcaagtgtgccgtaaaaattttgtccatcttcaccggggaccatgacaccgctattctgtgttttgcggttatcatccctttccttgaccaaaaatttaataccgttcactatgcaccctggataaaaataaattgctgtattcgctgggttagcgatagcatacaactcatctgacactgcaccctggttgctcaaccgtagttcattaatctacatatcagggaaaatattaaattaagaaaagttgaacagttattgagaacaagattaagagtattgagaggcaacaaggcttacttgagttttgaaccattcagggaactcagtctcttgcactgtctcaatattgcctacaccccttgcttgaagcaactccttgtgctcactatataatataatgcacttagtaagttaagaattttttagatgaagtcgactattgtgtgtttgtgtttatggaatttatacttacttgatatacggttcaacctctgtgcaattgttcaaaatgtaccactccgccttacgcttgctttgcatgggtaaggtgtcgactgtcctcataccgaggggtcggccaacatgcttgaatacagaaaattgtcgagttggcat

SEQ ID NO: 349286 - DNA, 599 bp, Cannabis indica
catctaaacaagggttgggttgtgttctgatgcaagaatggaaggtaattgcttacgctttaaggcaattaaaagaatacgaacagagatacccgacacatgacctagagttagccgcagtggtttttgcactaaaaatttggtgtcattatctctatggagtgaaatgtgagatctacactgatcataagagtttaaagtactttttcaccaagagggagttaaacatgaggcagaggagatggttggagttggtcaaagactacgactgcgagataatgtaccatcatggtaaagccaatgtggtagccgatgcactcagctgtagaggtccagggctagtttccactttacaagtagtgtcaagggaattattagaagacatggaacgagctggtatagagtttatcacagggcagcttgcaaaggtcacactacaatcaaccttgttagaaagaattaaggaagggcagacaacatatcaaaagcttagtgaactaaagcaagaaattttgaaaagtaacgccaaagattatgaaatatcagacacggaattaattcgattcaaggtgcgaatatatgtgcctgataatgatgag

SEQ ID NO: 349287 - DNA, 1298 bp, Cannabis indica
tgtatccttcaaggacagttggaaaccattgataatgtaatccaaggttcatagtgctcttaaggtatctcattaccctctcaatagcatgtcaatgctctatactaggactactggtaaacctgcacaataatcccacgacataggcaatgtcgagtctcatacaatcagtggcatatcgaagactgtcaatgatgctcgcatattcagattgtttcacatcgtcactagtgttcttaaatagatttacacttggatcatatggtgtgcacgcaggtttacagtcaaagtaattatatttcttgagaaccttctcaatgcaatgagattcatccaaagaaattctatttttagacctagtaatcttaatactaaggattatattagcttcttcgaggtccttcatatcaaaaataacatgtaataatggtttcacagcatggatatttgaaccaaatataaatagatcatccacatatagacatataatagtgcaaatgtcattttcagatttatagtaaatgcatttgtcactttcattcactttaaagccatgtgagataactaaattgtcaaatttctcatgtcattgcttaggtgtctgcttaagaccacatagagatttatctaacttgcaaaccttatgttcctggcctgggatcacgaacccttcaggttgatccatgtatatttcttcttctaattcaccattaaggaatgttgtcctaacatccatttggtcatacacaactaaattgtgtatagcagctagtgaaagtaaaactctaatggatgtaattctagtgacaggtgaaaaagtgtcaagaaaatctacattctctctttgtctaaaaccatttgctactaaacgagctttgtatttgtcaacagatacatcgggtttcaatttctttttcaaaatccacttacaccctatagttttgcaacaatgatgtaggtttgtataatgccaggttttgttcataataagtgagtccatttaatcatcaacggcctcttgccacaggtcagcatctaaggaaaacaaggcttcttgaggttggcaagatcctcctctaaggtgtaagcgtaaaaatatgaaccaaagtctttatctattctagctctcttgcttcttctgggttctatttcattactctcaatgtgctcattattcctaattgtaggaacattgctagtagatgcgcccccactgtttcttaatttaaaggaaaatctatgttcacaaaaatcagcatcattagattccactataacatgtgcattcagatcataga

SEQ ID NO: 349288 - DNA, 501 bp, Cannabis indica
aaaacaaatcattcgcatgatcataaattacaatataaatcaaacaataaagaactaaactctaaataaaattaatatttacgtgcctcggcacgtaacttttaactagttattgattaaatatatgtatattattttataatcatttccttcgcgaggagttggatgagaagaaactctcatgtccggttcagtagtacagatggaactaataaaaaaccctaaaaggacccggttccgtaaataccataaaggaagaatgaaagaaatatcttatcggggtaattgtatttgcttcggtagatatgctcttcaagcacttgaatctacttggatcacatctagacaaatagaagcagggtgacaagcaatgacacgaaacgcccgccacggcagaaaaatatgggtacgtatatttgaagttttactgttacatatacacaggtgtatacagtggtcatccaattgatatttaacgataatatttaactggcgtgtcaa

SEQ ID NO: 349289 - DNA, 545 bp, Cannabis indica
taactaaaaattaattattaaaaaatattatcatataatatatttattaattagacttaacaaggtctcttaattaacaaataaaccctagtaactcgttcttcacaaataagcccttacttagtgaaaattcataacctagacatagtctaattttagaattataattaattaatcaaaataaattaactaagtcttacaagtagtattttctcaactagtatggggaccatgggcctatatatctgagcttccaataagcagctatagaatttaccaagtatattcactgacttattaattccttgttgcatccaccatagaacttggaattgactctcagttatatagaatgctctatatgttccaagatatagatacgctattagttatctattgttataatcccaataattaatgatcctctatagataatttgcgttgtaaagggattaatttactattacaccattcaatgtgttttatccttaaaacacttagccacctataaatcatatttcagtgaactaaacataatcactgaa

SEQ ID NO: 349290 - DNA, 644 bp, Cannabis indica
aaaaaaaaaaaaacaaactccctacatcgcctacccttgtcttatttagaataatgatgatgtcttttgtccagacaatttttgtctcaacaaatcttgacttgacaaattttatcttaatattttttgtcattttcctatttaattaatttgagaaattatttatttattataaaaataaataattactattttgccaattcaaaataattttttccgaatgatattatactactctttatctctacccttgacaaagttttaaggtggcgattcggggactatgaacctataattctaagctccaataaactagattatttattgagtctcatcaactaaataatctttgtttattaattccatgattactccactataaatatagaaatgaactcttagtaattatagaattatatttactgttttactacaatgtctattaatataatcaattccagtgattagtcttccatgtactggttcaaaattagtttaattggtcaattaccgttttactcttctaattacttctttatcttttggtaccattaatttaatagtggaagtataatttagatccattgaaattcgggcacaacattccagttctagaattaacttaaaggaaaccagcatttgat

SEQ ID NO: 349291 - DNA, 453 bp, Cannabis indica
ataaataatatttctctatatatagagaagtactatttataatataaatttttaaactattttagtttactaaattgaatcctgttttaataataattctttatactttatcttttacactatttttaagacattgttacgagtgctcataatattttattttattttttttaaaagaaaaataaaaaaattaattaaaaggtagaattattttagaacattttaaaaaaaaaatacgttacatttcaatgcttatatataaatggtgcagaaaatttggatccactgtgactatgatgaagatgtggtcccaatcaaattcacatgtgacctatattaatttatttattaatttgccaagtctcaactaccactccaattatagtatgaagtgtgtggggattttctcttctcttctcttatatttagttatgttgtattattatattatat

SEQ ID NO: 349292 - DNA, 781 bp, Cannabis indica
ctgacaacaagctctttggagctaatattgtcaaatggaaagataacatcaatattgctctcatcggtgaaaatgccatgtttgtgttaactgatgaagctcctgaacaacaaggtgagaatgcgaccaaggaaattaaggaaaagctcgagcattggaaaaatgctaacaagaaaactcggtactttatgtcgtctagcatggtcgacaccttgaagacaaggtttgccaatactctcatggctgcagaaatcatgaaccagttaactggactgttcaggattacgtcagatcatgctcgttttgaggcgacgaagaattttataaatgcacagatgaagcctcatcgaaacgtgcatgatcacctgctctagatggcaagttacttctagaaagctaagaatcgtgaagctattattgttcaggaaagttaggtgagtttgatcttaaatagtttgactccagcttttctgcccttcacatcaaattatgtcttgatcaagttgacttttttacttccatgagttaattaacaaccttcagacatttgagaattttattggaggaccacataaaggaggaaacaaagctcctagttctggcactgctaatggtacgaccaagcctgaggcaaacattgcctctacttcgaaaccctaaaaaaagaagaagtggaagaacaacaagtatcctcttaaagctgttaacacagctaataagaataaaaaggctactgactgaaaggcaaagcaaaaaacgaaagtgcttctattgcaacgaa

SEQ ID NO: 349293 - DNA, 573 bp, Cannabis indica
aatgaaaatatagaaatcagaataggaatgagaatagaaatggaatggaataaaatttaaaattcttaaaaaaaaaaaaataaaaaaattattaaattttttctcatcatgcattgaaatgatatttcctttcatttcaaaaaaaaaattgttattctaccaaaatagtaaaaacattttaatatgcaaccaagcaaaaaaaaatagaatgaagattgtttcctttcctttctattcaatttcattacctctaatcaaacgccacttaagattatgtagtagagaaaacttatataatatgacctcaaggcttcaagaaataaagaaagaaatgacagattgtgtttctttatttttgactaattttatattgtgtttcttagccattaaattccttcaaagaaaagttggtttcttgcatttaaggttgtgtaaacacattgttcaaaaaaaaaaaggttgtgtaaatacaagtgttcatgtttgtagaagcaaacttatctaacccaacgtcctctcctcttccttgtcaaatatatagtaataataataaaaaaagatttcctttccaaa

SEQ ID NO: 349294 - DNA, 1287 bp, Cannabis indica
tgtatacactatttataaaacaaatatatttttttttaaaaaaatatgtttgtatatacttagttttaatttcctattaaattatagtaatcatatcattttagtaatataacaaactagaaatattgacttatgtgtttatagatttaactttatgtgtttattttttcttttttttagaaaattacttaaaaataatcaacacggtaaaattataaatatatatttctttgtaaatatttataaaattatataaaattaggtaattatatttttcagcaatatagtaaatttacttatatataagtaaaaatgggctgatataagggtttttatatcacatattgaaattttaaacattttttattgtgggacggaattttttttaaaaaaatattgtgtaagttttatactatgtattgtgttaaagtttttgttgttattccacggttatttttttaattgtttcactattttttaattgtattttgttgtttacgattaatttataaaaaaaaatatgatttatgtaaaaaaaaaaaaagaatctttgtggccggaaaattgtaaattttgtccgaaattcaatattttttttttttttttttgttaaaaactcctgtaaaaagtatggcttaatttgttttgtttataaagatgtgagaaacaaatagcccatcaattaagatttttaactaaaaagccataaaataattttttctaaaaaatgacatttttttgaacaaaaagtataaatatccataattcttgtgatgtccacatttatttacaagaatacgaaactatgagtttgggctaagtataacgctatattgtaagtcatggggcctgaatgttaaccatgaagacttcaagtacaatggcataacgtgaatttggaccatagtgaaacacactaaaagcccaaattaggatttccttttcttttttaattattatttttaaacgtgaggatttctttctatttggtcggaataaaaatatcaaattcaacttatatttaatatatatatataaatatatatatatatatatatattttgatggaataataaacaaaatttttaatgtgttgagagtttgtgtttccaaaagagtcccttttttagtgaactttatttgattgtaatcataacttttaaaccttttaacaattaagtttcatattcttaaccctattctctctaagtctaatcccataacaaatgctcctaaagttcgtttgatgttgtaacaccctaactagcataggcgtattacgtgatt

SEQ ID NO: 349295 - DNA, 1563 bp, Cannabis indica
ccaatatagtttgcgacatccttgacaaccgtagccgttttaaaccccgatctgagatcatgcaattgcacatatcaacttcattcaaggtaaccaatcttggatcctccccccgctgcaaccttctaaaaattaagaataacctattaaaagtccaagggcttcgattcatcatactttggatgtcaatttcatgataaaattgaaagaggtagcgattaatatccaattccttgacaaacacccccttccccggctgccacaatgaagccatcatatgttgcatggcctcaaaatcaatttgtctttcagtcaagaaccttccaacaatacaccacctatcatcgtagtcattaatatccgtagcactggcagcataagacaagatagtcacctcctcctccacaataggaatatgcacccctaaaatcaacaaagaaaaacaagaacaaaaaaaaaggaccagaaaacactaaagaaccatgtcaaaagacaagactaatgggaaaacctagttagttttaacacataaaactaaaaattctaaccccataaacactaattggaattaacctaaaaatagtaaaatatggatataaatataagagtaatttgcggcataaatacctaagtttaactcccagttgcaaataaatacctaagtttaacttttggcggtaataatacctaagttatgttttcagaactatgtaggtacctaaccgtttaaattttatgtcattatttacgtgtcattttcttattggtatattttaattaatttttttaaaaaaataaaaatttaatgacttggaccaattaggaattgccacctagcaatttacttaacaattaacagtcaggtacctacaaaagttccagaattataacttaagtattattaccgccaaaaattaaacttaggtatttatttgcaactcggagttaaacttaggtatttatgccgcaaataactctaaatataaacattgaaaaacaaaaaaaactaataaagagtaatgttccttctgacgacaccaaagaataatttaacacaaaagaaattaaaaccaagtaaaactcttgtcaaaaactcttggacaaaacccggtcttcgttcccagtttcatccaccacgttgagaacacggacgaagccctaacaccgccggcggaatcgcagattcatccaccaccatcattgacgtctgcgagatcagggaagaaacgtctctgtcatcgtctttgattgggaggtgtcgtcgtccaggcgccgtcgtcagcgaataaggaggtgtcgttgtcttgataccgtcgtcaacgaatagggaatcgtcatccaggcaccgtcgtcagcaaaggttgaaacgaaagaaaccctagaaactgcttctttctctagcacgtattttttttcttacctaacttcacgtgttttttttctttccaaggttgtcatatgtaattacttagttacatataactaatgaaagtttaagggtgtgtttggaagtaactgtgtaattactaggtatggtaattactagggtggcaattacacagt

SEQ ID NO: 349296 - DNA, 659 bp, Cannabis indica
tttatttatttctaatcgcttcataattgactcattgccgttggctaaaagcaagctcaacacacaaattttggctcaaagtgtgtgaaaaatgtatgtttgattttaaacttgggagctcattaatctcgtttgaatatgttcggtatatgataaaatgctcagccaacatatcttttttgagtaaaaattgagtttttatagtgttagggtgaaatatagtcatttatagccgttagcacgattttcaaaaataatcctgggaaaaacagcctttctttttctaaacggactaccgtttctaggaaaaatggcctgccatttggaaaacggaaggccgaaaacaagacaggggcaaaactagtattatccaactctaaaacgcacataactctttactcaattattcgattttataaaatccaattttgttctcttagttaataaaatgtgatttaaaaagtcaatcaaaaaaattttgaactattgggtgagaaaacttgtcgcacaagttagtgagggccaaaatttgaacttatggaccctagtgtatgttgggttttatgccctaaataaaactcatttcaatataatcaaatttatttattaatatagatcagaaataacatttaatgttgcatggttcacatgatttattt

SEQ ID NO: 349297 - DNA, 500 bp, Cannabis indica
aaaaattcttcaaaaaattagttttttgactgcttaccaaacacatttttatcacagctttttcaaaaagtaacttttagctttttcaaaagctgtaccaaacgagcccaagtggatgatatgtaacatattattcacaaaataatccagagaactacatataaataataaaaaaaaaaatctacaaaattatggcatccgtactaataataataatgactggcacttttatattgtagttatatgtatcatatttgaaaatttcatcttattgtcaagagagtagatgttttttgaagcaataggcaataaataataaaataatataaacacaaatcaatacatatataaaaaaaaattaattgttggtactaaaaaagagaagaattacctcatatactatttttttaaatttttttttttttcaaatttacggtttgagtttctaaagtggttgtagcgctagttgcaataggcatttctgtacgattttttgttgc

SEQ ID NO: 349298 - DNA, 508 bp, Cannabis indica
tatagggctaggttccctggacttctgcttttgtgtgcttggtgaggactctcctagtgtttctccaagtctggcggggattgctttgtgatgcacgtggattcctgttgcctccatggccttttgcatggcaagcatcacctcttgcatcttcttgttttgttcattttgcgctgtgatttcagcttcgtgatcagcagccttttgtctcaagagcactagttctgtgtaactgccttcgtcataagcgtcgtactcgttgaagtttcgttcgtattcgtcgttgtgggttccttctcgttcctcagagcccacgttcactattgaggccacctcctcatcgtcgggatcttgagcgtcttgaggaggacggggttgacgtgtgttgcgagtctccaccattgttgttttagtttatgatatttttgtctacttgcagacgcttccttcagctctcaatgaaagcaccaagatgttgaccgaggttttcggcaaccaatattatagt

SEQ ID NO: 349299 - DNA, 538 bp, Cannabis indica
atatttaggtgtccataaaagttaatattacatatagttttacataaaaatattatataaaatacaatttaatgtaatacaatacaatacaacctaatacggcgttccaaacgagcccttagtttaataaataatataaaaaatactaacaacatttatagtgttatgcacttaaaggttaaggtaactaatagcaatagctaataatcattatttatacatatatacatacacttacatacataattatactaaaaaaaacacaccttgtgaagttcagtaccacagagcaagctatcaacttcctctgaagtccaaaccaaaggcaaagactcttggtaaggcatgacactaaaataaggagcccaaggggataactggccaaggctcctctcgtacatgatggccacagagagagcgagagtaccatccaaagaggaagcttcaatgaggtctcttgcaccagtattccggacggtgaggcaggcaagcttgggaatggtggcaaccacgtcacctacggtgaggtcgcagagtg

SEQ ID NO: 349300 - DNA, 752 bp, Cannabis indica
ggttctattttaatttataaccactttaagtcattcgtttttattcattatgttatagaactagttctatttttatttatatctgagatatctacttctggtgattttctcagtgactttttcggcgacggtgactttttcggtgactttgctggcaatgatgactttttcagcgactttttcagtaacttttctggcaacaataactttcccggcaccagtgacttttctggcattggtaacttttttagcgaaacttattatcaaaaattttatcaaatttatttattgactttgttttgtttcctatatttcaaactttgattattttttaatcttatatttttttgcactatttattgggataaattgaaaaatacttttttttttttgtattcattaataaaaaatactctcatattatatttcattaaaatgtacatacttttgtgagtgagttgcttaatatattcctactctctacttaagtccagcacataatttacattaacataaggggtataatagggacatcatctataaaagtggatatatcttaaagaatataaaaatgaaataaaaattaaaataagtaaagtaaagtgggtatacaatataatttactcttatttatttatgtcatataaaagtaaactctactaaatttttctaaaaaaaatgaataattacataagacactattttttataaaaaaaattacatttttacgtttaaagaattttgttttatat

SEQ ID NO: 349301 - DNA, 908 bp, Cannabis indica
gacctaggaaatctcctaaagttggaaaaaataataaatccttggcatgatctccccaccgcgtcgagggcatcctaaacctaaggagacgttcattgaaccctacagtcctaaggcaagcatattcgctaacagaagggacgtaatgtattgctaaaggtgacttaccggagccgaaagtactggcgtcaggagcccttgtgttcggcaccttgaccgtaggccttggcctgggggccctcttctcaaccgggctcccaatgcgaagggacctcccggcagccgttgggcttctcctctcgactgggctcccaacgcgaaggggcctcccggaagtcgcttgggccttggtataagccttctcctgggccttccggtagagatactcctggtacttcttctccacggtggcaataatctcatcccggaaggtcttctccgcgactgataccctcacgttcgggcagataaccttagaaaggttagagtcctccactgactggtgcgccaggattagcttgcccttctggcagttctccgtcgtaaccaagcccccgacatcgaggtcagtcctatcataagtcgcgaagacctcggcccgctgaagaaaaatctgagtaggcgcggtccgttcgtacggagggatcctgacccattccgtaaggagctccgggtgctccacagctcggaacccggaggagaagaaaaagcgatggcgatattccttgacatgggtctgctgattgtaatggaccacgccatcattcgaagtttgtcaccctttttcaggacagaaacaagttcgtaaaaatataaaatcttggggagtaaaaaataaataagcctgaaagcaggcggtaagcttggggagtaagttggtatggcgcaaggccgacaaatacaagaaa

SEQ ID NO: 349302 - DNA, 902 bp, Cannabis indica
acgaccaatcttacccttagtaacggcttctagaagattgccacgatggtcacgagctgcacaacccacaccaaaccgaccctcatgatcaaataaggccccatcaacattaaccttaatcttatgtaacataggtgcagtccaacgcttagaatgtcgccccctatcgttcaaaggagacaaagaaagaccctttctttctttcttgagcacatctatactgatcaagcatgttctttgctgatgcaacaatatgtgaagcatactaactcttctttggccaaacaaaatcattccgcgcacaccaaatagcccaactcaccatagccgcttcctccatcgatctctcaaacatgccccctgcaacaaaaccagcaaccaattgctgtatgttttagagccgctgccaatgtccaccaggcttcgattctaggtagcctttgcaaacacacactccatcaatgtgtgatacactatttctgcagtagaattacacagggggcagacggaattaacaggcacatgacatctttgaatctgagaacatgtaggaagtatacccgaagcagctcgccagaaaaaattactaatctttggaggaatttttaatgaccaaagtgtaaagatcgcttaactttaatttagaaattagcaaataaatagggtttatttatgaaacttgtatattagttatgaattatcagtttacggagatttatttgaattcagaatgcatgttatatgtcatatatggaatttcatatttttgcatgtttgtgcccgccaacattggaacgcggtctttggctattataatcatattttagtatttttagtatagcaggggaatatagtaagactttgggaatgttgggattagttgagattttagaattgaccaa

SEQ ID NO: 349303 - DNA, 661 bp, Cannabis indica
acttttccaatatggaagacgaaagagattgactttctttgaaaacaccattagttttttattttctgcgctttccatctaaaatctacaagttcaacttgttggagaattgttccccagacagtggcaaaggagccatatcaccctcttcagtaccatcgaatgctttcttcttccgtctatcaggatgatttgtaggcaagtaccgtctgtgacccatataacacattgtgtccatttgccaagcgacgagccgatgtgttagtgcaacaaatcggacaaccttcgtaaccctttgtgcttaagcctgataaattactataagcagggaaattactgacagtcaacaacaacacagctttcagattaaagaattcttttttaaaaccatcatagacctgaacaccgttctcatacaattctattaaatcatcaatcaatggttccaaatatacatcgatattatgtccaggttgttaggggcttatatcattaaagaaagcatgttaaatttcctcttcatcactaaccagggaggaagattgtacataactaggaagacaggccatgaactatgacgactacttagagatctatgtggatttactgcatccgcagacagaccgagacgaatgtgtcttagttcagatttgaattcagg

SEQ ID NO: 349304 - DNA, 514 bp, Cannabis indica
atttttgaaaaatttattttaaatattgaaaaactctatattcatatatggggttgtggcttgtagctatacatagaattaagaccacatagttatgaataaaacagtcaacaacatattaaaattatggaatctttaatcaatggctgctagtacagttcgatgatacccgttctttagtgcaagtaatcttgattcggattacggatgtagtgacacatcaaagtgaatgtactgtatatattaaagattatatataacaactgatatgaataaagccgtctttattaacatgtcattttgtcataaaggcctaattcatatcataatgatgatcaatactagattgacctaaatccttagttatcaagaactcatgttcatgttattagtttatttaattcactcgttaaagtttctcagagaagatgatccttacaacttctattttgggaatcctaataacatggatggctgggaacatgatatataattatggaatcctaactttttt

SEQ ID NO: 349305 - DNA, 562 bp, Cannabis indica
taaaataatcagccaagaattaaataaaattcagattactaaatgtaactaagtccactacaaaatacataggaggaaaatgaccattttgcccctcccacactaaaacaacataaaagggtactaagggtattttggggaaaattctaaattcccgactatcctcgacattcccaatgtctaactataacgccccgctatacaaaaaatactaagatgtgattcaaatagccaaacaccgcgttccaatgttgtcgggcactgaacatgcaaaaatatgaaatttttatatatgacatataaaatgcattctgaattcaaataaaacatcataaattaataatatagaattaataaataaattccataattaaaacctaattaactgctaatttccaaatttaagctaagcggtctttacaattcatgtcatgaccctgagacacaatctcccacaagatacgggcatcatctcgtagcatataaatagcacacttgacccggtcattatccttgacccgcgtaaaataaaaaatggatgttatcatactcatccactgct

SEQ ID NO: 349306 - DNA, 716 bp, Cannabis indica
aaatccaattacattatagctttgcaagcacacccttaattgaaagactatttctggacaagcatgacactgtctgctcattattgtcttgagttatatcaaatagattattaaaatgtcatttatcaatgataatattgatgacaaaaattatgtggtgcaactagaaaattttgtatccaaagatccaaagaatatagtttgtaaattaagaaaaatctatgtatgaactcaagtaagcttctcgtcaatgattacacaatttttattaagtattctcatttggttttgagatagaagcttttgatgattgtgtatatatcacaggttaagtcgcagtaagaatatgatcctggtattatattggtgaaaaattacttgccattaatgatatactcattttgtattaggaattcaagatatgttgagaatgttcttgagatattcttgaattgttacaaaagagatatatcaataaagtattcgaaacttttggcatgaaagataatataccaggtgtaagacttatagctaaagaaaataagttgtctaagtcattgtcctaaaagaaacctttagaattcaagaaatataaaagattcttaatttatattggaatctaatttatgctcaagcatgtatatatttgtacttaatatacatattaagaatgttggataggtatttaagtaaccatataaggaacttttggtatg

SEQ ID NO: 349307 - DNA, 544 bp, Cannabis indica
ttgaatccaaaagtacattttgcaagagaattcaaggagaaaacaaaaaactccaatcatcttctccagctacggtgacctcaacaattcttcccgatcgtcttctttagaaacaaaaacttcaaaaaaaaaaaaatcaatcatgaatgcttagacaagaaaacagatcatgaagataagttggtataaaaattgattatacagaacaataaatattcaacaacaattttctccaaaagatcacaaaatcaggtacacacattaaaaaagcaaatatatattcatcatataattgttggggatgattttatcagaatctagatttcctaacatgtatgttgtttaacaccctaagtatgaattctctaaaacaatagaatttaagcacatataaagttaaggaaaccttacattgattgcagtgaaataatatgtctcattccactcagatctctaacccttgttcctttatgttgcaaagtattatcatgatcggagcccgattctccttcagttgttggattcttcacagtcttacacacta

SEQ ID NO: 349308 - DNA, 739 bp, Cannabis indica
tccctgttataaaaagttttactaaggaaatatatacgacaactatttaatcataaaatctaaatacacaacagatacaaccaatccaaaacaactcctggcaactcggcacgcagaccggtgattttaatatgtacattgctggagaagactgccacctcatggttgatctagcttttctttgcctttacctgcaccacatagcagccaagagtcacaaggactcagcaagaaaagcaataataacaatcatgtagtttcttatttgaatattgtcattcatacacaaaaagaatcgaaccatcacacattgttcataagatgaaatccaaatcactactgacatctgccacgaataaacattagtatacacatatttggtaatacaaaaccattacattaataatagaattcatattcatttaatcatatagataatatatattgttaccatcttcataacatcacgttgcttaatcaggcaagtcgatgctttaatttgataatcttgtattgcatcgcctaatcaggcaagctcgtgccatagcctggcacccatatgtcgcataactacatcacctactcaggtgagcctgtgccaaaaacctgcacccatatatcatataattgcatcacctaatcaggtgagcccgtgccacaatttggcacccatatatcatataattgcatcacctaatcaggtaagcttgtgccacaatctggcaccaatatattgcat

SEQ ID NO: 349309 - DNA, 974 bp, Cannabis indica
aaactacaatactcaaacttaacatatactataactctaatggccatccgtagcattttctatcgccgccgagttaaaatcataaaaattacatatttcatatttaacacaaacaatcctcttagaatttagtaaaatttccagaattgaaaaattttaactctaatacccatttttctaaaatgggactcagattaaagtatatatattcacatatagtaattaattaataataattagtgtctattaccccactaatccatatctaaatcatgcatttattacacaataagcgttagattatgcaatctccaaaagcccaaactacccttttcttttggcttccacatataagactactttcaccgatttattttgctttgttccgttgagcccactaaaaccttgcaaacattggctattagttgataattgtactcttttcccttaatttatgtgggctcctttatttctttttttattataaaatttagtaaataaataaacagttaattctattctcttgaatttaactattttacatattttttagcttaatgaatagtagctaaatgtacaaataactattcattgaactaaacatattttaatactatttttttttaacttttctatatgtgtaatattatataaattattaatataatataaataaaatatattaaaaatataatatttaaatcatatagagaaaaaatacaaaagctgatgtattataaaatgtaaaagtttgagataaaataaataaagtggaggttttagtaatgtattttaaaaaatagagtgaaaaaaactcttgggattgctctaaacaaatcaatcaaatcatatatatacaataaatgtcacttttatcagcagttcgccactgcgctggtaaaagtaacttttatcagcgtattttgcaaactgcgctgacaaaaaggtttataaagttttaccagcgtacattt

SEQ ID NO: 349310 - DNA, 485 bp, Cannabis indica
gtaatacttttaaataacatagaaatatattagtataaaatttagtatacgtgcatcgcacgtaattttttgctagtatatatatatagaggaaaagtatgaggcagtgatatggcggtctaaaatctcttcaaagctatttttcttttttctccttaattttctcaatttgttaatattttattaaagcataaatttacaaattaatataatacgattattttaataaatttccataaaaatatctaatataaacttatttttttataaaaaaaaaacacaataaatataatacatacacgtttttcttcttattatgattattagtattattatatctaatttaacttcatatatctccattacacaaaaatatttactataattaattagtaattaaaaaaattaaaaaattaaatttgtaaatatctattctttttaattctctcttttttttgtaatttttttgttctatttaaattctc

SEQ ID NO: 349311 - DNA, 524 bp, Cannabis indica
tttttttttttttaaataaaagatgtaaatttattaaatcatctcttgagcaattacatcaagaatgctactcagaataaaagtcatcgagtacctacagtcagcatgtaaccatgaaactctagctaagccatgagcaacacgattagcaaactgtttaataaaaaattgtaatagaaaattttaattagtacttctctttgtaaatacatattgctttaataaatagatatattggaaaaagacaatgtgtgtgaaagctaattaggaaattttgccaaaccaaaccaaataaaattcttataccaatttcaccttcttcgcgcaacttttttcttaagctgctgtgttttgttggaggaaaattatttctgaagtgattaaaatatggttaaatattagggtaaatactattttggaccctctgttttacaaaagttaccaattggaccctgtgttttgttaaatgacaaaatggaccctttattttcaaaaatagtacaaataggaccctgaattgattt

SEQ ID NO: 349312 - DNA, 438 bp, Cannabis indica
tgaacaagctcatcaggataatgaactcatccaaattaagcgtgcggctaagttgaaaggaggtgcaagggccaagcaatatgctcatgagcccttgaatcctaaagatgaggctgagcaagagcaggtgactcagctcaaaaggaggaagaaatttttgacccagcccaagcctattgaacatgcaattcgcattagggagcccagtctgcctgctcggccgccttctcccgtgctcgaaaaaacggaaagccattatgtcaagaccgcttagttaaatttagaaattagcagatagatatttaaataattatttatgatgatatatttgaattcagaatacattttatatgtcatgtagtgaaatttcatatttttgcatgtttagtgcccggcaacatggaacgcggtgtatggctcggtaaaatcacatcttag

SEQ ID NO: 349313 - DNA, 860 bp, Cannabis indica
gtttgctagtatgttggacttgagttggaaacttttagcctgcattgcatttgagtgtacctatagggggacacggtgaggtatccaccatatgtaggtttagtttgtattatgttcgagggacacaagttatctagaaccttattagtgttgcctatggggcaatttgatgtaattcttggtatggattggttgtctaaataccaagctattgtggattgttcacgtaaaagagttactcttttaacccctggtgatgatttcattgtttatcgagccaacatgagtgtagtgagacaaaatcctatcttaagggcatgtttaggtggaaagagaaactttgagtgttatgagaatctgtttgcgatcgatgatgagtctaggaatttagaccagttcccttggatatcaatggttagtggtttttttggatgtgtttccaaaggatttaccagggttaccacctgatagggagatcgagttttgcattgatttgattcctgaagctcaaccagtttctattgcgccttatcgcatggcacctgcagagttggctcaattgaaaaaacaattaggggagttaatggataaaggttacatcagacattgtacttctccatggggagctccagtcttgtttaccacgaaagctgatgggactttacgactttgtgtcgactatagaaagctgaatcagatgacaattaaaaacaaatatcctctgccgaggattgataaactatttgatcaactgggtggttcaaagttcttttcaaagattgatttgcggtcaggctaccatcaattgaggattagggaagaagatatccctaagactgctttcaggatacggtatggac

SEQ ID NO: 349314 - DNA, 544 bp, Cannabis indica
actctcacgactacagaaatcataaacaagttaactaaactgttagggatggcgttagattaagctcatttgagacgaccaagatttttatcaatgcacaaatgaagcctcatcataacgtgcctgatcacctactccaaatggctagttacttctaagaggctgagaatcatggagctataatagatcaagaaactcaagtgagtttgatcttaaatagtttgacttcaacttttcctccatttacttcaattatgtcatgaataagttgacttttgacttccacgagttaatcaataacctttagaaatttgaaaattttattggaggattgcagaaaggaggaactaaagctcctacctctagtaatgctgctaatggtacgactaaacttgaggcaggcattgcctctacttcgaaaccgaaatagaagaaatggaagaatagcaagaagcctcttaaaggtgttaacatggctaataagaaaaagcctgctaatcccaagtcaaaggaaaaaggaaagtgcttctattgcaacgaaaag

SEQ ID NO: 349315 - DNA, 583 bp, Cannabis indica
aaaaaaaaaaaaaaaaaagcaatttctgatctttattaattagtaaattcgattatattgaaatggattttatttagggcacaaaatccaaccacttgaatctagtgtcggtaccaaggtacttgaatggggagaatctgagatgataataaagcaattattccctaggcagttcgcttcatagtgagattcactttaccttgtgcaagtgaatataattgcctcttgaaccgacaagatgcgacgaattcatctttacgtagggaggtccatcgctaaggtatggcccctacactattatttgaatagggcattagtgtagaggggatcacttcatctaagctttgatgaaagttgcagatctactactactagttctttttctttgaacttagctcataatgatgtaataaaatttaatatctaattaataaaagcattgaataaagcttgttggtacttcattgttagtaatcaattgcagctcacaaacctaacatcgctctctagcgctgaacaaagcttgtagagttggtcttgaggtaactgtggttatttttttagtgagttaaacacttccaac

SEQ ID NO: 349316 - DNA, 558 bp, Cannabis indica
attaatgatagactacacaaaatcaagaaggttaaaaaaataattaaaataattctgaataactcccaaatttataaaaggaatgaaaaaaaaacctatagattcagaatgagaaaaaataataataataaatagctaccaaattaagaaatgcacaaaacaaaaaaaattatatattataaataacgaaatcattaaaattataataaatgcatttaccattaaaataaaatatttgaccaatataatttctttaaaacactaaaactaattataattaatactttcctataataaaatggttaacttatcaaggtgagataaaagtaataaaggtaaacttcatacaaaattattaaattggaaaataatttttaaacagaataacataaaaggaacttaatgagaaaattaacacatataatagggtaatttaatactaacatatattacctgaaatcatgggtctataataactcgaaattaaaagagcaaattttaccttaatgtcgccataattttccttaactcattgtaattagtggactttttcctatc

SEQ ID NO: 349317 - DNA, 642 bp, Cannabis indica
atgatttaccactagctgtgagtcactacaaatctcgatgtgctcgaccttcatctcctttgctagtttgagtttagcgattagggattcatattcggcctcgttattggaggctttgaatctgaatttgaccgctgcatggaggtgttgcccccaggtgtgacaagggcaattcctgcgccggatagctgatctgtggccgacccatccacatgcagcttctaggtcggcttgttttcagtgttgctcagttgtggtgttgactcgagatcgccttctgggatgcttttagtttatcctgtgcattccaccacaaagtcagccaaggcttggcctttgatagctgttcggggttggaagttgatctcgtactgaaccaattccaccgcccacttgagtaaccgtccagaggcatctggattttgcagtatttgtggtagtggttggtcggtgtacacccgaaaaggatgagcttgaaagtaaggtcttagctttcttgttgctaagatgaggcagtaggcaagcttttctatcaacggatattggccttcggccccgatgagtcttttactgacgtaatatactggatgcagcacactgtcttcttctctaattagtacggcgcttatggcatgctccgtt

SEQ ID NO: 349318 - DNA, 770 bp, Cannabis indica
acccacggcacccacgaaaaccccaaccccggtcaacccacggcacccacgaatcccaaccccaaccccaacgacgctcgaagccccagccccagccaacctctccaccgcgtatgactcaagatcggcccgtcaccccctcatcaccgccagtccatcaaaactgaaatggcgaaggtaagttcgatcccttatttttatttttgttattatttgtttgagtgattatgagttagagtattgattttaggatttgatttgaacggatttgttagatttaaggctcgatttaggctaagatctccgatttggggaaatcggtttttgggaagacaatggtccgatggaccccgatgggtccgatgctatggtcaatggcctcccccgatgggtccgatggccattactgtaaagggtccgatggtctataatgtaaagggtccgatttggggaaattttggctatgggtccgatggttcgattgtaggcccgatggggccgattataggcccgatgggtcgccatcggacccaatttttttttggttttataaattattaattatttagttattgttttaggtattattttattttcaatgatttattaagtattttttaattaattattgttttattacaaattaataattatttatttacttgtaattaataattattgttttagtattaattattaattatttttttaatttttattgttttattaattagtagttatgtttttttagtaattattaattattgttt

SEQ ID NO: 349319 - DNA, 485 bp, Cannabis indica
tccactttttccaccagtacatcccctcttgccacatattctctgatgatgtgatgtttccttttgatatgcttgcttctcttgtggcttcgaggctccttactgttgggtatggctcgtcacacaacaaaaccagtggtttttccattccagggatgacaccgagacctgtgaagaactttctaagccagacaagttcttttgcagcctttgcagcaactatgtattctgcctccatggtagagtctagggttgagcataaaatccagaaaaccgaaaaaacccgttcaaaccgacctaccgaacaccgttggaaccgaaaccgaggaaactgaaaatcgaaaaaacttctaacgatttaaactgccattgaacggtcggatttttttggtaataaaccgaccgaaaaaaccgaaaccgaccgttatacatatatatattaatttactaagttttttttttcatttattatagttactaataat

SEQ ID NO: 349320 - DNA, 926 bp, Cannabis indica
gttaaaaataagtttttagttttttgaacacgcatggtagattaaaatatcagaaattctattttcggtactgtaaattatttagaatttgaggagtgctaccgttaatctcctgttacaacctctttagcaactttcgtgcctaaaaacatatgccaaagtatttttttctcaatttttttttatagcagtgttcattatgtttacaacattatttctgtaaacttttaaaaaatttacaaatagtttacaatactgaaaatacgtttgaagttttttgaatacgtatagtaaatttaaatatcaagaactctattttttggtattataaactatttagaattttttaaaactttacaggaatgatactataactataaccaacatcgttatatatatattcgagtatgtgattttagacgtggagattgactaagaagttataataggaagttgtaatttgtacccctctcagaatttttccaaaatttacatagatgatattgtaactataacgaatatcgctatgaaaaaatttgaaaaaaaaaaaattccgtcatgtgatttcgcgcgtcaaggttgattaacagattgtaattagcactcctctttaattattttgtggttatgttcctcaaactccaaccctaagatgtgagttatatttttcctcaattttataaattatcccaaaattaaaattttgaaatttacgaatcgagtttcttttagggtatgtttggaaagccacaatgtaattagatttgtatgtaattggaggtaattacacaatttgacacgtttgtctgaccatgtaattacactgtaactgtgtaattggaagtaattgaggagttccaattacactctccaattctcatggccccccatgagaattgaatgtaattgcactgtgtaattactaa

SEQ ID NO: 349321 - DNA, 646 bp, Cannabis indica
ttaatccattatttacatattgaattgcaaaaactaaactaagcaacgttaacattaataaatgaatggcagttactaagttcatcaacgcatgcgtcttccgtacctatgagttgactgttcatatttcgatgtacaactcgcagggttatcattatgtctgcgtctttaggtagtcgcttcttctagacatcgtgtgttgagctgatagaacctagacatgcgagtctatatcgctttataaaggctgtagggttcctaagatcaactcgtacttacagagaatcgttctcctagttgatacgaggacaaggggaggatgatcgcatatattcgatatatgcgatctactctcttgtcttggatgcgattagacttcggtcatgctcgccacttctcgctggttatacctttaagcgaggtttaagacttcgaggagtccctcagggacatctcagctttctgtgaaaatctgagtatacgtgtccttttagtgggggtctggtctcgagtttctaggtgagagaaatctcactataacacgtaatatcatcacattatcgatactcaaccaatcaatcttttcattatataacaatattaattatatctcaatattaatcaattcataacaatactaattgta

SEQ ID NO: 349322 - DNA, 816 bp, Cannabis indica
ctttttcaaaaaaaaaaattatcaaggcagttaaccacccaaataccttcattttcaaggctacaaagatttccatatcaatggacatgaattctgtgtttaacttcttcaacaaagatttacaagcaaatacctttgaaatgcccaggttccaaatccttgagtcaaataaagaacaaaagtgcaacatctaaaagaattttttgaatttggaactctgtacaatgatgggaatctattagaaaaactcaaactccccagtccccactcataaaccctcccaaaattgaattctatctctcatacctggtttataagtgacataagttgagactcaaaatcatcctaatgaaatgaacttccacgagctcttgtaactcagtgatcatacaccaaaaaaaaaaaaaaaaaacgccagagatctgttacgcactaggattaatatggtgtgttagcatatattaaacaaaagagtaattgagtctttgtattgagggtagtattttggagggaatacaatagtatatatagaatattgaggggaattggggagtatgcattgtattgagtaaatctctgtttgcatcaaagaggcctaagggctcccatactttgtaattgcgtttctcatacattcaacatacatttcctactgttttgctactgttctactcctattattgctactgtttcattgtgttcttgagtttggagttctcggggcttatcaattggtatcagagcaccgattcttcggatgccgataataagaatggaggagaaattagaggaacaatggaaatcagagtcttatta

SEQ ID NO: 349323 - DNA, 1429 bp, Cannabis indica
cagaagattcagaaaatatccagtaactattttggttgacttcatcaggttcacacttcaaaattggtttgctgatcgtctcgaaaaggcaagtaagtgcactactcctttggctactactttttgaaaatgattttaaaggaacaacacaaagatggtatgactcaggagtgtccttcgtaatggtgcccaattatttaacgttggtacgagtcctcaaggtgagaaaggtggtgatgtggacttagtggagagaacatgcacttgtcggacttttccaatcgcttaaaatcccttgtccccatgtcatgtgctgcagtagttagtcaaaatgcgagcgtgtacgcacttttctctccatattacataaaagaaacgtggaagaagatcgtaccagtggagaaaaacaagtaggtcagcctaggaagagcaatgtaggtagaagactgacgaagcgtcgaccgtttaatggtcaggtgctagtggaacctcgtcattgttcgctatgtggcggtgcagggcacaatagagctacatgtaaagctcgagtttgaaccgtttctctaatagtttaatagctatcaatattatatgcatatgtgttgtattgctggttgctatttagtaggattgtatcttgaagatttaacaataggcatggatatttttattgtgtttgctatattgtgcgatattttttacgatgtatgtgcgattttatttcatatttcatcaatgctgttttgtttgacaaaattcattttttgtacgatttttatgtgatatgtgtgcgactattgtgcaatttcgttttacaatattatatattttttgttgcatttttttcgatgtctttgcaatattggtgcgacatgttttgcgagttatttgtctttttcaattagtttttttttgaaaaagaataacattattttttgcgatgtttatgcgatttatgtgcgacatttttggcaatttttactggtcacatgtctaatatttaatattgtctaattttcacgatgtctatgtgatttttgtgcgacattttttgcgagttaattgttttttttctgcaaatttttcttacaactgttaaattatttgcgatatatgtgcgacatttgggcgattgaacttttcacaatgtaatatatttaatatattgcaaaagatcatgtgtatatatgaagtacgttacaaaagaactatcatgtaaagttctggtaaaataagtccacacaccacgtatgtctaaaggtgagcatgttatcatctgtaacatgctctagcgaatggtccaacatacagtgctcaatgtattcaatggcaaacattccacaatcgccactacaaattaaaaaattagtaaatattagcaacaattaagttaagtaattcataatggagtgcaaaattaaataaatta

SEQ ID NO: 349324 - DNA, 501 bp, Cannabis indica
ctaaaacctgtgaacatgttcaatgtaaagcaaaaataaactataaaaaatcttaaaaatgaaatatgatcactcagttatttactttatacataaggctaattaggattttcgccccctaaattttaacatgtactaaatcatgctctctgaacttttctggccgttaaaaattcttcctgaactattgagattgttaaatttaaggaacttttatttaatttcattcaatttactattttagtgattgtttatgaactttgatatctaccaaataatcatgccctcgaacttttacatgtactaaatcatgtcttcttaattttcatccatgttaaacttttttttactaaaattaataaaaaattcttaaatacaacaatctcaatagttcacgagacatttttaacaatcttaaaagttcataagcataatttgatacatatcaaaattcgagccataaaaattctaattaacctatataaatatatagatttttat

SEQ ID NO: 349325 - DNA, 540 bp, Cannabis indica
tattaaataaataattttggcatttaagtggttaaaattagaaaaatgacatttttgagaaaataaggaaaaattgttgaaaaatgataaaattccaaagtggggcccacatcctatggctgaccagttatgagggaatttcgatttaattttttcaatattttaatgcctaataaattctaacctaaacctcggtggttgcctataaatagatactgatggctcacacttaaatatgatgaaattcaagcctttagtcaaaatttcctgagccatattccttgctattttcgaaccaatctcctcttttcctctcttcatattttcataccgtttagtgatagattaagtgccaacacacatcaagtgatactcaatcatagtgtgtaaagctgtgaagaatccaaattcaagagaaggacactcaggctcagatcttggtgataccctgctacagacaggatacaagggttagagatctgaggggaaggagtcattattattccactgcacccactataaggtttcttaaactttata

SEQ ID NO: 349326 - DNA, 719 bp, Cannabis indica
tctttttgcttgggtttaaacacgatagaaattaggtttttgagttatgatttcatacgccaaaatagagaacgaacgagagagagtgaacgtgtacaccgtatacgatataccgaaaaattttcattcttcaagtggattgcgacctgggtgaaagtgggggtttgagatcacttatgtacgacctaaggaacctttctaacatggtataagggacggaggtccctgtttcgagtttcgccgttgttgaagcttcgaaggtgcgacttgaaacggacacgaattcgaacgtgtttaagcttgttcttgggtcaagggaggttatatatgagtgcatgtgaccctaaggactgtttttgacgtaagaaaacaaagctttaacgtccaaaacgaaggaccaatattttgactccattaaagacggtacaccgccaacgaaggagacgactccgatctgcaaacttggacctcttttcttgggttgatcttgatcgttttgaggtcctgagcactatggagagcttcctcaattgaaaggacgtgtcaagagcaatcggggacaaagttacactttgccgacaacgaaactggcgagaataccttttgaggtgtttttcttagatatttttgtagattttgattccttattttattctaaggtgcttggtgaagtttcataattttctgaatttatttggaattattgtgaattatttagt

SEQ ID NO: 349327 - DNA, 1343 bp, Cannabis indica
aaatagattcaattttgtgtacatgaaggaggagacatacaaatgacacgttgttgtcacccgactaagctaaaggtagtagacagatgtagtagtgtgatactcaaaaatggttaggatattagtattcaaatatatatatttatacaaaaccagtttaaccaaaaaaaaaaaacaaatgaagtaaaatagtaagaatataaattatatatgtttcaaaaaaaaaaataatataaattatatagtatgtctaaatgtgtgtccattaattagcaatactctttaaaaaaatatgttaatactatattgacatgctcatcaaaattaaatcaaaagttttacctcacaaaaagaataacaataataatatattaacaaggaaagaaaaatgggacataaaattacttacacgtaatgtcgtcaaatacacttttatgtgttctaaattaaatatagtctagcttcttacaaagaaatttaaatctattacttttatatatatgtttgatactagggtccatattaaaaaacttatgatctccaaagaggagagaaaataaaagagaaaaaaagttattatagtgaattatcaaactacaaattttatattaaaattaaaaatattgtaataaaaaatagaattgttttatataatattataattcgtaagttatggtcttaaacttcaataaatttggaccaaattatttgagaatgaaacattatgattctaaatccagaccccctaattatgtttctctgattttattggttgcagttttagaattctcgctaacaatttaaaccaaacaaaatcgtctatttctttatgtgttctaacaaggtggaagtgtaagatataattttgaatgatataaagaaaataaatagagaaagtggtgtattgtgtaatataaaggtttgatgttaaaataaagaagctataattttagtgatgtattttaaagaattgatagagaagctgaagggagtaaggtctaattacttcaccccttaatttccttttttttgttttttttttttttctcagtcttatatattcatggccaaagaaaataaacaacattcattgtataaattttttcctcttatatatttcaatttaatccaatcaattgactagaaatattagagccaaacgtacacatgcaacaaataacatacaatcacaacgaaatgccatacgtacgtacgtaccaactagaaacacttatcttgtaaaaatagagtgagaaaaaggtacaacttgaatattaattaagaagcaccaaacacgatatgaagaataggagaaagaagtactcaacacttacaggtccttc

SEQ ID NO: 349328 - DNA, 1012 bp, Cannabis indica
agatcctggtaaaataaattccaacacaaacatccatcaagggccaagccttgggagacttcataatagaaggaataactctagaagaaaatctgcttgttcaccgagacacaaacacttggaagttatgtgtagatggcgcatccaacgagtagggctcgggtgcaggggtaatattaatttcaccagatgtctttaagtttcattatgccttgagatttaaatttgacgcatcaaacaacgagactgaacatgaaactttgatcgctaacttgaagatagccaaggcattgaaagtcaagaatctcatctgccatagtgactcataactgattgtaaatcaggttctcggggaataccagtccaagggtctgaaaatggctaagtatcaagagaaggttcggaagaactatgaaagattcggttactttaaaatcgagaaaattccaagagaacaaaactctaacgctgatgccttagcaaaactcgccttgcagaacgacttggatgaattgaacttggttccagtggagatgctaagcgagccaagtatatgtgaaatggaatacatagagatgatagacatttcacctacatggatgactactataatcaactatctactcaacgagcaactttcaaccgacaaaaacgaggcacaaaaactcttgaattcagtgcctcaatacataataattgaaggcaaactatacagaagaggttattctatgcctctacttcagtttgttcttcctacagaagcaaacgagatcattagacaaattcatgaaggcttttatggggatcatgcaggttggaaaagcctatccaaaaagatcattagacaaggatattattggccaataatcgataaggacacccatgagtttgtcaaaaagtgtgataagtgtcagagattttcacatatacctcacgtaccgccaacggaactaaggatgatgacctcgccttatccatttgctatatgggggattgatttaattggggaact

SEQ ID NO: 349329 - DNA, 541 bp, Cannabis indica
tgtcttccaattttctcttaccttttctgtcctggactggattctcttgatcgatttctacttttatttatttgatgttgctcaccacttcaatctgccgattttcagccattttttttgattgattggtttgtaagatgagtgtgacaatatagaataaactttgcatatatatagatgacaagcaaccttgattcctgtattctttaaatactcagcttatgaataaaaaaataataaacacggttatatatatgagataaataattattttcatttaaaaaattacattaaaaaaattggatatagatttacctttccaatacaaatttgtgtgaattccaataaatttcttatttagagtcccaaaatatatttaacaataattgttaattagtcactacacatttaattttaaataaaaattcttaataataatgacgacatcgtttaagtacagtacacgttactgatttttgaaaaattaaaaaattaatttatttcattaaataacaattataaaggcagcctaataaaatta

SEQ ID NO: 349330 - DNA, 1877 bp, Cannabis indica
gagctcgagaaattagggggaaatgcataatgattagggtgacgtattagggaaataaatcaaaagtcaggggagagcaattaatgaggctaacaggaacaaaatggaacatcaaaattaaagagatgatagggggtaattaatgcaaaaacaggaaagaagcaaagagaaactaaaagagagaacgaagcagagaagctcaaacctgtggaagaagaaacaaagaaaaagaaaatcaggcaaacaaaccgagattgatgctgaaccagagcaaagcctgtaggaagcttcaaaaagaagagcaagaataagatgtattatgaatttatgataaattcaacaaggcttgatctccacatgatatgtgaagactagagaacaattaggagatatttttacaaagactttgagtggggtgcaggttgattatctttgtaacaagctggacatgattaacatctatgctccagcttgagggtagtgttgaaatattagctgtacaaaattaaagttaattgtatttagtagtttcttattttagtctcctagctttttatatagatatgtactatttgatggaataacccacacaattctatttaccattctctagagttaccaataaatcaaatttcttttctagaattaaaataattataattaattatataattaacaaaaattaatttgtagtttaaatatttaatgactcttttagcaattaatatttataaataatttctatttttatatttaaattcatattataatttttttaacaattaaccatttgattataatacttgcaagaaaaaactctattttttttttgttttacaaatcccttttaaaataaatttggttaaatgattaattatttaaaaaaacatttaaataattggtccaaattaataatattatttttttattaaaagtatttaatttttttaaaaaaatatttaaaatttataaaaataaataaacaaaaaaaattaaaaatataaaattaatacccattattaacaataacataattgtaaaaaacaaaaaaaaaaaataactcgtgtaatggtaaaattttgttttatttttttaatttattatgtagtttaattatatactgatcaaatgatttttttggatgtatgatttatttttttctgactgtttgctatttgtttagattttttaaatttggttaagattcaattagcaaaaaaatacaccaatacttctactgtaatctagtttaaatggagatatgtcatatatttttaaaaaattaccataggccttggtgtatcaaaacataatttgatttggtttaatcaagataaacttacaaaaatactgttttttaccaatattttatattttcaaaaatattgggacatgacaaactttacatttttactgtccaagccctttttatttctttcataatgcccaggcccaatatatttacttttatactgtaaacagtaacaaaacacaaatgagacctctcattcgtggttggggacagacaaatcaacaccggaatcatagaaacaccaggaaaaaaccataaaatctggcaaagagaaaaaattactaaatcaacaacaaaatattattttgtagtgttattttactgttgttttgatatgaaaaaaaggccacataaatgaaatattgtgaaaaatgacaggacatggaatctataccagttctcataaagagcaatggacaatgggaaaaagaacataattattttaagagaatgtgacaatgctcgaaaacaacgcagcaatacttgaaaacaacacagtaacaacagaatcatacacattagaacaccaattagaagaaggaggagagtcaaaaacaagagaatt

SEQ ID NO: 349331 - DNA, 709 bp, Cannabis indica
taactatactgaactcgcagtgccccgagaccacatctatgcaatcaaagaaaggaatggagtctttaagaattgccccccatcaggggaaaccgcgacagaagagaccccaaaaagtcctgtaagtaccataaagatattggtcataccaccttcgaatgttgggtcttgcaggacaaaatcgaggagctgattcggagaggaaaattcgataagtataagaagagcgaggaaagtcatccccgagcggataacaaggaagaaaaccaaaattcgagtggttcgagaacgccttgcaatattttaactatcattggagggccccatatcgcaggagactcccgtaggtcgcaagaaggatatgccaaagaagccaaggagaagccgctcaccaatgtaaacaatcttagtgagcggtcagagaaactgtttaagaaggaatgcgacgacatcacctttatggagagtgatgcgagatgggtccatcacccacattccgatgcactatttaccatcgccaatattggcggagataatgtccaacgcatactcgtggacaatggaagttcagtgaatcttttgaacttccaagccttcaaacaaatggggttgcaggagaaggacctgcgacctgtgacatcgagcatatacggttttcttggcgacgtcattgcattaaaggaattatcaaactcccaatcaccttggg

SEQ ID NO: 349332 - DNA, 795 bp, Cannabis indica
attggagggccccatatcgcaggcgactaccgcaagttgcaagagcgatatgccaaagaagccaaggagaagccgttcaccaatgtaaacaatcttagtgagcggccagagaaaatgttcaagaaagaatgcgacgacatcacctttatggagagtgatgcgagatgggtccatcacccgcattctaacgcactagttatcatcgccaatattggcggagataatgtccccagcatactcgtggacaatggaagttcagtgaatcttttgaacttccaagccttcaaacaaatggggttgcaagagaaggacctgcgacctgtgacgtcgagcatatacggttttactggcgacgtcatcgcattaaaaggaatgatcaaacttcctctcaccttgggaactgccccagtaacagccaaatccatggatgacttcgcagtaatcgaccagtattcggcatataatgcagtgattggtcgaccaattttgaaggagatgaagatcataacctcgatttatcatctcacaatgaagttccttactcccggtggagtaggttctgtgcgaggagtccagtcagactcacgcgaatgctacaacgcagcagtcaagctcgcggagaaaaggtcagtaaatgttatctacctattggaggcaccacctcctcgccaggaggtcctcagaatcgaggaggtaccacacgtggacaaaccagatttggatccaagaatccttgatcatgtcgccgcagcccaagccgcagaagacaccattgaggtacctatagatcctgta

SEQ ID NO: 349333 - DNA, 549 bp, Cannabis indica
taaactctaaaaaaaaaaaaaatctatgtacgccgacttaaaaatatatttaccagtaaaaaataaacatatactcattttctcttagttgaacaactaaataacaacaaataaacaacttaataacaacccactttaaactaaaaattaattaggcatcagcacatggcgtcaacttcaaaaataaataaaaacaaaacacaaataaagaaacatgaatatagtatattctttttttcttggttaaataacttaataacaacaaataaacaattgtataacaactttactctattatgcaaattacatagacataaaaataaactccaagaaagaaaaaataccaatatataatctataaaataaatttaaaaacaactacaaaacacttgtacaccaactcaaagatatatgtacacataaaaaattaaacatatacttatttttttctttgttaaacaaataataacaaataaataacacgataacaatctcatttgaatatatataaaaattaattggacatcaacacattgtgttaactttaat

SEQ ID NO: 349334 - DNA, 656 bp, Cannabis indica
aacccctaaaatataaattaaacgcttaaaatcctaacactttcgccatgaactacgcaagacgactactctcccaagccgttaagtaggattatttgctttgactccccagtctctcccagtctcctcccattactttgctccatggagatgctatttctccagaaatcatcccgattgctaaaattatttttaaccttactgcatctttccatggtcaatatgatctctttttctcttttaaattctatttagtacattcgtattttcacgaaagtgtcaaaagtctcaaccttttctctttgttgattatttggaaatattatgtttatttctaaatactttttttctttcatcatggatttatttgagatcattcgcgtacatttgtattttttaaaaaaattatcaaaagttttcctccattgccatctctctcttcatctaatcttaggagtcttcttatttctctcatctaatttctcaaattttcaattaattttctaaagttaatggctactgtagtcgcaattttatctcacacaatagatcaacgacgcttctctgcaaattcgattgttctccaatgtatggacgagaccttctcaacgagttgtaaagcccgcttagttaatttggaaattagcagttgttta

SEQ ID NO: 349335 - DNA, 1536 bp, Cannabis indica
aagtcgtccatgtaaacttccatggtgtttcaatcatgtcactagaaaaatgctcatcatgaattctttaggaaagtagctggtgcatttgcacagtccaaatggcatacgccagaaaacaaaacgttccaagaggacaagtgaaagtggtcttctcttggtcctctaatgcaatctcaatctgatagtaacctgaataaccatcgagaaagcaatagaaaggatgaccagctatgcgctcaagaatttgatcaatgaatgggagcgggaaataatctttacgggaggcggcattcaattttcgataatcaatgcacatgtgctaacccgtcaaagtttttgtgggaacaagggccccattttcatttaggatcacggtaacacctgatttcttaggcactacctgaactggactgacccatttgctgtcagccaccggataaatgatagcaacatcaagaagttttaacatttcatttttcaccacttctcaatttgaacaagaacatcctcaatgataccccaaggctttttgatagagcggtcagcaagctgcagcacaacagatgttggcttcatttctccaagaccatgttgcgagtacacaaagtaaggcatgagattcacactcgcgccaaggtcaagcaaagcttggctgacttcatgactcccaatttggcatgaaatggtgggacaaccaggatctttgtatttaggcggtgtcttttgttcgatcactgcactcacttgttcagtcaagaaagcagtcttcttgacatggtgttttctcttagcagtgcacaagtctttgatgattttcgcataagctggcacttgttttatgatgtggagcaaaggaagattaattttcacttgtgtcaagtgctcaaggagttcggctcgatttttaggaagtttcccaacaggtctaagagcctagggaaacagtactttggattgagcattgagtggtgcactgtcaggggcaacttttggatttgaagtagtggttttgatggatggatcttccaaatttttatcacttcttgttgtgatggcgttaacccctttgacaatgggatcattagaggtagaggttttagccatatgttgcccttgtgcattaaattgaggttgggaaggaagtctgcctttctcagaaatagccaaggatgagttcaattttgagaattgactttttatttcttggacatcttcctttaattggcgatttattttggtttgctcctcaatgaatgcatgaatggtattttcaagggagttcccttgttgttgagcattgtattaggttgcatgatatgccttcggaggctgagattgattctcatttctccattgtcctccagatgtttgagcttggttggaattatctctccaactgaaattcgggtggtttctccaaccagggttgtacgcatgggagaattgcttgttatattgccctaaggcattgcattgctcctcatgaacccccctcaattctttgtaactaagtagtccttagctagatgctca

SEQ ID NO: 349336 - DNA, 566 bp, Cannabis indica
gaccctagaacaagactaggaccgtgaccaggacccggacccagacctagaactgaacacagacctagcctcagacccaaacttagactggaactcgggcccagacaaattcgtgtacccagaccagatccaaaacacaaaattggacctagatagcgatccggataaaaaccttgacacagaccaagacccagactgggatcgaaatgttggacctagatctgggcagagatcctgacccagaaacaaacttggacccgcactcaggacccaaactttgacctggacccgaacatagacctagatcagggtccacacctggacacaaacccagacaaagactcggacccgaactcaaacctacacctagaatcagacccaaagctagacccggacccggacccaaacccgaacctagaccaggatcagaactaaggacttagacacagaattgaatccaaactcaaataggtattggaacttgggactcggaccgaacctagaccaacacccaggaggggaacccacacccgaagcctgatctggacctagacagaaatccagac

SEQ ID NO: 349337 - DNA, 657 bp, Cannabis indica
ggggtacgaggagatgtgcgttgtagagtttttcctgccacactctcagaagctactcaacaattgtacttcaagttggcactaggaaggttcaactcttggaaggccttctcctcagaatttcatgcacaattctcttcttcacgccaactctcgttacatttagaagacctggttaaagtgaagcaaaggccaagagagcctcgccgagcttatataagtaaattcatgacggaagcaacaaaagtggtgtgattaattgaagaggggaaattagccgccatagtgggaggcatagagattctcggagagctacggaaagacatcaagaaaagtggtctggtggattctatgagtgatttcctcgaccgtgcaaatggtttcatcaagcttgaagaagccattcaacgagcagacatccattcaaaacccccagtacactagtagttaaagctcgagcggtaaaagatctaacaataacaacagaaaaggcaatgggaaaaagggaaagtttacagggaaagccgaacagacccctagagagaattcgtccaaattcactgctttctttgtcctgacggacgatttggagaccatctatatggctatttagtcagtagttccgtacaagaaacctgctcccatgaaaaaggacat

SEQ ID NO: 349338 - DNA, 647 bp, Cannabis indica
ataagagccatttattccgtgggtgtaagggtccaatggaggcttgaaacggggacgttacagtaccaagatgatctctcattagttaaccacagacatgagtaatgcatgtattgagtttatggtgggaaaacttagtaacctggaaatttattctgacttgatagaaagaatcaagtgttcccaactagaagatcctgagttggtcgaagctcaagaagaagtcttagttggacatgctaaggacttcacagtttctaatactggtattgttgggaatattttaccacaatctagatttactaataagtatgttgaattaatcctaaatatgaattttctaaaacaatgaaaataacacataaggatttaagaaaaccttacattgattgcagcggaatatattaactccttctgttcaagatctctaacccttgattcttttctgtcgcagagcattatcaagatctgaacctggatctctgtctccttcgggtttggttacaaccatcttactcactatgtttgagtacttaacttgctatgtgtgggaacgtcactcattcacttaattttcgaatatggaagaacaataaaggaggtgaaaaatcactaaggaaggaactctctcatctaggttgaaagca

SEQ ID NO: 349339 - DNA, 912 bp, Cannabis indica
aaacaaacatgtggatgacgctaaagcaaatcttacaagtttttttaaaaaattctatccaacaaattttgttcacatgttttaaaaaatgatatgtttggaagttggattttagtgagaaagaaaaatagtaaagaaaatgtagaaaaagaaaaatgtgtgaataaaaaattaaattaacttttcacctttcataaagaacattttgttgaattgagtgtttttttttatacattttttttttcatactaaatataaaaatttataattttttattttccattttttttttctatactttccttattttttttttttatttcttcattcaaatttaacttctaaacataaccttatgtaacaagctttttagcaaacaattagtcaaaaaaaattacaattaaagtattttaattttgtctagaaaaatagggttccatttcaaaattgatgagtagagtagtccatatttttatatatgattcaattttttacatttaatccatgtgggataatgtaccatctgttgcactcgatctcgtgcagctgactaatcatctggataggcgtggatcgaaaacccattagggatatggctctgataccatatcaagaaatagaggtgtgcataaatcgatcaaatccaacgagaaccgaccgatctaattacaaccgaccgccaaatattagatatccaattgtgatcagatcagattggatgttatttttaaatatccaattggatcggatcggatggtggatggagtgtctacaaattcaatacatccaacatccaatcgaactaatttgtattttcatttagtattttatattgttatacgtcaaatctatatgtatatatgaaaattaacattaaaattttactcttttttcttggatgggatggatcca

SEQ ID NO: 349340 - DNA, 901 bp, Cannabis indica
gttatgtcttttggaccaaccaacgctccgacagcttttatggatttgatgaatagggtattcaagaatttcctcatatttatttttttttagtttgtttgcgaaggcttagtgcttttttgacttttatgtgttagtttgttatgtttttagttttattttggatgttatgtgtttgactttttttttatggtgaatggtatgttttgttttatccttttatttgacttttattttgtgaattccttgccaccctttttgatgaattaaaagggggagaaattatatgataattttgtttggcacaacctcaatttttttttggggatatctaatactttttaaacttaagtataaaattgagggagagtttacaaaatcatgcaaggtaaaactaaaaggtaaatttttcttacccttgcacacattaagtgggagctaacctaatatatattgcttcaatttttcctttttcttttgaaaataatcaaatatttgatatcatcaaaaagggagagattattaactcacacttttaagtctccttgtttcgatgattaacaaatatttaattattatttgttactaatgttttgttgattttgtagcacaattaaaggtaaaataaatttttctaaggtaaaattaactccaagagcaaaatagtaattttaccaaaattctcaaaagttacccgaagtggattccaagactcaaggaaatcaagacaagactccatgaaggtttatttgcattttttagtcttgtatagtgatttttaagtccacacttaaaaaagtttttaagtacacattttggccccctaacttgtgcgacaagttttctcacttaatgattcaaaaaaaaatttaattcactttttaaatcacatttcatttaa

SEQ ID NO: 349341 - DNA, 531 bp, Cannabis indica
ttaatagtttttttaaaaaaaaaatctaaattttaaatcgcatttagtgagaattatatataactatcatttatttatatcaattataactctttggtaattgtgagcaaataggcatcatggctacaatactttgttatgcaacaaagctttattttgatgggtacctatgagacttttgagttatttgatttataattttattgatttgtagtttttttttttttccgctaaggaccaatttcaaaacaatacaattgtgaagagtttaattattcttctaattattatgatattaacatagttattttaagtgaacattgagagaaaatagtgataattctacatagagaagtgtcctcgaagaaaagaacgaacatataagtttgattctttctttttgttatttttttctcttgaatattttttttagtgtagcgtcagtgacggacccagaaatttttttttgtgggagctttttattattaaaaaatatttgtacacatattataatcatttttactagattta

SEQ ID NO: 349342 - DNA, 713 bp, Cannabis indica
ggtctgggttggggtttcggtccgggtctgggtctaggttcgagtcttggttttggtttggttcttggtctgggtctgggtctgggttctagtacgggtctaggttttggtctaggtcctgggtcacgagtcctagcgcaagttttggtccaggttcgggtttgggtctgggtatcgatccctagtctaggtctgggtccatatttggttttgcgtctagatcttgttctcgattgaggtccaattcctgttccaaggtcatcatttcggttcttgttctaatttcgggtcccgggtctgagtttggtttttgatcctggtctagaaattgttccaggttggggtcttggtacgatttgaaaatccagacaccgactatgggttaggtccaagccgtggatcgtgggtcaagatctggatcccaatcttgggtcccaatctcgttctgattcagatcttgggtctcggtccgtgtctatgttcgtgtttgtgttcgtgtctgggtctgggaccgagcactactacaaattacactattcacatcggtcaacgctactattcagtgttgaccgacgtgaatagtgtccaaataattggacccgtctgtttaaaaacgtcactaataatatacaatttgcgttgtttgataaatgatgataaaaaagaaaccgacgaaataaagtaaaatttaaaaacttgtttttcattttgcg

SEQ ID NO: 349343 - DNA, 934 bp, Cannabis indica
gttgtcaatcaactttttactgccgataaacaacaacgcctagttctcaagcttcatgtaagtccttcgcatctcgtactttagtttattgttcgtccacatcacatgctttactgttcatctgcttttctaggtttgatgtttgaattttctgggaagatctgtcttgagtttctgtgtaatacattagattcctcttttctggtggtcgtgttacttctattctatgtattttttgtcaaggacccatcttttctttaaggaatgaccttcaagggttcagagaggactttgtctttctcgatttttaaccccccctttttttttcttttcttggcctattcgtaatgtcaccatctgtgggattcttgcacccgacttttgtcaaggataaccttctaaggctttcttgttgacaactgtccggagggggcctctttccagcagttaggggacccccattcccttttttgatatagggtttggtttggggcctgactgctggaattttcaatctttttcagagccaagatgtctgcatccggttccaaatcttcatagaaaggcgcgaaacgtctggccaccttggaagaagtaatgaagggtccagtgcccaggaagggtataagccccgtgctaaggggtgggaagcggccgagcttcactctacccttacttgcccccaccagctggagcacattgtggtggtggcaggcattgcgacttccgggacttaccagcggccgccccgagacgcggagacgcctaatcacaattatgggggcttcggagcttggagccaaaggcacttgatgaccggggccatgcttccccttcaagattactttattaattttctagtatttgtcggccttgcgccataccaacttattcctcaagcttaccgcctgctctcaggcttatttatttttta

SEQ ID NO: 349344 - DNA, 1436 bp, Cannabis indica
cagtaaatataaactggaacataaatcaagatcaagatttattctgataattgctaattcattatattacttccatgtttaaaatatgtgtgacaaagagtactgtggtgtattgaatatagtccagagttcaaaatgaactatatatttcaatagtatagtccaattctaagtatatagagattatgatccacccctaaggggtatagagatcacggttctctaagtgttatagagatcatgtggagttatgaatataattcagagttcaatagatataaaagattaatgaactgcatattattcttaactttttccatccctatcagatcaaaagatctttctattaaacaaattcttaataattattgttagaattaacaattattcataatcgcagaaagaaattttattgtctatgtagtattaactctttgaagcgtttaagatactatagaatttgtatcaataataaaaaaacatacacatacaatcattaaaacatatcaatataattggtactggcatacacaagataaagtgaatgaagctcaattcataaatgtaatttatttccaaaatagaaaactttattataaaattctccaaaattaaaggaattgtttgcaacaatataaaaaatagggaatataattccaaactaataattgaaatccaaattgtgctgaaactaaaatagttaattcacaaataataagaaaaagagcttcatcttcatcttggacgaactccacccctttttgttcaaccttctgattcaactcgctaagacagcatccgagttcaagcagtttgggttgtaataagaagaaaagcaaataaacatggttggtaggtcaagaattaataatccaaatggataataattcactaaaacacatatgtttataggaaaagaaataccttgttttgtttgtaagaaatttagggcattggggtttctagtgtcctttttcattgcaaaagaagcattttccttttaatgtttgaacaggcttctagctattcttccacttcttcttgtttttggttttggaagtagaggcaaagtttccctcaactttagtcgccacattaccatttctagaatcatgaggtttactccctttcttcttcggtcctccaatcaaattttcatatgtctgaaggtcattgactaacgtgtgaaagtcttgttccttcttatttatgacatactttgaggtgcagagcaaaaagcctggagtcagactattcaagataagactcacttgagttgtcttatccatttcagctccatgattctgggcttcctggaaataagttgccatctggagaaggtgatcacacacatactgatggggttccatccgtgcattgataatttcttctcgcgtcaaagcgagactgaattgatcccattccgaatagttcag

SEQ ID NO: 349345 - DNA, 1200 bp, Cannabis indica
ttatttaattattttttactttcaaacttgaattctaattcttaaaaaagtaatattgaaatttgattatttattagatacattatgccatataaatagagatattttgatcatattgaaattaaatttaaccaaaattatgctcaaggatgtttttatgttgatatgtcatataaaaagtagtgttttgatattaactaaataaaaggggtatgctttgtaaattttactgaagcaaactaaagggtagtaaatatgtaaagggtacaatgcctaacttgtattatatcttgtgcaatatttttgtaaaaatgtgataatttacttcttattatgtttgggctgtctgcacaaggcaaagacttgtcactcttttgtattttttcttcttctaatttgttctatttcaaaacaatgtttaatttcagcttgaagaagcaaagcttttgcgtagccaaggacagcacgagatggctatcagccttgcaaaatatatctctcaaaattaccagtgtaatgaagaatcttcagatgtatatcgcttggttgggaagtggttggcagaaactagatctagcaggtaatttgaactttgaagtatttagtgaatcatttccaatgccacatcataatgctgatatctttgttttgtatttccttttcttgaatattatgttggtgatgacaattcagctcaagaactattctcgaaaagtatttaaaacctgcagtagcacttgctgaaattgagaacactacaaacaagaagtctgtagaaagacagggccaaactcattttcatctcgcacactatgcagatgctctttttaggagttacgaggaaagactttcttctagtgaatggcatgcagcaacccgtttaaggaagcacaaggtaacttgatcttctccagaaattgtatctaagttacattatcttaataagtaattaacagaagtgaaatgttggtttatcagactagggaattggaagcgcttattaaacgactgaaaagttcatcaaaggtaagttcaatttgctctttatttcttgtgtgtgtgtgtgtgactatatctgaagtctaattttattgccaaaaacattaaaccgtaaagggtttttttttttttttggataatcaaaatacaaaatgtctttgttttggtcactaacgtcaatgaagggatgttaggagctac

SEQ ID NO: 349346 - DNA, 752 bp, Cannabis indica
gattgacagtccgtggtgaaagggaaattaaagagagtgagaagagagggggggtcctatgtatagcttcctctctgaaattaatggaagtaaagttagatgtattatgagttgtttttgtgttgcaaattccaagaaccaatttatagttattgtgatctggatttataatatgcactatatgggttttatcctaaggttttacactgtttcttgaaagagaataactgtacaagtgtcccctcttttgctacttctttaggaggaaaaacaaaagccttaccatcttatcaaccaagctcttcttttaaagtcacacacattaatttatttaaataaccaaacttcacttactcactcactcaatcttccatctctacattttaattctccttaaagttttggttacacacttacacaacaacatatatgttttatttaccccactcatgactcaattcacaaccccacaaaaaataaagtttataattgaatttttaacacacatactatagtaataaatatcaaataattaaaacaagttactttctctagaatctttgacaacatattcaagtgtgtaggccattatacaaatttatatatatactaataataattttatttccttaattagtaaatacatatatctttattaattagtattgttattgaatattagtggtgtgtccagtatcttttataagtggtgctccacgattagcgatattccctaaaagttattttttaaa

SEQ ID NO: 349347 - DNA, 811 bp, Cannabis indica
gtcatactctagccttaccgatgtgacacaatcggatggtacgaagccaacatacatatctaatgtaatctaacaggcttcctaacatgcacactaaacatgtaatacatatgcatactattatactaatcttacctcgattctgaattcaggtgtgccggtcaacctgagtggaacgaactgcacggcgatttacaggctcctaaaccataacaatcacaacactgataagtaatacgctaaatcactttccggggacttaaactagaaactagaagtttccctatcgataaaaagtatggcaataccctaaacaacataaaaatgggaagaactagggttcccaatttttcccgaaccggtagaccggttctacaaccggaattccggttctgggaattcctggaacccaaccagtagaccgattgctgaactggaattctggatcagagcaggaaacttcaaaaattcgtttctcactcaaatcaaacccaaactctttcaaacctttcagacctgctctacatacccccataaacatttccaaagcatcataacaacccagaaatcacagatatgaaaaatgccatgtgagctccaagctttgagttcaaaactcaaacttggctaaagctcacctacatgcattcaaacctgattaaaactactccaatatgcatataataatagtagaaaacaacactaaacaaatcccacaagtacaacaagctaattgaacaagccaccattaaaatcaagatttagctcaaaacttcatacttgtttaaaatcaactaaacaccaacaaaaa

SEQ ID NO: 349348 - DNA, 515 bp, Cannabis indica
acaataattagttttgtcaatattagtgccttcttttgtttttttaggctttgggagatttatagcttttgcagccaataatccatctaatatttgttcgacatcatcttcatcaatgaacgaataccccatagtctcttttataatggactctttcggtagtattttagctttttctttgcctttgtcatattttacaaagatagccattgattcatatgacatgtcgttttgacgagctatttgcacctcaacattacttgctttggaaacaagctcattgaaagtttcaggttctgtggagcataagtaaactgctatctcaggaatgagattttgtctacacaattgaactgcagatagctcagacaatttttctggacattgaagtcgaacacttctccatctagcaataaattcgttgatagattcatctggtctttgcttagtttcagctaagtcactaagagtgacttcccttattgagcttaccaactgagcaatgaaggctcttt

SEQ ID NO: 349349 - DNA, 503 bp, Cannabis indica
caaagccttcggctttttccatgttcgctgaatgttgttagtctcgtctaagtattggagatcagtcagtataatatttttcaaaagaaaaacaaaatcgcgccattttttatatttaatcataaatatatggctcatttaccgtatttttcactcctatcaatttttagaattattacatagaaaatataaactaatatcttatttacaaaaatacatttataaagtatggacaatatttataccttttatataattttaaattccaaaataccacatacattattacttacacaatcacacggtagtggttgtgcggtggttgcatcagacaaaggtttcaatcagacgatggttgctgggtaattggtcgaaggttacatcagatgaaagtttcaatcagacaaaagtttctaagtagttgttgggtggttgaccaaaggttgcatcagacgaaagtttcaatcagatgaaataattgttagcaaaatatttatgcaact

SEQ ID NO: 349350 - DNA, 628 bp, Cannabis indica
cagcaggagtgctaaacacaagtggcttagcctgaaagctcgatctctcaaatcatcgctctcaatggcagctttaagaagctcagttgccatcaccttcccatcacgtgccttgtctaagttcttagacttatgcacagttagcttagctctaatgaacttagacaaatgaaggtcatactcatcaaacaactttctacttctcttcatcctagcccatgacaactcaacaatacaagttgcttacaacccaagtaaggtctaattgggttgagaaggttcaagcaattttgaaggaaattttcaaggcactaagaaagtgttttgggattttggaggttttagaaaaaaaaaataattcaaagatttttgggagtctaaaaatctttggagtaagatcaacaaaggaggagaagaagaaatttctaaaaaaaaaaaaaaattgacaccaattctaagaaaacaaatgtttctttctaccttggaatgaagaacgctcgaaggcttgatgaagatgaaatttcaagagactctctaaaggcttgggcatgtggaatgaaatgagaaagtgtggaaattttgattgacaactcttttatttataggtgagttcaatctcctaatccta

SEQ ID NO: 349351 - DNA, 796 bp, Cannabis indica
attttcaaataataactgcatttatttacgtgggacgtaattaaagcccacaatttggggaaaatattattatgggatttgaatctgattgtaattaattgccaccctatgttactataaaaaggggcagaatgtattgaaaaaaggacggaaaatccttgagagaaaaaaacctagtttgtatcagaacaatctgaataagattgactcgtggactatgcagagttaactacaaaatcacgtaaaaacttggtgttatatttgctttattattttttcttagatttcaactaatttttgtgatgatcctatcacagaataggctaattatcgttaacaaatatttgcgttaatcatgggacatcatcttttgaagcatataatcataattaccttccactgtgttgacatcactgtaattgtgaataactatatgttctggacttaacaaaaattgtatacattaaaccataaacatgaaatctacatgttaacataaatgacttttaatcttctattgataacaaatctagttatattgaaataagttttatttagggcataaaatcccaacaaactcccacttgcacgaacataaaacaagtagtgcatttcaatcaatccacttgtcttgatataaagatcaagtgtagtgtacttgactaaacccaaaataactaggaaattgtaagtctgtggtaagcaattgcttcctccaccattacttcctttatgttcataaaacattatgcaacattattttttttatgcattactcatctagggatactgaatt

SEQ ID NO: 349352 - DNA, 577 bp, Cannabis indica
aaagaaagaaaaatttggcgaccagtgtcaatttcaagaaaaaaaaaaataaatataaagttattgcaatcttgtagaaaaaaaaaagaagaagaaattttatttatctcatccaattagaaaaaaaaggtagtgggattgtgtgtgaaaaaatttattgggtgacatgattagagaagcttatggtatggcaagcctaaatgaacatttcaactacccttacctaagcctaacactacaagcctagaaagaccttctaaatcttggttgtgcgttgatttatattagtggacaatagtaagtattgcaagcatatgaaattttagtttagtggatttatggttgtaattggcatgcataaagtggttcaactgttagttaattgcgttctatggtttcatgagctgaatgaaatcaaaattaaagtgtgtcaagggtgtaattgaactgaaattctggattattatgcataagtgaaatttttcataatcatgttattgagtctacttgaatattactcatattctagagattgacttgtttaacttttattttttttagtgttttacttgaggac

SEQ ID NO: 349353 - DNA, 674 bp, Cannabis indica
agaaaattataaggcaaggttatttctggccgataatgagcgaagatccaagacctatgttaaaaaatgtgacaaatgctagagattttcaatgataccgcgagctccgcccaatgagttacctaagatgcaaagtccgtggccttttgccatttggggaattgacctgctcgaaaaattacccaagggaaaaggtggagtgcattatgcagtgaatgtggttgatcactttactaaatggatggaagccgagccactagcaaccattaaatcaaaaaagttcaagactttgttgtgaagaacataatctgccggttcggattgccgtacaaaatagtctcggacaatggcaaatagtttgacagccagtccttcactgatttttgtgtgaaccatggtatcatcaaaagtttcttcgcagtggcgcatccataagaaaatggtcaagttgaagcagtcaacaagacattgaaggatacactaaagaaaagacttgaggatgctaaaggaaactggccggaggacttcctaaagtcctatggtcgtaccgaacaactgagaaaatggcaactggacagactccattttcgatggcatatggatatgaagcaatgttgcccgtagaactcgagccaccatcccacggaagactgatgtatagccaagaagcaaat

SEQ ID NO: 349354 - DNA, 805 bp, Cannabis indica
tgtctctcatctactagttatctaacagagttagaaagtagaatttggaaaagttgaaggattggatgagaatgagagcatcatgttccttttatagtatttcaactagggtttaggtttaaattatatagagtaaagaggaataaaataatgggaaaaattacacactgtggctgaccactagagggtattttactagttacaattttgctactttatttcaactacttattcttctttcaataataccatattttctaatttcaatcctataaatgtcaaaactatttatttaataataataattaattatcaaataaaatttctatttatattatttattaattagaccataccaagtctcttaattaacaaatagatccttaaacatcttttcttcacaattaagcacttgcttaatgaaaattcataaattagacatagtctaattttagaattataattgattaattaaatcgaattaattgagtctacaagtagtgttatctcaacaagtgagggggccatgagcctatataatcgagcttccaataagtagatctagaatttaccaagtaaattccttaacttattaattcctccttgcgctacagtagattcggaattgcacttcaattatatagaacactctatatgttcaaagatatagataggttatgattatccattattacaatcctaatagtcaaagatcttctattgatgatctacatcgaataaggacaaatttactgttctacccatcaatttattttatcctttaaacacttagctacctataaat

SEQ ID NO: 349355 - DNA, 825 bp, Cannabis indica
aggcgcacgattcgaattcctgagatccaacggttggattggatcgtcattgaggcggtggaaacgcatgagtgtccgcctgacacccattaatgcgccgtatcaatcaatggacaagaaacgaatcgacgcctgcaaaaagtgaaccgctgcagtaatggtgatcattaaatacaccctcacgcgcccaaagcacgtgccagaaaaccgagaagccaaccggaggcatccaagcaagccttgttcacttcacaattaaacaaggcttgggggtaaatgttgcccctgattttgcccaatatacgtggaccaaccggacagtgacacgtggatggaaagggtttagcgtttgaattaaatagctaagtctttataaagcaaagcattattttggatatgcctcccggagaaggcatgcaaggtctcatatgctcccggagagcaagatggcatcaaagcatctccgggtggtgtcaggcttcctctgagcagtcatctcgcatttaatgccgcatgggaggaggcgtattggaactgccacacgcaataaagtctgacggcacaacccccgatctgtacctactaggctatgaccaataaagtctagtgacggctactctgtgaagaatcacatcagtcaagagggattaaggactgccctcataaaatccctacagcacctagggattagaccatgcataacccatgatatattcattgggaatgtacaactttactgatagttacagaaatgcatgtaccttaattctggggatcaccccacaaaaacactataaataccccccaaagctcattaaagagggg

SEQ ID NO: 349356 - DNA, 605 bp, Cannabis indica
gctcaatcgtatcaatcaacctaatgggtcgactcaatcgaccattttgaagctcaaatggatcaatcgacaataaatcaaaatcaaatgctcaatcgtaaacatgaatatatagagtaaaggtgttgcaggtatttcaatcgtatcgacccaattgttgttcgcctcaatcgaacattccgaagctgatcaatcgactataaatttaaatcaatcttgattcaaaaattgaatgcaccattgaatcgatcttcaaacaggagatgaaaaatgcaaatctcgattgggaaataggggctgaaatcatatgggagtggggttttgattttggtatcattaaaattgttgaatcccttgcaagagaaaatagacgatgagagactaagataaagaactgatagagagaaagagaatcgtaaatggggatgaagaaaaatcacattatacggtgagtttgacgataaataaggtcgaagactataattagttgttaatgacttgattaatggagattttgaaataaaaataattaacagaagggttagtctccgttaacgttaacagaaatatttaagaaaaaaaataaacaccgttaaaccaagaat

SEQ ID NO: 349357 - DNA, 1220 bp, Cannabis indica
agggaaactatatgcgagagacagattaaaggttgtcacgagaaggtgacctttggttgtcccatcaagggtttcaaaaaattacggctgtagttattttgttttatcttatttatggtgccacgtcatgaaactcttcgattttcgtgtaggcgtgcccatggctgaccgttggataggacgaccttaggcattcttgcagccacgtgtcataatcccaatttatgagggatatgggtctttaaactctctgatacgaaataacttcctcattttccctctcgttctttacttcctcttccctttttctctaagatttgaagaaatcctcatccatccttcacccagattcacttttcttcccatctttctaaaattttaggagagattgaaaccatttgcagggagcaattagaaaagctaaaggtcaatttctaatccactcgtgtacttggttttttgaaaagatgagaattatttttctgggctttttgacattttgagaggcttgaatatgtatgtttgtagggaatacacatagggctatatttttctgtgtagaattgggtaatcttagaaaaataggcctgaaatttgtaaaaccgtgaactttaggaaggaaagtttgaatttatgcacctttcttaaatgtttatttcttgaatacacgcgggtattcgaatgaactcttcgaatactcgcatacctgcttcctttaggttttacagagactttatcattcctagtcgttgttttagaacatagggttttatattctctgtatattttgttgtgggaacattggttaagtccttcaaatggtgggcgtgtcgcaatattccaatgctcatacgtgcgatcgtatgttccttgaggtacttcaatacgcccagccatttgcgacatacgccagtgttcccattttccatataaccgtattcttcgactagtggatttgctcgaaacggttggtgtttcccagtaacttcagggtcatgctcgaaaacgcatgccccttgggtcactaggatacacccagccattttttgaggtacattgctactcagatatgcgtgccaaactcgcatgttgtggctggttgaatttctcgaaacggtgggtgtttcccagttacttcagggttatgcttgaaaacacataccccttgggttactgggatacacccagccattttttgagagattcttctattcgcacac

SEQ ID NO: 349358 - DNA, 1073 bp, Cannabis indica
tgcccaccctttatgagtcttctgaaggggatgggctgtattgatctttttaatttgaagaaactataagagagatcatgatacgcttctatttccttagaatgatagtttcacgaccttcagggttggtggagtagtaaaatttttattttcataaacttggtttcattattttaggttcatatgcctttttaataatcacaactttcacacttcccacaagattgatagtttatgattaactatatattttattaggtcctctagagatacatatatctgatagtgatacttaattgtaatgcttgatcattaagaataactcttgttgtgggatagttttgctaatataataatatttttttaacctacttctagcaaaatcggatgcgtgccttaaactatataaacgaagaaactgataataacctctatgatgctcacagtgtttttatcttggctccttttagattttattaagtatttagaattatatttatgagataaaatttaatatgtgatagttaggcttccatttataatttttgttacatattttgtgtatttatcttcctactttatatgtattacagggtatatatatttttgtggagatatgctcttttagggattctataaattgggggttcaaaatatggtggccccttgtaattggatatatatctactaattatttttcacagattgagaatttacttggttgtttgtgattagatttaaatttattttgttatttgggtttcaattgtacaaggagctttttgtttaattgaaaatggttacctttacctttgagtaattattcttaatacagttagattatcaagatttcttcaagcgtcatacaaatttatgaaattaaaatgggtaaataccattttggaccctgtgttttacaaaagttacagattagaccatgtgttttattaaatgacaaaatggaccctggaatttctaaaatggtaaaaataggaccctgagcttaattttggacatctttttttaaatacaaccaatttgaagacaattcctaatacgaacaaatacaaaaa

SEQ ID NO: 349359 - DNA, 529 bp, Cannabis indica
acaaatatattaagtcgtttataaacttaggatctttcattgaggagcatcaaactctaatgaaaaatctctaatcatttacaagccacaagaagggatctcgtactaagtaaaaggatagcaagttctcaggctggtctggcagtgggctaaggcggactaaatttgtgcttaaggcccactcaaactcagagcctaaaatttttatataatatatttttctgcatgaaaaaaaaataatatttttgaatttttttgtaaaaagatacttaataatactcacattttattttagataaaatacacacttaataaatttcttaagcttattataaaggttggccatgcaagttctttgagagttggcattcattcacggggatagagtttttagtttatttgaatattaattcaagggtatgttttacatcttcatgcataaggctaattagcaatttttcttccgaactttgacatgtacaaaatcatgtccctgaattttttttgccgttaaaaatttctcctgaac

SEQ ID NO: 349360 - DNA, 757 bp, Cannabis indica
cgtggtcgtagtctccatggaacagacaattttgtcatgtcttttttgttggtatcttgcttcatgggcccgggcttcttggacgagactaatgactgagttaccatatatacactctctatatctttagttagaatagtgaatgcagtgtgtttggcatgatcaaaaggagtctgtctagatttatcggtgaactttcctttctttccgtttccttgcttgtggttgttgcttgagcgcttgccacttgaattgtttgaatagatgggaagttgggcagatgttccagtggaaggagccttcgctttccctggcttttgctcaccttctgctcgttgaatggcttcttcgagcttgatgaagataccgaaggaaatcactcattgagtctaccggcccgttctttcttatatccttccaaagttcactaaggacttcaatgcccccagtatcgcgaataactttccatcctcagttacccgcaaaactttggtcgcttctgtcatgaatctgctgatgtatgcccaaagtggctcgcctggtcgttgctttacttcgaccaaatctcccaaatgcaatgggagatgacgcaaggaagagaattgtgcattgaattctgaagaaaaggttttccatgaactaaactttccaggagccaacttgaaataccattgctgtgcgacttccgacagagtggcagggaagattctgcagcatacatccccccgtactccttgtaaatccatttgcatctcaa

SEQ ID NO: 349361 - DNA, 628 bp, Cannabis indica
tcaagcgaaaagaaataatgtcaacatgataatttcaagtcaaaattttaaaaatgtcacaaatattcaagaaaaatattagtaacaagccaataagaactatacaaaattaccttgaatacatctagagttgtgagtgtgtgcaccaaacttgaaccttcttaccacaaatcatagcacataaaagctttcgaaaaatgaaccaagtaaaagtctcaactccattagcctcacaggtttttgaaaatatttattcacggctaaggatttcacgcatggagttaaaaattaaaaattgagcactcaaaatggatagatcaatttaggacaaatatttgaataaacattgaaacgaagatagtaatgagttatttggacaaaccaccataagtgtaccacaaaccagcttttcgagatttttgaacaaaaatagataatcatttacatttattctaggagctaaaacaaatgaaaaataaaatacaacaatttttttttcttttcttttcctttttttttgttttcttttgaacaagaggcaacatgttggataaaataatggaaatgttgcgcttgtattttttttcttctttttttttcgcacataaagaaaataattacacaaagg

SEQ ID NO: 349362 - DNA, 687 bp, Cannabis indica
gtgttagaggttttcacatgtacctcacgtaccgccaacacaacttagaataatgacctcgccctacccatttactatatgggagatcgacctaattggggcattacccactgcgaggaggagctaattctgcggtaatagcaaccgacttcttctctaaatggactgaggccgagcccctcgtctccataacttgcaagaaagtccttgactttgtctttaagaacattatctgtaggtttggaactcccgtgaagacattatccgataatggaacccaatatgatggcgacttattcactgaattctgcgagaggaataaaattatcaaaagcttctcgtcagtatccaagcctcaggcgaatggacaagtggaagccgttaataaaaccctaaaggatactatcaagaagaagttagatgctgccaaaggcaaaagggttgatgagctacctcaagtgctctgggcccacagaactaccgagaaaacaaccacaggacacactcctttctcgttagcatttggcttggaagtaatgctgcctattgaattaaatatatcaactcacagaagagagtttcatactcaagaagaaaactaggaacttttaaaattgtccatggatctacttgaggaaaaataaaatgagtcgcgaatccccaacgtcgcataccaacaccgagtta

SEQ ID NO: 349363 - DNA, 521 bp, Cannabis indica
agatttcatggaaacccctccacacaaaatgtaaaattttcatgggtatttttaaaccccaaaattgcttccagcataatgagaaaacatgatcactagctgaaagacttaaagcacattattagagaaactttttattaaaatatgctaaaaaaaaaataacaatataccacctatttaacactctatcagagatgcttttctatatatatttttgaaaaaaaatgatactcaaagagaattaaaaaaaaaatcatcataaatgatactcacataaatagtgtgatagtaaatgcaggatcgactttaaaatatagtgggtcataaaaaaaatattttttggcccttatttagaaataagggtatactattttggaccctgtgttttgcaaaagttaccgattggaccctgtgttttgttaaatgacaaaatggaccttgtattttctaaaatagtaaaaataagaccttgagcttaatttttgacaactttttttttttaaatataatcaacttaaaaa

SEQ ID NO: 349364 - DNA, 1737 bp, Cannabis indica
gttgaattgaaaaaatggcatttttgagaaaataagaaaaagttattgaaaaatggcaaaattccaaagtggggcccacatcctatggccgaccacatgcaagggaatttaccatttaatttttcaatattttaatgtcaaataattctaacctaaacctaggtggttgcctataaatagatagtgatgtctcatatcaaaagatgatgaaaattcaagtcttcagtaaaaaatttgagccatctaatctatgccattcgaaccactctcttctcttcctctcttcataatttcaaaccctaaagtgaaaagagtgagtgcccacacacatcaagtggtactcaatcatagtgtgtaaggctgtgaagaatctagtttgaagagaaggacattcaggctcaaatcttggtgatactctgctacagacaggatacaagagttagagatttgactggaaggagccattattattccgctgcacccattgtaaggtttctgaaactttatatgtgtttaaatttacatcgttttagagattcatatttaggatgttaaataacatacatggtagtaaatctggatcctagtaaaacatattccaacaatagatcttccaatgtataaaccgccaattccttatcctcataggtttatgaagaagaaacttgatgaggaatttgctaagttcttggaaattttcaaaaaaaagtcaacatcaacatttctttcattgatgcattagagaagatgcccaattatgttaagtttatgaaggaggtgttgataaagaaaaagaaatttgtggattatgaaactgtgagcttagctgaggaatgtagtgccataattcagaagaagttgcctcaaaagcttaaagatccaggtagcttttcaattccttgtgagattggtggtttaaaatttgagaagtctttaagtgatcttggggctagtataaatttaatgccattttcggtattcaaaaagttgggtattagtgaagtaaagcccacaacaatttcattacaattggtagatcaatcattcacttatccaaggagaattatagaagatgtgctaattaaagtgggtaagttagtgttgacatggaagaagataaggatatgctattgatccttgggcgccctttcttagcaattggtggtgcacttatagatgttcgatgaggccacttaaccttgagtgctaatgatgaagaaatcaagttcgatatttataagtcttctaatcaagctgatattgagaatacatgcaatatgattgagtcttgtaattccaatgaagataatcgaaagactaatcataaagaaaagacaaagaagcctcgagataaaaagaaaccaaaggaggagttttcaataggtcaacaagtgttggtgattcattcaaaattcaaatatttgataagtaacgttatctcaagatggaaaaatcattttaatgtcaaggagttacttccttgtggccttgtaagtattaaaagtgagattctaaaggttcacaagcgtaaactgaaggcatgcactaatgagctccgacgatcttattgaccacctaagggtcatgatgacgttccacctgctattgatggctatgttacagttatgcacccgtagtcctagctgctatggtttgttttctctcctttaattttattgcataatggggacactttttagtttaagttcgggaatgggaaggcaattttcatgtttt

SEQ ID NO: 349365 - DNA, 582 bp, Cannabis indica
atcatgattatattccactgtgctgacaacactataatcagaaacaaatatgtatacatatatctacatatattcttgacttaatagaatttatacaataagtataatcatgaaataaatcatgtgagccatacaacatagaatgcaatttctgatcttatattaattagtaaatctgattatattgaaatatattttatttagggtacaaaacccaacaaactctcacttgcactaatataaaacaaaaggtgcatttctccaccattacatatccttgatattatgaaattcctctctatatgtctactcgtttagggatactagattacttactttttagcaattacttctatgtttgtcaggaagtaacacttgtagttaataaagtgttggtacaatgcaaaaaaattgtatagaactttccatagattgaataagtatctttcctgcaactttagcattcagtctcaatggtagagttaaagactccagatcagtttttacatttctccaaaatcattgctccaccccaaacgtaatcaccatctcattagtcaactttctagcatcaaggcaagt

SEQ ID NO: 349366 - DNA, 503 bp, Cannabis indica
gtcttaacttatatatattcatgactaatactcgtttatcatcgtcccctactccattgcccaattttttttttttgaaaacgagtgttatatctgtagcaaataagtccagagaaaaatgctcagttgtagaagatgatgactccgactttgctttgtctgtattgaaatgggatcatggccctgcgaagtagaaatctaaagtttctgttcctcagaaaatttgcccaacttttgagaattagaaagggaaggttgaagttgatcatgggttggaggtttgtttttagtttcgttttagtttttccccaactttgattttgttgcccttaattttgtccaaaatacgtggaccaacgcgactgcgacacgtggatttgaggagtaaggttttgagataattcaactaagtctttttaatcaagaggatcggcaagaaacatacctctcggagaaggtatgagggatccacgtactcccgggggcaaagctatagcaaagca

SEQ ID NO: 349367 - DNA, 371 bp, Cannabis indica
tttttacggtattttataaaaatacaaaaaacaacacgaaattaacaagaaaacaacattaaaataacataagaaataatatacaaataataaaaaatcaagaacaaaataacaatagaataacagaaaaatataccaaaagactatattttatgtaaataaaatctaactctaaaaatattaaaaattttatggagacggtatttctgtaatttttttttttaaattatcaaaaaaaaaaaaagccggacacaatcatcattatcattagggaaatttacatggtatactaacttttatcatttctttacaaaaatactgtcaggcggtattttttacttttttactgtatttttttataagtttcatac

SEQ ID NO: 349368 - DNA, 1160 bp, Cannabis indica
aatagagtattcttaaatagaggttctattgtattaaaaaatttactaatatagcactaaaatgacataatctacaattttagagttaatatttatatgttaagtgccaatataaagaatctcaaatttgattatattaaaataattattgtactgcaattatacttgtcccccacataagtcaattgtaaacaatgaacaaaatataactgaataagcacattcgcaaaatccttattaggataaaagtctacaaatatcataattcgagagatggagaaaattcatattatctttttttttttccacctatgttgccattttgtttttagtaagctttcatactttagaaactagtaaatatgttttttcttagcaataaagtatgtgtgttcatgtataacaaataactaatattttaggtttttaaagcataaatattttgtctctccaaaatatttgtttcactattgattactattcttagtttgaagttgtgaaattagttactaaaagtatttttaaagagtgttaattaattactttcatcatatttaacttaacacttcaccgaattttataattcattatttttaactttaagctaaggcaagctagatctaatcgcattctcgaaactcataatgaaaagtaattaaaatttatataattttacaaaaggctagaagtgagcctagaagttaaaatggccgaaattacttgttcgttggatctaataacccatttattaaaatttaaaaattcaaaactttagctatgtaatatgagtaaaaagctattatgatttatagttatgataacccattttgtattatacgaacttagttaagttaattatgcaagttgggtatgtagggtatattttcgaccggagtgaagaaaataaatattgaataagaagataaaaacacaacacacacaactagtaacaattaacttttagttaaatgacggcaaaactcctaaaactttcattttgatttcacttaactccaaaattcaaacttggacggtaaaacccccaatactcgtattctgttagcaatttaccatttccgtccatcttaggtgttaagtgtcatgttggactactggacatagtgtacacgtgacataattttgttggtccacgtaaaaaa

SEQ ID NO: 349369 - DNA, 1050 bp, Cannabis indica
atcattcaatttaattaaacctcaaaatctaatagcattacaaattggattggttgatttttcaattagatatttatttacacatttcatttttattataaacttaaaaacatgaaaagaaaaatacataaaatctatatatatacttttatttaaatttaatactttataataatatcatattacatgtttaatgcaacaaaaaatttgaaataactacaacaataaccaataattacaaatacaataaaaaaaaacagtaagaatataattaatatatatttaatatttctattatatatgtataaatataaataagttttttctgcaagtataaataagctttttttttaatatatattaaatatacttagattagattgatttttaattaaattttgagattaacatctaataattaattcaattaggactcgtttggtataccgtattgtattgtattatgttggattgtattgtattgtattagtattatttaatacaatactatgtttggtattgacttatattaatatattgaattgtattagtattatttaattcgggttccggttccggtcccaggtccaggtccgggtcctaaattcggattagagattggtgttgaccccgaatcctttgtaaatattataatacaagctaatatggaccatttgttgtgtattaaataatacaacatacattgtattaaaaaatttagtcgtaataattaatacaatacattgctttatccaaacatagtgttatttattatttaatacaatacgactcttatacggcgtaccaaacgagcctttagaatcttattttgaacattcaagtgaattcttattagatattcaactttttgtaattagattaaattaaatgagtttgattcgatggtggcgtttggttgggaggaatgaaaatataggaataggaatgggaatgagaataagaataggaatgaaataaaatttaaaatgcataaaaaaattgataaaaaaatcattaaatttttctcttgttacattagaatgatctttc

SEQ ID NO: 349370 - DNA, 682 bp, Cannabis indica
tttagatacttcattcaaaagttggaaggaaaatattattttggatcttatattttacaaaagttattgattagacttttgtcttgttaaatgataaaatagatcttatattttctaaaatagtaaaaataggactctaagctcaatttgtgacaatttttttaatataactaacttgaagacaatttctaacacgaacagatatcgaaaatgtaaccagttttgttataacatttctagatcggattattattaagttttattttgacaaaaaatcagttcaaaatcctatttgtaccattttagtaaaacaggattcatttttgtcatttaacaaaataaatggtccattagtaacttttacaaaatacacagtctaaaatagtatttacttaaaaaaaattacctaaattatgattttgattagagtttacaaaaatgttaaatttataaattaatttatatagaatttcaggttaacttaagggtaaataatattttagaccctgtgttttgtaaaaattactaattggactatttgttttgttaaatgacgaaatagatcctgtattttctaaagggattatttcacaaatacacaaaaaacaacaaaaaaattaacaaaaacttacggtttcacggattttaaatatttttacgtatttttttatttttattttat

SEQ ID NO: 349371 - DNA, 546 bp, Cannabis indica
ctatagaatttggtggcaaggaaatcaaccactcttggctcgctctctcagagagaatggaaaaagtctcaagcgaatggcatcatcactaactccattgactttgaaagtctgacataactccatgaagtttgatagatgcagattggggtcttcagaagggagtccaccaaactggattgaagactgcaccatttgaagtatggcaggcttaatttcgaagttgttagcatccactgctggtggtctgatgcatgactgaacccccgtaagagttgggagaatataatctctcaagctgcggccattagcttgatcttcaacgacacctccattattaccgttgttgcctccattattcgcagcattagcatccatgatttctagtgtttcaacagttgctgaaactctttcttgcctcttgttccttctgtttctcctacaagacttctcgatttcatgatcaacgggtaacatgactccttgtccttgacggcgcatacacctaaaactcctgaaatagatagaaacaatcttgcaagaaca

SEQ ID NO: 349372 - DNA, 599 bp, Cannabis indica
gcaagttaatagattgatagatgaataagatcatattgagttcccaagtaagcggtaagtagattataatttcaatcgttgcctgaccaaactgactcatgaatttgcaggcttatcctatagaatggattaggggtgttcatcaaactgctcagtggtgcgatgcggtcgcggtttgaatttttcctaaatcgcgtagtgcgatgcggttacagttttgaattatttatatgcagttcaaaccgcatcgcaccgcacattataaatatactaatttttatctttatttaggtccaatatgtgaatgtccaacccaaagtctaataattattgtattattgaaacttaatttttttcatatttattctcaagccttgtggtatttttgataagtgttgctcaagctttgttgtatttgtgatagtttagttattggtgatagtccaaaccacaaaaactgcaaaaatcgcaccacactgcaccattttttgcggtgtggtttccgcggttttttagtgttgtggtgcgagtgcagtttgggaaattaaaaaactgcatgtgtgggttggtttgaaaaaatggtcaaaaaccgcaccacc

SEQ ID NO: 349373 - DNA, 565 bp, Cannabis indica
aaataatttccaacagaaagaagatccatttcaggtgattgtggctttgttggacgtaatttggtctcttgaaagagtaagaagcaaaatattgtgtccagatccataatcaaaatataggatcatgacacaatctgtgtgtgagataatgtagatatatcaatttttgactgaaataggattttaaacttcagtattagcaaaattatggtgtgataatcaatttaccgtataatgtcgttacatacaaatataccatataaaatcaatttatgccatgtttattatacagtattcaaaatcaaaataaattaacaaagaaatataacaaaataaatgaaaaataatcgaaatcaatatttataatatgttgtttactaaaattgtttagaaataaaatcataatgatttatcttgtttactttattaaaaaacgtaatcaaaattcttaaattgattaaactgtcatttatagttaaactataatatataacagttattttgtaagacattttaaagaataaaattgtcaatgtacatttaatataaaaaataaataaataaa

SEQ ID NO: 349374 - DNA, 583 bp, Cannabis indica
ccctttgagcagcaagaaaaagtggatttttctcttgtgattcaagtgttttccatcaagtttagagtgattctagtagaggtaattttgtctagcttctctacttttgttttcttgaatttttgatgaaaaatggtgtaatgcatgcttagtttaggttgttgttgttgctgtgattttgttgttgtttgcagaggtttaagcatgattaattgaggttaattaagctgcttgtgatgcatgatagttaggttgtttagagttgtggaaattttagctcaaaagtttatttttcaaagagaattttcgaaatgagttgtgtatgttttctgcagtttcgaaatggataaatatgtgattttaatcaaggtttgatgcatgatagggttgtttaaccaagtttgagttttgaactcaaagcttggagctttaatagtgatttttaattctgtgtgttctggacagttttgttgctttagaaatgttctatgggatgtttagaacagtttggaaggtttgggtgaaattgggtttgaattgaatgagttatgaatttttgaaagtggtctgcgaggaaccggaa

SEQ ID NO: 349375 - DNA, 767 bp, Cannabis indica
tctaaaccattgtccaatctacttgttaatggggttccttttgagtttggggaagaatgtttgaaggcattccaagttcttaaggagaaattgatttcagcaccaatagtcacttcaccaaattgggagttgcccttcgagttgatgtgtgatgcaagtgactacgcaatcggagcggtcttgggtcaacgggttgacagggtgtttcatacaatctactatgctagtagaaccctgaatgatgctcaactaaattattccacgacagaaaaagagatgctggcaattgtgtttgcttgtgataagttcagccccatctaattggaaataaggtaatagtttacacagaccactcagaaattaagtaccttatgaccaagaaggatgcaaaaccaaggctgattcggtgggtgcttctactccaggaatttgacatagagataaaggataagaaggggactgaaaatttagttgtagatcatctgtcaagactagaattagaagaaagccaggatgcaaaagacgtgcaaataaatgaagaatttcttgatgaacaactgtttagttttagggaaaacctgatggtaccttggtatgctgattatgtcaacttcttggcggccaacataactcctcctgagctatctcgtcaataattaaagaaattcttttttgaggtaagcattactattgggaagagccaattctctacaaacaatgtgctggtcagataattaggagatgtgtgcctgaagaggagatgtact

SEQ ID NO: 349376 - DNA, 386 bp, Cannabis indica
aaaacaacagtagaaacagtgaaaaaacaacagaattacctctttcaaagatcgattgaaaatgagggtgttcataaaatccattttcacctgaccctccttgtccttgggtagtttaggccaattcaaaatccttggaatgccaacatttgagtacaaagaaagtttcccaataacgtacgggcaacactcgaaaaaccagaattgaatcgccaaaggaaaacccaataacctataatacccaccatcctcatcactacgaactaccctcttaagaccagaatcaatcttacccttcaaagaatgaaaagtgatatcaaaacaatgcttgccccaaccaaattcattatatcgaccactatcgacaatgtaaagaccgcttagtt

SEQ ID NO: 349377 - DNA, 1154 bp, Cannabis indica
caacttcaataactcaagagcaatcgctcaaaagtacaattttaagttccgaagggacatcatccttcgtgaacatacgatcagcaaataactgagactgacatgcaataacaagtgcagctcgattagcagaacgtttaacaaaccttaccaaatattattcatagagtctaacaaagacttacaatctttcacaattaaaccaaaagccgaaaacatctgtaccggactatgaatagcttgtacagtaactaagctatcactctccacacacacatgctggtatggcttgtccttcaaccaactcaaagcctcccttatgcccatagcttcggcatcagcaggagctgttcttccctgccgagaaaaccccactgccaccatcagctccccgttgcagtccctcaccacgaaaccaatcccataccgactgtcgctgtcaaaaattgcagcgtccacattaagtttgatcccattagtaacaggttttgtccaaagctcatcccctttgttgagaaataacggattcaacgaaggatagttttcacccaattgagcttttctccattgatcaatagatcttaatgcaaactgaacaacatcattagcactccgacttttctgatcccaaaccaattcgttccgagccttccatattgcccaatataatgtaccagcctgtgcaactttatcagcatcaactgtatccattagattctgcaaccagtaccgaaacgaatcccaaacccgacccccatcacacacagcaagcttcgcccaacacgcagcaggaaagtcacattaagaagacaatgcgctatagtttcgctggaaactaaacaaaaaggaaaactataatccaaaggcaccttcctttcaaaaagtctcttcctagttcggagacaattagccgctgcgctccaaagaacatctttaacagtaggcgacactttaacatcccatagctccttccaaaactttgaatccccagcccttccttcaacgttggtgtcacggttcatgagtaattggtaagccgatttcactgagtaacaaccaagattctccttcaaccaataccaagaatcacaagcatcactaatagctaaaggaatgcccaaaataacatcagcttccctttcattaaagatatc

SEQ ID NO: 349378 - DNA, 745 bp, Cannabis indica
caattttactaattgcatttaggggaaaaattattaggtaatttaagcatattaattcaaatttcccaatttatattaacatgttttcctatgttgagatatatatttttatgttattatgtgtgagatgtatatatatgagttataggtgtatgggtgtatatgtcatagtaatatataatatgatatttacatatattacatgttaatatgtatatgtgagatatacataatatataacatgtatatgaattatatatattatatatattgagcatatgataatatatatatattatgataagtgtatgttatgtatgagatgatagtaacatacataatatattacttagcataaaatttgggagataattttatacatgagagttatatatattattggtatatataataatataaagagttttggaattaattttccattagtgatatttatctcattttatgagatgagaaagtgaactgtgagagttacacttatgagatttgtcttgtcatagcaagaacaaatggatcaaaagtggatccaaacttgtaaaatgagtcataattggaagagcaattttagactcaaatcaaagtgaatcatggtggattcaaaaattgtgaaaagataacaaaattggagaagcaattttgaatcttaaataatcaaagtagtgaacaaaattgatgagaattttatcaactttggtataattttgggctaatctcaatgaggaga

SEQ ID NO: 349379 - DNA, 1284 bp, Cannabis indica
aataaataagatattctaattttagaattataatcaattaactgagtttgcaagcagtattatcttaactagtgagggcaccatgagtctatataactgagcttccaataagtagaactagaatctacaaagtaaattccctaacttattaatttcgtcttgcgccactataaattttgaattgaattacactcttaattatatagaacgctctatatgtaccaagatatagatacattatggttatccattgttacaatcttaatagtcaaagatcctatatagatgatctacactgaatagggaaaaatttaccgttttacccttcattctattttatccttaaaacacttagctacctataaatgatatttcagtaaactaatataattactgaaatgaggcctcaaccatttcatgacactttgtacaagaaagtggtaaagctagccttaattgttgatgagactgagcaacatataataaaggagcagattgtaatggatgtcgccatggcatcaaaccctcctgctagtggtaatatcaataaggggaccaatagtggtaaccctgatcacaaatggaaggctgaagcttccgaaacatcagggagtattaaaaagttttggggaaattgaggtggccatcaaggtcacggatcctcattcagatcatatcttgaatattcaaaatgcaagaacaccatcagggtgaatgacgggccaaggctgcataccatatttcatatggattatatgaatcgaatgttctaggattagctgaacagatgtgtgatcgtgtttatcaatgacatcttggtatattctaaatcagaagaagagcatgagttgcatcttagagcagttttgcaacggttacgggaccataagctgtatgctaaattcaaaaggtgcgaatactggttatctcgtgtctctttcctggggcatatagtagataaagatgggatcatggtggatccagccaaaattgaagctgttcgggattggccaacaccaaaattagctactaaagttagaagctttctaggtttagctgggtattatcgtctattcgttgagggtttttcaaagcttgttgtacccttaacggaactaacccgaaagaacctaaagtttgtttggattgatcggtgtgagaaattttttttggtgttaaagcagcgcctgattcccgctccagtactaactcttccttctgataaggaaaagtttgtggtttattgtgacgcctcgagacagggtctcggctgtgtgcttatgc

SEQ ID NO: 349380 - DNA, 554 bp, Cannabis indica
agatcctggtaaaataaattccaacagctactataacgtgtatttatatatagtcaatatacaccttatatacaactcatacacggtctaaattataagaccacaactcacaacaaattttcttagaaaagatcttcaatcagttcagaaatttttattctgtacctatagaatcgtgagcagtaagtgtgactttctttttataacaaaagaaaatcttacttcaattttcttcatacaagatctgatcaaatcaattaaaaaataaatattatatcagaataaaataaaaatacgattggtatctaacttttctaatttataaaagtctggcccttaattcacttttaatgaaataaataagaaaaatgatgttcgtcctgagttaagtgaattgaactttctcccgagccacatgtcaatcatatgacatcttattagttttactaattattattttaatagtcaacattaaataggtgtcaatatatttattattcactttttaatttctttttgcacgttttacgagacacatacaaacccaaaaaatg

SEQ ID NO: 349381 - DNA, 1386 bp, Cannabis indica
ctttcaaaaaaataataactttggtttttttccttttttctttgtttgtattttttttattatcaagaattttgtttatttcaatggcggagtcactcaaattgatgttgaagctactgctcagtcatgtgtggaagcagttgagattatggtaatgttgtttgtttgttaaattctggttgttttatggttgtgaatgtttagaattttttctataattttatataaagaaaaaacagatgtctttaggtgggattggtggtgattctggtaaccaggtttcaaattctaaagatattgagattaaggagggtcgtgttctgtgttgtggtatggttgttttaccatttttgtttagttgctcaatagttattttttaatgacagactttatatttgtttcccttcttgtttatatatatatatatttagatgggttcatacaggtgtttatgttgattctaatattcaagttgtggaagatgatcctattgtgattgagcaaactcttgttgttgaaaagaggaaatctaagaaaccaatagctttgacgtctccctttatggagtttgactctttgacttcaagttctaaagatggttctagttatggacttgtaagaagcatcatttgggtgagtgtagagggcgaggatgcttccagagtggtttgcctagacagtacaagagagactatcctcagctcaagaaagaagaacagaagacagtagcaaagcccgctctagcaagggtgtttgctcttactcaggctgacgatgaagccagtccctcagttgttacaggtcaactctcagtcaataactcttacttctctgtattgtttgacactaggccactcattcctatgtgacagacaaattttttgataaattgtgtagaccgtttgatagctatgataaagggtttattaccctattctctggcagagaattagttatctccaaaaggtgggttaggtctatgcagatcagaattgcgggtagagagttaagtgctaatttagtggaactgggtttagtagattttgacatcatacttgttggaattaattttactaggatcttagatctactcacaagtatgttgatttaacaacctaaatatgaacttctaaaacgataaataaaaaaaacacataaaagttaagaaaccttacagtgatggcagcggaattatatgtctccttccactcagatctctagcccttgattcctgtctgtcgcagagtataatcaagatctgagctcgaatgtccttcagatggatggtgatccttcacagtcttccaatctatgatttaggtactatttgctgtgtgtggggtcacgttctctttcgtacaatggatttcgaaattctctctcttt

SEQ ID NO: 349382 - DNA, 578 bp, Cannabis indica
gtctaaaataaatctttaagactaaaatgaaatgaaatactaattagggctgcacacgggtcgagtttttgggtttttgggtggtcgggttcgggtttttgggtggtcgggttcaggttttcggatgtcaggttttcgagtggtcgggttcgggttttcagatgtcgggtcgggtgtatcgggttgttattaggcgggttcgggttacaatgggccagatccgattgaaagatttttcgggcccaatgatattttattttttaaaaatatcaattttttctatttttaatatattttttgggttgcataaaatgtgaaataaactaatttaacatgttgatttttcttgggagaagaacagatcacgattgggtttgggacttgggagatgaaagtaaaggttattaataatgaatatgattatacatgtaataatggtataatgggatgggatagtgacattggggtgcgtataccattacttaggtttttaatttttagtttttatttttttgactttttgctttttttttttttttcagttaagaatattacaaataaaataataattattaaat

SEQ ID NO: 349383 - DNA, 617 bp, Cannabis indica
ttccttctcatcatcctcagcatcatcatcatcatcatcatcatcatcatcatcaaaatcttgagttactaactcatcagatgactttccctgattcaaacaacacaaatgcaacttaaataaaacagtagaaactaaaaacaaagcatgtaaaaacagaaacaataaactatgattaaatacctcatcagaaggacgacgatgaatgacattaaccttctactgaatatccttaattacagtcattacagacttgaaattaagatcaacaaaacacctcaaggatatgaagtcttcagccaatgatgcttgattcgaaatgaccatctccaacttagatttcatcaaatcaatatcatctgaatcagatttctttgaagatgaagcattctcacatgtttgcttcgatataccacagtcatcaatagattcatcaagaaataaaccttcaagttgaagcttccgcctctcttcatcagtaggacatatgttttttatctttaattgaacatcacaatcaaacacaatataaaaatgaaaaaaaaaacaattaaataaccaaaatattaacaaaagcacaaaacaaggaaaaaaaagtaaagaaactgaatttaacc

SEQ ID NO: 349384 - DNA, 1022 bp, Cannabis indica
tattttctaggtagactttttgttatttttctagatatatataattaaataagaaaattaatatttaagttgatttgttcaagacacttaaatatttgatatttttcttaaaattttaattaaataggaaaattatatttatgttgaaaatgaatttatttaattctagacaaacatgaattagaataatttttccagttttatttgattttattttaatataattttgaaaatgtatttcttaatacattggatttcaaaattcagttatatatttgtagaaaattaaatttgagttgaaaattaatttaattaattttggaccaacttaaattaagtatgttgacctcgcttttggccaacgacagtgagtcttaattgtaagggacaagtagtatagcatagatgtaatataatgaaatatgcaaagacatagagtttttatagaggtttggccttgagcaattcggtaatagcctactccccttgatttgtattgacttaagaacaaagaatgcaatgattcctcttcttagagctcttacaataatatctctgaatatgaattcttaaaatatgtttttcgacctttttgcccagtgagaaatggataactatttatagggctataagctttagcgaaaaagtttcccttactgtttacatagatataattggcaagattacacattaaatacaaaatacattgattaagggatttggttagcttgctatatctctgtgatatgatccccaaattatagggatttcttctgtgattcacgatgtgaatgctgaaattactaagtgttggcgtgctattcggactgctcactgcttggttaagaaggcttcatctgtgcgaatatatgtggtgctctgttcggcatatcccttgtgaatagatatgtggagttgattccatgtgtcacccatcgtggggtgccacgtcagagtgcaaaaattaggataacatttgccccccaagtctatacgggacttccaaagttgcgtgtagactt

SEQ ID NO: 349385 - DNA, 693 bp, Cannabis indica
tgatcgtcacaataattggggacaagtaattttggaatcagacagcttggtatgcatacaagctattcaaagtaaagtcaatgttgaattgcgttttgtcaaacgatctacaaacaagctggctcactgtttagccagagattcttgtttctctccaggtcgtgtgctttagttggaggattgttcctctgaagcacgttctattatttttaacgatttgattaattaataaagataccgatttgagtcaaaaaaataattattaataataaatagtattattaataatatggttttaaactacgttaaaataaatatccttatgcccgaaatcaagaaacccaaatattaggtattattaaaatatgttacatatccaataaaggtgtaaataagtggtgaaaagctaaaatataactcatttaacaaaaagtgtactccaatggtgtgccaaaaaagtaaatttggcacatagcaaattttgtgccaaatttggcacaacatttcctatgatgtaaaatttacaccacaataaatacactactttttcatttacattgatgtcttttttattattttattattatatttaactatcatattaaattatgaaatatttatattatttttttattgttttacatattaaaataataataaaattgattattaagttattcgattttatttttt

SEQ ID NO: 349386 - DNA, 729 bp, Cannabis indica
aactaagccacatggggatcatactcatcaggtaatcttctgcttatcttcatcatggccatctcaagctcaacaactcaagttgcttacaactcaagaaaagttaaaattgggttgaaaaaagtcaaagtaacttggagaaatttttcaaggcacaaggagagtgttttaaatttttggagggtttagaaaaattatttcaagagtttttgggttttagaatctttagagtaagactagcaaaggaggagaagaaaaaaataaaaaaaaaaaatcagcatgtagaagaaaaaaatatatttctctaccttggagtgaggaagacttgaaggcttgatgaagatgaaattccaaaaatgttctctaagtgctatatgatggatttattttaccaggatctttcaccaagatctgagcccgaatgtccttctcttgattttagattcttcacagctttacacactatgattgagaaccacttgatgtgtgtgggcactcactctcactatagggtttggttttcagaagagaggaagagagagaaggtggcggctaggtataggaagaaagctttgagtttttctctgaaggaatgagatgcatcatctttttcctgaagccatcactacctatttatagtaaaccggttaggttagatttatttggcattaaaataatgaaaaaataaatgataaatagactacaaagtggccggccatagataggata

SEQ ID NO: 349387 - DNA, 761 bp, Cannabis indica
tctattttgttagatatgtagaattgactcattcggcttcatattaaagtgaaaaatcactctttagtttcttttgatttgtttattaattagtttgaatatcaatcatgaacatagatacacaaataaaatatatattatatattcattgaaatatcaagttcatttttaatcaaaataattggcaatatgtacaagttataaggatggctttacatggatatgtttctcaactaatgtggttaaatagcttgtatttgctaaaatatatagtgaaataacataaaagaatattaccaacaataatgcttagttgtaatggaaccttctcataatattttgtttatattgcttatattatacaatataggatacctaaaactacaagaaaaaatatgtaacgttaatgtaacaattacttatgtttgcaagtaattacacctataagttgatgagattaccaaatattaaaaacaattagagtaagaaacttattattgttagagattttcttaagatatatgttatatcattttgtaatataataaatcaattaaaatgtgtcacatatatattattacgtgaataataatatatatattagagtatttgataattaataaattatatattctatagtttattttaacatatatacatttgtaacataaaaatgagttacaaattagttactcatttgtaactcttttgttaatcaccttagcgtttggttactaagtgaaaatggaatgggaatggga

SEQ ID NO: 349388 - DNA, 426 bp, Cannabis indica
agcgaggaagcccgaactccaataccgaagctattgtagggattgaagctcaaaggtcaaacgctggaggtatttcgatctttcattgcatatatatttcgatatgcttatagtgttttctgcattaaatattgtttatatatatgttgtattttatatactatattatagtctaatacccatcgcccacttatccgttccaagcacagaaacattaggggtaaccacgattgatcattcaacttcttggatagctccaattcaaaagtttttggaatctggaacgctcctggatgacggagtagctgcatagaagatccagctttaaacccaaaaatatgtgctcatggatggaaaattgtacagaatagggttatcaataccatatctaaaatgcatagttggaacttgttggaaattatttta

SEQ ID NO: 349389 - DNA, 881 bp, Cannabis indica
ttgttccactcctttagctttttgattcccaaaccacatgctatttttgactgacaaacattctcccaggctactacttcagcaccatggaacattgactgccctttccatagaaaagctctacagattgcttctatggatttgaaaacttttcttggcatgatcatcatttgactccaataatcttggatagcaattaaaatcgagttaataagtgtaattcttcctgcaaaagacagatttctagagctccaactcttgatcctagctgtcattttttcagccaacaattcacacttttcctagaaattttccttacacaaattgggatccccaaataggtaaaaggaaggacatgtcttgagaaaccaaatagctgcagcacctggtttacagtgtcctgctgcatattactacaataaattgcagtcttgcttgcattacgttgcagcccagatgtaagtgaaaatagctttaaagcctgcaacatgtatactatacttttgatatccccattacaaaatagtagcacatcgtcagcaaatgctaaatggttcattttagatcagagcacctgtcatggtagttgaaatcttctttctctccaatcttccccattagcctagaaagatattccatatccaaaacaaacagcagggggacatgggatcaccttgcctaattcctctcttagattcaaagaaatcatgtaaggttccattaaacatacgagagaacttaggggttttaatacaattcataattaactgtataaaaggtctcggaaattttaaacctaccagcatctcctccaggaaaccccactcaatggtgtcatacgctttttggagatctaagttgatcatacaacttggcttgtt

SEQ ID NO: 349390 - DNA, 1097 bp, Cannabis indica
ttttcactgggaatccatttaatatgacagcctacgaatctataagtcaggtaggttagacaacgatcacataaactctatgtaccatacattatggattttaaggtaatgcatttgaataactataaactattatgctccctaacatgcttttctaatcacataaattactaaacaagtaaaggcttactgaaccgtgagtcgagctttcttttgatgatgattgtacatgtcttgacgatcttcggtaaacaaacctggcagctctaataccaaaattataatgccctaatacttaggtgctacagtaattttctaattattgtaccacatttgttaattaaaggaatttccttaaaaatcgtgccaaattatatttttaacaaaactttaaactttataaatacatatacatacatacaatcgagatcctgtatttaaacttttacaatcattttcaaaataatttatcacaaacatgtcgcacagtgactacaaaatataacctaagttgtcttgagactgaacacttcaggtcgcaccgtctcgacatgtacaacatccctcgagctcggaactcattcctattcaaattttgcatttcctttacctacacatgaaagtaatatctgtgagtcaacaaactcaataagaaaagcatataacatacaatatattaccgacttgtatctaggcgcccatacacctatccacaaggcttatatgatgagtaagcacgttctttactaaggtatgaccactgtatcacatgcactacgtactgctactgtacgagtgttggtagggttttctctgcacctcaagtacccttaagtgttgtacaacatacactctgcacctatctgtactagtgttggtaagatcgtattgtactcttcaaacatcatacaatgtactaatgcactcagtactgctaccatactagtggtagtgtatgaattacaaatagcatgcatatatcacacatacacatattcatatataaatatgctctatgttagtcttaccttgttttcgaattcgtgtgctggccgacctaaacaaaaaaccacgtgctagatggatgccctatgtca

SEQ ID NO: 349391 - DNA, 821 bp, Cannabis indica
aatttatagcgtatctatatcgtcgaacatatagagcgttctatataactgagagtgcaattccaagttctatattggttcaatgaggaattaacaagttagggaatttacttggtaaattctagatctacttatttgaagctcggttatataggctcatggtccccatactagttgagataatactgcttgtaagactcagttaattgattttaattaatcaattataattctaaaattagactatgtcttatttatgaattttcactaagctagggcttaattgttaagaaaagagattctaggatttatctgttaattaagagactttgttgagtctaataattaaatatgttaaatggcaattttgtttgataattaattttaattattaaataaatagttggggcatttaaatggatgaattggaaaatattgtatttttgagaaaaaaataagataaatagttgaaaatggcaaaattacaaagtgatggtcccacatctaagtggccgaccactaggtgctatttttgctctatttttatcattttcttattccaaataaatcaaccctaaccctagtggaaattagtatataaggaaagctatggtctcattatctaactaatgcttctaaagctaaaaacctagttttctctttttggcaactatgtttataagacttcatcttcttccttcttcttctaatttcgaaatcatatagccatcttcacaaaccaaattcaagccttagtgattgggtgcatgcccagacataacaagtcagtcctcaatcatagtgtgtaagactgtgaagaa

SEQ ID NO: 349392 - DNA, 557 bp, Cannabis indica
atagaaaattaggtagatattattggaatttttttttgaaatatttagtagctatttattcaattttttttaataaaataatacattaaaaaatatattttttaattaattattaatatttataaacttaatattaatatattttttaattaattattaatcattaatatttataaacttaataaaaaattaaaaaactgagagaattaaggagaaaagagaaaagacatgtcaccaccttatatctctcctttatatatttatataaattggggttttgattgtaattattattataaatgagatacatgataactaattttgaaattatatgcaattattgtggtgttggagtccttcttgttcaccatgtcgtttaatcagattatgatatccacgcttttaatgaaagcaccaacctgttgacctcaaaaagtgatcaactgacagcggtgtcgtacagatttgatgcttaccacgtgtttgcataaataagaatgaaaaacaatagacaataagatttttttatagaggttcagctgttggaaattatttta

SEQ ID NO: 349393 - DNA, 550 bp, Cannabis indica
tcgacaaaatgattgaccttaactttctttatcaaccttgtgatttatattaacctattccataataatctcattaaatctatcagtgttatcatgtaaagaaaggaaagaacccattctaaaattgtataacctttccagcaaattgatcttgctagctattgatagttttaagtataattcttccaacttgttctagactccttttgctgtcttctctataatgagttttcttcgaacactgtttgacaaatacatggtaattgtgtagtacattatctcctccatttctacaatttcctctggtttcttctcggctaaaagtttctcatctccaaggaccttggataccttttggtgcactaggattcttttcaaactttatctccataatgcaaagtctcatgttccatcaaatttctccaattcgaatctcgccattgatgacatttaagtttcttcaagaattgcagcagaaagaatcttgattctgcattcttgattgattaccaagctctaatttatggaaaaattataactaatgatgcat

SEQ ID NO: 349394 - DNA, 1283 bp, Cannabis indica
ttgctaagtgcaaacctcatgatagatgcatgtgcataggtaagatgtgtaatacaaagattctccccagatttccattcaacccgtgcaccaatgagttcaatgaacatcaattggtgatccatagatattagcatttgttaaattttctgacagttgcaaagctttggaaatgtctttttcagcaaaggagaaccaatgtcctctaacataaacttttcgaaaaaattcagaattctcatcaagaaaatcatcagacaagttagcataaaattctttgacaattccatcaatataaccctcaaagccagtaagagtattttctcaatgatggtattgaataaatttgactataccatacaccctatgaccatgcaaatcataattcctctcactttcaaactttcgggtggcataaatgttctcatcacgctcattctcacgatagtaaaatctagaattcacagcatgagatggagagatattaccaggagaagaacacttcataggctgcttgcctttggcaacaacaaactttggctgctgaagatgcacgaggaggtgctggagcagatttggtcaaaggaggctcgggttcgagtttagtttcctcactgtcagaggaaactccaaagtcttatggagcttctatttcagaatggagagacctagatttggcctcagaatcttcagaggagacctccataggatcttcttcttcagaactcgaagaagccgaagggggattcattttcagcttcttggcagaatgaatgggtttgtcatggcttcgtttagagcaaagttccttcttgagagatgcctactaggcacgagtgcgagtggaaggccctgttggagttgaggcagcaactcccttacttgaagtagcaagaggagacgcagtaggacgaggtggagacccctttgatgaagaagatgatgaagtgcaaaatttttggggacgcacatatttccttgcaacttgcttggggattcatttcgacttgggattcacaggctgagattcacactgaggaagcgatgaatctcctgtgtttgatgcagttgttgcagcagcaggaggagcattcgagggggcttgttcggattccaccattttccttggatgccgtaggttcttagtcttagccatgaatttctgaaagtaagaattgttgggttttgtgccctaaataaaatccattgcaatctgattagttatcaatttaagagatttgaagtgatttatgttaacatgtatttttcatgcttatggttta

SEQ ID NO: 349395 - DNA, 529 bp, Cannabis indica
ttttttgagcgaggtcaacttgccgaaagttggtgtttctctcacaacttgaacaatactcatttgctggcttggttctttgacagaggacgagtcaaggtctgcgatgttagcttaatgttcttcaccttgaggagaaggtgaatttcgcgcgaccggtattgataggccttagataaataaaaagggtatatgggtcatcgtagtgaggtattaagatagtatatatatgagagcattagaagggatttaggggtagagaattgtttggttaagagagcattagctcttggaagagagttggtattgaaggttgtagaaaatagtgattcgaattgtatgtttatttcatagaatagtacatatttatatacaaagctaggagactaggaaataagaaactaccaacaaaataggaaactactaaatacaagttaccttaattcttttacacctaatatatagctaatactctaacactccccctcaagttggagcatagatgttaatcatgcccagcttgttacaa

SEQ ID NO: 349396 - DNA, 553 bp, Cannabis indica
tttcaaataattaattatttttaaatgatattaaattattttttataactagaagaactaagtatgagtttttctattcgagtttgaggttgtttcattttctgggagaccttgactttatttttcgactctagtttgattttttgagtaaatgattccttatcaaaaaaaaaaaaaaaaaaccgataaaggagtttagccatttttttttggaaaacacatttaacctatttcacttttactttttaaatatttaaataaaaaataaataattaagtataataattttaaattaaaattataagtataataaaattttaattttgaaattatatgtgtataattttaaattataaataatttcgctataaaaattttaataatttaagggtaaaaaaaattactaaaaaatcctatttaatgataaattataaaaattaattaataattataaataaattaattttaaaatataattaattttattatagttttataaggaaataaattattaggtgactattaggttataagttaactagtaaacaacccg

SEQ ID NO: 349397 - DNA, 870 bp, Cannabis indica
gttgtacgttacatgcaaggctccagattgtaaatggagattgagggggaggaagaagatgcattctgacaactttgaggtcactgtatttcacaatgaacacacatgtaacctgaatgcgagacgttcagatcaccgtcaagcagcatcatgggtggttggccaccttattaagaggaagtacacccaagatggaactaagtacaaggctaaagacatacagatggacatgtttgacaactatggtatccaaatgagttatatggaggcgtggaggtgcagggacatgggacttacatatgctaggggtacgctggagttttcatacatgaagctacctggatacttgtacatgctgaagtagaagaattcaagtactattactgacttgtatttagaggatgagcggtttaagttttgttttatatcactcggtgcatgtagaagaggatttactttgtctcgtcctattttgagtatcgatggcaccttttgaagacgtagtatggcggtataatgttagttgttgtggcatacgatgcgaacaacaatttgtgtaacgccctaaataattaggcacgctacccaagatacttatgaaacccgaatcccctaaacgggattactaatgaaattagcgatatttaaactttaatcataaaaagaattaaaataaaacttgtaataattaaactttacgatctaaaagttacagaaattgggaacccaagaacctttataaaatgttattacaagtcctttttctttacccaaacatatacattcctcgtctagctcctacactcatggctgatcaaacacaactttaccctttcctgcacagtagagcacccgtgagccaagcccagc

SEQ ID NO: 349398 - DNA, 665 bp, Cannabis indica
ccaacatcccttggagttgtatcttcagttcttttaattcagcaggtgccattcggtagggtgcttttgaaacaggttctgctccaagaattaaatcaatgacaaaatctatctcccgctgaggtggtaacccaggtaattcctctggaaatacatccaggaattctttaaccactttaacctctttgggtccaagtaacacaggtttactggaatccactacaactgctaagtatcctatacatccactgcataacaaatccctaactttcaatgctgaaatatttggaacacgagaaccttgaaccgaaccaacaaagacgaatggttcctcattctccggttcaaaagttaccattttccgtttacaatcaatactagcagaatatttggacaaaaagtccataccaagtataatatcgaactcgaccaatggtaactccacaagatcagcactcaattctctatcttcaatcctaattagctctgatctaacccactttcttgaaataattaattccccattaggcaacagggttccaaaccccgtctcaaaaatatcactaggtctatcatgctgatcaagaactcttgatgacacataagatcgagtagcacccgaatcaaataaaacagtataaacaaaacagttgattagaagctga

SEQ ID NO: 349399 - DNA, 734 bp, Cannabis indica
attgaacgccacttatcttattagaatctaatttcagttaattattattattttatttaaggtagttaattattatttaaatcaagtaaaaggaacaagtatttctgaccgtgtatcgtgatgttccttttgattaatatatattatttaaattaagtaaaaggaacaaatattttggaggatataatttgagtaatatttgagttgttttagaagatacgacgctattaaatatcttgtagtactactaaatactaatggagagaatcttagtggaaaagagttatatatgtattactatatataagtgtgtatctcactttctgcctaaagttgctttgtttacttaatttgttatacactttctctttagcctctacttcacttggacaatagtacagcttttctcctaatattacctacttcccttcttcttttagacccgaccaaacaacatacatttctgccaaatgtttcttttctaagtcctttttttggagatcacattcttaaatatcccaaaaattaaatcacttctttattcattattacttattagaagccactaaaataaaactaaaagaaatacatagtttgtcctaaaataaaaacgatggtatcattacatcacttattacgtgaaaaatataagagtttttataaaaatactagattttgggtaaaaatttacaattttactctcacacggaattttttataaaaatattgttttt

SEQ ID NO: 349400 - DNA, 524 bp, Cannabis indica
aagggctagagatcttgaacggaaggagttatattattccgctgcaaccaatgtgaggttttcttaaacccttatgtgtttattttcattattttagagaattcatatttaggatgttaatcaacatacttgttagtaaatctagatcctgataaaatattcccaacagccttgtcatccctccaggttgcccaagaagaccaaatcaactgagcttacagggagacagttgggagccatacgaagagtctaagacggatgccatttgtaacaccctaactaatataggcgtgttagcgtgatttttaacgtactgtgcagctcgttgttaaccaatgagattaataaaaaaacgtgattaattaaaatttgcttaattaattaaaaacttaaagtattacatttataaaattttgggatcccgttacaaaatatatttataaaagttcactatacgtatacaaaagttttgtcgcctaacgactatacatctaaaggtcgtggtgtcccaaagatcgtacgct

SEQ ID NO: 349401 - DNA, 2022 bp, Cannabis indica
aaaggagtacgagcagaggtaccctactcacgacttagaactcgcggcagtagtatttgcgctaaagatttggcggcattacttatatggcgagaaatgtgagatatacactgatcataaaagtctgaaatacttctttacccagagagacctgaatatgagacaaagacgctggctagaactggtgaaggattatgattgtgagatcctttatcaccctggtaaggccaacgtggttgccgatgccttgagtagaaaggggcagagtcagataaatactgtgaatcaaatctcgcagcagttagcaaatgagatgacccgagctaaaatcgagttggttgtagggcagttggctaatattaccctgcaatctactcttttagagcgaatcaaagaagcacaattgcaagatccagagttaatgaaatcccgagatagggttttggctgggaagactagtgactttacagtggatgaaacaggaatgttacgatttatgaatcgtgtttgtgtgcctatggatgacggtattaaaagagagattatgactgagtctcatacgactccttactcagttcatccggggtcaacgaagatgtatcaagacctcaaggccatgttttggtggccaagcatgaagaatgacatcgctgagtttgttgctaagtgtcttacctgtcagcaagtgaaggctgaacatcagaggcctgcagggttgctgcagccattgaatatcccagagtggaaatgggaagacattgctatggactttgtggtaggcttgccgagaaccacgggacagttcgactctgtatgggtcatagtggacaggtttacaaagtcagcgcactttttgcctgttcgaacgaacttctccattgatcagtatgctgagttatatgttagagaaattgttcgtcttcatggtgtcccaaagtccattgtttcggatagagatccgaaattcacatcaagattttgggagagtctacatcgagctatgggaactcagttaaagtttagcacagcatttcatcctcagacggatggacaatccgagaggactattcagatcttagaagacatgctacgggcatgtgtgcttgactttgaaggatcatgggtaaagtaccttcccctgatcgagttctcgtacaacaacagctatcaggcaacaatcaggatggccccttatgagcttttatatggaagaaaatgtagatcacctattcactgggatgaggtaggtgaaagaaagttcttgggtcccgaggctgttcagagaacaagtgaggcagttgataaaattagagcgcgaatgctcgcggctcagagcagacagaagagttatgctgatccaaagcgacgggatattgattttcagatcggggacatggtgtttctccgaatatcgccgatgaaaggcatcaagcgctttggtaagaaaggaaaacttagccccaggttcattggaccttttgaaatccttgagaggatagggcaagtagcgtacaggttggctatgcccccagcgctggcagctgtacatgatgtgttccatgtttcgatgcttcgaaaatatgtctcagattcgtcccatatcctgagttatgaagcattagaactacaaccagatttatcatatgaggaacaaccggtgcaaatacttgacagaagggagaaagtcttgagaaacaagacaattgcactggtgaaagtgttatggaggaacagtaaagtagaagaggcaacctgggaactcgagacggatatgcagcagaaatatccagagttgtttaggtaaatttcgggacgaaatttctataaggagggggtaattgtaataccctggaattaaggaaatggattagcaaagccctaactagttaattgagtattattgtagaattatattataatttattatatgcgaattaatatgagaaatgacatgttaagaccccgttggtgagttaggggcattttagtaattttgacccgagaagggtaaaactgtgaatt

SEQ ID NO: 349402 - DNA, 729 bp, Cannabis indica
ggctcttcgtatcagcacggtagcttaccgactacgatctttgatctctgcatggtgagcccttaacgcctccatctctttgtctctccattcaacgaacatacgcctttgttcgtcaaacgcgagattcactgcagcacgcagttcatcatgatcatgatgcagagtgttgctatgactttgcacgagtccgagcgcagcacagagatttcgcaatttggttgcatctccgatggtcatgtgggcgttggttccaggcgggacggttgtgttatgaatgccctggctgtgtgaggaactattattcccagtctcttgcacaccaggcgcgatttcagtaacatgagctgtttcaccattcactacgcttcccgtctatccatgattgatagcaggtggaacccttaaacttcctgggtcccgcaatgtcggatccagcgtctgtgaatttgctgggtcagataggcctacgagtttgcaccatcgtgttgaatgtcgaaaagagcgatttgcgatccttctctcaatgaaagcaccaaaatattgactttcgcttttagccaacgacaatgagtctttttgataagtgataaacgatatgtcgtaatgaatatataataaagcaacaataagacacaagaattttatagaggttcagccccgagcagttcggtaatagcctaatcctcgttatttgtattgactcaagaacaaggaagaagattcctt

SEQ ID NO: 349403 - DNA, 769 bp, Cannabis indica
tctctgtaagactccatccaatcgttctcagatggagagagtgcgtgtgacgttgggatttgatggcatgatagtcgtagatgtcaatggtaggagtggaggtattgcgttgttatggaaaattgaggataaagtgtctttgcttgggttttctgatgcttatatagatgtgagagttgcttctaaaggtgtgcaggaatggcatttcactggtgtgtatggggaaccgaataggagtaggcgtgcttctacttggaatctgttacgtactcttgctaatcgttctaatctaccatggtgtgtgatgggtgatcttaacaatattttatctcatgaggacaaaaagggcggtaataggtaccctgattttttaatccaaggttttcaacagactttggttgatagtggacttcaagacatggagttatgtggttatctgtttacttgagagtgtgggaggggtactaatcattggatcgaagtgtgtttggatagggaactagctaatcttgcttggttgaacatgttcacttcttctaagctccataatcttgaaatttcaacttcagaccatgatctgattcttatggtcatggttgagggaacctctttgttatcagattgttaaatatagttgggagatttgtggggttgatgacgtgatgtataaaatttagttttgtgggaagaagctggctgattggggtaaggaggttactgggaactttaaagaaagattaaaaaagtgtaaaaatgagatgcaaaggtg

SEQ ID NO: 349404 - DNA, 762 bp, Cannabis indica
aaggaagaagaaactttcagccgagcaaaggcctatcgaacatacaatttagatcagggagcccagtctacctgcttggccatccactcctgtagtagaaaaggggaaagtcgtcctggaggagcaaagagactcatcagatgatgatgactcatcaggtcttgctcgggcagatgcttctgtcaaagtgtaagatacttcatcttgcctttatctttccttattattatgctttcatacttctagtgcttttccttaattatgttgcttttatttcatccagacatgtctcagaaaatgctcgaatctctgaagaagagagtgggagggagctcgagcttgtctcctctgaccaagaagtccagagtcggtgagacaactctgtctagagagagcacaccggccgaagcagttattgatctttctgaggagccaaccatcgtggacccttctgctccgaaaataagtaagtccaaagactcttgaggagggagctcggacaagcccaagcagtcaaagggcgaatccgagctagtcaagagtggatctgagcagatccgggctcctaccccacctccagtactgcatccagagactatgagaggcaaagatatggtcacccactacatgacttgatcggtccctgaggtgaatgagcaactggccggagctgacaatgacatgtctctgaagctagtgatgggaggagtcttgaaggagtttacgagggtaagtctttcctgatagtttccttttatcctt

SEQ ID NO: 349405 - DNA, 666 bp, Cannabis indica
atttactttagctagatctttttagggagatttttatatgtcgcgggctgagttgcgagggtatcaatcgccgttccaaatggtgggtgtatctcagtattctaatggtcatatatgcgattatatgccccttgagatactgaggtacacccagccatttgcaatatgcgatgatactcaaatgatcgtactctttggctgataggtagtctcggaacggtgggggtctcccagtaacttcagggttatgctcgaaaacgcataccccttgagtcactgggaaactcccagccgtttctggaggtataccgcttggcccaggatgcgtgaattactcgcccaagaaagtattatctcttctcgcatattgaggggatggtcagtattcgcaaggaggctgaccattctatcgagtgcgactttatagtttaatgcgggtgagatcacttactttgcttttcacacatccatcacgctgaaaagatcttctatctttcagatgagcgacttgtcggatagccaacagctcggctccggaggccgtgcattcgacggtgaagctgaccaggaggaggacagctttctccccacctcgctttccgaagaggaggccgctccaatagagctaggcccgatgtcttctgtggacatcgaaaagatggtgca

SEQ ID NO: 349406 - DNA, 950 bp, Cannabis indica
ggcaaggctaaggctgaggaaccgtgagggcggttaggcctggagcgtacgatcctcgggacagcagtgcttttttgtaattagtcgctaggcgacgagtattttgtttagtcagtaaactttagtaaagtgttttgtaatcaggatcccgagtatttttgtataaatattttatgagtttaattaaaaagcaaaaattttaattaatcacaatttccataaacctcgttgattagcaacgagctgcacagtatgtttaacaatcacgtaatacgcctatgctagttagggtgttacatgcacattgatttttatgggctctgtcatgtttctaggtttatcacaaataaaagaaattacaaaatttacctgttgcaaattatttatataatctattaccaataggactatgattaaaattatatcataggaattgtccacaagttaatcatcgtgttatacccaaaatttggttggaggacacatgtcaatataatgggaatgtgaattggtacaatagctttttacggaataactcattaattacgtaactatcagagtatatttgtaaccccactgactgtaaggtcttaggtgagtattcaatgtacaaactggcacttagtgtattagcgagaaaccatatttcgctaaatatgaatagcgaggcactggagaaagttactattatacccaaaatttggctggaggacacgtgtcaagataaagggaatgtgaatcggtacaatatctttctatggaataactcattaactgcgtaagtatcagagtatatttgtaacccgctgactgtaaggtcttacgcgaggaatcaatgtacaaactggcacttattctattaacgagaaaccatatgtcgctaaaggtgaatacgaggcacgaagaaaagtgatacataccttagcttgcaataagcaaactaagtgtaa

SEQ ID NO: 349407 - DNA, 890 bp, Cannabis indica
aaccaatataaagcaacaacccagtgatacacttaagacatacttaagtcgttttagcacggctgcggctagggttagaaatttggatgacagcacgcaacttacaacccttcaggggggatctctacttatccattaaccgcagggggcgagttgtgggatgacttacaaggacatccggtgagaagcatcactgagttcagcgaaagggctcaggtgtttgtttggaaggaagaagcccaaaagaaaatgaatctgttaaaaacaagctcgggaagcaaacccaccaatgttttaacaggtattgtttccacgagaattgataactcgggggcttctggtttgaagagaaaggatggaattaaggatagaaagaaacaaaagaagaatgagaaatacgtgccactgtatactatttataccgagcttaatgaaacttgggagaatatttacctcacacatgagcaaaaggtggcgttcgggaagcccaagcctatgacgaattcgaggagaaaaagagatcctaacaaatattgtaaattccataaggatattgggcatacgactgatgaatgccgccaattgaaagatgagatagaaagactcatcgctcaaggccattttaaacagtgttaaaagatagggccagggatacaaccagcccagtctatctaattaccaaaacaaccacgggttataacctattcctgtgtaaggagaggacatcttaattatttcaggagggtcacatatcgaaggggaaagcaataacgctcagaaatgatgtgtgaaagagataaagaacgagcagttggcccttgccccagaaccttccaagaaggtgaaaaccgaggaacctcccattacattcacggaggaagatgagaaaa

SEQ ID NO: 349408 - DNA, 656 bp, Cannabis indica
cattggtgataaccattcaactcccaataaaaggatcaagaaagtattaatagacaatgggagctcggtaaatatcctttataaggagactctacggaaaatgtggctcgaaaaaggccaaattaaggccttgtatgatgaacctttctggatgcaccagatatagcattgctagccttggcataatcgagcttgaattaaccttaggcgaggcacatttatctgctcctgttacgcaagacttcttagttgttgacctaccctcagcttacaacatattgtttggtcgtccagcactgatcgaactagggccaggcagtttgatcaagcacctatctttgaaattccaaacactagatgtcgtgggagtggtgcggggagaccaaatgctggctcgcgattgctatcacattgagctgtagcataggaaagtcggtcgtcaattgatgacgatcttgacagaagaaagcgagaagaaagacgaagattttgaccctcgagttcaagacgagaaaaacctattgaaaccaatcgaggaatttgaagaggttattctcaacccaggtcccacaaaatatgtatacatttggaagaacctagacgagcagctcaaatagcagctaataagctttttgaaggcgaaccaggatcaattc

SEQ ID NO: 349409 - DNA, 413 bp, Cannabis indica
atggcatgctttactatctgttttgtttttctgggtttggttatttgaagtttctagaatgtattcccttgtagtttttcacgttaatatgtctagatttcccttctctggggttagggttactcttgttacacactgttattatattttgtaaaggaccatacactcttcgtgtgatggcctccaagggcatagagaagacttcgcctctctcgattttctgcccttcttctttctttttctttcaatgcgtaatgtcaccatttgtgcaatctttgcacccgacttttgtccaggaaatccttctaaggctttcttgttgacagatgtccggagggggcctctttccagcggttaggggaccccattccctttttgatttagggtttggtatggggcctaattgcttgaat

SEQ ID NO: 349410 - DNA, 1586 bp, Cannabis indica
gacgccacgtcagagtgcaaaaattaggataacatttgcccctcaagtctgtacgagacttccgaagttgtgtgtagacttcatccgagctgtctttgcgtttgaatgggttacacatgtcatgcgcctgttcgcgactcgatgtgaggctgactgggcgtcccttcggttttcggctaataaatgctctgacaattaatatttcaaaattcaattttctctcaccacggttgacggctacacttgattacttttgatttcccatattcgcttttagggggaaccaaggcgtctgacgttcttttgaaatgattacccctttttgttgtttgcttataaatactagtgagcatttgtccacaaactcattttcaccaaccttccttgctaagtaagttcagagcgaaaaaagacgtttttggcttcaagtttgttgatgtgctttcatcaaaattgctcgtttggcttgacgtaacctgaacccagacgtttgattccttgagtaagttctcgatttcctttatgtttactttgcacattgctttctgaatgcactttctattttgctgtagaagatatgtaggaaaccctaagtttagaaactctgaaattttcctttgttacggttcatgcgatttcatcatccataatgctgaactacataatgcctgtctttcatctttcttattctaagcttcatgaatttttttgccctaaatcgcaaaaatttcaaacttcaagagttttgacttttcgttgaatattcttattctttaatatgttgggtactcttggtcggcatatttgcccattttaatgttcgatatcctgaccaaacattcatcttgtgcgttgtcttttgtagatgaacccaggtgagttttggggaagcaaacaccaaatcgagtaggatctgcttcaactcttgcacgaggatcatcctcgtcttcgttctagtccaacttcttcgagtgacatgcattcttccttatatcttttgtcgagccataggatgatggctcgtaccaaaaagataatgcgtagggtcgacgcatccaaccttcaagtggcccagcacgccaccttacccagtgccgaacaagatccaaccgtctaggaggaggaggatcatgaaggggacgctgaggtccaggagattgaggagcaagacgatgtccgtcctagtagtccctccgaggcggaggaagaggaggaggttgcacccccaaaatatgggggatacaatgaggccagggagctagttaattctgatggcgacgtcctggttgagggcattgactacgccagtgaggaacttactactgcggttcctcatagaaggcaaggtactttgggtgccaggtgggtgagcccttcgtccagggttattaaggcacgcctgcgggatctcgaccaggatggctacttgggcgaattggactgttacattcccgcccacaataatcgggccacaaaccctaaaaggggaatgtgcgcctggtcgggtgctcatgcccagcaaggggcattgttgcctttgcattgtactttaggaatgtggcagacttctgttggaaattatttta

SEQ ID NO: 349411 - DNA, 653 bp, Cannabis indica
ttgaggacacggctaaggagtgagtcaggtttttcatagattcgccatgcttgttttgcaagtagtgcctgattgaagtgaatgaaagagcgaaaccccataccaccatctgatttggacttacaaagaaggttccatgagcgccaatggatttttgacccattttcagtcaagccccaccagaaatttgccatcatagattccacttgcttgcaaaagtagattggtaatctgaaacaactcatggcatatgtaggtatggactgaactactgcttttaagagtacttccttaccccctgctgaaaaaaatttctgatgccaagtattcatcagcttccaaatcatccctttaatgtggctaaacatttcttttttatcacgaccagagtaagatggcagacccaagtacttctcatgacattcacaaattggcatggaaagttgttgatgaaaatacacttgagtagcaagagtggtatttggagaaaaggacataaccgacttgcccaagttaagttcctgtccagaagctttgtgataggtttccaaaacactcttaatagcaaggcaagatctctcatttactcgacagaaaaggagggtgtcatcagcaaaaaaacaaatgagtgattggaggagcatgacgtgtca

SEQ ID NO: 349412 - DNA, 465 bp, Cannabis indica
tttagggcgtaaaacccaacagtttggtgggtcatggttgattacgggtgatgtgaactttatcttaagtagctctcagcctgttgggtctaaaggaaaggatcagttcctcccctttatatatgatttaaatatttgtcatgctttaattgatttgcctatgaaaggggacaacttaacttgggataaccataaagatggtgaaaaccacatcaagtcggcccttgacaaggctttggtcaatgagggttggttgagtttgttccctaagtggatggcacaactactcttcacttgcaattctgatcattgacccatttgttttagtatggtgaacccgaatcttagaagtaaaaggcagttctggtttgaggcttggtggaccagggatccttgtagctctttgattgtggattttgcttgggcatctactgttgggttgtgtgccctaaataaaactcattt

SEQ ID NO: 349413 - DNA, 647 bp, Cannabis indica
ttctcaccagagatcaatatcctaccattaccccacaagttcaaaatgccgatgtggaagatgtatactgggagagaagatcctctttcccatctcaagtactttgaaatgcaaatggatttgcaaggggtacgaggagatgtatgttgcaaaatctttcatgccacactgtcggaagccgctcagcaatggtatttcaagttggctcctggaaagtttagttcatggaaaaccttctctttggaattccatgcacaattctcctcctcgcgccaactcccattgcatttgggagacttggtcgaagttaaacaacgactaggcgagccacttcgggcatacatcagcagattcatgacagaagcaaccaaagtttcacgggtaaccgaggatggaaagttatccgcgatactggggggcatcgaagtcctctgtgaactttggaaagatataaggaagaatgggcaggtagacttaatgagtgatttccttgaccgagccaaaggcttcatcaagctcgaagaagccattcaaagagcggaaggtgaacaaaagccgggcaagtcaaaggctcctccactggaacatccgcccaacttcccaactacccaaataatttaagctcaagtggcaagcattccagcaac

SEQ ID NO: 349414 - DNA, 523 bp, Cannabis indica
tttctaaagagataatatttaatttagtgggcgatcattatattatttataaataatataatatatatatagattaaatatgtgtaacaaaataataagtgtgtgtgtatgataatctatattagttctcatcattttgtaagatatggtggagctacttgttattatgtgtaacctccacaattatcacctatattaagtgtgtaaaaaagtgttacacatctaaatttgaattcttaatgttataggagtttggtgtctgcatgagttacatatcttttactctcattgagttcataacatctatgagaggttttgagttagaatttcaaatggtgatatcctaaacactatataaaggggtctaaggtgctcatattgagaagaaccaagttttaatcaacaaaacacttttctagaaaccttaaaaggcttgataattccaaagttattttcatgagagttctcttaatgcttagagataagaaatataagcttttggacaaaggtgtaaaactttgtt

SEQ ID NO: 349415 - DNA, 583 bp, Cannabis indica
ttttattaactgtttatttcctttctttatttattttcttcctacttttgctatttttcttattttaattttttctcttaatttatttaactaaataaaagtaagaatttaattttaaagtacttaactacaatcctcgtgggataaacctcactctttgtgaggctattacttgttaacgatatgtatacttgcgtattgaaaataccacaccaagtttttccacatgtggggaccactgtccgcccatttaaacacctacactccaccagccacacgggccgcgacccagccaaagtggcattgcggcccgcccccttcagcatgcaaaaatatcaattttcccctcacgccggcctgtggtttcctacttcaatgctaaataggattttcagcatgtgtatttttctatcttttcagtctctcaatgcctttataaggagtgaatttcagttgatttcgtcaagcaattcagagggaaataaacaacagaatatagagcacgaattctagagatcaactgcaatattggagtcattcttcaaaggattttcaacattattttttttctctattttcttct

SEQ ID NO: 349416 - DNA, 530 bp, Cannabis indica
ttcttggatagaggttctactatagtatcagttacttccaaatgttcttttaataaattcaaaatggagtctgtactgatgaaactgaaagaaattacagttttacaaacattgagtacttatgccgctaaaaataaatattgagtttatgccgcttacaaacttaaaactttaagtacttatgcagttatttaccctttaaaataattattttttaaaaatatcgctaaccaattaaatagcactacttataaaagatgatgaggcacgtaataacaatgttccataacctatacacatgcatactctccaacctatattgaaactagtgattagagaaatggtattaaaaattaataaaatattttatattgaagtttgtgtaaaacatgagtatcatatgaagtagttttttatatttatttttcaaaaaagaaaaacgctataaatataagaggccaaattgaagagatcacacactcacaaatatcacattgtttttgataaaaccattcttaaaataaagatga

SEQ ID NO: 349417 - DNA, 670 bp, Cannabis indica
agaggaccgaaaaagcgtttccgtgcaccaagagcccagagggagaggaagaagggaacagaaatgtcctcccattgatctaaggaatcaaattaacgggaaccaaggtgacctccgggatcaccttgatcaaaagaaatacggacccgcagtcttcacgggaacgttaaacgaaggaatcatggcagaactcgccatacttcgaaaagacatcgcccgagtcacccggagacagaaaggcgacgactcagactcagactgcgaggaccgggagccatgtgccaaacacattctaaaagcagagctccccaaaaactttaagatgcccgaaatggcagcttacacggggaactctaatctgagtaatcacctgtcacgattcaaccgagtcatgacggtcatgagagtcagcaatgacgctaagtgtttgtgcttcccgcttactctaagcgggtccgcggaagagtggttcaagaaattggatccaggatccgtggattgctggaataagctgcaaatcagcttccagagacagtttgtcgtcgctaggaaagtcaacctggaggtcagcgccttgactaacatcaagcagctgcctacgaagacactatagaatttcataaagaggttccgggaagaagcctctaaaaccaagaaagtagatgacgga

SEQ ID NO: 349418 - DNA, 562 bp, Cannabis indica
cagtttaaggttcaatttattttatatatatatttttaatttctagagttatagttgtgattatatatagagttgaaatatactaaatatcagttcaaatattaataggatttgttttattattattttattatatataaataatattttattattttattaaataaaaataaaaagtcacccatgaatttactcataaaccaagaattttcagttatataggcaacactttatatagaatagatatattgattgattgattgatttttgaattaataattgagattacagaaaaagttttatttagggcataaaatctaatatgatcattaaagtttgggtgaaagtgaaaagctaggactagttggttatttgcaagatcttggtatgttacggttactagcatatatgtatgtccactatatatatagctcagtaagtcatcgactatggtgtctcttctaacttaaagattttgagcaaaaggctgttcttactgcataggtacgtaccctttcttctcttcccatctctttaatttttagttcttcaattttccaca

SEQ ID NO: 349419 - DNA, 599 bp, Cannabis indica
aatactttaaacgaatatttaaataggtcaagaaaacttatttttgtagtagtgagaggaaggattcaaatatgagagagatagaaggctcaaaatttgactgaaaggcaagtgaatgcttaagctttcatcatcctttaatttgagactatcactatctatttataggaataaatttaggtttaggtttgaattatttagtattaaaaaattaataaataaattgtaaaaattttcacatgtggtcggccataggatgtggtcccaccacttgcaatttatcttatttttctcaaaaatatcatattttctaagtcaaccacttaaaataaaatttccatttaacatatttattaattagacttaataaactctcttaattaacaaataaaccctaaaataacccttctttacaattaagccctagcttagtgaaaattcataaacaagataaagtctaattttagaattctaattgattaattaaaatcaattaattgagtctgacaagcagtattgtctcaacttgtgtgggaaccatgggcctatataaccgagcttcatataagcagatcgacaatttaccaagtaaattccct

SEQ ID NO: 349420 - DNA, 632 bp, Cannabis indica
taaaagagcacatggccaagccaccaatcctatcaaagcccgttctcggagaagacttgttcctatacttggccgtctcctagaatgcggtcagcgcggccttagttcgggaagaagagaaaactcagcatcccgtgtactatgtcagcaagagcatgtaggagcggagacgcgatatccagtaattgaaaaactagtttttttgcctcctgatggcctcgagaaagttgagaccctacttccaagctcacccaatcaaggtattgaccaaccatctgctccggcaagtcctacagaagccgatagcatccggaagactcctcaaatgggcaatgaaattaagccaattcgacctgcactacattccccgcatttccataaagggacaggcgttagcagactccatcagagagtgcaatgaagctgaagctgaagctatcgcaaacatgcccacaccatcagtcccagcgtggaaagtatttgtagacggagcctccaacgagaatggatccggagcgggggtcggcaatgatatctcctagcggacttcgactccaacgcagccctaccggttttgtttggaaattattttacctaggatcttagatctactcacaagtatgttgattata

SEQ ID NO: 349421 - DNA, 688 bp, Cannabis indica
aaaaataataaaattcagtgatgttgggaaaagaaagaaaataaatttttctcaatcatggttagttgtgggaacactttgggaaatttgaaattagaagaagcttgtgggttatttttgtgcttatgatatctttagccaaaattgtttttcattttccaaatatctaagccatactttctaaacaaaaagccctattgattccaaaaggatgttgccaacattagtggagagaggaaagcatgcaagcatatgagctatcgggtagtggaatcgttggaaagagtaaaaccattataacattgtttcgattgtgaagtcatcttgtgtttgtacagtatgtgacaaactgagcatctaagttaattgttaaagttagtggaattgaaattctagtttgagcaatagaagaaaactgaacatgaggcagtagtattgtgattatctgatagcgtagttaataaattagtagttagtagtatttattttctttatcttactcgagggcaagtaagaatctagtttgggggaatttgttaggctagaaatgtttaagtttcgggtcatattttcggttagttttcactctttgtttctagttttaggactattttacgcttgattcttttattttaagtcctcgggtgtttaaagaaagtatgtacaagaattgaggacaagtggtgaa

SEQ ID NO: 349422 - DNA, 545 bp, Cannabis indica
ctagaatagtcatcaattatggttacggagtacctgctccacctcgacatacaatcctggaagctccccagaggtctgaatgaacatagtccagagtgccctttgttgtatgtctccctgtcccaaacttgaccttggtagacttacccaaaatgcactgctcacagaagtccaaatcttgtagagcatcttttcccaacagtcctttcttgttcaacacttccaatcccttcaagctgacatgtcccaatcttctatgccatagagaaatcgaattggttatttctttcgaagcaactgaaaccaggttgctggaggttgtagtacataaactccattgatcatggaacctttcatcattaacattgatccttttagtaccttgagaactctaccttcaacccttatagaacacccttctttgtctaacattgccacagaaattaaatatctcttaatatctggcacatgtctaacttgatgaattttcatagtggctccccctgataattgcaattgtacagatccaatcccaactattgagc

SEQ ID NO: 349423 - DNA, 506 bp, Cannabis indica
aattgtatataatttgagagtgttccaatcatatttttataatttaaatgcgttttattatgtatcattataaattcattagtttactttaaagtgataatgcatctccccgtgttttttttttataaaaatcacgttaaattaacataaaaattaggtgccgtttggtaacatttttgttttctaaatttttaatcacaaaatgaaagtaaaatttttgtttttagaatttttgtttttgaaaaacaaaaatgcgttctgtaaccacttttgtttttcaattttaaaaacagaaaacaaaagtgtgttctacaaagttgattttcactttcaattttttgattttatttacgttgggtctaggtctggggtcggattcgggttcaagtcagaggccgggttgagtgccagggccgtgagaggatttgggtccgagtctaattgaagtccaagatattgattaaaaaaaaaaaaaaaactgtttaaaaaaatattaaaagtaattt

SEQ ID NO: 349424 - DNA, 783 bp, Cannabis indica
gaagaataagtggttgaaataaagtggcaaaattgtaactagagaatggtccacttaatggctggccattatgtgtcacccaatattttattcttttttgatctatataattcaaccctaagccctagttgaaacactataaaaggaacatgatgctctcatctcatccaattattgccttcaaccaaatcaaacttagttttctctatcagacaactagtagatgagagacatcttctatacagttttcaagcatccttcattattcttcatactcgagccttagtgatagagtgtcatgcccacacatagcaagtcaagtactcaatcatagtgagtaagaccgtggtaacctgcttgaaggagagaaagagatctaggctcaaatcttgataatactctatgacaaaaaggaacaagggttagagattgagcggaatgagtcattattccgttgcaaccaatgtaagattttttaaactcttatgtgtttaatttcattgtcttagagatatttatatttaagatattaatcaacatacttgttaagaaatctagatcttgctaaaatattccctacaataattaaaatatttgaatcttattcttaataggtatgtatataactcagttgttaaaaatgaaatatttccattcttttcactcattaatgtggacaacatatccaatattaaaattccatataatataaattcttttaaaagaaaattcccttaattaatttgtttaaagatttttttcccattttctctaatccatttt

SEQ ID NO: 349425 - DNA, 577 bp, Cannabis indica
acatagtacacgggatgctgattattttctcttcccgtactagggtcgcgctaactgcgttctcggagacagccaagtataggaacaaaacctctccgagaacgggttttgataggattggtggcttagccatgtgctcttttagttttttgaatgcctcctcgcacttgtcggaccattcgaatttctgacatttcttcaagatgttgaagaagggaatgcatttgtctgtggaccgggagataaagcggctcagggcagcaactttttcggttagactctggacatccttgtgtttcttgggggaaggcatgctcaggagagcttggattttttctggatttgcctcaattccccgctaactgacaatgagacccagaaacttccctgacttaaccccaaaagtgcacttcttcgggttaagtttcattccgtatctccggaccacttcgaagcattcttctaggtcatccgcgtggctagtgcatgcctttgatttgaccagcatgtcgtccacgtatacctccatattttgccccagaaggcccttgaacatccggttcaccattctttggta

SEQ ID NO: 349426 - DNA, 512 bp, Cannabis indica
attactttattgttcgaatttatgcttagttttgtttttgttatgttttcaggagaaatgaatatgtgacaaatcacacttatcaatgattatcaacaaaaatctttcaataaaaattagataataacaatcctattatattcaatctagaataaatggaaataatcaaacgaccaatcatagcaataacaatcgtaacaatcaattgcatcataaatcatagggccaataaaaatatgagtctctctcagatttgaacatagacaaggatatagtcatgctacttagtatcaacacaaacatgctctgaaccagttgagattctactaatgtcctaaaaagaaaacaagacgaaaatcccctaccatgaatgaataaagtcctactaccataacaacaacaaggttgtgtagcaacactattattgaaaataaaaaaataaaaaaaacataaaaaaaaacatattaaataaaactaaaaggattaatattagtgaagatccaatctaaaac

SEQ ID NO: 349427 - DNA, 747 bp, Cannabis indica
atataaagatatattttttttttcaatttaaattgaaattaaacatttcttgctatatttctttttacattttttcttttcttttgaattagttattttatttattttaatttgttgtttgaaacataaaataacaataatttgttatattttattgttagttacgtttaaaaacatatattttttaataaatatttaataatttaatattgaaaagtaataaatctaaaataattgacccaatttgagctattgtgcgaattggatcgaaaatataaaatttgtacttagtgcggatcgaatacactatgagcaaaatagtgtaaccgtcttgaagaccctaaacgctctaggtttaaccgtcttcatatgtacaatcttcaccctagctttagactcctcccggttcgattctaattcttacatgcacatacatgtatcgtgagtcacaactcaataagaaaagtataatcatatcataacacaaaccagattataactaagtgcccatacacccaatcataaccctatcccacgtccatacgtactgagtctagaacgttcgtacgacagtactatggaccataacaccagtctatacttggtacctagtcgtaccgatatgatagcgtcaataagtacttatgccaaagatacattgatcaatatccaatataactctatgtatattgataccactatttcaatgtaatctaacagattttcataaacatccacgctaaacat

SEQ ID NO: 349428 - DNA, 571 bp, Cannabis indica
aggtacaaagaaggtattcttggaattgaggaggcaagattcaaggccagattagtagctagatgtttcacacagagagagggaattgattacaatgaagttttgtctcctgttgtgaaacacacctccatcagattactcttaagcattgttgctactgaggatctagaattggaacaactagatgtaaaaacagcttttcttcatggagatttagaagaggaaatctacatgaggtagccaaaaggattttgaagaaaagggaaacaaagaccatgtttgcctattgaaaagatccatatatggcctaaacagtgctctaggcaatggtacaaaagattcaatgaatgtgtactgggaattggtttcaagagaagtgcctatgatagttgtgtttatgttaggtactcaagctgcattatatatcttctcttatatgtagatgatatgttaattgctggaaaacatatgagagaaatagacaaagtcaagaagcttctgagcaaggaatttgaaatgaaagactttggctcagctaaaagaattttagggattgagattacaaggaaca

SEQ ID NO: 349429 - DNA, 521 bp, Cannabis indica
ttcttattatttttattttgtttatgaaaatctcaataaataattaccattttgacatacaaaggatctatatttttatttaataaaatagaggcttcaattagtaacttttacaaaacataacgcctaaaactgtatttatcatcttttaaaatatatcactaaaaatttattttctatattttacattatacccatatacattaacttctttaagatatattactaaaattttactttttaaattttaacatatcatattaatatatatatgcatacactattagataataagaagaattttaggagagaataaataaatggaagaagctatattttatatctcaacttgttgtgtaatttttgacttggtacaaaatgataggattacatctttatttattaggactctatagactaatctagaaacaatattatatgactaccttctacattcttttacataattctccctactaacacaagtaaaagataaattctagaaaattcaagagtactca

SEQ ID NO: 349430 - DNA, 587 bp, Cannabis indica
attttattttaattttttctaaagtacactattatgcatgatcgattagagcatacactagttttttatctgtaaagtaaaatatgatatcagccaacgaaagaggaaaattacctcaaacttgatctgcattagttgtgatctgcagaacctcaaaccagctgccaaaagaggaagaggtaattgtgtttagggatgtaccaaagacggaccaaaacgatttagcaaaggtacatatatatatgtgagcagtgcatatggatggtagtttcagcatgagaattatacacatggcatatattgctgagatttgcacatgtttaatttgtaataagattttaatgcatgtgggaagggatctaaagatggcacaccataaaaaattagtcactttgagtggaatcttctaaatttttttttcttacaacaataaaaatcatataaaatagaaaaaatagtataattaaggtgtaaattttaatgctcatgtagagttttcggtacaggactcttttttctttttttcttttgaacataaagtcttcattaacagaaatcagtacaaatgattatacacgtagtactct

SEQ ID NO: 349431 - DNA, 890 bp, Cannabis indica
tgcgagtttcctccgacttcatttttttaaggcgatccttgcttcgttcgaaggtttgtagaaggatttcccaagcattgccccaagccctaacttcaaacggtaagttattttcttctttctcatgtttattacatagtgtggatcagttacttgattcgtttgtatcgttatcatctcatctgagtggtagtttttagggttaaaactattcatagtaggattcaagcaatatgtaagttgttttaagatctccaactcattaccttctgatttgataaaattctctctagggattgggactgctttttgctggtagcaatgtcccactctggttcgggagtttatcatccagaagctttagagtttgagtttcctacagaattggccatcccatataaacacaatccctcaaaacccacctccaaattagagttaaacgatgctagggctagggaacacacagtgagatcccaacaggaagatatttctaatcgccacaggcgcttcttgcaagaaatatccgaaggcagacactggttcttgcgagaagcagcctggccagaaccacctgacgtgtcctttattcctgtggcaaagcctttgtttttacccaacgtcacaattgcttttgaaccagatgacctggatttcgagattatgcctcccaaaccatgtacgtttaaaactcctcaagatcacagcgtcaccttcgaggctgagttaaaagaatcgaaggtgcgatttatctcaggctatacagacgacatgttaaagacctgtggaattgccattgggcaatcatgccaggttagtcagtacgagaggtgatgcgtgtcgtaagccacaacaaatttactattttttaattccaatacttccaattattt

SEQ ID NO: 349432 - DNA, 832 bp, Cannabis indica
ttttagtatagcgggacagtataattagatattgggaatgtcgggagtagtcgaaactttagaagtgaccaaaatacccctaagtgacattttatgacttttagtatgggaagggcaaaatggtctttttgctcgtttgtattttgtcttttgtgggtttatgttaaggttataattagatttttattaatgtttaatgctgatatatttttaataaaacaaaccttttattcatttatacaaaaattggaaaatacatgaaaaaagcaagaacactctcgctctttcaactctccctctctcaaaattcctagggttgctagggttggtgttttcttcagtatttcctctgattcccagcaagtgttaggtgatctcaagctttaggtaagtttctagcatcctcctctttagtttcttgaattttaagaaagtggattttgcatgtttagtggtttttgctgctgttgttgctgtgggtgtttaaatttgtgtttctgaagttaaatatgtttagatatgttgaattaagcttgttttggtggctgttagtaggtttgagaaagctttgagttttagaactcaagtttggctctttaatggtgaaagttgattctgagcttctgtagttgttttattgctttgaatatgtctattggggtataatatgcaggtctggaaggtttggtaaggattggaatcgaattggttaggttttcaaattttttgggttttctggtgtaaaccggttaaccggttttacaggacctgtaaaaccggttaaccagatttgttgttgggttccccaaaaaattcgtgtgtcgattcgtgt

SEQ ID NO: 349433 - DNA, 509 bp, Cannabis indica
tatacaacactatataggggaagttttaatttgaggaatgaattgagaaataattaattaataagaaataattcttgagggaaaaatagtaattttgtataattatgtcaatattgaattgagtaattaaaatggaattaaattttttaattttatttgataaaactatattaattagttaaatatatataatattattattgaataatattatgagagagaaacatattattttagtgtaaaataatatttaattaatccaagtgaagtaaaagattaatataagttgataaattcttatttatttcaaaataaataataaatcttatttaaaaaaaaattgaaaaattaattttaggctttaaaatatggctcacacgtgtagagtggcatataaaagcccatgaatttgttttgtttattttattatttaatgaggttaatcaaaataagtaataattattttttaatatttaaattaaatatttattggataagatatttaaaat

SEQ ID NO: 349434 - DNA, 1101 bp, Cannabis indica
gggtgctcctgatcaggtgccggtaatcctagtcacacaaatctgggataattcatacttagggttaacccctaacttttaactcaataaaattcaagcatggcatttacatttcagataatcatacagagctcggaacgagctttccaacgatataaagaactcccaaatcggagttcggaatcaaaagttacgaactttcgaaaatcaactcaaaactgcccaaaaacacgagggcgggccgcggcataccccagaccatgccgcggcacctgggacaaattcccaggtccactcagaggagcgggccgcggcatgctccagagcgtgccgcgacatctggctgcagaacccagaaaccagcaagtttctctttgaatttcagtccaaaaactcaatcttttcttagcaatttcacagccaaatcacaaatttgtatataggattaatagcacatactagatactcatttatcatattacatgcatcaaaatcccagaattcaaattgctcaaaaacactcaatatcatgcttaagattaacaaaacctaagctcaaactcaagaacttcaaaaccaagctcttcaaaccaattccagcaatcaaacactaaatttcacacctgaaatttcaacctagaattaccaataatctcagcccaattcaataacaagcatacaacaagtcaaactcaaatccaatccaagatagcactaattcacccaacatgtagcaagaacaacctaacccatgcataaccaaaatcaacaaacctaaacatgtttctaccacaatattcagcaaggaaacataaattaaaatcaagaaaactacctcaaatacttgcacaattaagcctcaagcctcccaacacctttctttcaatcaacaaacttcaaatcaactagttcttcacaaatttaagctttgaaaatggaaaggggtaaaagagagggagagggttcggtgagagagagataataccagaaaaataattcattttctctcaaaattcattaaattcaatataactcataaatggtcaaatgacctttttgcccttagggctataacacacatattcattttcaagggcaaaa

SEQ ID NO: 349435 - DNA, 545 bp, Cannabis indica
aattacataaagcatttttttgtaaaaattttatattttcacattcattttttttttatattttacgatgctctgtaaaaacaacacgaaaacaacaaaaataatatataaaagtaacggaaaataacattcaaatagcatcaaaataataataataaaaaaaaacataaaaaatcaacaataaactaacgacacaacataaaaatatatcaaaagatcatattttctgtaaataaaatcataaaatcgtaaaaatgtagtttaaaatttcgtatagctgtatttttgtaattttttttattgtttttgtatataacttgtgaaatatcttcatgtataaatagttagagagagaaagagagagaacttgagaggaatgacttggggattggtgagagacatgttttgtacacaattgagtttgttatcaatcaagtgaagaaacgttctaagagcatctccaatgatgcactaaatatagtgttacactatcactaaatttggcgtcaaaaaatatttcttctccaaccacaacaccaaaaatt

SEQ ID NO: 349436 - DNA, 775 bp, Cannabis indica
tttataattttatttaattttaattttaaaataaaatttgaaataataatattaagtatatgaatataaacttgtcatgtgtataagaatgtacacataaagagtctatggtgacagttagctagctgacaccttaaatttattaacagctcaataatttagaaagttttaccattaaaatttgagtttagaaaattaagtgcaagtgaaacaataattaataggggagaaatgctaaagggcaccactggtgcctagcaccctcctacgtgtcaatatcgctattggtgcaattaagtattgggtcccatatagtttaatataataatttttatagagtatcgctagccaattgcaagtcgacacatttagaaagtgctaggcaccactggtgcccaatagcaatgctcttaatagggtgtagggtccaaaaactctatatttttatcttttcaaattaatgaaacaataatgcccttggtccatttctaactttttttcatggttggtatctataaggtgttcgtggaaggaatctatctagtgaggagtgaggaccatccaggttgaacaagaatttctgggacctaatgcaaaatatggataatttcataaattaatacacaaaaataataaaaaaaaaatgataaaaaatactattgtactaaattttaaagggtaaatactattggaccctgtattttgcaaaagttactaattggatcctctgttttgttaaatgacaaaatagatcctatattttctaaaatagtaa

SEQ ID NO: 349437 - DNA, 1065 bp, Cannabis indica
ttacagaaatttggtctttttattaagttctgtccaattattctgtttaaatactgacttgtctttataaattaataactttaccccttaaattttgacaactatcaaatattgcccctcaaaataaaaataaaaaagattcaatattttttttagtaaatcttaaaaaaataatttagatcttaaaaaaatatcattgttgacggtaagaactcgtcaactaaccttgtggcctgaaaaccaaaatttaaacataaaactcaaaaacaaaataaggataaagtgaaatgcaagttttaatagctaatagattttttgagtaagtgagagtttcttttctattgcatccaatatatgtgttacaagattgattttctaaccccctctcacacatgagtggggtatttatatgcactaatgacctgagttacattgtggtcccaaagagacaagttgttgctttccatatccaaagcgcaggtacaggagctggtcttggacctcgtactcttgtttggtgtcaggtggtcccaggtcgcagaggtggtggctgcagcatacctcttgctttcagagcttgaagaaggcgtggtcgtatgcttttccaagggaattctcttcaccacgtattcaaattccatcactgtttcacttcgcacacacactacacagggattcgcatgcaggcccctcacacaccatgggctcgcatgccaccccttccccacacacacacacacacgaatgggctcgcatgcgatcccccacacacacatgcatgcatgcagatgtatcgcacgcgcctctcgcacggacgtcacaactgctcgcacggatgctcccccacttgcataaaggctccacgactcacacaaatgctccaggactcgtccaaatgcttcccaccttgaacaacagctcatgggctcgcacaatggctcatgggctcgcacaatggcacatgggctcgcacaatggcacatgggctcgcacaatggcacatgggctcgcacaccccattgtcacattttagtggtcttaatattttgctcataactctctcga

SEQ ID NO: 349438 - DNA, 606 bp, Cannabis indica
attatttgaaaaaaaaataattaattgattgatctaacggtgttagttttaatcgttaattttaacaaaaaaaaattgttaaaccaacaatttttcgttaaataactacatttaatataaaatttatatatatatatagatggatattaaacttcagtttcacaacattaattctaaagccaattacattgtttattattagagagactttagacatcagtagagtttagcattattaatattataagatagtatcttacgaatagttagtaatataaaggtcattttatattaaattatgtagaacttatacttaattacttagttaacatatcttttagagatgtgagtcattatcactattaatataattaaatatagattttacttattttacttaaataataattatatatagggtaaatggcggtaaaaccccccaaaactttcattttggtttcacttaactcctaaaactcaattttagacggtaaaactcccaatactcgtattctgttagcaatttaacatttccatccattttaggtgttaagtatcatgttggactggacacagtgtacacgtgacacaattttattggtccac

SEQ ID NO: 349439 - DNA, 545 bp, Cannabis indica
ataattaatcataattaactgataatttccaaattaactaagcgggctttacattaaatattttagaaataaatctgtttatcaaaaaatgggttgtcaaaaataaatgtttgattattttttcttgttttaaatctattgcttctcaaatgtggtattttgacagtggttgttctaggcatatgacatgtgaaaaagactatcttgacaacattagaccaatgcaatgtgaagaaattacttttggtaatggtctagctggaaaagtcatagggatgggaactcttaattttgaaggtctacccaggcttaaaaacataatgttggttgaatgactaagtgctaatctccttagcattagtcaaatttatgatcagggttggaatatgttttaccaggagctagatttactaccatgtatgttgtttaacatcctaatataaatttctcaaaaataatgaaattaaacacatacaaagtttcagaaaaccttacattgggtgcagcagaatataatggctccttccgctcagatttctaaccct

SEQ ID NO: 349440 - DNA, 1075 bp, Cannabis indica
ggggatagttgtaaagaccgcttagtttaaatttgaaaattagcagataattagcgtttgatatgaaaattagttattaattctaattattaatttatgatgatttatttgaattcagaatgcatattatatgttatatttagaattttataattttgcatgttcagtgcccggcaacattggaacgaggtgtatggctcagttgaatcacattttagtattttagtatagcggggcagtttagttagacattgggaatgtcgaggtttgtcaggaatttagaatttcccagaataccctttagtgcctttttaaacgcttttagtgtgggaggggcaaaatagtcattttgccccatatgcttttgtctttagtgagttgagttgggttatgttaaattgatttattgttattatgttggctgagtattactttaaagaaaaaagattaagttaactcattttaaaaaaattagaaaagttagaaagaaaatcacattttctctctcaagctcactctctctttcggcccccttagagcagctagggtttggtgtttttctgtggatttcaagctgttttctcaaggatttagtggtctcaagttcttggtaagcttcttgtagctttttgttgatttcttgagttgtaagaaaaagaaatttttgcatgaattgttgttttgcttgctgtacttgttgctgttgttggattatattttcagtagctatattatgttggtataaggtgatttgagcaggttttgatagctagttagttggatgagcaagctttgagcttttgaactcaagcttgactcataaatggcatgttttgattctgtgtatgggtggatgttttgttgtcttgaatatgttctctagggtgtatagaacaggtctgtaaagtttggtttgaattggggttgatttacatgatttatagaatttttagtctttcctgcactgaaccggagttccagttcagtggggcctgtaggaaccggaattctggttggctcccaggaaaccccacagaaccggaattccggttggggaaccggtctactggttggg

SEQ ID NO: 349441 - DNA, 2215 bp, Cannabis indica
tctttttaatttttagttatttaattattcaaccttattattgattctaccagatcgaaacaagaattcaaatgatttgtacttagctacagtcctcgtgggaacgatctcacttacctgagtattacttgttaaaacgatacgtatacttgcgtgttggatttatcacaacactaaccctgatcggtcttgacatacttctacaggtgtgggttgtttttccttatcaggaattcaatttcccgcttcaggttgttgcattcgttagtttcgtggtcgtagtctccgtggaatcggcaaaactttgtcatgtctcttttgctgacatctttcttcatgggcgcgggcttcttgtatggggctagcgactgagtagccatgtaaacactttctacgtcctcagtcaagatggtgaatgtagtttactttgcttgattctctcggggattttgctcggatttgccggcgaattttcttcttcccattcccttgcctgttgttgtttgaacgtttaccacttgaaattgaattacttgggtaatgggggagttgggcggacgttccaatcgaaggagcgttcaacttgccaggcttttgctcaccttttgctcgtcgaatggcttcttcgagcttgatgaagccttcgacacggtcaagaaaatccctcattgagtctactgggccgttcttccttatgtccttccaaagttcaccgaggacttcaatgccccctagtatcgcggacaaactttccatcttcagttacccgtgaaactttggtcgccttcgtcatgaatctactgatgtgttctcagagaggttcgcctggtctttggttgacttcgaccaagtctcccagatgcaatagaagctggcgagaggaggagaattgtgtggaatttcgaagagatggctttccatgagttgaactttccaggggccaacttgaaataccattgctggatggcttccgaaagggtagcaggaaagattctgcaacacacatcccctcgtatcccctgcaaatccatttgcatcttgaaatacttgaggacggaaagaggatcttctcttcctgtgtacattttccatgttggcattttaaacctgtggggcaacgccagaagattgatctctggagagaaaggagttccacgtgctcggtccagcttgagatcattgtttctctatccagccatgcattggaacatagtttttagttcgtctagctgtgcctgcacagctggactaacttgctcggcattctggtcgatttgaatcacatccgaatctttctgaccgggaatttgagcacgggctccaggctgtacgatcgtcatgacaatctaatcgtctactcctctccttctgttcagatcgccccttaggtcatgagtcgtccccaacctatcgaatacagaagcgtcaggctgtcttagcgattgatttgcttggttggctagtggaatgacaccgttaaccgggttggaactatcaggtatgacctctcttgatgaattactggacaaggtctgcccgcctaccgctaggcccacaagtggaactcgtgaccggggattcggcaactgaccatttgtagtctgggaagtattgatcgctggatctttgtctgtctcacctagggggatgacactcggaggttactgtttgacagttgggtaggctttttcgtatcagcacagtagcttgctgactacgattttcaatctctatatgatgagcccttaatgattccatctctttgtctctccacctgacaaacatacgtcttggttcctcgaacgcgagatttaccgcagcgcggagttcttcttgatcatgatgtagggtattggtataaccctccacgagtccaagagacgcacagaggttttttgtctcagtatcatctccaatggtcgtttgagtgttggtagcaggcagaagggctgtgttatgaatgccctggttgggtgttgaactgttattcctagtctcttccacaccaggagtgatttcatctacaatagtcgttacaccgtgacccacgttcgctggctgttcaagattagtagctggcaaaacccttgcatttcctgggttctacaatgcaggatccaccgtctttagatttgctggatcaaccaggcccctacgagtctgtaccaccatcatacttatggttagatttcgaatgaagaacgattcttgattc

SEQ ID NO: 349442 - DNA, 595 bp, Cannabis indica
gatggcatggcactaagcatcacacatagttagcccacctaaagtcacgttgaaacaatacttctagaaattataataacctaagctatttttggaagaaaatataaccatagaatggaatggctatatttataaaggatattttcattatttgtacagtagtcattccattagagtagctttttcagtacatatgtcaattttatttttcttcaattgatttcattccatccaaaccaatcaccacctcaatgttagaggtacctgattccttgatttccaatgagagctcctcttgggagcagaaccatgcagctctaggattggactctgtgactaagcattttctttgtattagagtgcatgagtccctttgtttttctgctaagtttgagggttgtacagggaaactaaaattaacctttccatctaattcaaggcatttgttatcaacttttgtggagatcagctaaaattttagcttgtaaccactgttttcctctgccacaagagaggctcccggataaattctaggaggaggtcagtttaagacaagtgacctcagtctctttttcaaaaaaaaaaaaaacgtaac

SEQ ID NO: 349443 - DNA, 1276 bp, Cannabis indica
actaaacaagttgacaattaaataagtatttacccagaattgatgatttattcaatcaacttcatagaaagacggtattttcaaagattcacctgcgatcaagctatcatcaactcagaattcgggaagaagatataccaaagactgtgtttcgaaccagatatgggcactacgagtttctggtgatgtcattcaaatcgactaatgctcctccagcctttatggatctcatgaatagagtattcaaggatttcctcgataactgtattatagtgtttatcgatgacatccttgtgtactctcagtctgaagaggagcatgagcatcatcttcgaatggtattgcagagaatcagggatcacaagttgtatgcaaagtttaaaaagtgtgaattctggttgtctgaggtatcttttctggggcatgttgtcgagaaagatagaattatggttgatccaagcaagatcgagtcagtgaagaattggccgaggccaaaatttgtgacagaagttcaaagtttccttggtttagtagggtattattgacatttcgtcgagggattctctaaaatctctatgccactaactgagttaactaagaaaaatcagcgattcgtgtggtcagacaaatgtgaagcaagtttttcaagagttgaagcaacgtttgataacagctccggtgttagctttgccatcagatcgagaaaaatgtatggtttactatgatgcatccagacagggtctgggatgtgttttgatgcaagctgacaaagttatagcttatgcctcttgtcaactaaaagaatatgaacagcgctacccaacacatgacctagaacttgctgctgcggtttttactgtaaagatatggcgacattatctttatggtgaaaagtgcaagatttatactaatcataaaagtctcaagtactttttcacccagaaagatctaaatatgaggcagagaaggtggctggaattggttaaagactacgactgtgagattctatatcaccccgcgaaagctaatgttatggctgatgcactaagtagaagaggtcccgggcagatttactctactgttatgatatctcctcaactggtctcagagatggttaatgtgggaattgaatttgtggttcgaaaattgcaacacttaacactccaatttgatttgttagagagaatccgaaaggcacagttagaagatcccgagctagtaaagattcgaaatgaggtgatggctggtcggcctaaagacttttcaatctcgaata

SEQ ID NO: 349444 - DNA, 644 bp, Cannabis indica
agacctttcaagcgaatcatgtgtttgggtagcttacgaagttcatcacaataggttaggtctaaagtcaacaaatggtgtagcaaacaaatggaatcgggaatgacttcaactttactacgagagagattcaaatggcggagatatttggaattattgactaatgatgacatggatattctagaaacaacattcgaatggcattcgaaagcccgtaatgagcgaaaattaaatttaatatcactgggatctgaattatttgatgatgagaagaatgtctttaaggattcagtacttgctatgttaggaatttgcccccgtccacttaacgtcaagtgacgaactcttttttgcaagtgaatggtacgattatcaacctccacattacggcatttgtcacccattatagattgagctagatcatgaaccaaatcatgcatcttaaaatacgttctgtcaaatggacctttctccatatctaggaaaaatgatctccaccataaatcattaatcatctcatttccaacgtcttccacctcaagttctggctttgaagaaatcagcccatttgccatccaaagatgaattaatagtgtcttttctatttggtaatcctttggaaatatagcacaataagagaagca

SEQ ID NO: 349445 - DNA, 507 bp, Cannabis indica
agcatcagacccaaacttagactagaactcgggcacggacacggtcgtgtagccagatcgaaactgagaaccggacctgcacctaaatgggggacccgattccaaaaacagactttgacctatataggaatcggaatacgaacctggactcagaccaagacccagactgggatcgaaatgatggacctagatctggactgacatcttcacccagacccaaacttggacccgcattcaggacccagacccaaacttggacccgcactcgggaaatgaacttggacctggacccgaacttaaacccagatcggggtccagacctagagacaaacacggacacagactcggacccgaactcaaacccacaccttgaatgagaccaaaatctagacgctgaattggattcaaacttgaacccagaccaggatcagaaccaaggacttagaccaagaacagaatccagactcggacccaacctagacgaagacccaggacgcgaacccacac

SEQ ID NO: 349446 - DNA, 749 bp, Cannabis indica
tgataatggcatctgataagttaaatatcatgataccagtagcagtttccaagtattcttcttgttgaatcttggtagtcccttctggccattctatagggtcattaagtactctcaataatttctgttgagccaagagtgacttaatctttctcctccaaatcctataatcaccagaaccatcaaatttgtcaatgtcaacctttaaattgctcataattaatgaagttaagtaaaatcagatgaaatagataataataggcaattcagttataatggttattagaaaatgtcccagaaatcctttgttaaagatttcagattggttttgttgagttcttgaatttcttgtttgtgtttcttgatttcttgcttgagttcttctccttcttgatatgtttgaatgttgatctttacagcttcaaccaagctctgataccattgtaggaattttaagataggaatttactatcttgccccctacaccaacaacaaaacaaatcaatattaaggtcaatttcgacctttccctgttcactttgacttttcaaagtctgaacactcaaaacgaccccgttttgtctttgaacaaaacccaaggctcgagaatcttctcagccactttctctctttctctgtcttctcttcgaaaccctagcagagagtttctctctgagaaactcgaagctaggtttcaatcttcccagaaaaatcaagccccaaacacactactcagatcagatctacaa

SEQ ID NO: 349447 - DNA, 752 bp, Cannabis indica
ccttaatctgtatatcacgagaaaatctaattggtcaactttatcgaacaaattaaagaacataaatattacaactaagatcgaagctaaccatatcaggattaagatctatatatctaagatcaactagtgatattaacttaaaaatatataacagtaagtttatgatatcttacccaagtttaacatcggtcaaatccaatgtatactccatacattcgatactagcatactttgccaatatcctgaaaaggacataacacttatccaaggtgtaagtataccttatcgttgattatcatgtcaatctaaatccagtgtactgacaaatcatgagacttaaacttttaaacttatagtcatgattatattccactgtgttgacgatactataatcatgaataaatatatgttttggacataatagaatttataaattaaacatacataatcatgaaattaatcatatgaaccattgaacataaaatgatttctgatcttttattaattaataaatctaatgatattgaaatggattttatttagggcactaaatccaacaaactcccacttgcactaatgtaaaataaaaagtgcatttcaattaatctcattagcatgatatccagatcaagtgtaatatgtagtactctctgtaatatgatatgacaagttgtattcaattcaaactatctccaccattacatatcattagccacaaaatccttgatattgtgaaattcctctctata

SEQ ID NO: 349448 - DNA, 780 bp, Cannabis indica
aactcagtgcctccttaatacccaaagcttccaccattttaggttgcaacacccctgaccgaccatggtaaaagcttccaccaatgcgccagtttcatccctaatcacccttgcaaagctataagttgcatttcctgaaaaaatggcagcatctacattaatcttcaaggtgttttcagctggtttggcccaagtttcagtaccatcgacattagtaaggaatgcagccgtaggattaaatgttgaatcttgagcccgagtccaatctgcgagtaaagcttgagctaagtgagcaacactcgcaacagtagagaacttatcagaccatactagctcatttcgatgtttccaaattgcgcaacatgtcattgcgatgaaccttcttttctccccatccgcctgctgtagaacggtagcaaactagttggcaaaagaaccaactactgccaacacgctttggcaaaagagaaattcaccaagcaatggtagatggtttcattagttactttgcacatagggcagatggtatcaacaggcacatgtctagaacaaagtttggatttcgtaggcagacagttagtggcagcacgccataacaagtctttcactttcgaaggaacacttagcttccaaagagtattccaaaagacggaattatcatcatgtgcacccaactctttgctcaattgtaagaacttataaactgattttactgagaaatggcccgagctctcccaactccaataccaaacatcacataaacgacttgaagacaaggaa

SEQ ID NO: 349449 - DNA, 775 bp, Cannabis indica
agtggagtaataatggaattaatgaactgggttattctattgaagagttcaataataatcaagtatttattggagctttcaaatataggtccatagtccccagatcacctctatacaacactgtataggggaaagtttaatttaatgagtaaatttgagaaagaattaatttctatgagtactaattcttaagggcaacatagtaattttgtggaaattattattttgaataattatattaattatgaaatgtattaaagtggtaaataactatttagtttttttttattaaaactacattaattagttaaatataatattattcataaataatattaaagagagaaatatattattgtagtgaaaataatatttattttaatcctaataaaataagagattaatgagaattaattaattattatttattgacaaaacaaattataaatcttatttgtgaagaaaataagaaaactaattttgggctttaaaacatgcccacacgtgtaggccttgtcccacacttgtagggtgacatgtaaaagcctatgtgatttttttttttttgtattatttcctttataaaataaatcaaattaaatggataattatcttttaattattgtattaaatatattataagataatgtatttaaaattaaagataatataaaataataggatattattaatttttgttattcaatttatatgatattattttgaatttaaattaaaataaaatattatcttttttattttattggattaaata

SEQ ID NO: 349450 - DNA, 649 bp, Cannabis indica
tttttattttattggattaaataaaagttttatttattatttaatctttatatatttgatatataataataataataatatgctatacataagaagtatatcagagaaaacataatgagacttttagaaagatcaattttaggttgaggagcatcgatcagtttgattagtttttttttatataaaaattcagaattcaattttcggtctggattggtgcaattttttgaccgaccaatccagaacctatcttaaaatcgactgatttgaatcttggtttggtcggtttaaaccgcccaaaccaaacttctttttttccttaaaatatgatccaatttattctataaatacattattctacattttacaactacaaacatacaaattaattgttcaaaagctaattatcttattcttttaactttaatataaataaaataataatatattattattatatattattagtaactacaatacataaaaaaacttaacaaattaatatatatgtataacggtcggttttggttttttcgcgctattaaaattatccttacaacaaaaattaaaaaaaaaattaattaaaaaaatataagggaaattggtggctaaaccacctgaactttacagtttgtaacacttaaccaca

SEQ ID NO: 349451 - DNA, 1933 bp, Cannabis indica
agagccattcattctgtgggtgtaagggcccaatggaggcttgaagcggggacgttacaaacagccatgatatgaaaggtggtttcgggttctctattacacaaagaacaaacactgtaaacatgaacccgcttagtctgaagagagactagagttggaagacagttagtgagagccctccaaagcaaattcttaacttttggaggaagtttcaaataccaaaattttctccaaaaaccaaaattatcctacatattctatcttccattacgcatttgtaaagcacgataggcactctttactgaataaccaccaaaagtttcaaaagtccaataccatgtatccaatttcggcaacacaagcagcggtattttacaaatgagttccacatctctgggatcaaataaatcctctaaaagctcctcatcccaacacattcgatcattctgaagaagattggagacattacattccttaagagcctcatgagaagaaaccacatagggattgtccatggaagggagccacggctggttaagaacagggatcgaagaaccagaacccacacaccatctagcacccaatttaaccacatcctgagcttcaattatgctcctctaagcataactcgggttagctcccaactcagtatcaagaaaataaccttggggataatatctagcttgaaaaacacgagccacaagcgaagtcggattggttaatagacgccaaccttgcttgcccaacatagataagttaaaatccctcaagttatgaaaacccaaaccacctttatgcttatgcagacacaacttaccccatcttttccaatggattccaccaccttgagaggccttagaatgccaccagaatcttcccattaggtgatcaatgtccttacaaatttcaaggggtatcaaaaagacactcatggtgtaagaaggtaaagattagatcacagactttaataaaacctccttaccagctctcaataaaaacttactatcccaattttgaatgcgcttcctaaccttctcctttaagaaaccaaatgccacattcttgtttctaccaaccacactcggcaatcccaaataaaagctattctcatcagcagcaaacatatgaagggttgacaaaataccaattcgaacattatcaatcgtgtttgagctaaaaaatacggaagacttatttagatttaccttctggcctgaagcctcctcaaacttattaagcaattccagaacacgttaagcctcttccatagtagtcgagcaataaaggaagctatcatccgcaaaaagtatatgtgtgacataaggggctctacaagccacacgacaaccatggatccatttcttctcttcataaagtcgaataagagtcgagagaccttccgcacagataataaagagatatggagaaataggatctccctgacgaatccctatagttgggacaatcggcccaagaacttctcctccatggacaatgttataagagattgttctcagacattccattatcatcataatccagtcaacagagaaacccattcgaagtaagattgcatgcaagaaagaccactccattctatcataagccttgatcatatccaacttaagagccatacaaccttattttccttgttgtttatgtctcaagtagtggaggatttcaaaagagacaagaacattatccgtaatgagtcgaccgagaataacattcttaattgttaggtagcatttgattggaagtaatgaaataaaatagaaaggaaagaaaacaatcttcattccattcgttgtttggttacatattaaagtgttaaaatgtcatttcaatggaatgacctttccactattttggtagaatgactattccattttgaaatggaaggaaatacaatttcaatgcatgatgagaaaaa

SEQ ID NO: 349452 - DNA, 962 bp, Cannabis indica
tgtaggttactcggaggttggtgggtatatgtggctattcgctgacacttgtcgcatttcttcgcaaaagcgaaagcatcctgtcgcaaggttggccagtaatacccttgtcgcatgatttttaatgcaagagagttaccccctgtatgattgccacaaattcccccatgtacctcacgtagtatgtagtcgcaatcttcaccgtcgatgcatttgagtagcggttgactaaaacttctgcgatataaccttttatcgtacatgacatatcgggcggctcgctgtcgcagctttcttgcttccaccttgtcatcaggtaaaacgcccttttccaggtatgcgactattggagtcatccaggtgacttcttgaatggtatctatttccatgatcacttcttgatttatagttgggtgagccaatacgtctaccggaattacatcgagcaattcggcttctctagttgaggccaaacgggccagtgcgtctgcgtgtgaatttcgagcacgcggtactcgagacacgattactttcttgaatttctgcatcagctcgcatacaatggctaaatacttaaccaatctcccgcctcttgccagatattctccattcacctggcacaccacgatttgggaatcgctaaaagcctgtagatactcgattttcatctcgagagcgagcttcaaccctgcgattaaagcctcatactcggcttcattgttagatgcagaaaattcaaaacgtaaagcagcgtgtaccttaaaattgctgggactgattaataagatcccgccaccagagccttcgctatttgaggctccgtcgacgtacaatgtccacatctctctattggttatagcaatgtcgattttgtcttctatgagtgccacttcggtgctggggaattcaaggataaaatctgccaaggcttgccccttgatcgcagttcttggtttatactt

SEQ ID NO: 349453 - DNA, 768 bp, Cannabis indica
ggtatgggatgaaaagagatgtggtggactacgtgtccaaatgcttaacctgccagcaaatcaaggctgaacatcaaaggtcggcagggttattgcaaccttttgtccttcctgagtggaagtgggaggacattgcaatggattttgtaactggattgcctaaaactacaggaatgtatgattcggtatgggttatagtggacagattcacaaagtcagctctcttttggccagtaaaagttacatattcagtggatcagtacactgaactgtatgtaaaggagattgttcgtctccatggcgcccttaaatctattatttcagatagggatccaaagtttacattgaagtttgtggtgagtcttcagaaggctatgggtaccaagttaaagtttagcacaacctttcatcctcggacagatggtcagtcagaaagaacaattcagatactggaagacttactgcgagcctgtgttatggactttgagggttcatggaataagtacttgcctttaattgagttcttctacaacaatagctaccagaatacaataggggtggctccctattagatgttatatcgtaggaagtgtcgctcccctattcattaagacgaaactggagaaaggaagtacttgggtccagaattagttcagaggaccaatgaggccattgacaagatcaaggctcggatgcttgcttctcagagcaagcagaaaagttatgctgatctgaagcgcagatatgtcacatttcaggcaggggaac

SEQ ID NO: 349454 - DNA, 771 bp, Cannabis indica
ttactaacatgtatgtatttagctccctaaatatgaattctctaaaataatagaattaaacatatataaagttaagaaaccttatattgattgcgacggaataatatgtctccttccgctcagatctctaacccttgttcctttctgtcgcagagtattatcaagatctgagtccgattctccttcaagtattggattcttcatagtcttacacactatgattgagtacttgacttgctatgggtggacatgtactctttcactataaagctaaaaaataatgaagaaagagagagagagggagattcgaattctatagaaggagactctcaaattttctagttctctaacagagttagaaaactaggataataggttggatgagaatgagagccatcttatttcttatataggatttctcctagggttagatttaaattatatggctttaaaaaacaataaataaatggctaaaaataagtagtgttcaaaagtaaaaggccaataggccatataacacatgaaatcaacatgtctatgcaaataaaatcatctttgaagtactaataaagtgaagcttcttgtgtgcaggggcaggggctggtgcagctgagtcagaagctgcagtgtctagatgttgggttttgtgacctaaataaaacccatttcaatataatcagatttactaattaataaagatcagaaatcgcattttatgttgcatggttcacatgatttatttcatgattgtatttaatgtataaattctat

SEQ ID NO: 349455 - DNA, 613 bp, Cannabis indica
taaatgtcgatcaaaactacccagcaaagaggtagaagaggaggcccttggattttgagagacaaagggcactcaaataggaagtggataagttgttggtcaacgactttatacgcgaggtgttttatccatcgtggatagccaatcctgttctcgtcccaaaacccaatagaacttggagagcttgtatgtatttctctgatctgaataaggcgtgcccaaaggaatgcttatcactggtaaggatttaccagttggtggatgagacagcttggcatgagcttatgtcattcatggatgcatactctgggtataacaagataaaaatgcatgtcgcagatgaggaacatacatgctttgtaactaaaatgggactttattgctataaggccatgccatttgggttgaagaatgctggggccacatatcaatgactggtgagtgaaatgttcgcgaatcaaattgggcagaacatggaggtttacgtcgatgatatgttggttaaatcgctaaagagtggaagtcatactatagaccttgcggagtgcttcaaaatattagggaagtacaatatgaagattaacccgaaaaaagtgttcctttagagtttcct

SEQ ID NO: 349456 - DNA, 1211 bp, Cannabis indica
tgatagaaaatagatattaacaattggcggaagttatactgtagtgttcaatgtattctagaaattgaaatttaaaatttctatttagaatctaaaatttaaattcaaagacataaatttataccaaatattcaatgagtaatattctctcttggaccaccactactaagttaactctaagtttaagttgcctttagtaagcatatacaagtaggaaatttttctaagatcgatgatgtatatcattatgggatagaatatctggaatatgatcgtttgtgccactcattttataaaagaaaatagagtgacatcatagcagatgatctataaaccttcttgtctaatgatatatgttaacaatttcttaataaaaaacttaagaggaaaaactaaagaatttttttgattaaaataagaatctgatgatgtcctagtaggcaagagtcaaggttattcttattatatcaattctccattatgtcagcattgtaagtgttgagttttgtgccttaaataaaacttatttcagtataatcagatttactaattaataaagataagaaatcactctatgttgcatggtttacatgagttatttcatgattatgtttaatgtattaattctattaagtccagaacatatataaatatatatatatatttgttcatgattatagtgtcgttagcacagtaaaatataatcatgattatatgttcaaaagtttaattctcatgatttgtcagttcactggatttagactgacatgataatcgatgataaggtatacttacaccttgtatgagtgttatgtcctttctaggatattggtaaaatttactagtatcggatgcatggagtatacattagattggaccgatattgatcttagataagatattataaacttactgttatatctttctaagtcaatatcacttgttgatcttaggtttatgtatcttaatcttgatatggttatgttcaacttagttgtattatttatcttcttcaagttgttcgtagaagctaaccaatggttctggcggatattacatcttgggaatatggtagcaattgagtaggagcgctaattatagatatggaatctatagcttatataagtatttagaagtgaaacaatgatttctttcgagtttggtgaatagaaataaatgattgaggagaaataaatgattgaggccttatt

SEQ ID NO: 349457 - DNA, 772 bp, Cannabis indica
gaaatagacagctgttaccatctgaacaattaaaacctagaatatctttgctgacgtggactaacactaacagtacgaaccccagacaaaacactacgagtcccagacgcaactggaatactactggacataatttgtcactacagaaaataatagttctaacaccacacttattaaagtaccaaaccaatggtacatttagttatcacctttagacaaacacccatcagtggaagagattattccaagataatctaacctttatcaaatatgcccataacatgtttctaatattctattgatccttccatattacccatctttcaagaataaaaacatcataccattttttcaataatctccataattctcaataactttctttaacccttaacatcatagcttaagatatcaactttggaatttcacaagattagactatttcttcgtataaattccatattctcatttattgtataaattctctacactaatagacaacatattacctcggtatgtccagccactactactttgtcgaaatcataagatcccacagtacataattcagaattatgtctttctattcctccgatgggacctcctaagctgatctattgacttaacttattagcaagttaagtattcacttctgatagatattcaattaaagtatttcttatttccatccaatactatatacttctctcaataccttgtcaatatctacttattaacacatcccttcctcttgataatctctggaatgact

SEQ ID NO: 349458 - DNA, 810 bp, Cannabis indica
tttttatcaattttttatgcattttaaattttattccaatcctattcccattcccattcctattgctatattttcattcctcccaaccaaacgcctccttagttcttggagctctcaacaactcacaaactctctatgttttctaataatgggattaagccttcacattagttaagacaagccttatataggccttggtactgatcgtaagagagaaggaaaaacaactagacaacaaacttaactaccttcttatttgagtgttgagttggctgctgaggtagcaagtaacttggtcacaataccacaaaatccatcttgatccagtagcttgacacttgagtgatttgaacgatagcaccaaattaagttgttcctgtatgtctcgcgaagaggcctaatcatcttttctgatgttcaccaagtttaagcaatgcttgaacttagcttgggtgattggtttagtgaacatgtctgctggattatgataagtttttatcttctttacattcacctcttggctattgatcacttccttaatgaagtgaagcattgtttcaatatgcttggatctcttatagaacatggaattttttatcaagtgcagggtactttgattatcacaatatgttaaaatatattttaccaggacctagatttactaacaagtatgtttattaatatttaaaatatgaatttctaaaatcataaaatttaaacacatataaagtttgagtaaccttacattgattgtagcggaattaaatgtgtaaagcccgcttagttaatttggaaattagcagttgttta

SEQ ID NO: 349459 - DNA, 671 bp, Cannabis indica
aataaatcaaataattgcaagaaaattatcaaacttcatagtaggcctaagaacacctagcacaagtcaagaactgaaagaaaatcgaaaaataacctccagaaacccctgaacggagtgtcgccggagttctcgtcggtttcggtgtcggcgaatgcaaaactcttcttcgggtgctttcgacgtgtatttttgattggaagaaccttccaatgaatccaggatcccaaaacaaccaagaacaaccaagaaaaagagccaaaatggcctaaacccggttatcttcttccttggcggttaaccgttaataatggagtccaaaaatggtgaattccgtttcagaccttaaagcttcgattcttcacgttaaaactgatctttggggtcccataaacttaaacacaacctcctttgatctccgaaacaacttaaacatgttcaaattcagatccgtttcaagaacggtattttcgaacgtaaacaatggtgtttatcgaaaggtgcgattacagaccttctaatcgcatctaaaactcctattggatgaaataaaactcaaagaaatattctagagtagcccataaactctcaaactcaacaactcaaaatctcatttttttccaccgctcagtttggttcgatcgtcctgtctctctctctctctctctctc

SEQ ID NO: 349460 - DNA, 430 bp, Cannabis indica
tcgaaggctgcagatggggccattcactcgcggagcttgaggggaacgacgagaaacctcggcgctggcagggggaacacaggcggacaacagggtgatcgttggcgtgatgcactacttcagacaaagaattgtccgagtgcacgtgcgcggatcccagggtagtccgagtgcctggtgcacatcgatgcagccactcgacagccgtggcacccaattttccaaaattcataactttctcaatttttatcgaaatcgagttccctaaaaaagaaaattgcttaatttttcccaaggaatccaaataaaatattttcaaaaataaaatatttttcatggaaaaagttctgtacaacacatacattcatcaaataacacataaaccacatgaagccatccaaatcaacataaatcatcgttttaattcata

SEQ ID NO: 349461 - DNA, 705 bp, Cannabis indica
acaaaaaaattaataacaatactaaattaataactcaaaaaataatatatcatgctaacaaattatatatatatatatcactattaaagtatgtatacataccgaaaaatttatatataataaaataaaaactaaatattatcttaaataaatgatatactatagacaataaaaatcatataccatactgttgccccgagtttttccaaaaatatgtagccacagctatgtatgacacgtggaccaaaagaacacctcacccgagaattagctaagagtcgtatacagaagaataagtgtagttcgaagatggagcccatggagttgtacaaaaagtatgccctctctcaaggagctaaaaatatagtaaggcacctccgagagcagaagggcttattcgaacagtcacctcatatttaatgcaacatggggaaggcgtctgggaatgcccataagaggacatgtcagacaacgtaagccttgtttaaggcgattacacaataatcgaagggctagtgacgactccattatgaagaatcacatcaatcaaagaaggataaagattaatctcacctaattcctacggcattgcatgccctattccgtatctcttgggaacttgtgctcatatgttgttggcactcaaagacaagttatccctttttaactatacccaccaaactctataaatgggaaagaggatcg

SEQ ID NO: 349462 - DNA, 803 bp, Cannabis indica
cgacgcaaaaatacacttttgtactagtgaattcactatgaaaactctctctcaaaattgttccaaaggtgttttgagtatcatcccacactattcaagttgatacccaggcctttgtggaacactgtgatgaacacatacgaaggaggagaagatctaggttcagttcttgacaatacactgcgacagaaaggaacaagggttagagaactgaacagaaggagataatatattcctctacaacaactataaggatttttgaatcccttatgtgtttattttaattgttttaggaattcatgttaagatgttagaatagtcttaatttaacatacatgaatagtaaataagatcatggtaaaagattttcaaacaactggtattagagcaatggtaattatttactattcatgaaatgtagatttaaaacaattttgtatgtttcttgtgagatttgaatttttcatgttagtgtttgttatcccaaattttgtccacccaacgtggcatgtccacgtaatgcaagacaaagtacatgtggaatacagccttgccattagcaagtctccatacaaggtatggcaaaaccgtcaagcaacaaccaaaaggagtgaagcgaactatcaaggggctgtaccaacatgtttggctgtctaagagaagcgtataggccagccaggttgagcttgtatgtgttgggaatattttaccaggatatagatttactaacaagtatgttgaattaacgtcctaaatatgaattctctaaaacaataaaaataaacacataaaggtttaaaaaa

SEQ ID NO: 349463 - DNA, 501 bp, Cannabis indica
ctcagaatcgcaaatggaactagaactgaactaggactaggaacagctgcaggacctaaacccaaacccgaacccagatcaaaactcagacagagacctaaacccgaactgagactcggcctcgaacccgaaccaagaccgagacccaaacccacacaagaatcgggacctagaccaagaatcaggatagggtcctgggaaaaagaattaggaccgggacctattacccgacccatacccaaacttgaacctaggaccaagctcgtaacccggcactagaaatggaacaagactcggacctaagattgggatgctgatctagacccagggcttggacaaaaactgtagtcggtttcggaatttcggacccagccctggacccgaaccctaacaaggacctaaacccacacccgaacctgaatccagtccgaaacccaaaagtggactcgaacccataccctgtgacccaaaattggaaccaaaaccggaagtcgaccggga

SEQ ID NO: 349464 - DNA, 332 bp, Cannabis indica
gtgagtagatctaagattctggtaaaataaattccaacagatacactttctagctctaggttctagtttgtcttgtcttatgtgagcataagctagacatccaaagatcctcagatgaccatagctagacaagtgtcctgtccaagcttccataggtgtcttgaaattgattgcagatgatggacatctgttaatcaaataacaagctgtgtttgcagcctctccccaaaagcttttaggcaaaccaaaatagattagcatacatcttaccctctccaaaatggtcctgttcattctttctgcaagaccattttgttgagggtttctaggga

SEQ ID NO: 349465 - DNA, 966 bp, Cannabis indica
cccaagtagtcaaagttggcctggggattagccttccaaaaatcaaagaagagctcgagaccggctgtctccaaggcattgaccgtctccttcaacctgtccacctcacccgtaagctcccctaccttggcatccttctcctccttcatccaaagaagaactacttgctgagaagtcctctcatcctgaagactgtttacttcagcagataagatcttgatggtctccttaaagcgatcagtagcctcgagatcctttgtcagcagttagatcttcttctcggcagcgaacagcttcttgttggcctcgcccaacttcaaccgaacagctccagcttctgccctggcttcctcagcttccttcttggccaagtctgcctccgccttcaaggtgttggacggagccgtgctcttggaagcaacagacttagcccgggagtaagtgtaagccaacttaagaccggcctacacaaaggaaaaactttagcgtatggagctaagtatggaaagttaaagagaagtatcaaagaagacttaccctgttgaactccttcaggactccacccaccaacacatccagagatgagtcactatcaacaccagccagttgctcaatgacctcgggaaccaacttgttcatatagtgggctagcatctccttgccctttttggcctctagaagcacgggcaaaggtggagttggtgcctgaacccgctcaggagtactcctgactagttctgacccaaccattggtggtccagactccttggacttggcagacttgcgggtagaggggtttgcagcagtcacctcctcggaaagataaatgacgtctccagaaggtctcttttccgaggacccctcaccgcccttggacttcttggctggaggaaaggcgctagagcttccgcccattctcttccttagagcatcatgttgggttttatgccctaaataaaactcttt

SEQ ID NO: 349466 - DNA, 533 bp, Cannabis indica
gacgaagagagaggaggaggccccgggggttgggttaccgcccgattaagcagaagacgaagaagagaggggaggtcgccggttgggtcactgcctaactaagaagaggagtaagagaatggtcagttttgaagaggacaaaatgggtcgaagagaatggccagtttcgaagaggatgaactgggttgaagagaaaggccaatttcgccagagcaatttcgaaggaggagacaaaggttagggatgtgaacagtaagttatataatttttgggttttagggattttattaaatttgcgtcagtttctatttctcacaattatatttggcgtcatttttaaaactttacgagcacaatagtcgactattaccaactgacgcaaaatgaaaaacaagtttttaaatttttaattatttttttctaaaagtataaatttatatgcttttgacaaaaataaattataatatttttaaattatattttgtcacatctaaaaaaaattagaaacttaaatatataagaaactctaagtt

SEQ ID NO: 349467 - DNA, 598 bp, Cannabis indica
ttcattattttagagaattcatatttaggatgttaatttaacatacttgttagtaaatctagatcctggtagaatattcccaacagtagcattctcgagccagaagttggtcacctcgcaccactcctacacctgtcggtgtctgaaacttcagggataggtgcttcatagaactaattgcccctagtccaattaacgcttgctgacccagcaataaattgtaagccgatggcaggtcaacaactaaaaagtcttgcattatggtagtggataaaggcgcttcgcccacggttaatgagagctcaattattccttgagtggcgacactgtcgcttgtaaatccgcatagattctccatgcaaggttttaagtttgctctttctacccccattttcttcagtgtatttttgtaaaggatatttactaaatttctgttatccaccaacaccctctttatcctttttttggcgagctggatggtaatcactagtgggtcaacatgaggatatctcatatgcttcgtatcttcctcctagaacacaattggaggttccttagtcttagctttcttagaagattttggagcaaaaactgactg

SEQ ID NO: 349468 - DNA, 808 bp, Cannabis indica
tacatacaacgtactatgcagtacaatatacttttcttacctttaatccagcttcatacatttcggccaacccaagtggagaactatcctcgatgatctcgtccctatgtcacaacaacggtaaaccaataagtgtttatcccaaaatactacttaatattcacataaggcaatctagagtttcctaccaaaccccgtggtataaatacactaaaataaaacttacattttggctctaaaatatatataccatattatagagcttgttgccaccttcaaaacggtatatagaatatccaaaacgaacacccgagtcaaaagttatgacaaaaatatgatttctgatctcttagacatttctaagaactataaaactcacaaatcctaattttcgcactcaccgaaacacttccaaaacatatctaaatccctccaaacttcaaagggcgcatacataccataaatattaccatccttacgtaacaaaaataaaaatcgggcccttaaatgaaaaacgccattaacgttcggactaaactttcaaaagttcaaaactcgatttctaactaaaaattacctcaaattcaacaagtaaacatcggaactagtcccatgactacccgagaataataatataaggtcaaaacctccataactattctaattcacaaaactcctatacgaaaccattgttttttaaacttaaaacaaaattaaaccataccttaagcttttaccttttcaaagatttgctatcttgcaactaccggagcttagatcactaagtttcgggttgaaaatcgaagaa

SEQ ID NO: 349469 - DNA, 767 bp, Cannabis indica
aaataaaaaaataaaaaaaaatccttagatttatgggggtcgggtaacaaccgtggtgtttaacaccacctaaaatattatattgatattgatgcaattaaatatcggtctcatatttatagagcattgctattgggcactagtactgtctagcacttctagacatgttgttttgcgattggctagcgatactctctaaaagctattatattaaactacatgtgacctgatacttaattatattaataatgatagtaatatatacgaaagtgctaggtactactagtgccttttagcatttctcatatttatatatgtaaatataacacttaaaagtagggttgagcaaaaaatctaaaaaaaccaaaaaaattgagtacatcgaaaaaaactaacaccgaaaaattgaaaaccgaaaaaattacctctggttaaaactgtctttgcacggttggttttaatgtcaataacaaaccgaccgaacatatatagaatacactatacatatataatataattatttttgtacgtatttaatatacaattttattagaatagttttactttttatcttttacattcaaagtctcacttctctattattttattttattataatttgatgtacttatataatatgtattatacacacacattcataaagtaatatgagttttttaatataactcattactatactagcagcacaaataatttgaataaatttaaaaaaaaaaattattttacattatttatttaactaagaa

SEQ ID NO: 349470 - DNA, 534 bp, Cannabis indica
tgttaattaatagttgagaatgatgaagtcaaagattttggtggactttggaagctaggtttattattatttaacttactcatatgtgatttttgaattgaaattttttttaagaaaaaaaatattattgttgaacctaattgaaacacaatttccgttgtttttcacaataatattatacttgtaagttgtttttataatactttgggcccgtttggcacaacttttggaaaagctaaaagctgcttttaaaaaagctgtgacaaagaggtgtttggtaagcagttaaaaaaaaacttattgaagaatttatagaaaagctaaagctggtacaacccaacttttaaaaaaattcatttttattaaaagactataataaattattattactaaaatttattatatattagaaaaaataaaaatatatttaatgaaaaaatatttaaaaataaataatatttaaatttctaattttttattttattttaaaaatattttatattttatatttttattattaacaaacaatatcaa

SEQ ID NO: 349471 - DNA, 1314 bp, Cannabis indica
atatattatattatctttttatacctcttttatactcatcttttgcaattctctaggcttcttttgcttccaatcgactactttctgagcggcttgagtatttggagggtgagactcacaaattaatgtcccaatgcaaggatgtgtgtgagcaacaagagaacgctcaataggagattacccaccttaagcaagaagtcgagaaagcgaaggaggaagcagagaaagtaaagaaggaagtcgagaaggcaaaagaggaggccgagaaggccctcaaagtccaagccgatgagtttgaggagaagcttgctgaaaaacttgccaagaaagaaatcgagaccgtagaacggtgcgataaagttggttttcgcgctatataacgggcctggctttggaaccctaacatggataccagcttcttggaggagaaggaagaggaaactttagctctttgcgagaagaccaagatggaagaagaagacgacgaggtcgaggaagaagaagaagatctgtccaagtctcccagcatgtagacttggtttatttttcccttttttttaggaaatggccccttggccgagacaatagtttttcccctagtgacactttttgtaaagacggatttgcaaggttagatggccaactttgcttttttaatgcctcgcacttttaagtatgaattttattatgcggatgtttgcttgcattttattcacaatataaactatcacatgcataaagtttattaggggtttccaatgactttcctttcttccgactttaagtagttaatttcctactttacgtgcgagcaacttatctactcgttcctcagtctgcgagccgtcatcaattccatctcgcgatcatcaaaatattcatattttaagcatattcaaatatatttctaatgaacttgtcatctgatatatattttcattgcttatatgagtagttaaaatttctatccacgtgttgggtttgagtattttttaaagacattttgacatctcgtttaatactttcccttagcgcaaaccattagtattcagctttatgcgctagtcataacttttgattttcctctctcgtcagataggttataaatcaaaaattacagttgtttgatccctttctcgtcagaaaggtttgatcaaggcgttataacgattcgacccctcttccgtcgaaaaggtttggtcagggagttataacagttcgacccctcttccgtcaaaaaggtttggtcgaggcccttttaaaaagttttcaatttttttttgaaactatgggtttgcattgtactatgtattt

SEQ ID NO: 349472 - DNA, 829 bp, Cannabis indica
ctcacaaaagctcacatgctcgatgccaaatctgccccaactcccatgacaagtggccttcgattgtctggttttggtagtgaaccagtacctgatcctcagctatatcgatcaatcgtaggcgcacttcaatatctactcattacacggcctgaaatctctttcagcgtcaacaaagtttgtcaattcatgcacaatcccctattgactcattggcttgctgttaaaaggatacttcggtatcttagtggaacaatatctcatggacttcacctcaagaaagctcctcttaatgaaattgtggcattttgtgatgcggattgggccacggatcctgatgatcgtcgatcaacctctggttttacaatcttttatggtcccaatctgattgcctggcagtgcaaaaagcaacataccatctctcgctctagcaccgaagctgagtatcgaagcttagctagtacagttgctgaaatcacttggattcactccttattctctgagttacacatttcacttcctcagccaccaataatatggtgtgacaatctcagcactgtccttctaacggccaatccagtacttcacgcacgcacaaaacacatagaacttgatctttactttgtgcgtgagaagatactgcagaaactagtccaagtcaagcatgttcctgctcaagatcagcttgctgatggactcacaaaagcaatctccacaccacggttcaatcaatttcgtaccaagcttactattgaagacatctctgttctcatagatgcttccaataataagcttgaggggccgtgttaggggtattagttagttagtt

SEQ ID NO: 349473 - DNA, 779 bp, Cannabis indica
cttttggcgatattaatattacccctacacccgaaccctattcgttggatgcgccatccacatataacttccaggtttccgcgtctcgctgatcaagtggaatttcaattgcagttataccttctatcaagaagtcagctaaagcttggcccttgagggatgttcggggatggtatgttatgtcaaacttccccagttcaatcgaccatttatcaatcatcgagaagcgtctagttttgataaaacttgtctcaagggctgatcggttaaacttttatggggtgagcctagaagtatggtcgtggcttacgagatgcatggactaggcataacacaagtttttccagagggggatatcgagattctgcccctagtaaccttttacttacatagtatatagattgttggtgcttgccctcttctcgcactatagctgcactaatcgcatcttgcgagatggctaaatagagaaacaacatctctccatttattggttttgccaaaactggaggcgttgctagatgccctttttttctctgaaaggcgtcttcgcactcttttgtcaactcgaactttttgttgccttggaatatgttgaagaatggcacacacttatcagttgactttgaaatgaatctgttaagtgcatccattcttcctgttagggcttgtacttccttaggctttgtcagtgatggcatgcctattaatgccttgattttttcaggattcgcctcaatacccctcgcgttaactatgaatcccaaaaaatttcctga

SEQ ID NO: 349474 - DNA, 680 bp, Cannabis indica
attaaaacaaaaaacaactaacatcggtaagtttgaataaccgataacctctcacttgcttaattaaaacaaaaaacaactaacgtcggtaagtttgaataaccgataacatctcacttgcccaatgctctttcacttcatcaatttcttcttctgtatactttgcatcacttaactacaaaatttaaagataaataatatattaattaatttatcatcatatgcattttaaataataataataataataataattataataattataataataatgtatgacatatttatatagtttgtatgttatgtaccttggccaaaaagtgtttccgattcgaagcttgaaacaattgttggcgattatgttgtacgagccattgatatagtatcctaatagaaaatttatacaaagctaccttagattaatttttgaatagataataagaataaagttaaaaataataaatttattatatatatcaagtaatatacctcatgtagcacgtgatgatacctttcccatggacaaaaagtatcatttgggtctaccatattttccatacaaaatcttatgaagaattcaacaccatttctatactccttagataacctatttgttgacatctattttttatccatatttttcttcctacatcatccgtataaaattataaaaaaaa

SEQ ID NO: 349475 - DNA, 809 bp, Cannabis indica
tgaagcggggacgttacattgcttgacctagggttttcacggcctagtgtgtcaccctggggagctcctgtcctattttttaagaaggaagacagatcattacgcatgtgtattgactactaggaactaaacaaactgactattaagaacaagtatcatttacctatgattgacgacttgttcaatcagctttagggaagatagtcttctttaagattgatctccgatcgggctatcatcagttgagaattcaagaggaggacattccaaaaactactttccatattaggttggacactgtgaattttcggtcatgtcctttggactatccaacgctctagcggcttttatggatttgatgaatacggtattcagagatttccttaatatatgtgttatagtatttattaacaacatccttgtgtactctcaattagaagcgaagcatgagcaacatcttcagatggttctgtaacaactacgggaacataaacgatatgccaagttcaaaaagtgcgagttttggctatctcaggtgtcttttctcggacatattatcagtaaagatggaatcaaggtggatatagggaattgaatccatcagggattggtcgagactaaagatagttacaaaatttagaagtttcttgggtctggctggttattaccgtcggtttgttgagggattttctaagatctcaacacccttaacggaactcactaagaagaatcaatagtttttatggatagattagtgtgaagcaagcttccaagagttgaaacaaagattgattacaactccggtatta

SEQ ID NO: 349476 - DNA, 703 bp, Cannabis indica
taggtggcatactataaataggtagtgatgacttcaggaaagatgatgcatcttattccttcagagaaaaacctgagtgccttctaccattaacctagccgccacctctcttctctcttcttcacaattgaaaccgaaccccttgagtgatggagtgagtgcccacacacatcaagtggtacctcaatcatagtgtggaagatcgtgcagaatccagattcaacagaaggacattcaggctcagatcttggtgatactctgcgacagaaagggtacaagggttagagatctatgtttatatgtgtttatttattatcgttgtagaagttgtatatagttttgtaattattttaccaggatctagatttactaacaagtatgttattaacatcctaaacatgaacttctaaaattattaggaataaacacatataaagtttcaggaaccttacagtggttgaagcggaatataatgtctccttccactcagatctctaacccttgtataatttctgtagcagagtatcaccaagatttgagtctgaatctccttctcttgaaactggattcttcatagccttacacactatgattgagtacaactttatgtgtgtgggcactgactctaatcactctagggtttgaattgaagagaggaatagagagatagggtttcggttttgtataggagaggaggctcaaa

SEQ ID NO: 349477 - DNA, 783 bp, Cannabis indica
gctgacctccagattaaccttccttgcagcgacaaactgtctccggaagctggtttgcaacttattccagcaatccacgaatcctggttcaagtttcttgaaccactcttccgcggaccagcttagattaagcgggaagcacaaacatttggtgtcgttgctcactctcatgactgtcatgactcgattgaaccgtgacaggtgatcgctagggtccgagttcccggtataagctgacatttcgaccatcttaaaatttttcgggagctctgcttccaggatgtgcttggcacatggctcccggtcttcacagtcagagtcggagtcatcgcctttttgtcttcaggagactcgggcaatgtcttttcagagtatggcaagctcagccatgattccttcgtttaacgttcccgtagagactgcaggcccgtatttcttttggtccaggtgatcctggaggtcaccgtgtttcctgtacatcttatgtctcagatcgatggcaagacatttctggccccttcttcctccgagttcttggtgcacagagacgctctttcggtcctctcgatcttgagggccaagactccatttttggagtttgcccctctgcgggcctttccctttcgggaaatctgagcagaactttcgcggatcctgcacccttttctttttcctaggagtggaagtaggatttttcttctggttcccttcggagggataccttatagggctaggttccctagacttctgcttttgggcacttggcgaggattctcctggtgt

SEQ ID NO: 349478 - DNA, 898 bp, Cannabis indica
gcggtcccccataagaggcaaggtgccatgagggctaaatgggtgtgtcctccgtccaatgtaattgaggaccacttaaaaaatttggagaaggctgggtacctgggcggacttgagtgctttctccctaccccaaatcaccgggcaactagcccgaaggaagggtactgtgcttggtctggtgcccacacaaaacaaggggcgatgctgcctttgcacccgtacttcaaaagggttgtggattactaccgcctttgtccgacccagttcaaacccaagggcatcaaatacttttctaccctgttcgtcctctacgctattcaaggatggggtgtgccgtctttgcacgacatcaactggctcttcaatttgaagtttactcctatgcagagcaggtcgtggaacttctacttttcttagctggacgacaagtggctgacggacaccgttgacacggaggttagcaaaattggacattttgttaacgagtattactttgtggccggcatggagactactcatactcggtttcagcagatcccctcgtattgtcgtcctcccttcacattgggacttagggaaagggcccaaaaaattctccaactaccggaggctgctcaaaatatcactttgttgaccatagaggccaactttgtagagtaccagttttacccggcagattttgtacctaagtccatgaagaagaagaagaagaagaagaagaaatccaggtcggacaaggctgagagagtcgagcaagagaagaatcttattcaactgaagcgtaggctaagttgaagggtggtgccggagccaaacattatgctaaagaatagtctgagtaggagacggaggctcaagaatattcagagcaagagaggccacgcaagaagaagaa

SEQ ID NO: 349479 - DNA, 502 bp, Cannabis indica
tatatatgactttgatttggttcttttgataatggttttatagtactagctagctagctagttttatatatggtctattaaaatgatttttttaatataaggttgttgttgttgtcactcatttcaaccaactaacaaagttcacatgttactaaaaagtaaaaacaaaataattaggccccacctctatacatagagcaagtactagttattttgtgaactataattttttttttctaatcaatactaggggcaaattatattaaaattctacttgttttggaatttgggagaatttttttttgttattttttttttcataatagtgtatattataattatttaaaacatcttataaaattttaaaaaattttaaaaaaatttaacatggcaaaaacagagttcaaacaatctatttcacaagtatataaactctttaaattatatttcaggtatgttaaatttttttaaaattttttaaattttacaaaatgtattaaat

SEQ ID NO: 349480 - DNA, 614 bp, Cannabis indica
gtctaccaggccgttcttccttatgtccttccaaagttcaccgaggacttcaatgccccccagtatcgcggacaactttccctcatcaattacctgggaaactttggtcgcctctatcatgaatctgttgatgtatgcttgaagaggcttgcctggtctttgcttgacttccaccaggtctcccagatgcaacggaagttggcgagaggaggagaattgtgcatggaattccgaagagaaggctttccatgagttgaactttctaggggtcaacttgaaataccattgctgggcggcttccgaaagggtagcaggaaagattctgcaacacacatcccctcgtatcctctacaaatccatttgcttcttgaaatacatgaggtgggaaagaggatcttctcttcctgtgtacattttccatgttggcattttaaacttgtggggcaacaccaagagattgatcttgggagagaagggtgttccacgtgctcgatctagctcgagatcattggttctctgtccggccatgccttggaacatagttttcagttcgtctagctgtgcctgcacaactggactaacctgctcgacattctggtcgatttgaatcacat

SEQ ID NO: 349481 - DNA, 708 bp, Cannabis indica
atcggtgcaatatcagatagtgacaactggccatactttggggccaattgtgccaagtagaggacttcgacagggggatcccatatctccttacctatttcttgtttgtgctgaatgtttttctgctgtcattcgaagatttgaagagaagaagtggattcatggaatcaaagttgctaatggtgctccggttgtgtctcatatgttatttgctgatgatagcttcctttattgtaaagctacgaatggtgaagtaacccgtgtgttgcaacttcttcaacttttttctatggctactagtcagcaagtgaactttgagaagtcttcagtgttttttagtacaaatacggcttcagcaacaagacaaatcatttgtgctaggatgggtattccggaggcggatgagcatagcaagtacctgggccttcctagtacggtaggaagaaataaaaatgctgtctttggttatgtgaaggacaaggtgcataagcgaattcagacttgggacaacaagtttctttctagagctggtaaagaagtgctcatcaaatcagttgttcaagctttgcctgcttacaccatgaatgttttccttatccctgttggaatctgcaatgatattgagcgtgccattagtcaattctggtggagatctacttctaacaaggggattcattggatgaggtgggataagctttcggctcacaa

SEQ ID NO: 349482 - DNA, 1332 bp, Cannabis indica
ggttgagttcacaccggtacaattgatatggttctccagcaagctcatggaacctcaggccaggataccctagagtttcagctatatccacataattcaaactcctttcccgaaattgctgtttcaagggttgctgttctacagtgaaggttggtagctcataaagagcatgaattgcagctgtggaagcaggcactctaacccccctaactctcactttgtcatcctctctttcaggccagttggctaaaaattctaaagctagagtttggttgctacgctcagtgacatccacgaacttagtccactgcctatttaaaatttgatctctaatagacgcaaatgcaggaggaatgtttgcagtttgactcaggttaacaatgtctatccctctatcttcaatgaatgccctatctttcaatttcaaaaaccgctcttgagcatccatattggtaaacctcactctatcaagattagagcgacccctaggtggagtggatgatgaagctcccccttcttcactcactcttgaccttttaggacccatgtcacccaaattttcctaactttcaagatttttttaaaaattttggcagcacttccccttaaaaatccacttcccgggaattaattccctcacaatcaaacccaatcttactcacacaaataatattgaacaatgtatagagcaaaaatcccaaatatccaacaaactatccaaaattctccaacaattcacaaattcttcaataaaaattggataggaagtcttagaattaatacctcaatgagaatcctcctttaatcatcctccattgtagaaagcttgaagttcttgagaaagaagaagatgaataagggtttttgaaattttgggtgaggttttagggatttggggttgattttgagtgggaatgagtgattgatgagagaaataatggtttaggatgatttgggatgaagatttatggttagatttataggaaaagggttttggatgggatttgaagaagaaaaaatggtgtttagagaggtatttttgaaggtggtggttagggatttgaatgggagtgatttgaaattgtgtaatgtgttcccctttttaaactcgtcagacctttctcgccgcgaccacttaatgcctcgccgcggccaaattccgtgaaaaatcaagtctttctgtaaggcttaaatggccgcagcggcattacccctcaccgcggccagaattcgtgaaaattatgtcctttctgtaagccttaaatggccgcggcagccctacatctggccgccgccactgggcgaatcccaaaaaaaaatatatatattttt

SEQ ID NO: 349483 - DNA, 635 bp, Cannabis indica
cccaaaaaaaaatatatatatttttttttatatgcagtacataaggaaaaagaatactaaaaattgttttaccagttttctaaacaaaactagatagaacagaaaaagaaaattacactaaaacataaaagagttcaactaaatcataaagaacacttgggttgcctcccaattagcgctgcctttatcgtcgcacagctagacgtcgatcgagttcttcatagtggcgccagaatcatggcagacttggcttgatcaaattgacctcccaagtagagctttaaccgctgcccattaactttgaaagtattagggccttcacctttcagttccaccgctccataaggaaacaccttgaccactgtaaatggccccgaccaccttgactttaatttaccaggaaacaactttagtcttgagttgaaaagtagaacttgttgcccaggttgaaactccttcctgactaagtttcggtcatgccaccttttagttctttccttgtaaatcttagcgttctcataagcttcgttccgaaattcctccaactcatttaactgtagtaatcttttctgtccaggagcctttaaatccatgttcagagttttcattgcccaataagctttgtgctctaactc

SEQ ID NO: 349484 - DNA, 571 bp, Cannabis indica
tataacaatagagtcccatgttgattacggagcttgtatgtttcttgatttgggacgtatatttttatctggttatatccagaatatgcatccataaacaacataatcttggcccagcggttgcatccactaactggtcaatcctgggaagtcgaaaatactcttttgggcatgccttatttagataggagaagtcaatacaagttctcaaagttccattaggtttcgagacgagcacaggattggctatccacgagggataaaatacctcgcgtataaaatcgttgactaacaacttgtcaacttcctgttttagtgccccttgcctctcggaatccaagggcctccttttttatctcttcgctgggtagtttggatcaacatttaagtgatggcagataatcttagggtcgatccctatcatatccccatgactccaggcgaattgatcttggttcgctttcaaaaagcttattaattgctatttgagctgctcatccaggttcttcccaacgtacacacaattggtgggatttcccgggtcgagaataacctcttctaattcttcaat

SEQ ID NO: 349485 - DNA, 868 bp, Cannabis indica
ccaaaaccggaatttcggttctgcgctgggaaaaccaaaaattctccccttgctctcaaaaccaacccaaacactaccaaactttccagggtacctaatatgggtataaagaataaattcctggcagtaattcacaaaacaaaccaataaaacccaagttgccattagagatcaaagctttgaactcaaagctcaaacttgcataaaaactcaaaccaatcaacaataccagctgctaggaacttagtttaactcaattgaaccctaaaattcgaaccccaaacaaccctaactctaacagcccctgaaactcaatttcacatattcaacctaaacttaaatttcaagaattagggcaagaatttgctagagcttaccttggcttgatttcttcttaaatcccttgctgaaacactcaaaaaccagcagctaatcccctgccctgagctggttcgaagagagaaagaaaggaggagaaagcttcttcaatatggtgttttccttaattttcctaaatgagataattgatagggaaaaccaatttcccttgctgaataaatcagcttgctaggtgtcaaaaaactagatagccacctcaacatacacttaagaaaatgacttaattgccctttaacccaaaaccatgattttttaaaagctaggggtaaaatggtcaaattccataaccccgctcaatcccgataatttatttcctctaaaatattccccactaagaaataaagttctaaacttacccatgtgatcaacctagtcatccatcgcattttccgtcgtcgccgagcaaaaattataaaaataacatattttacatattaactaaataatacccctagagtttaataaaatc

SEQ ID NO: 349486 - DNA, 893 bp, Cannabis indica
ggttagagttggttaaggattattattgtgaaatcctttgccatcctgggaaggccaatgtagtggctgatgcccagagcaggaagggtgccgggcaggtaactagtataattgagatttcaccccaattagcagaggacatggttggatcatgcatcaagtttgtggtaggaaaacttcataacttgacactgcaatcagatctattagaacgaattaaagctgttgagttaactgatccagaattagtgaagatcagggaagaggtttcagctagtcaagctagagattttacagtgtcagatagtgggatgctgttgtttaagaccggggtttgtgttccttgcatactggcaccaccaagatgtaccaagatcttaaaccctacttttggtggagaaggatgaagaagaatgtgttagaattcgtatcttgatgcctaacttgtcaacagatcaaggctaaacactagagacaggcaggttttttgtagcctttgacacttcctgagtggaggtgggaggatatcaccatggacattatggttggattacctagaaccacaagtttattggattcaatttgggttgtggtagatcgattcacaaagtctgcacattttctaacggtaaaaacaacctttatagtggatcagtatgcagatttatatgtcaaggagatagtaagtttacatggtgttccaaagtctatcatttaggagagggatccgaagtttacttctaaattctagtagattcttcagtgatttatgggtactaacctgaaattcattacaactttccatcctaagactgatggacagtccgaaaggacaattcagatactggaagatatgttacgagcttgtgttatggatttcgagggctcctaga

SEQ ID NO: 349487 - DNA, 989 bp, Cannabis indica
gttaataatagtaagatattgaaacaaaagttttataaagtaaatattgtagtagtttttacctcattcagttgcagatttttcgtcaactctgaaatttggatgttagtcactatttcgtgtaatccaacaaaagattttggagaagattcatatgtcaagcagtttgctattgcgtttttaatttctgtttcgttactctccgcccttaaaatagagtaagtatgataattattataaatatagtatacaaaaatttattttttttgtaaaatgtgtagctataatagtatgtgtatttgattttatgagtattaccattccttcagtgcttctgcctcggggagttgaggattgattttgaaggtactcgtgtcgcgtgacgatagagacagccctaaatcaaaatgtatgtgttaattgaatttttgaattttcgcttttaaatatcagtagtttaattaatgcaataacctctcttggtttgaacaattagttttgatcccaatattatgggtctgtcttcgattacttctgctatttgtaagcattcatcgtggactttatgcccccacatcgtcaaacatactggtttgaagctacaactttgtaaagaaataaaaaaaaaatgtattagcataaattttgttaaatagtatttaatatatcgcaataaaaatgaacacaagggtgtatttatagtggtagattaaatgtatagtttacctttcatcaattaaatatatctcttgaattgtatgtagtccatagggagtgttgacttcttttggtgggttcattttgagtagcaatagccaaaatatctaataaatgtaaatattaaatagttagtcaatgaggaatatatatttatgaaaaatcaaattgtaaaatacctatggtttgctgaattctttaggtgtatgtcaggtcgtctaaacgggaatgaaaatcatagtttgtgctgatatctggttgtcttctgtttg

SEQ ID NO: 349488 - DNA, 574 bp, Cannabis indica
ctgctaaaatgttcttagatggaatctcaatatttgaatatatgacaattaacacatatatgctatgtttaataaaaagacacgccgcacaacaaatttaatatgttagttaaataaccacattggtatttgattcgagttataacagagtctataatgaaaataataaaaaaaaaaactacattaattctaatactattattgaatagttgttttcaatttaagctagatgttggtgtcatatttaatccactatagaataagtcaattctccttaattattaatgagatacattacatatatatatatagatatttatttatataaggcttgacatttactgagcttgttagtgagggtaggtgctcttaattatagatacaggacaaccccatgacacgagtctcatcatgagagcagagagagttgtaccacacactacatctgctctggataagtagtaactacttcttctatactactacattttctactttcttctctagctatatccaattccaaattatgaaagacgcaacctttttttttgcactgtgaaatctacattcatat

SEQ ID NO: 349489 - DNA, 918 bp, Cannabis indica
caaataattgattttaattaatcaattacagttctaaaaattagactatgtctagtttattaattttcactaagcaagggctaaattttgaagaaaagagattctaggttttatttattaattggaagaatttattatatctaattaataaatatattaaatgacaatattatttaataatttattttagttattaaatcattagtttggacatttaaatagttagaattggaaaattggcatttttgagaaaatagatatgaaaattgttaaaatttgcaaaataccaagtcgggcccattactctatggtcggccacttatgaggttttttccaattaatattttcattattttaatgcctagtaattcctaacctatacctagtggttacctaaaaatagatagtgatggctcacacttaagtgtagaatgaagagagagaaatcagatgaaattttgccttcagaaaaattgagcctcctatcctattgtctatagccgaacctgtctctccctcttttcttcttcactttttggaaaccttgaggtatagagtgagtgcccacacacatcaagtggtatctcaatcatagtgtggaagattgtgaagaatccaaattgaagagaaggacattcgggctcagatcttggtgatactctgcgatagacaggatacaagggttagagatcggagtggaaggagacatgttattccgctacacccaatgtaaggtttcctaaactttatatgtctttatttcattgttttagaaattcatattaggatgttaatcaacatacatggtagtaaatctagatcctggtaaaacatatttcaacaactcgcctcagagccatagtaatgatttactttcatgaaatatgaattaaaacgatgatttgtgttaatttggat

SEQ ID NO: 349490 - DNA, 477 bp, Cannabis indica
ataatacacagtatacaaactaagtataatagtcgggcaaacccaaaacaactaaaagcgaggcgtccatctcgctataggaaggcacatttctaatactttcactaatcagcttcagacatctttcaatgagattcatagtctcgacgagtcagttctctcggatagaagctgaaattcaaatgacgttagctgttgaagtttaccttttcgtcaagaactgcgattgttagatggattgttgtgtcttcaataacataaaggacgtgatttaccatatcaacctcagaagatatgggaaactttagctcgctaccagggttattgttgctatgctcttagcgagatgtcccagaacgatacgctgtataacgtatttaatacacgtatgtattgacccagtaaaagtggaccaatcacaattgtgtgattttcaaataataactgttgggttttatgccctaaataaaactcttt

SEQ ID NO: 349491 - DNA, 1048 bp, Cannabis indica
agaatttttcctgctaccctgccggaagtcgcccaacaatggtatttcacgttggcccctacaaagttcaattcatggaaagccttctcttcagaattccgggcacaattctcctcctctcgccaacttccattgcatttgggaaacctggttgaagtcaagcaaagaccaggcgaacctctccgagcatacatcagcagattcatgacggaggcgaccaaaatttcacgggtaactgaagattaaaagttgtccgcgataatggggggcattgaagtcctcggtgaactttggaaggacataaggaataacgggctggtagactcaatgagtgattttcttgaccgtgtcgaaggctccatcaagtcaaaaaagccattcaacgagcaaaacgtgagcaaaagcctagcaagtcgaaagctccttttgctggaacgtccgcccaactcctccattacccaaataattgaagctcaagtggtaaaagttccaacaacaacaataggtaagggaatgggaagaagggaaagttcgccgacaaatccgaacaagctccctgggagaatcaagcaaagtacactagattcactatcttgactgaagacatagaaagtgtttacatggaaactcagtcgctggccccatataagaagccagtgcccgtgaagaaagatctcagcaagagagacatgacaaagttttctcgattccacagagactacgactatgacactaatgaatgcaacaacctgaagcgggaaattgaattcctgataaggaaaaacaacccacacctgcaaaagtatgtcaagaccgatcagggtcagagaaacaacaataaccaagatttagtacctccaccagtagatggacatctgcaagtcatcgttggaggctcgcatattgctagagattcaggaaaagctcaggagaggtatgcccaatagcgcagcacgagcaagaggaagttattctggccgtagaagaaaggaaccccaaagttccacgagcaggagggtctaccataaccttcaacgatgaagacgct

SEQ ID NO: 349492 - DNA, 701 bp, Cannabis indica
gatgctttgtgaatgttgtatatgtgttgttactggagttgttggacaggtttggagagattttggttcgaatttggggaagaaactcgaaatttcctagtctgccagaaccggtcgaccggttggttctggtgtaccagaaccggtcgaccgattacaagcaggggaaattttttgggttttcctcgcaattgattgttggctcagcgttgtacccagtatccattttaggctatttgagtattatattgtttggcttactttggagctactggaagttaggtttggtccggttatggaaattagggttagttttcggagttttagtttaatgtatttattggtttttgttgtcgtgacataggacccaggattcccaagctttgattccatttagaagggatgcacactaaacttctggactgaggtaagaaaagtattaaatactgtataaagtaatgttatgattgttacagtttcgattaagatcgaaatcttgtcatacgttgttgtgacttaatcctaatcaaggttaacgatatgtactggatgtgactcgattatgatcgagggaaataataggaaatgattattatcgttgtggctcgattataatcgagtaaaagaaacggttattatcgttatgagtaattactcctgaaaccgtggataggtttcttacttatcgtttgttgtatcgg

SEQ ID NO: 349493 - DNA, 727 bp, Cannabis indica
agtatttttttgtcactgatcgataattacttgtaccttataaaaaaaataggtctatgtcggcgggtctggtctcccgttattaatctatctcggtgggtctggcccgctataaatttcaatgccaagattggtggggaatctatttcggtggtctcgacccttcgttattggggacactcttggtgggcaaagcccgccgttaattatgatgtaatcttggcagtctatgcccgtcgagataggtacatttttatcctaaattatattttttgacacctatctcgacaggcccaagcccccgttattggtcaatattggtggtctaaagagcctgtcgagatagtgtactggtggaaaaaaaaagtaattcccctactattacattgattgcatacaaaaatttacaattcaaatataatttgcaaaaataatctttcaatacttgaaataaatgtatgtaattcgtcttttaatataataaagtattaattcataatatatattgtaattagttcaaaagtttgacaataattataattagtcatatatacttaataagctataatctaaatcatggcatatactcagttaagtaggagatctattcttcacgcactttgttgatctcatccattgagtatgttttctgataataacacaacaatataaaagttagtcaaattttatatatatactagtttttttatgattcaaaatttaaatt

SEQ ID NO: 349494 - DNA, 869 bp, Cannabis indica
ttatactgaaaaagggacaaaagattcataagagaaaaggccccagaactgtatcagaaatctaataagattgactcgtggactgtgcagaattttaactgcaaaaccacgttaaaaaccttcatgttcttgtttttttctttactgtttttattttctgtgcaagtttatcaccatttaggctcatatctggttaacgaaaatctgcgttaacaagaacttcaattgaagaaagagaaaaaaaaggtaaaaaagaaaaattctcaatgaaagacctcaaaggaagaaaaattaggaaaattactggtaaaaaatattaaaattaaatgtagattttttatttatcttgttttatttggtgtgatgaaaggaaagaaaaataatgtaagaatgaaattataattcaatatagtttttatattttcaagtttaaaataatagttataagtaatttaattaagaatagtttgtggtgtaaatatttaattttaattttagcttgcagataaatacttaaatttaatttttgacgataataatatctaagttatatttttagaactttcgtacttactgtcaagtcattatccacgtcttatttttttattggtatatttaaattaattcttaaagggaaatttgattttctatacttagaaaatcaaaaaaaaatttcctaaaccaaaatttaaacctaaaaaactatcctttttttcaaaccccaaaataccccctcacaatattctctctctctgcatcatctctctctccctctatctcaccccaaccgcccaccctcacccgaaccaccctcacccacccacgtcaaccccaacgccgatcaccaccctcacccccgtcgaccacga

SEQ ID NO: 349495 - DNA, 500 bp, Cannabis indica
gatcttgggttaattgttaatttatataacattttttattaaaaagaatgaatagtattaatgccacaacatatcatctatacaaatttatagaatggcattcttttctcttcaatggtatagtatttcaatattttaccacataatatgtctacctcaccaagaatcctctacagttttaccaatgctctaatctctttactttttgacataaataaaataaaatttaaacaaaattttttttttttttgcataaaagtatattatataaactagataaatgttacgtgccaagtcacgtatcttaattttattttagtttttagttttttctaatatcataattttaaaattaaaaatatttaatgtagtgataatcattgaaatttgaaagcataatagtgatttaaataaaaacaaaaattactattatactttgtactaataattaaaaaaaaattattattcgtcctaaatttaatgaaaatgctcatctggtt

SEQ ID NO: 349496 - DNA, 987 bp, Cannabis indica
tgtagatcatctatagaggatcattaattattgggattataacaatggataattaatatcgtatctatatcatggaacatgtagagcgttctatgtaactgagagtgcaattccaagttctatggtggatgcagcgaggaattaataagttagtggatttacttggtaaatactaggtctccttattggaagcttggttatataggcccatggtctccatactagttaggacaaactgcttgtaagaatcagttaattgattttagttaatcaattataattctaaaattagactatgtctagtttacggttttttcactaagcaagggcttaaatgtgaagaaaatagatcctaggtcttatttattaattaatagactttattaagtctaattaataaatatattaaatgagaatttgtatttgataattaattttaattattaaataaatagttttggcatttacatggttagaatttgaaaaatggcatttttaagaaagtaaggaaagattgtgataaaatggaaaaattccaagtggggcccaaacatcctatggccgaccacttatagggtattttccatttaattttttcattatttcaatgcctaataaatcttaacctaaacctaggtggttgcctataaatagatagtgatggctcacaccaaaagatgatgaaaaattcaccttcagtcaaatttttcttgagctttcttttttattaatttcgaaccacattctcttcttcttctcttcatattttcataccttgagtgatagagtaagtgcccacatagatcaagttgctcttcgatcatattatgtaagactgcgaagaatccaatgaacaagaaagagaatcgggctcaaatcttggtgatactctgctacagaaaggatacaagggttagaaatctgagcggaatgagtcatttaattccgctgcacccactgtaaagtttctcaaactttatatgtgtt

SEQ ID NO: 349497 - DNA, 1604 bp, Cannabis indica
ggattggatcggatgaggaaaaaaatattggattggatcggatgcccaccccctagtattttgtatgaaaattttcttttaaattcaattaaggaatttttaattaaaccacacatttcttaaactaatagattagttagaaataagtttataaaagcacacacgtggcgtccctatgggtcaaggtgttacagcattggtcattgtattctcttctttgggaacttgctttatagtatagcctttaagccgacttaataagtcatgaatcttactcaaataggctatcatcctttcgcctcgggctgtatattcaccttgggcttgattaacgaccaaaaaagaatcgttgtttatgtccaggtaatctgctcacactttgtgtgctagcttgaggtcaacaattagagcttcatattcaacatcattgttggaggctttgaaaccgaactttattgtcccgtgaagctgttgcctccctaggtgtgatgagggcaaagcctacaccagacaggtggtcagtacagcttccatcaaatgcaacttttaggttgaattttctttctcttgcttcttctcttgttcttgcttcttctctggctcttgattttctcatgaatcttgagagactttaggagatatgcctgtacattcagccacaaagttagtgagagcttggccttttatggccactcttggttggtaagtgatctcatattagctaagttcaatggcccacttaagtattcgatcctatgcttcaggtttttacaacacctatcgtaacgactggtcagtgtatacccttattggttgagcttagaacaatggtcttagctttcttgaagctaagatcaggcaatatgtcagcttctccatgaatgggtatccaattacaatgtcaataagccttctgctgacgtaatacactggctgttgaacaccatcttcttctctaattcggactgcacttacaacatattttataacaattaacaaccaagtatatgcccgattccttattgtctagaggttttgataggataagaggttgaactagttgcttctttagctattggaatactgtctcacactcatttgtccattcaaatttcttgtttcctctaagtatgttgaagaaaaggacacacttgttcgtggattttgacacaaatctgctcagtgctataatgcatccagtcaggtttcgtacttcttttatttttgtgggtgacttcatgtccaaaagggcttggatcttgtttgtgtttgtttcaattcccatggcattgactataaagccaaggaacttgtctgagcctactctgaatgaacacttaaggggattaagcttcatgttgtagtctcgaaggatcacgaagcattcattgagatcttccacccaaccttttatgacttgaccagcatgtcatccacatatacttccatgtttcggctaataagatctttgaacatcttgttttcaagtctctaataagtggcccctgcatttttcagtccaaaaggcatgactttatagcagcacaggccaaagtctgtcatgaaacttgtatgttattggtctggtggatgcattttgattt

SEQ ID NO: 349498 - DNA, 694 bp, Cannabis indica
actacaaaaccacataaaaccttggtgttatttttgctttattattctttcttagatttcggataattttttgctaatcctatcacgataataggcttattatcattaaaaaaatttgcgttaatagtttggtgctttcattgagagcttacgtgaaaaaagctcagaaaacatccctcataaccaaaaggaaattttttgctccatggccgataacagggaagatgataataatcaacctgaagggactgctcaccgtcctgaaaaaaaagccggcgggctcacggaggcctcccaattcacggacaacacgatctacacggtcaacatgttcgaggagaagccaacgtgaaggtgaccaaaacccagaaactgggaatgaagtgcccaacacagacgctaccggttctcctgggagtgggggtgcctatgaccccaccaggtatgtaccatttgttgagttggaaaattttttggaattattttaccaggatctagatttactaccaagtatgtttattaacatcataatatgaattctaaaataatgaaaataaacacatataaagtttagaaaaccttacagtggatgcagcggaatattatgactcctcattcactcaagtgtttcaaaatttagagagaagaaaagagagagagagaggcgtgtagtctttttgagagaaatcaatgt

SEQ ID NO: 349499 - DNA, 520 bp, Cannabis indica
tccgaagtttacttcgaagttctaacaaagtcttcagcggcctatggttaccgaactgaaattcagtacaaccttccatcgttaaactgatggactgtccaaaaggacaattcaaatactagaatacatgttaccagcttgtgtaatggatttcaagggctcttggagcaagtacctgccgctgatagaatttttgtacaataacaactaccagagtacaattgggatggctccctatgagttgttatatggcaagaagtgcaaatctcccattcactgggatgaaacgggagaaaggaaatacctaggtccaaaatcagtatagcggactaatgaagccatagaaaagattaaggccagaatgcttccctctcagaataggcaaaagagttatgcagatccaaagcgcagaaatgtagaattttaggttatagatcatgtattcctacgggtgtcttcgatgaagggagtcagacatttcaggaaacaggcaagtcatgccataggtttacaggacctt

SEQ ID NO: 349500 - DNA, 1199 bp, Cannabis indica
aacgggccttaaaaactgtctcccttaaacgataatatctaaattgtctggaaaaaagaaaaagagactgtaaatgtaaagatagaaagaaaaataattgtagttgtgaactggttgaactggtcggcctaatcaatgcagggtggaagacgagggccccagcgctcctcgagcaaggcgtcaagccctttcttcttctcccggaagtgaacaaggacttcctcaggcttgggataaaattcgagcttgatgttctggccatttgactgccaggccatgtaaacgccatcgtcaaaatgcttgacgcagtgcttgcagacgacgggggtcaggagctcattccttttggcctttttcaaggcttggtccttaaagtccctcagctccttcacttccacggtcaggttggtcgtcgacagcaagtctgactggtgcagctcctccaaggattttaacttgcagccagctcatccatagcctccttggcttcccacaactcccgcttggccttggccacacctcgacctcaacctttagctcctcctggtgcctcgcctccgcctgacgcctccctctgctcgggcctcctcccggaatgccctcctctcagttgataggtcccgcagactcttcacagcctcatccatgcccccaaattcgaacatgacgtacctgtggtcgatcagggtctttgagaggcggccggtctttgcagtgatctaaaaaaaagaagcaagaaggagatcagatgccttaagacaaaatacaagcaaaaggagaggaatggatcgcgaaaacttaccgcagccagggcagcgctgatatcctgaacctggtaaacaaagttcactgagccacaagttgcgtatctcttggcccggaattgactcagatgggagacaaaccggttggtcatctcagaggcaaagggggcgagagtaggaccgatgaagcggttgaaccagtccgtcagaggatccatgttcaggtcccaggggtttctgaaggcatcctcgcgcaaggtgttctgttgatccttccgcaaaatcttcttcagggcctccacctcttcatgtccccggctgaactcgtccagggcatagttatgtttggcgattcggagcatttgcctctcttcgttcgtggggatcggggtgagaacaatgccatgcggcacggtgtactcttccgcttccgaa

SEQ ID NO: 349501 - DNA, 607 bp, Cannabis indica
attacatatcggtctagtcatctataattaaattatacacgacacctatactacatgccatccacatatgtgattcgaatcaaaaccacacacagtaaagtataatatttagtaaaccataattagtagttctatattaaggatccctttactttaatacactactaacttattttattcatattgtataatcttaattctcttgtataaccttacaaggttctaccatctctaaatgaataagaaattttttgatattaattaattatacttctataattaatgtattcatttatcatacaactacatttcatatattctataatatattatccattaattacttgcttctatagcataaatcccaacaccaataagccacaagagaagcaaacatattgagagaaagtaccatctactaagagatatagtagagagttgtgatatgacggtcttgaagattatgttagaacataacctggtagatctattcacaaagatgcttccagtgaaatattttatgggtcatataactaatatgggattaagatagatgcccaatttacttttaggacaagtgggagattgttagggtttatgccctgaa

SEQ ID NO: 349502 - DNA, 813 bp, Cannabis indica
cttttaacgagtatctaaatctaatttaccaaaaaacttaatataaaaagaaaagccaaaagaattatttgtgattgagttgtgcaagataaaatgagtaaaaaatagctaccatcttgaggtagatgttagagagtctcacattatgtataaaaactaaatacaatacctaaaacacatgaactactactctcattgtcaattaattatgagatagaatctcatgcacttttactatatactcacttattcttacttcctcaacaatacacttctccatattctaacaaatagtgtttttttagcatattaattatattaaagtactgtttattgaattatattagctagtgatactttttgttttttaattagaaaaggcaaaacccaaaatagcaacatgcaatctagaaattgatagtcaataatggatatattatatatacgatcatgatacattagatatacaatatatatctaaaatatgaatccaaacaaaacattaaaaatagtaatttgatatcatttttaaaatagtggatttaatgccaatttaaatagatatgaataattaaaaaattgccacatcaatatcaatatatgtatatatactaaaaaaaatatttttaatgataactttttaatcacaatacaaaatttttgtaattaaatgtaatttttaattagaatgaaaatttaattgtgacaaaaatataatatttaaatataaattgtcactaatttagttttagtcacaatattactagaagtacattttaatcacgaatcataatttttgtaactaattacatt

SEQ ID NO: 349503 - DNA, 514 bp, Cannabis indica
tcgctgagaatggagccaagttactttgatgatgagcagttgcttgtcatttgacttcccaagactagtattgttttaactttgataactatattttttggtgttgagatagtctttctcgcacgcacgctatcttctagcaagataaacgcctcgctatctattatcttgactcgtcaaactatctacacttagtttgtatatcgtgtaatatacgctaagtgtttttaatgttatcatttctcttccacgcatagaggttgaggcctcgtcatgcacacgtgcacccacatggtttctcgtcaatacataaattagcagtttgtacgtttctgtctcgcagagggctattcagccaaccgagttataaacatactttacaaattatgtttccaacaagttgttccatgctaagtgtactttcgtttgcgtgtttgagttcttcgttcttcccagctcgacacgtgtcgtccttgttgggttttgtaccctcaataaaactcatttcaatata

SEQ ID NO: 349504 - DNA, 575 bp, Cannabis indica
ccaattagattccaactacttcactagctatgattgatccacgtacattaacatttgattacgtccttaagattaccagtaagttgtattgtggagaaatttaatttttatttctattatagaagtcaaactcatttattgttttgagaatacatctcgtatggtatattctagagtttcatactaggcctagagtttaaaattatatttcaggtcattaagaatattttgtgacaaattcaactatagtatttatggctaagaactataagagcactggtcgaaactagcatatcgacattaagtagttagccataaaaaggtatgataagtggtcattaagcacacaatactgaattgggtaatcgcatatccttgactaaagacatgtcgcaacgcaagttcaaggatcgtaaagtaaatatggtattcagttacccctaatacagtttttggctgtaaaactaaaattatttaatgaaactcttaattatatattttctcatatttatgcgcatcttaattttatatttgagaaaattttaaaggaccagaataaacataaggtttatgtt

SEQ ID NO: 349505 - DNA, 962 bp, Cannabis indica
gaggaccgacttctggaaggagttacaagctcgaaggccagaatccttagtcaaattcttcgccatggctgaaccccacaagagaatcgagaattctctggcagagttagagaagggcaaagagaaatgcaaatcaccaataccgcgttcacgatctcgcaatccccgagggaagaactccaggggccgaagcccaaggagacgtagcccgcggagacagcgaagtccgaagttggccaagtctcctccaaagaaggaatcctcgccgaaaaggaagggtggacctcgtttcgtcaattatactgaactcgtagtaccccgagaccatatctacgcaatcgaagaaagaaacggagtcttcaagaagccgccccgcatcaggggaaatcgtgacagatagaacccaaaaaattctgtaagtaccacaaagacattggtcatactaccttagaatgttgggtcttgcaggatgaaatcgaggagctgatttggagaggaaagttcgacaagtataagaagggcgaggaaagtcatccccgagcggatgacaaaggagaaaactaaaatgcgagtggttccaaaacgcctagcaacatcctaaccatcattggaggaccccatatcgcaggagactctcgcaagtcacaagagcggtatgccagagaagctaaagaaaagttgttcagtaatgtcaacaatcttagtgagcggcccgagaaactatttaagaaggaatgcgacgacatcacctttatggagagtgatgcgagatgggtccatcacccacattccgatgcactagttataatcgccaatattggcggggataatgtccaccgcataatcgtcgacaatgggagttcagtgaatcttttgaacttccaagcattcaaacaaatgggattgcaggagaaggacctgcgacctgtgacgtcgagcatctatggttttacaggcgacgt

SEQ ID NO: 349506 - DNA, 879 bp, Cannabis indica
aatcacgtaatacgcctatgttagttagggtgttacaacctgacatcgactttatctcagacataacagccttcccctttccagcatagggatgagatggccgaacaggtgaaatgggctcccttaggcgaatggcatgttcaacaggcctgggcgtggccaggaatttcttcttcctcttcaaaggagtcacctgctcagcctcagcctcagcttcatcttcaagattcatggactcctgagcatactactttgcccgggcacctcccttcaacttagcctctcgcttcagttgaatcaactcattctccggatgagttcgttcaggtcggccagcatcagaattcaccttcttccccgtcacggacttagaataaaagtcctctgggtaatgcccgtactgcacgagattttcgtcggaggtcaactggattatattcctgtcttccgccggcaaccgggcaagtttctgagccctatccccaagagtaagggtgaggggagaacggtgatgtcggaatctgctgaaattgcgtctgggtgatgctcgaatccttcaccatgaaatactcatcaacaaaacgccctattttgctgatggccttgtggtccgtcccgctcaaccaattgaagcctggctaagagaagtaaaaataccccgacctgccttgcttgggggtagacttcaggtcgaagaaccaagcaacctcgtggggagaaggagcatcccatccctaggaagcgtagaggacgaagagagcggacaaatacttaatgcctttgggagtaatctgggccgggcagaggccgaagaagtctgctacatcccggaagtacttatgcaagggcatcagcaccccttgctggccgtgagccccc

SEQ ID NO: 349507 - DNA, 619 bp, Cannabis indica
ctctactgaaattcctagagagctttcttctaaaagagaaatagaacgaatacagacatcattattgtaaatacttgtaatacttaaacatttgtccaaggaggctaatacttttgactcgtgaactaaggatctttcacgcctgaacgtcgtaaaaaatttgtttgtctattgtttaatatcttttattttcttaagctctatttaattggttttcaaaaatctcggtaaatattttggtgctttcattgagagctgaggaaagtttagtaccctcatcatgcttcaaccatggtgtacacccaaaaaaactctggcaagaaagctctcctggatacggttatggaggaagctaatgttgtgattattttaccaggatctagatttactaacaagtatgttgaattaacattctaaatatgaatatctctaaaacaataaaattacacacataagagtttataaaaccttacattgattgcagtggaataataatgacttcttccactcagatctctaacccttgttcctttctgtcgtagagtattatcaagatctgagcctagactctttctctccttcaggttggttaccagcgtcttccgcactatgattgagt

SEQ ID NO: 349508 - DNA, 546 bp, Cannabis indica
agggcataaaacccaacaaccaacaccggtagctgcagcagaataagtgttaccatcagctcctgatctagtggtgggtaacccgggatttattctgccacatcaagattcagtgtttgaacattttgtcaagcttcaacctccaacatttcagggaggtattgatattatcaaggctaagtagtgaatgagaactattactcgcatcttagataacatgggggtgacagggatagaacgagttaactgtgctacattcatgttacaaggtcatgcccgcgtctggtgggatattgtggggcaaaccagaaatgttagtattatgtcttgggaagagtttaaaaccctgtttgaggaaaaattctataactttgctgtaagaacttcacatatggaagattttgtgaagttgactcaagggaagatgatggtggccgagtataccctagaattcgatcagttttccaagtttgctagtgatctggtaccaatggatttcacccgaaaataaagatacgtaaggggactgaatgccacaatcagtcg

SEQ ID NO: 349509 - DNA, 622 bp, Cannabis indica
aaattaattaatttaattatgatttttagaattgaaataggaatagtaaatttctaaatacaaaactacacaaaaaatcggaagttaaatccatgaaaaagcatgaaaaatcgaagaaaaatgagaaaattacaagctatacggacagtatgctgagcatactgtccgcgcgagcgccttggggttgcctgccgagaaaactccgcgcagggggggatttgcagcatttacgcgcgcagaaggggttttagacaccccgtgcgtgttgctcggacaaaatcctgtccgaacacgcgtatgaccgaggttcactcggttccgcacgagcgtgggtgaggcttcatcccgatattttttttcgaaacttcaaaaaatcataactaattcaaattaaatcgaaatggagttctgtaaaaaagtaacttgcttaatttttttcatactatccaataaaaataattccaggaacaaaatttcaattattttttacgaaaattcacaaacatcaatcaatcatcatataacactcaatacaacatgaaaccatccaaataacaaacaatcattttaaagtccaaatttcttgcaagaaaatcaattaccatggctctgataccagttg

SEQ ID NO: 349510 - DNA, 1790 bp, Cannabis indica
aacctcctccatggcagcaagacgattgttcacttgttgaacctcatgcttgacctcatggacatctgtaggagcagaactcaaacttgcaccagcagcagcagcagcaccagctttaggactcttggaaacagctccatcaaagtacttcgagggttggaagatggtgccagtaaggggaggctcaagtgttttatgagagtaggccacatctttctaagaggacagaattttatagattaagttaagaaaaacaagcttatgattatgctttttacctctctgaaatgaagaaatatggcccaagattgaagaagccagatcaatggatgcccccgaggtgatacgaaagagaaaggatgccaaatcttgagataccacaattttgttggaattgggaagccaattgctaagtgcaaacctcatgagtgatgcatgagcataagtgagatgtgtaatacgaagactctgcccagatttccattcaacccgtgcaccggagagttcagagagcatcaaatggtgatccatagacatgacaacactggacacaccttcgggtaattgcaaagccctagagatttccttgacagtgaatgaaaaccaatgcccccgaacatagactttacaaaaaaatttagagttctcatcaagcaaatcattagtcagattggcatagaattctttgacaatactttcgacatacccttcaaaattagtaagagtattttcccattgatggtattgaacaaacttaacaatgccacacaccctatgagcatggatatcataatttctttcactctcaaactttcgggtagcataaatattccaatcacgctgattatcacggtaataaaatctggaattgacagcttgagagggagagatattaccaagagatgaactctgcataggctgctttcctttggcagcagcaatggctttggctgcagaagaagcacgagggcgtgctagagtaaatttggtcaatggtggctcgagatcgagatcagtttcctcattgtcagaggagacaccaaaatcttctagaagaactttttcagagggaatagacaaggatttggtctcagagtcatcagaggggacctccattggttcttcttcttcaaaacttgaaaaagccaaaggtggattcaatttcaacttcttggtaggaggaattggtctgtcatggcttcgtttagtgcgaagctccttcttgagtgaagcttgctgggcacgggtgcaagaagatggtcctattagagtggttgcagcaacacccttacctgatgcagcaagaggcgatgcagtagcttgaggaggagaccccttcgacgataaagacaacgaagtgcaaaatttgtggggacacacaaatttcctagccacttgttttggaactcgtttcgacttgggcttcacagtctaagattcacgctgagaaaatgatgaatctcctgggtttgatgcagttgcagcagcagggagcaagattagagcagcaggaggagcattcgagggggcgggatcagattcttccatcctttttggttgccctaggttctttgtcttagccatgggaatctaaaatatagaaagaagaacaaagaagcagaaaaacaaaggaataggaatcatgtaggtggtgagaataaatgacaaaagaagttagtttttataaacatgtgagagtgaagcaaaaaaggaaaccaacttcaaattttaaaaactaccaatccacaaacaaggagaaactgccccactctttttccaaaattattttt

SEQ ID NO: 349511 - DNA, 2435 bp, Cannabis indica
aggtggaggtttgcatctaggtttgggtcctgggtcgtgagtcatgggtccaggtccccgattcaagtcagggtccaagatcccagtctgggttagggtcccagtctcagtgcaggtcccggtccgtgttcggtactggtccttgtcttgggtctttgcttggtctaggtttgggtcacaattcggttctcaggtctaaggtctaagtatcgggtcccggctcccgggtctcgggtcccggtcccggtctcggtcccggtcccagtcccaggtcccggtcccggtcccaggtcccggtcccggtcccgacggtcccggtcccggtcccacggtcccggtcccggtctcggtctcgatcttggtcccagctcttgagtctcgatcctcttcctagtctaggttctagtcctagtccttgttcaggtctttgtcctagtctgggtctaggtcccatacctgatatcggtctaggttcgggtctcgggttcgagtccgtgttctagtacgagtacgagtctgggtttaggtctgagtctgggtccaagtttcagtccgtgtctgggtccgggtcttggtctgggtttcggtctgggtccgggttctggtataggtttgggttctgggcctggtcccgggtaatgggtcctgggttacaggatctgggtcgcaggtcctggcgcaagtctgggcttgggttcgggtgtcttgggttcgagtcattattccgttctgtgcctagatctggttttgggcccatgtccaattcctgttccacgttccttattccagttcttattccgatttcgggtctcggatcagagtttgggtttgggtcctagtctagaaatgtttccaggttcgggtcttggtacgattcccatatctagacccccactaggggttgggtccaagccccatgtcgtgtgtcaagatctggatcccaatattcagtccgattcaaatcttgggtccctgtccgtgtccaggtttgggaccgagactggggttggggcttgggtcactgtcccagtccttggtctcgattcttgttctaatttttagtttgggaccccaatctaggtctgggtcctgggtccaggtctgagtctccaatccaggtccaggtcctgggtccgggtcttggtccaagcccatgtctgggtttgggttcgtgtcccgagtcctgattcaagttgtaattcgggtccgcatctcgtccggctctagttctgggtcctagtcagattccagttcctagactcaaacccagtctttgactcggacccaagtctggggtacgggtgtgggttttggtcagggtctgagtccgggtctgggtttgattccgggtatgggtcccagatctaaagaccgactacgagtcagttctaagccatgaggtcagggtcccaatctagttcgactttgggtcccaggtcctggtccgggtcctaggttacggtccgaatctgaggtcgggtctcggtcccaatttttatgcccgtgtcacggctctaggtcccccatccaggtccaagtcctaggtcccggtctgagttcgggacccagtccgggttcaagtccaggtccgagtctgggcttgggttctgatctcaatatgtatccagatctgggtttgattctcggtcaaggctcgggtccgagtcccgagatgtaggtctaggtcctaggtcctgatctgggtccattcaggtgtgggtccttctcccagattcaatttcgattcagtgtctaggttcgagtttcggtctgggtctgggttggggtaggaatcctggtccgagtctaggtctgggtttgggtccagttctagatcccggtctgggtgtgggtttaggttaggtccaatgggttaaggttaggtccaagttcgcgtcctgggtgcgggtccaggtctttgtgtgggttagggtctcggtccgaatcaaggtctcgagtttcaatctcggtctagggcttgtttgggtttgagtccaggttcgtgtccagatccctatctaggtccgagtctgggtttgggatcgggtcccaggtttaggtcctggtctgggttcgggtccaggtctcggtcccgttctggtacacgaatgtgtttgggcccgacttttggtctcggtttaggtcttgggataggtatgagtttggttctaggtttgggtccgggtcctggtcttgcagttctttttcagtttctagtttcgggtcccgaatatttgtcagggtctgggtttgggtcctgcttctggtttcggatccagtttcaagtcacagggtacgagttcgggtcgagtttgggtctgagtctgggttcgagtcttgatttgggttcgaggggagattcaggtccgtatttcggtctcggttagggtatgaggttgggtacggttttcggttctgatctgggtcgaagcccc

SEQ ID NO: 349512 - DNA, 1230 bp, Cannabis indica
ttcaattcaccccccccccccctcttggaaacatatcttgggctaacacaaacaaacatacaattcttttcaactaattccgataagggtgtagaaatcttggcgaacccttcaacccttcaacaaccactttaccacatacactatgtacctcattgtacgagtgttggtagggtttgtttagtaccctgagtaccactgagtgataccccatacttgtactggtatcaccgtaatggactccttaacaatatatactataccaatgcactttgtaccataatcgtacaagtgtttgtagtgaatcaaacatataagcatgcatatacacttaacatatacatacttcgcatattcatattacacattatacacaaatcttaccttctttccagattcaagtgagttggctgaactgaacagaaagtctcctactggatggatgccctaatcacatatttaaaccgagtaaatcacatgtccaaaaccctaatccgggaacccgaacctacaactcaaggttctgttataatcactagggactacactatcttagaaaatagggaaacacccaactaaggcactgaaatgggcaagaattgagaaaacgggctattcggggaacctgcaaaaaccggttaaccagtttgtaccagttttccccaaacttgctcaatactcaaccaaatgctaccaaacgttccagagtacctaaacagggcatacacaacatattccagccaataaaacccagaaaaactcattgaatcaaaacatgccattaaagacctaagcttgagtttcaaagctcaaacttgtgaaatttcaacacaatacactcaaatcagcaactagaacctagaatcaacttaaaatgaacataaaaactaattcataacctaatcaaaccctaacagtctcaatttcctaaaatctcaagttaaaaccaattcaaaccttgagaaaaacataaccaacgagtgtccagggcttaccctgattaaaacctccccaatccttcctgaaaacacaaaactcagcaacaaatcccctggtttttggctagttcgagaagagagaagggaaagagagtgaagttctattttttggtcttttcttctttttctcaaattatccaaaatgcaaataaagattaattaattaatctttggctaaaatgctagtttctaggtgtcatcatcctaggcagccaccaaaccacccacttga

SEQ ID NO: 349513 - DNA, 641 bp, Cannabis indica
aaaaaaaaaaaaaagacaagtaataaaaaagatttaagatttattttaatagaaaagatttaagattaaagatgagtaaatataaaaatatttttcaaataagatgtgtaaaataagattattaagatattagaatccacaaaatacaagtttaatagtatttataagtatgttgattcccaagttttagatatagttgaaataaatcatactatattttctatttaaacacaagttgttttcaaaaaggtaggatttttacttataaaatatataattttcaagcattaaatgtgttacaattttaagaattagatgtaaataatttaatgaaagacatttaatcaaagaatatcatatttttacacaatgaataactaaatgtaacatgctttaacaataaaaaatacatggtattgaagatgaaaaagacatttttaatagaaaaattcatagaaaatgttgcataaataaaaaatcaacatacaacacaaatattatctaattacattttgtttcatcatcatcttaataatcttaaaaaaagattagaagctcataactagattgaaataaaaatttacaaactaacatatttgacatgctcttcgaatgcgaatgctagatctgtggtggtggcc

SEQ ID NO: 349514 - DNA, 943 bp, Cannabis indica
tttgcactttggcccactaggtttagtcctccctttgcaaagcattcagctagtctgattttaagtaacaaacatgctcctactgacgtggacagctcaatttcgtgttcccacgtcactgtcagaatgctgaattcgtttcagcattgcttcagcaatttgccccaatttcagcttttgttcccacttcttccttgcttccttttctttttcctatcaatttaattcttccttttcaacaacaaacacgcacaattaattagaacaaacacacataacaatatcaatttttacaagacttaaaagttagcttactatatagaaaatgaaactaaaactaactaaaattaatcaaacaaacacatttttactactcttctcacaatacttttagtttaaaagcataaaaaataactctataccatagagtcatcataccccaaacttagagtattgctcgtcctcgagtaatgaaaaacaaaaagaattaaacaataaaaaaagaaaatgacagtgacactaacatgcttgcagcagagacaatattgttctttcacacttggtttagcaacgaaaatgctatctgtattagatggaatggaagtgtaattggtgatagtgaatatgccttgacttgtgtgtttcaatagaattttgcatgctatttatgtccttagtacttaccaagagtagttcaatcaataaagtgtgcaaatacttcccaccaacatcttgaatttctacaacgactaccctcgatcctcaagtttaaaaagttcgcttccataagttgaactagtgcaactctttctactaatgtagtgataggatttattctatcaaagtgatatcaacagtaagaataatgagaagaggagaagaattggagtaaaattctagtagtattctattaaccagggaattcgagagcctggactctcct

SEQ ID NO: 349515 - DNA, 1612 bp, Cannabis indica
gtatccactgcagtgactatgaaccccagacaacctctgctcatcaagtccttagctttcaacagtgttattctcggtatacgtgccccctgaattacccatgaacactgctgggttagcactatcgggctcaaacaccaccatcttccttttacagtcaattgtcactccatatttagatagaaaatccattcccaggattatgtcaaagtcagacagttgtaattcaatcagattggcggtcaactcacaaccgtcaatccagaaagacaaagacataatccacctagtagatactaaaaggtctcccgagggtaacagggttccaaaccccgaagcataaatatcacatggcttgtgaaaactttctatcactctactcgacacataagagtgagtagctcccgaatcaaacaacacagtatatgaacagccattaatagacaactgacctgtcacaactgacggtccgcgtcagcctgagtcatggtgaaaagtcgccccgggttctgagcagtattcttcttaggctcctctttcttggcctgagggcaatccctgataaagtggcccaccacgccacattggaagcatgccttggctcgacactcactaggatggtgtttcttgcatttaggacactcggtatttgatcggaataaggacccgtgaccctcacgaccacctctgttttcccaaaacattctgttacctcctgatactccggaagcctcagccttccatttgtgatcagggttgccactgtcggtccccttactgacattacaactagcaggaggattcaatgccgtgacggcatcctttacagtctgctcttttgcaacatgttgctcagcctcctcagcaatcaaggctagctctaccactttcttatagagagtgtcatgtgaagtggtaatcttcaagtcccgactgattgtggcattcagtcctctcacatacttctgttttctggtgaaatctgtaggcaccagatcactagcaaatttcgacaagtgatcaaattccagagtatactcggccacagacatcttcccctgggtaagcttcacaaagtcttccatatgtgaagttctcacagcaacgttgtaaaacttttcttcaaacagtttcttgaattcttcccaggtcattacattgacatcccgggtctgacccactacgtcccaccagacgcgggcatggtcttgtaacataaaggctgcacagttcactctctcagttcccgtcacccccatattatcgaggatacgggtaacagtgctcatccactgatcagcctttataatatcaatacctcctagaaaagtcggaggttgcagcttcacaaaccattcaaacactgggtcccggtgcggcataataaacccatggttacccaccactggcacaggtgctggtggtaacccttgatcaactggggcagctggttgccttaaacgttgcaactcttcttcttgacgaagtatgatacttcgcatttcttggaacatctgctaccagtcagcaggaggattagcattaccaacccccgcattatcccccagattctgcggaggtggaggcgatgtcggtggatcggttcgggtag

SEQ ID NO: 349516 - DNA, 744 bp, Cannabis indica
atatttgtgagtatttgatttttagctcaagttcttgagcttgagtattgctagttttgaagcatgagttttgtgtgttgttactgctggaacttggtgtttgaaacatgagttttaattccttgttgattgctagcaacaatatttggtaactgagtgttctgttgagaatttggggtgaaaagattggatttttcttgctgaaatcgtgtttgagcttgctggtttctgggtttggaacacagatgccacggcatgctctgggcatgttgcggcctgccccaactgatggaacctgggggttcgtcccaggtgtcgcggcatggcttgagcatggtgcgtcccgccctcgtgattttgggcagttttgtgtcgaactttgaaaattcacaacttttgattctgaactccgatttgggagttctttatatcgttgaaaagctcgttccaagctctgtatgattatatgaattttaaatgccatgattgaattttataaatatggaatcaggggttaaccctaagtgtgaaaaatcctggatttgtgtgactaggattaccggcacctgatcaggagaacctggggattcggaatctctatcaattgctggacaacatgtaagacagtggttagcacgtagagtatgcgcagtggcgcttatattgagaatgataagtatgaatgtttagtaaccgggattagggttattactctaataggaacggtctaatagcctagggtta

SEQ ID NO: 349517 - DNA, 743 bp, Cannabis indica
aaagaggttggcgcaaaggtcttctggtgcaggtttgggtcttgggttggctggattctccgatagaaaccacgccaacttccctcccagatccatctgaaaccacgccaactttcttccaggctttcttgtcatcctgaggaggacctctaagatcactcacaagatctatgtctattcttgtggagacgaagaaaaaggtcaatggagcaacaaaaaatatataaaattaataatatgtatgatccgactcagatcaccatttacaagggataatactcacccttaagaatcacttgtgatgatcacccgtaacgatcaatagggttcccttggtttggattggtcagaagctcctcagccttggaatccgtcgtttctggttccaattaaggtttgaagtccttgggaacggatcgagaagaaaaatggttggtgcatcctggagttatgaatttggggggctgaacttctaaactcagatgggacattctagcaagaaagagatgatccattctcaagatggatctcaccaaagagccagaagtatgtgaaaaatgacaagcttgagccgccattttatacacaaagtccagtgacaagaaagctaacgattgggaaatctaacggtcgggaatagggcagaatatgaagagacgattcataatgaccctagaaaccgtacaaccaccagaatcaaaggacgcatttttccaaaaggggattttgacgaaaatgccctc

SEQ ID NO: 349518 - DNA, 609 bp, Cannabis indica
acaatatctcatgctcttctttcttgtcattttacttcatgctgttggaattctatgggtctgcctgctggaattgctcttgatgactcctttccaacctggttagataatatttttcacaaacttgatgatgatcgtgtttgccagatggttatggtttgttggtctctttggaaagcaagaaactctattgtttggaaaaacaaagctctcactgttgcaaatgttttagcttcagcacggatatctcttgatcattggattaaagctcaggataacacttccctatcttccattaatttccataataatggagatggggctgagctatggactaaaccggatacaaacacaatcaagataaatggtgatgctgctacatttgctattgagaacagatatggttatggaatggttgcaagaaatgactcaggcatcattattgacggtaaagctggttgtaatactgggacctttactcctgaagttgcagaaataattggcatcaaggaagccttaagctggattaaaactcataactgacacactgttgagttagagactgatagtctgctttctgttcaggctattcgaagcagtgttcctctt

SEQ ID NO: 349519 - DNA, 1582 bp, Cannabis indica
taagtaaaaattgaaatttaggtgtataattggatgtccaattaaaaacggaatccaatcaaattagtaattggattggattagattggattttgaggtctaattggattggatcagatgatgattttttaaatccaattactaattggattggatctgatgagaaaaaaaaaggttggattagattggatgcccacacacacacacaacatttaatgtatacacattcatagaactgctcttgataccaattattagttttatggtactaaatcaggtacgcagcagaagagtttcgtatgatctgattattattgtaccatatcctattggatctccagatgtgtgtacattaaaataaaacataaaatagtaagtttagaacacatatctcttgaagactatcaaagtatcctcaaaacttcttgtatgttgtatcccttaatccaaatgatgaagatgatgcaattggacttacgccagtatcttccaaatcgttccaccacacccaaggaatagtgtgggctattaggataaagtgtataatgttattcttattgaattctcaatacatgagcaagaactattcttgagagaaaaatagtttttcttctctctttagtgtattcaaaatttatgtagaaagagaagtgttttgatttctcaaatcaagcttctgtttatagtagttaaattttattgattaaattatactttattattcaaatacataaatatctataaccgaatttggttactaatatttatgagggaatctctcaaccacttgagagaatatctcaacaactttgaaatatttataattactttttaaatttaaatatttatctgattgaaaataattaattaaccgaaaaaggcaaaaatgcatagggataggtgcctacccttgtctgtttaggacaaggatagtgtcttttgtcctgacaatttttgtcttgacaaatattatcttttccccatttagttaattttaaaaaaattatttatttattacaaaaataaacaattactattttggcaattcaaaataacattatactactctttatacctacccttgacaatgtttcaaggtggcaattcgaggatcatggatctataattctaagctccaataaactagattatttattgagtctcattaatcaatcattgtttattaattccatgattactttactaaaaatatagaattgaactcttagtaattatagaattatatttactgagttttactacagtgtctattgctataatcaattccagtggtttgtcctccatgtgttggttcataactagttttgatcaaaatactgtcttatccttctaattacttctttatcctttagtactattaattcactagtggaagtataattagatcccatctaaatttgtgcacaacattatagttctagaattaacacttaaaggaaactaacattagatccgttaggaaagttaggattctataattgtagatcatgttcccatccatccgcattattagatttccaaaataaaagttgtaagaatcatcttctctgagaaaatttaa

SEQ ID NO: 349520 - DNA, 1076 bp, Cannabis indica
tcttcttaggctcctctttcttagcctaaggacaatctctgataaagtggcccaccatgccacactggaaacatgtcttggcctgacactcacccggatggtgtttcttgcatttaggacactcaggatatgatcggaatgaggacccacggccctgacagccacctctatttccccagaactttctataaccccctgatactccagaagcctcagccttccgtttgtgatcagggttgccactatcgatccccttactgacattaccactagcaggaggattcgatgccatgacgacatcctttatagtctgctcttccgcaacatgttactcagcctcctcagcaatcaaggctagctctacctctttcttgtacaaagtttcatgcgaagtggtaatcttcaactgattatggcattcagtcctctcacatttttctgtttcctggtgacatctgtgggcaccaaatcaccagcaaacttagacagccgatcaaactccagagtatattcggcaactgacatcttcccctgagtaagcttgacaaagtcttccatgtgagaagttctcacagcgatgttgtaaaacttttcctcaaacaaacttttaaattcttcccaggtcattacactgacatctcgggtttggcccacgatatcccaccagacgcgggcatgatcttgtaacatgaaggttgcactgttcactcttttagttcccgtcacccctatattatcgaggatagggtaacagtgctcatccactactctgcctttattatatcaatacctcccaggaaagtcagaggctgtagcttcacgaaccgctcaaataccgagtctctatgcggcataacaaacccctggttaccctctactggcacaggtgctggtggtaacacttgatcaacaggggcagccggtgccggttgccttaatcctcgcaactcatcttcttgacgaagtatgacacttcgcatttcttgaaacatctgctgccagtcagcaggaggattagcatcaccaacccccgcattatcccccggattctgaggaggtggaggcggtgccgatgg

SEQ ID NO: 349521 - DNA, 510 bp, Cannabis indica
caaccgcaacacgatggtgcaaactcatagaggcgaatctgacccagtaaatttatagacgctagatccggcattacagaatccagggagttcaagggtttcgcctgctgtcaatcccagacagacaggaagcgtggtgaatggtgaaacatctcctattacttaagttgcgcctggtgtgcaagagactgggaataacaattccgcacacaaccagggcatttataacacgactgttccaccttgaaccaacgcccagacgaccattagagatgcaaccgaattgcgaaatctccgtgacgcgctcggactcatgtagagtcatagcaacaccctgcatcatgatcaggatgaactgcaagctaaagtaaatctcacatttgatgaaaaaaggcgtatgttcgctgaatggagagacaaagagatggaggcattaagggcttaccatacagagatcgaagatcgtagtcggcaagccaccgtgcttatacgaagagcctacaaaactgt

SEQ ID NO: 349522 - DNA, 537 bp, Cannabis indica
taaattttatgggattttataatttttgggcaagaatatggctttttttgaaaaatatatcttatagaaaaattaaagaaaaagttaaaaaatacactatatatcatacaatgtataatatatcatacatctcaaccaactaaactatgactatttgttgtttataatacacttaattttactttaataaaagcgtaatatttttttttattttgggctcccaaaatgagtgggtcctaagcacggcccaatatacacccctaaaaataggtgtgtcgatacaatttttcatatttttgatgcctgaatttggagattaatctatctccattattggttttgagttattgtggtaaataatccactctaaactaaaccagctttgatagccaaatcatttggaaaatcggttaatatcagttgagttccttcctatttgggaagttggtaagggctggacatgtcagctactaacaactatgtattaaactcttgtttgtaatcagagtaaggcaagaaaagagagagagagagaga

SEQ ID NO: 349523 - DNA, 780 bp, Cannabis indica
tgggtttgactaaaccttttgtaagcactttaggtaaattataatcatgctcatttttccgactcaattgaatttgaaatactacctttattcatttattgatcgaaaatgtaattattaccttagtaacttacattagagctatggatctaatctaatcttttaggttaacatgaaataaaacaaattgcagacataagaaattgtactttaaagtggtctgcccgacctgagtactttgtctctgaaacctttgcgcgtagtccgcccagaaggccattcacttagaagcgaatgtttattcagtactttaaaacggtcaacccgatctgagtacttggaagttgtcaccaacctatgtactttgaaatggtcaacccgacctgagtactttgaaatggtcaacccgacctgagtactttgaaatggtcaacccgacctgagtgcgttgaaatggtcaacccgacttgagtactttgaagtggtcatgcggacctgatactttattggtagtatttccttaaatgttctccattccagtaccgtggtactagaatgagttgcattttttcgttatacttacctaatttgtatgctccggagtcgagaacttcgaccacttggtatggtccttcccagttaggtcctagtacacctgacgtgctgtctttggtgtttaggaatacccttctaaagaccatatctcccacgaagaattttcgagctttcacttgtttgttgaaataccgagctactttttgttgatgagctaccaacttt

SEQ ID NO: 349524 - DNA, 765 bp, Cannabis indica
agctatttgaagatataactctcaaagatgtagttgttaacaaaccctgtgttgggaaagttgttgggtgcaaggacatgactgcttcagttgtcaagaagattcttcttggtgtttggcgtaggttaggtccatggagaatgaaaaaatgtgaagatggagtcatggagttcttttttgatgaagaagatgactatgcttttgtgcttgagaagagaccatggattgtgaatggagtgctgctgaatcttaaaccatggtcggtggacggagaggtccgagtggcagaattcgaagtggcaagcttttgggtccagttccatggactccctacgagatttctgaaggatgagaacgctgccattatggagaagaaggtgggatcgtttctgaaaacggatgggaaacctaaggaggagctggtgcatagagggtatcttcgtgcttatgttgatgtatggctcaagcaccctatacttgcgggtttcttcctcactgctgatggaaaaccgaagtcttggattcaatttaaatatgagaaacttccccatttgtgcttcaactgtgggaagcttgcacactggaacaaggaatgttttgctctgttggctatggtgattcctaaggttggagaggctgtccaaatgtattgtacttagattaaatctgagactgggcgatcaaagtgttttactatgaagggtaagggtgtatctgttgggttttatgccctaagtaaaactctttacaatctgattagttatc

SEQ ID NO: 349525 - DNA, 452 bp, Cannabis indica
aggccacttgtgagattacctagatgttagcactccttcaagactttggcatccattacaaagatcccaccatcttttattgcgacaatacagccgccatccacatttctaaaaaccctgtattccacgaacgaccaagtacattgagattgattgtcatgacgtctgagagaagatccaagaaggcacactgaagctaattcatgttaccaccaaaaataacactggtgacatttttaccaaacctctatttcttgcttattttcataccattactaccaagatgaacttaaaaaaattgtatatttcatcttgagagggaagtattaggtttagtggcccaatattttcaacccaattttattgtgggcttccttttttgtgccttatatataaactgttggaatttattttaccaggatcttagatctactcacaagtatgttgattaa

SEQ ID NO: 349526 - DNA, 731 bp, Cannabis indica
atcgaccacgcctctgcgagtttgtaccaccatcatatttatgattaaatttgctgtaaagagcgagtttttgatccttgctctcaatgaaagcaccaaaatattgacctcgcttttcgccaacgataatgggtcttaattgtaagcgataagtgatataatttaggtatagtatgaaaagataaataatgaacacagagttttttaagaagttcggccccgagcagttcggtaatagcctactccccttgatttgtgttgacttaagaacaaagagtactatgatttttctctttgagctcttacaatgacatatctgagtatgctcccttagatcattctttcgaccccctcttagtgagaatagatcacatttatagggctatgtgcttgagggaaggtttcccttttgtttacaatgtctataattggtaagattacacattacatatatagagtacacagattgagagatttggacaacttgccatatctctgtgatacgataccagatttatagggattgctcttgtgcttcacaatgcaaaatgcttaaattgctaagtgttgatatgttgttcggattatccactgctcggttgggaggacatcgtccgtacaggtatacacggtgctcggctcggactatctccttcgggaagatatggggaatcattgccatgtgtcactagcatgtgatgacacgtcagagtgcaaaaattgagataaca

SEQ ID NO: 349527 - DNA, 759 bp, Cannabis indica
cagaggtttctaagcctagggttacctaaacatttttctacagtagaatagaaagcgcattcaaaatgtaaacatgcaaggataagcatgaaggggaatcaaaaacttactcaagattcaaatgtctgggttcgagcaacattaatccaacaagcagtttttctgaaggcacttcggcaactttgaagccaagaatttctcttttcgctctgaagcttacttagcaaagaagggtgatgaaatgagtttatgtgccaatgctgttggtatttataagcaagtcacgaaaagaggtaattgtctccaaggaaccttagaagcgtcagcttcccaccttaaaaacgaatatgggaaatcaaaagtaatcaagttcagccgttagccgtggagagagaaaattggatttagaaatattaattgtcaaagcatttattagccgaaaactgaagggactcccagtcagtctcacatcgagtctcggacggtcgcgctcaacacatgtccccatccaaagcagaatcagcttagatgaagtctacacgccactttggaagtcccgtacagacttggggggcaaatgttatcccaattttggcactctgacgtgggatcacatgaatggtgacacgtagagtccacttggaacatctgctcgaaaagataggctgagcaggatgcctcgcttgcatgcccagagcaagatattcagcgatccgtgcagagcaaccaacacttagtgaattcagctttcgcatcatg

SEQ ID NO: 349528 - DNA, 546 bp, Cannabis indica
tgcaacataaaatgttatttctgatccttattaataagtaaatctgattatattgaaatgagtttcatttagggtacaaaacccaacacccagaccctgtctggatgcaccacagtaaaccacaaatttctcttagtctgatggtaaagctaacaccggagctgttatcaaacgttgccttaactcctggaaacttgtttcacatttatctgaccacacaaatctctgatttttcttcgtcaattcggttagggacatagaaattttagagaatccttcgacaaaacgtcaatagtaccccgctaaactgagaaaacttcgaatttccgtcacagacttaggcctcggccaattcttcactaattctaccttgtttggataaaccataatctcattttccccaacaatatgccctagaaaggacacctcagacgaccagaattcacactttttgaactttgcatagaacttatgatccctaagtcgctgtaataccgttcgaagatgatgctcgtgctcctcttctgactgagagtatacaagaat

SEQ ID NO: 349529 - DNA, 537 bp, Cannabis indica
ctgtttataggttaatgggtcgtcatcaataccgtcatcaacgaccatattgatttcaccatccaagccataatgagatgatttagtagaaaccctcccactacgacaaggagtcgcgatcttctgaacaggaacgttagtggtagatttctcgattgtatcaacttgcaaagattcaaccgaggaagtgggattttcctctacttgagtagaagaggatggaacattaaaaagagttatatcagaaaccatttcctccaataccactataacgccctaaataattaggcacgctacttaagttatttatgaaacccaaatcccctaagcaggattactaatcaaaatagcgcagaatttaaacttttgaaataaacggaatggaaataaaacttgtaataatttaaacttttgtaacacttgggatcccaaaaatatttacaaaatttattacaagtcttcttctttcaaccggcctaagcggcaaaatagagttttaaaatacatccctggtagacccttaacccgcttggtctg

SEQ ID NO: 349530 - DNA, 675 bp, Cannabis indica
ttcatattaggatgttaaaaacatacttgttagtaaatctagatcttgataaaatatattccaacacataccgagtacggaacgcaattttcgagatatcttcctcttgaattctgagttaatggcaacctgagcaaagatcgatcttggaaaagaccgtcttacccttcaattgatcaaataggtcgtcaattcgaggttagggatacttgttcttgatggtaagcttgttcaattcttgataatcaatacatatatccgcagtgacctgtcattcttctttacaaacaataccggagcacgccaaggagaggaactcggtctaataaaccccaagttcagtaactcctgaagttggatctttaattcttttagttctactagagccattcgatacagtacttttgatattgattccgctcccagaattaactcaatcacaaattcaatttctcaggaaggtggtaatctcagtagatcttcaagaaagacatcaaggaactcgcacaccaattttttattcttaggtctagatgacacaggttggctggtatccactgcagtgactaggattcccagacaacctctgcacatcagatcttttgcttttaaaagtgttattctaggtatgcgcttcccctaaactttacccacaaacactgtcgggttagcact

SEQ ID NO: 349531 - DNA, 858 bp, Cannabis indica
aaggaggaagtaaagctcctagtctggcactgctaatggtatagccaaggctgaggcaaacattgcctctgcttcgaaacccagctaaaagaagaagtggaagaatagcaaaaagcctcttaaagctgttaacacagctaataagaaaaatgttgctaatcccaattaaaagcaaaaaggaaagtgcttctattgcaagggccactggaaaccccagtgtcctaagtttttggcaaagaaacaaggtatttctatctatgctataaactcatgtattttagagaattattaaccccttgggttattaattctagatctaataaccaagtttattttcttcttatttcagctctagcggcttaaacttggattgctatcctatcgagttgagtcggattgttggacagaagggtggagattgtccaagtgaagatgaagctcgtaatctacttttaatttttgatataattattttagtttatgaacaatttagtttcaattattggtttggattttattccctatttcataattttgcagacaattcattatgacatttttgagaatttttataaagttttctctttaagaaattttcattatgaattgcatttatgaattgagcttcgagttttcttaaacttgtatgccattaccaattatattatatgtttatcatatttgtatgtgtttgtgttttattattgatgcaaaatctatggtatattattctctgcaaagagataataccacataaacacttagaattttaaattcaatgtttatgaataattgttaattcttaaacaattattaagattttgtttaataaaaagatcttttgatctgataggggtg

SEQ ID NO: 349532 - DNA, 623 bp, Cannabis indica
attcttgtctggtttatgtttaactgattttgtatctggtttaaatgcattattgtgcatgtgtttgtgttgagtttgtgttgtaggagaatttacaacaagtagaatttaaacacatataaagtttaagtaacgttacattgattgcagcggaatataatgactcttctcacttagatctctaacctttgttcttttctgtcgcagattattatcaagatctgaattcgattctcttttaggtgttggattcttcacagtcttatagactatgatatgattgagtattaacttagggaaaattacatttacaaacgatatatttatctaatttacagaattaccgttgctcatttcaatttacaaaaacaacgtgcaagaatttcaaatttataacacggtataaaatgggagtcaataccttctcttaatcttctttgtatgtgcactaggggtgtgcataaatcgatccaatccaataagaactgacagatccaattacaaccgaccgccaaacattggatatccaattgtgatcggattggattggatgttatttttaaatatccaattggatcggatcagatggtggatggggtgtctaaaaatccaatacatccaac

SEQ ID NO: 349533 - DNA, 1116 bp, Cannabis indica
aatacaaggttattcatggggggttgatgaactcgagaaagaccgtctacacatagctcaaagaaagaccgtctacacatagctcgagaaagatcgtctacacatatctcgagaaagaccgtttacacgtagcccgagaaagactgtctacacgtaaaaggtctcgacatctgcatagacctcattttttgcatcagaagattccatttcctacagtcgagacctcattcccagccttaggaaatttttcaacaccagagactggctggcccaaaggtcttcttgtgcaagcttgggtcttgggctggttgggttctttagtagaatccatgaccacgccaattgggactaccttcttcctggattccttgtcagcctaaggaggacctctaaacttgctctcaaaatctatgtccattcctgtggaacagagataaaagatcaatggagcaacaaaaaaaaaaacaaatatatataatctcgttcaaaccaccattcacgagggatgcaccattcacgagggatgatacttaccctcgaaaatctcttgtgaggatcacccgtaacgatcaacgacatctccatggtttggattgatcggaagctcctcagccttggaatccttcgtttccaatttaaattgaggtttgaaatccttgggaacgtacggagaggaaaagtggttagtgcattctggtgctacgaatttggagggataagtttctgaactcggatgggacatcttagcaaaagaataacaatccaatttcaagatgaaactcatcgaaaactaggagcgtatggaacatggcaagcctaagccaccattttatactcagaagccaataaatggaaaggccaaaggttggaaaatctaacggttggaagtgaggcaaaagatgaaaagacggttcataatgaccttcgaaacagtacaaccgccaaaatcaaaggatgcatttttccatagaagggattatgaagaaaatgccctctgtaattatcaaaaaacactttttattaataaagaactttttaaggggcaattgttatacccaaaattatgttgccaattcaatagaggacacgtgtcaagttaagggaaatatggatcga

SEQ ID NO: 349534 - DNA, 1193 bp, Cannabis indica
aaataaaatgctaactctaacaaaagttttacacaaacaccgaactcaactccccttggaaaaatgatcctacgttgagtatacgaaccataaaaattaaattaaaaccagtcctcctcctttttgtttatctataagggtcaaaaacaaaaagaaactaaaatttccccaaaaaaattaagatttgaaaaatcaataatgatcaacaattaaaaaaaatatgaagaataagaaatcaaattttaagaggaaactcatcaaaaatttacaaatcaaagcacatgttgatacttaccaaaagaaagacaaatgaccaattttttttagcccatataagtcaagtcacatgactctcctcttttttcttaaatgaattttgaaattaaaaaaatacaaagaaactaaaatattttatacaaaaattaagttattcaaaagcctgcatctttaattccttgtttcataaaaaggacaaataaccatgttatgctttcaaaaatgataagaatttagagtctcaaatacaaataatacttaccagatgttaaaaaaaaatagacaagttacataaaatgtgaatgagagttttttttttttttttaaaaaaaaatttaagtcaaaggagatttacaaacttgtgcacacttgtgaggcattagagtgtgcattgaaaatataatcactgcccttggcatgtttttcatttttttgccttttttaaattgatcccgaaattgaatgttgtcacaccataatgaggtagcccttttatatggcagtgaatcctcttcataactcctaattattacgacgttccaccttactgatcaaaagaaggctttcacacctcagtagaggtagctagctctatttcagctaggggtgagcgaaaaatccaagaaaccgaccaaagcgagtaaaccgaccgtccgaacaccgaaaaaactgacaccgaaaaaaccaaaaccaaaaaaaattgccttaacatggtcggttttaatgtcaatggcaaaccgaccgattaaaccgagaaccgaccgaacatatatattatatataatatatattattttttgtacatatttaatatacaatttattaaactaattttacttatatcttttttatttaaagtctcaattattcattattttatttattataatttgatgtatttacgtattatatacaca

SEQ ID NO: 349535 - DNA, 737 bp, Cannabis indica
aaaacaagatgcaccttgttgatataggtagtatcaatcaaaccatttaagctctcttcaactgtgcagtcacatacctacacagtctcagaatcatcacatatgaccttccgtaggtggtgtgggattgcacagcttacctggtgtttcctcttacggatcacgggactactgactgtcacatatagctcaactaaatccctattttgtgggatttgattatgtagtagagaaattcatggaattttatatttgaattcccatgccattttatttcttttatatatatcgagattcacattattgttactgatgatttagcaaacaatgcattcgtatttttctctaaatagtgaagtcatttcactatttaggggaccttcttttcgcattctaaaagggcagacactttacaaaaataattgtacgctttttgagaattattaagaaactcacctggtcggaccttgtgatcttgatagttcgtcataatcaatacaactaaaaggggagtaagctattacaattataagaggataaatctctataattattgtgtgttgtttataatttttgtttcatcattaacttctttacaattactatatttttaaagacacagtgtcgttggctaaaagggaagtcaacacatatttattggcactacaagaaatgtcacttttaccagtgcattttgcaaattgcgctggtaaaaatgtcaaagttttaccagcgca

SEQ ID NO: 349536 - DNA, 561 bp, Cannabis indica
tagtttccaaaaatcttaataaacaaaaataaaaattaattttgctagcaaatttcaaaagatggtaatggccgctgcgctagcaagcctaacttatcatatatggagggatcaaaatgaaataatttggcaaggaaaacagtagatagtgacacaaatggctgggaggatcaaggagacagtgaagttgagaattaatctaatctggcctaagaaagttagttcaaaagatgtccaatggtttaataatctgtaaatgtatatagcatagggcttgataattggcgaatttgattgtacgaaaacagttaagtagcaataaaaattcatcttattcataaaaaaaaattggttttagaaatttgtatagatggttgtaaatagtggcaggggtttttgtacgattgtttattgattttttcttgtaatacggtgtttgtaaattgtaaatttgagtttgattgagcaatacaaatgatcttattcattaaaaagggaaatttgaaattctatgcttaaaataccatctaattttttcccctaaatgcatagttattaaaa

SEQ ID NO: 349537 - DNA, 680 bp, Cannabis indica
agaaagaggaacccaagaagaatactactcagaacccggggcaacttttttactatgactcaggctgacgctgatgctagtccgtcagtagtgacaggtcagttgtctattaatggttgttcttatactgtgttatttgattcgggagctatccactcttatgtgtcgagtagagttatagaaagtttccataagccatgtgatatttatgctttggggttggtaccctgttaccctcgagagaccttatagtattcactaggtggattcggtctttgtcattctggattgacggttgtgaattgaccgccaatctaattgaattgcaacagttggattttgacataatcctgggaatggattttctatctaagtatggggcaacgattgaatgtaagcggaagatggtggtgtttgagcctgatagtgctaacccagcggtgtttatgggtaaggttcatgggacacgcataccaagaataacactgttgaaagttaaggacctgatgagcagaggttatctaggattcatagtcactgtagtggataccagccaacttgtgacatcaagacctgagaatacatgattggtgtgcgagttccttgacgtctttccagaagatttaccgagatttccacctacccaggagattgaatttgtaattgagttggttccggga

SEQ ID NO: 349538 - DNA, 587 bp, Cannabis indica
tccccaagtgttctttgagtttcttgaaggcctccttatagtcctcactttagaaaaatggcttgtttcctcttaacacgtcaaagaaaggtagacatttatttattgatcacgagataaacctgttgagggctaccacccctccctgtgagacactgcacctccttccaattcttttgtgattccatctttatcaagacttgtattttctatgagtttgcctctatccccctttcattgaccataaagcccaggaactagggctgatcatcagtcggtttggtcaatttttttctatataaaaatttaaaattcggtttttggtcgaattggtgcaatccaaaaatcgaccgaccaatcctacacttatcttaaaatcgaccgttttgaacctcggtttggacagtttaaactgcccaaacaatttatttatttatttatttattttttatatcctttattctataagcttattctacattttacaactacaaccatacaaattaattgttcatcaactaattctctcttattcttttgactttaatattaataaaattataatatattattatatattatgagta

SEQ ID NO: 349539 - DNA, 606 bp, Cannabis indica
tcgttgctaatcaacaaggttaacgaaaacgtgattatttaaaatctgcttaattaaaagaaatcttacagtattacatatctataatctcgggattccatttacaaaatactttttaagagtttgctatacatataacaaaagtttgtcgccaagcaactatacgacataagcctcgatgtcccaaaggtcgtacgctccaggcctaaccgccctcacatgtacaaccttcacctgctcattttcacggctcctcacctttagccttgcccttacctacacatgaaaatagcactgtgagtcgacagactcagtaagaaaagcataacataaaacatactaatatcctgggttataatcaggcgctcatacacccattcataaacctaactgagtcaggaacattctcgacaaagtatgactaactgcgaatccagcctatactcagtactctagtcgtactgatgtgatagcagataactcatactatctgaaagcctagcatatatctgttggcatctcagtacaactctatgtacacctcactgttgccctgatatgctaatctgatggctatagatttgcctaacatatatctgttggcat

SEQ ID NO: 349540 - DNA, 690 bp, Cannabis indica
atttatctttataataagggccccaaatttttttatctatgacctatttcaactcagggccagccatgtgtacatgcaacaaaagttttaaattttattttcaatactataacaattcttaaacttaaaaatttagagtctagagagtttcgtcacacatcataaacaaattaaactaaaaaaattactgacaaattaaaaaagatagagctaccaaaacagccctttgtacatagagtgtactagtgttgtaagttcgtacatatcgtgttgacatatttattagtatttttcaagaaatggatcccacagaaaaatataggtcgtgtcacgccgtgccaatatttttaaatagtaggctcagcacaacccataggcccgatatttttgtgtcgacccgcatttcttaaacaaatcaatccattttctatattccgacttaaattcgtgttttattttttcattttgttttacaattactgacgtatatagtaagttatatttatatagtttttcaacaatattttacaaataatcttaaaaaaaaattaggtttattaaaatttaaatatctacttataaatacttaattttttatatcacatcttataaataaattaataatatataatcttaatttttagtatttaattattaaattattatattcagtattatattaaattttat

SEQ ID NO: 349541 - DNA, 1035 bp, Cannabis indica
cttgtaaatccatttgcatctcaaagtacttgagatgggaaagaggatcttctctccccaatatacatcttccacgttggcattttgaacttgtgaggcagtggcaggagattgatctctggtgagaagggagttccgcgagcttggctaactcaagatcattattgcgctctccagccatgccatgaaacatatttttcaattcgtcaagctgggcctgtacggctgggctgacctgctcggcattctggtcgatttggattacgtcagcgtctttccgagtggggatttgagtatgggctccaggctgcatgatcgttgtagtattttgcttgtctgttccccttcttctgtttagatcgttccttaggtcgtgagttgctcccaacctttcgaacacagaagagcctggttgccttagcgattgattcgcttggttggcgagtggaataacaccattagtctggttggaaccgtcaggtatgactcctcttgatgaattaccggacaaggtctgctcgcctaccgctgtgctcacaagcaaaactcgtaaccagggattgggcggctgaccattagtagtctgggaagtagtcatcattgggtcctcttccgtttctcttaggggaatgacgtttggcgattgttgacctacattttcgtaggctcttcgtatcagcacggtggcttgctgactacgatctttgatttcagcatggtgagcccttaatgcctcaaactctttatctctcaattcagcgaacatacacctttattcgtcaaacgcgagatttactgcaacacgcagtttgtcctgatcatgatgcagagtgttgttatgaccctgcatgagtccgagcgtgtcacagagattctttaattcagttgcatctccgatggtcgtctgggcgttggttccaggcggaacagtcgtattatgaattccctggttgggtgcggaactgttattcccagtctcttgcacaccaggtgcaattccagtaataggagctgttccaccattcaccacgcttc

SEQ ID NO: 349542 - DNA, 888 bp, Cannabis indica
tggagaacattaattaagcataggtttttcaccaataatattcattaggcaacattgagaaacataaagatataaaagaatattcattgctaagaagttcattttgaaataagaatcaataacaaaggagatttacattctcacttgtttttataaaagattctattatagaccttggcatttgttgcttgtttcaattcattaatcaattccaaacagtgaactagaggagaaggtatacagactgccataaagattttcctctaatagtggtgaacatatgcaagcttaaagtgtctacctatagattaaaacaaacatctcacaaattggtattatatcatcttttcctttaggtttgaaaagagaattatggaaataattatataccagaaggttagtgggagtaatatttgttttatacgtagacaatatgttacttgcaaatgatgataaaagttttctatataagttgaaataattcatatctcaaattattattttgagataaggaatataaataatatatataattttaattaattagagagtagccacagcatctctgattaaataaaattatgtattattcatctgatataacttttatctttaagtgtgataaattcaactcgaaccagcatctgaaaaatgatctggaatgagaataaattaagaacattcatttgcttctattttagaagcctaatgtatgcctaagagtctgaataagactttgcattacatttgtttcaggatcgttaagtagtatcagaataactaaagttaagaccactttatttttcatacaaagtgatgaggtgtctttaagatactaaaaattatattcatacatattttgttaagatgaattgaccatctggaaat

SEQ ID NO: 349543 - DNA, 1464 bp, Cannabis indica
gagaggaagtatttcccttctcgtttcaatcgatataagcaaaaagattgcagagtaaatacagaatacactgatcgtgggatttggacagcttgccatatctctgcaatctgatcccaaagttatagggatttccttgatgactaacgatgcgaaagctgaattcgctaagtatttgtcgttctgcacgggttgcttactgcttcgtcttgagcaagcatatgaggtatcattttcggcttgtatcttgcgagcagaaattggaataacatttgtcaccatcatgtgatgccacttcagagtgcagaaattggaataacatttgtccccaagtctgtacaggacttccaaagttgcgtgtagacttgatccgagctgtctttgcgtttgaatgggtgacacgtgtcaggcgcgtctgtttgcgactcgatgtgaggctgactaggcgttccttcggtttttggccaataaatgctctgacgcaattaatgcttcgaaatccaattttctctcaccacgtttgacagctgcacttgattgcttttgatttcccatattcgcttttgggggaaccgaggcatctaaggttctttttgaaatgattactccttttcgttgtttgcctataaataccagtgagcatttgttcacaaactcattttcactaaccttctttgctaagtaagttcagagcgaaaaaagagattttttagcttcaagtttgctgaagtgtttccacaaaaactgctcgtttagcttggcataacttgaagccagacgttcgatccttgagtaagttctcgatttcctttatgtttactttccacatttattttctgaatgcaactttggcatcgctgtagaagatatgtaagaaaccctaagtttagaaactcagcgatcttcctttgtaatgattcatgcgatttcatcgttcataatgcttgtttcttgaactgcacaatgcctgtcattcatcatgcttattctaagcttcatgaatatttttgccctaactcacgaaaatttcaaacttctgagttttgacttttcgtctaatattcttattctttaattcgttgagtactcctggtcggcatatttgcctgttttaatgttcgatatcccgaccaaacactcatcttgtgtattgtcttttgtagatgaacccaggtgagttttggggaagcgaataccaaatcgaccaggatctgcttcaactcttgcacgaagatcatcctcgtcttcgttctagttcaccctcttcgagcgacggaaattttagcctaattcccgtccagccataggatcatggcttgtacaaaaaagacaatacgtagaattgatgcatctgaccctcaagtggcccggcatgccaccttaccaagtgcctaacaagatccgtgttggaaatattttactaggatctagatttactaccatgtatgtttcattaacatccta

SEQ ID NO: 349544 - DNA, 917 bp, Cannabis indica
ttattctaatttaagttgttctggaattagaatttccaacttagatatatttttcttgaaaataactaatatttaagtgtctagattgaaatcaacttaaatatttaatttttaatttaattaaatgtgttgtctttggtttttcctaaaatacgtggacacggataagggtgacacgtggatcttaaagaacatccactcacgaaaatcaactaagtcttgaacaaaagaaagaacaccacagggagtgggcctcccggaggaaagcataaaacacattttttctctgggaggctatagccatgctaaggtattttcgggaggtaaagagattacttgaacaatcacttcgaatttaatgccgcatgggggaagacgtattgaaacgtccataaaagatgtgacagatggcgtaagccctttttacggcgatttgattgcgaagaattcaccaacttctgcaaccaacacggagtcgttaaaagcttctccacggtagcaagagcacaaataaatggacaagcagaagccgtcaataaaatcctaaaggtcactctaaagaagaagttgttggcctgcaaaaacaactggcctgaagaattgccaaaagtgttatgggcataccggactactccaagaaccacaaccgggcactcgccattctcaatggcatacggttgtgaggccatggtcccggtggaaaccttgttcccatcccacaagagaacgacatatgatccggtaataaacaaagctttattacaagaagcactggatcaaatcgacgaactcctagaagagtctcaagtatggatggcagcttatcaaaagaaggtggctaaacacttcaactccaaagataaagacaagaaatttactattggtgatctagttttaagaagagtcttcccagccac

SEQ ID NO: 349545 - DNA, 649 bp, Cannabis indica
tatattttattttattttaatagtcattttatttttgagaattttgaattacattattttaaaatgttgatatttcgatattattcattttgaaaattaggttaatgtaaaaattattttaattaactttagatcaacttaaatcaagtaattttcattaatgattttatttaaataaaatgactaaaatatattacacttagtttgtatatcatgcaatatacgctaactatttttgtcgttatcatttctcttccacgcgacgaggttgaagcctcgtcattcacacttgcacgtacatgatttctcgtcgatacatgagttagcagttcgtacatttctgtctcgcagaagactgttcagctagccgagttataaacatactctgcaaattgtgtttctaacaagttgttccatgccaagtgtacttacgattgcgtgtttgagtccttcgttcttcccagcttgacatgtgtcttcctcttatgtgctcaccaaattttgagtataacaattgcctcttaaaaagttctttttttttttaaaaaaaaagagctttttaatgattacaaagtgtagttttgtcatgttcctcttttttgaaaagatgcatgtcctctgatttcggaggttgtgcggtttcgaggta

SEQ ID NO: 349546 - DNA, 642 bp, Cannabis indica
tataaaaataaaaaccccttcagctggggtaaattgtataagtagaagatttggttgttaaaacttgtatatatataattacgaagagtttattgttgagccatactactttcactttgtctaaatatggtaactttgatctctgcaggttgattcttgttgatcagctcaaagaagcaaacatcaattttctgaagagagttgtctcttgcaaatgcagcccatccagaagaaaacttatactattggtggctgcttcagatgaaggcctcttattattattattagtgcctgtgccttgattgtcatgatcagtatttgcttcagatactgattttgtcttatttgcagctgaaaacaaaaattacataattaagttaactctgtagccatatttgcattcagttatgataatgatgatgatgaatatataccttcagaattaccataaggactagtctttcttatcttgttgggccgagagtctgaattttcattagagtcatcaatatcaacattatgctcctaaaaatgattaggataatcaaataccataacattgaactcagagtttacttaaagaataatagcattaattaattgtgttgtgcaaatttattccaactctttttctgttaattc

SEQ ID NO: 349547 - DNA, 631 bp, Cannabis indica
acttgcttcacaggtttgttgataaactttatacaagtagcttatataaatggctaatggtatggtttgagaagagacacatggaatggaaaaatcttaaaattattgaaaacaattaaagaatgtacctcccatggcatattgactaaaacaaaactcaatatgcatttgagaagaatattttgcacttgcattatttgagaattgagagtgtgtaatgtttttctttatttggaatctaatagtaatgctttgattgtatatatgtgataatttagagtatgaaaattaaatatcagacaaagattaatatatagtaaatagggtgaggattggcccacgtattaggtagcttgtgcattgtacaaggtcttatattaaaataatattttttttgttataatttatacataataaatattcataatactaaatatacacttccaaaaaaagtgataaaactttatgtctcaatacacttaattttaaaattctcacttattttaaaattaatgaagtattgttttatttttatttatttatttttaaaaattaaatttataaagtattgattgatattgttttatttttttaaaaaataaaagattatttacaccacatactaaaattt

SEQ ID NO: 349548 - DNA, 593 bp, Cannabis indica
tccaactgtgcatcttacacatgatggggaaccatttgatgattctaagaaatatcacagattagttagaaagttgaattatctaactgtgactcgtccaggtattgcattcccagttagtgtcattagtcagtttatgtcttttccaacaatttatcattgggtagcattatagcaaattttatgttacttgaaaggagcaccatgaagaggtatagtttacaaggatcatggaaatacccagactgagtgtttctctgatgcagattgggcaggctcgaaggtagatagatgatccacttcaagatattgtgtatttgttgagggcaatctgatctcttagaatagtaagaaacaaaatattgtgtctggatccagtgctgaatcaaaatatagagctatggcacattctgtgtgtgaggtaatatgaatttattagcttttaactaaattcaggtttaagacttctattccagtaaaattgtagtatcataatcaagtcactctttatattgtctcaaaccccgtgttttttgagcgaactaagcatattgagattgattgtcattttgttcgtgagaaaattcaacaag

SEQ ID NO: 349549 - DNA, 1191 bp, Cannabis indica
ttctttttctttctcttcttttgggtgtttttagggtcaaatgatgctttgtctttgctttcttgtggctcgtgatccttagcaatttctttaaggggaatcttctttctcaccttcttactaactttgaatttggactcctcaaccatgttaggatccatgtctccccttgcagccgtgagagtattggcaaaccttgttttccatgctagatagaataaagtatcgagctttgttgttagcattctgccaatgctcgaacttttccttgactgccttggtcgcattctcacttggctgcttaggagcctcttcagtcaacacaaagagggcattttgaccaatgagagcaatattaatgttctctctctatttcataaagttagctccattgagcttgttctcagtcaatagtgacaccatgggattgttcatagtcatgttggatactacaactatcaagaaatagaagtcaagtaaggtttaacacaaaatcaaattcaaaaattattagcacttagcaagtaggaatgacaagtgaaaatactaaaacatacaatcctaaataacttccaaggttttcaacaaaatgatatcagtgtcccgtttaggtgagagtcaaagataccatccattgaatagagttgttgggcctactaatggtcggccacttagtgctatttttggtccatttttattatttttttattccaaataaatcaaccctaaccctaagagaagtagtataaaaagaaaagaaagtctcattgtccaactaattcttcaaaggcaataaacctagctttctttctctctaggtttttgatacttcttcttcttttttcttctcttgttttcgaattctataatgttcttcacaaaaacaaaatttatccattagtgattaatgcatacccacacataacaagtgagtcctcaatcatagtgtggaatgtgttaataatcatctaagtatggataattataggattattggtctgtgtttgtttgattgtgaattctagggttctaatttttcatttgtttggaaatggacgaactggaaatttgcgtagcttgtttttagtaatatttttgtttgttcgttatacttttttattgtttgatttgtattttgatatggcattagattctagatttagcaataatgcttttaagaggtttgtattt

SEQ ID NO: 349550 - DNA, 855 bp, Cannabis indica
cgcctaaggtagttagggtgttacactttatgtctttactgtttatttgcatgctagggtagaacttttggttaagcgtttgatttctgggaaatagttttggctaagtctattatgtggtgtatagactctcctttatttgggtttcgttatttttcttccttatactttgcaatcgacccctctgtcgaaagattatttagggtacggggcaatttttgttcccacgttctgcgtttttcacttttcttctgctttcactgcttttgagatttttgcacctaatgtttcctaaggaaaatcctttgggtttccatctttggcaaacatccggagggggcctctttccagcggttaggggacccccattccctcttgtcacactagggctaactgctggattctttctttttacaaaaccataatgtctactcctgcatctggagcaaaatcttctcggaagggggcggttaccctggccaccctggaggaagtaatgaagggcccggtcgcccaagagaactatacttgccgttccaatgtctgggaggcggatgagcttcgctcaacactgacctgcgcccatcaattggaaaaaattgtgactgtagctgtgattaagccgtccgcgtctggggttattcaccgtttgccttgggacgaagagacgcgcaatcacaactacggaggttttggagcctggagccaaacccatcttatgtccggagccatgcttccccttcaagactattttataaattttctagtttttgttggcctcgcgccctaccaactcattcctcaagcttactgtctgctttcaggcttatttattttttatgtagcccgaggctg

SEQ ID NO: 349551 - DNA, 527 bp, Cannabis indica
cagcatgtctacttttggggctctaggctctcagagagctcctgatgaatttgggaaagaggtcaatatcgggttgcgttatcctcgctctatgtcattgacaaaggttcaagcgtctaataaccaccaagatcctatttctctttttaagatcgaggatgtcagttcaggagacttaagataccattcttctgatgatgataacgctattcaccatgtcagaggttatggtgccatttttcagggaaatgtcttaggagatgttgataataaagatgatggggatttgacttaccgagtggacgaagatttctttccgtgtctttaccgtttcttgaaagataagaaagtgcataacgattttgtctttcgggggcgagccgactttatgaggtgccttattgaatggactgatcaaggattacttcaacactaaggtgtcttaaataaggcacgctatttatggtgtctgtttctgtactcccggtacccctttttatgggtttttcatgtttggcgagcttttt

SEQ ID NO: 349552 - DNA, 694 bp, Cannabis indica
ccttagacctggaccctagacccaacccagatccgatgtcggcgtccgagtttgggtccaagtctggggtccaggttggggttcatggttactctatggtctggggtccaggttctatggtctgggcttcggggtccgattttgggtctcggtccaaggtttaggtcttggttggggtcgagtccgactcatataaaagcaaaaagcaaatatgaaagataaaatttctagaacacatttttatttttaaaattaaaaaccaaaagtagttacagaacatatttttgttttcaaaaataaaaataaaacaaaaattctactttcacttttgtaatttaaaaattaaaaagggatattggcaaaaaaaaaccacatgaacttacattttttaatacttaaccacaaaaattaaaattttgacgataaaacttgctgaacctgggtcatgttttgctcttcacacttctatcaaaaatccctgttaagtgccacattggattacccacgtgtacccaaatgtacacataacaaatgttgtgaaaattcgtatacgcaagtgtacgcaatcgtaacaagtaataaattgataaatcgagtatcgtttccacagggattgaaaattagaaattaatttgaaaaacgaattactcacaaattggtttcaactaaaaaaaaaaaaaataaagtgatgaga

SEQ ID NO: 349553 - DNA, 912 bp, Cannabis indica
tagtataaacatagtactttgttatactaactgatttaagtataagtactttgtgaagttaatttttatggtataagtattttatttttaatttttgttgttattttatcttaatttagaaatcttacaatatagatggggaatttgacaaataatagtaatttacaccctgcaataatattgtgtcgttttaaaaccgacactaaaaaacttgggaaatcataaataagttttttggtgtcattttataactgacactaaagaatctttaagtgtcggttataaaatgagaccaaaactcaatggtgtcagtttaaaaccggcactaaaagataaaacataaaagtatactttaagtgtcagttataaaacgagaccaatactcaatggtgtccgacaccaataatttactttttgtcactgtagtataggtatcagttttatgaaccgacactaaaagtataagtctcagtttaaaaccgacaccaaaagtgtgttttgtagtagtgaccatttattttgaaaacactactacaaaaagtataattctcgtcggtttttaagtgtcatttaaagaatttacgtcggtttaaaaaaccgacgtatataccgtagtcgcaaatagttttttattaacgtcgtttttgaaatgacgcaaaaaatatttaacttcatttacaaaccaacacaaaaaatagcacttttctttttattttctgcgtcggttaaaaatgacgcaaaattgtttgtggcattttccaaaccgtcacaaaaaacttattaacgtcggttcaaaaatagagacataaattgttgaaatagtttcctttttcacctattgcgtcggttataaaatgaagacataaatgtaggtaaggaaaattagcaaattttcatgcaatttcccctacc

SEQ ID NO: 349554 - DNA, 670 bp, Cannabis indica
tacattgtaggtaattaaaatattgagataatttaaataattaataagccaaaaaagagtataattagtataaaacattggtttcgcattatgaggttcaactatagacgtgctcttagtcttcttataactcttttattaaattacctatagattaaatattcatgaatgccacaacaaaaagaccttacaaatttataatgatatatgaagttataggatgatatttatgtgctcctaataagttaattattatcaactataagtataattattggttggttacttatttatttttttagtaaacttaaagataattaaattaaaaaaataaaattaaaaactaataaaatttttaaagattgaaagaagcaagattaagaaacaaattcacataggccgtacatgatttttcaaacaaaatcatgatataatgtcaaaaggcattagaagctagtattttggtattttctccctccccttaataattctaaaagataataacaaaaaataatataataaagaatatattttaataaataaacagtacaatttttttaaaaaaaaagtaaaataacataataattattaactaaaccaaaacgaataaataggatcatttcttatcgtaattatgatcactattatatattgtatatcaagatttttt

SEQ ID NO: 349555 - DNA, 598 bp, Cannabis indica
gatcctggtaaaataatttcagctgagtttcgtagtagtttttctggatttttttttcatgaattcgaaacaatccctgttttgattaattccgatcgtcttctcagatgaagtgccaggattaatggtggttctttttctagttgggtttcgtttcggctgtgttgggttgctaggtggttgattgaagatcgcatcacatgaaggtttcaatcctagaaaacgtggatcttgggttgaaggtgtgtgtcaaaggtagttgtgtaattttttttatttgggctgtaaatttgtttatttggccaactgaaattttttttgtaatattattacctttttttggttaaaactgaaaaaagtcctaattctttccttatatatattttacttatggattaaaattttaaaaaattactattgaacaatttttgtaatatatggaacacttctcaacagatattatgtattattttagttgtatggaacacttctcataggtaatactcattcataggtattatatttactaggtattttttactttatttaaaagttatacaattaataattaaaaaaatattattaattattaggtgag

SEQ ID NO: 349556 - DNA, 608 bp, Cannabis indica
agggatcaaactattataactttttgatcaaaaacctgtttgacaagaaaggaaaatcaaaagttataaatgagatataactcataactcgcatgtgaagttgaatattaatgactcacactgtataggaaagtattaaatgagacgtcaaggtgtcttgataaaagtacttaaacttagtgtatgaatagataatctaactattcatgtaagcaatcaaaaatatacaaagtgataagatcattaaaagtatattcaagtttgcttgaaattgattataactgttattgcgaggaagaattgataactgctcgtaaattaaaagcatggcagataataaactactcgtgcgtatggtagactattaactacttaacattaaaggaatgtacaagcagtggaaatttccttaaagtactttgtatgtgatcaaaatatgattgtttaaattgtgaataaaatacaatcaaaaaattatgtagtacaaacataaaagtacgaggcattaaataaagattgaaaccaagttggccatccaacctagcaaatttgtctttacacaaaagtaaaagtgccacaagggaaaaaccattatctcggccctaggg

SEQ ID NO: 349557 - DNA, 548 bp, Cannabis indica
tttatgattaaattctggtatgtgaatattctttgagtttaggtttgatgttcatttaagatttgatgcatgttggtgaaactagtggtgatattggtaatttttgatgtgtttgagctattgagaccatatggattgtaacttgaatgttgtgtgagctttttagggtttttttggtgtttctattatgttatgtagcttttaattttatgttgttcttgagcttgggtttgagtttaaagattcaaggtttgagcttcaattagtgggaaattttgctcaatgtttggagcttaacttttatattgactaaatttaattttggttgaggattaatgcatgaattttgtgtttttaccctctgtttggttggggttcaaaatctaggaaaggttgtcattttaaggccttaaaatggagttttgggtgttctgaacctagtcgccgcgacaggatttggcagtgggaatgtgtgtttttctcgattttattttggccataacttttgactcaggactctgtttgggacgttctttatatcgttggaa

SEQ ID NO: 349558 - DNA, 985 bp, Cannabis indica
gttttgtcatagcacttttagatcggattataattaaactttattttgacaaaaaatcaattcagggtcctatatgtactattttagaaaatacatggtccattttgtcatttaacaaaacacagggtctaattggtaacttttgtaaaacagagggtccaaaatagtatttaactaaaaaatcttcatgtacgattttgaaaataatatatatcatgtatataactaattaatatttatattttgaaaatatacttttgttaattatgtttcaatttgatagtgattgttaaaataatatttcaaattttgccacttttaaatatgtaagtttaatttttgaaaatgtattaacttattgatttatatacctagctaactaattaattgagtttttataattactctataaaattaattaattacttaccttgaaaatttatataattacttttttaagcatttatatttgttattcaaaggacatacatcattatttgaaatatatttataaactatattattattcttttgtataagaaaatagcatacgtatttaaaaaaaaaaaaaattaaaagcataactaattgaaaatatatttatacatataatgtgaaaatatatatatcttaaaggttgttaaaatagtttgagaaaaaaagtatataatattatatatatttgaaaaatatcttatatagtttaaattcaaatataaatataatttgatttttatttatcaacattgtttatttaaattattgttttgatttgaaaaatagcactgatactatttttaaaaatatcttaacaacataaatttttatttttcacaactttactgaatctatactcaaactttttttttctcttcatttttgaattttattgctaaacttgaaaagcaagattgtacataaattgtattgagctttgtgctcaaaatttttatctattatttgtttaaaatcaagatacatttga

SEQ ID NO: 349559 - DNA, 516 bp, Cannabis indica
aaaaggttgttgggggcagaatcaagatacctaccgcttgaaaaacttccactatgtctattttatgcatcttgcaaactaaggccttacttccaggcacatccaattaaggtgttagctgatcaacccctgagataagttttgtcaaaaccagatgcttctggaagattgataaaatggtcaattaaactggggcaattcgacataacttatcactcgcaaacatccatcaagggccaaggcttgacagatttccttatagaaggaataattccagatgaaactccacttatcttgcgagaagtagatacttggaagttgtatgtcgatggagcatccaatgaacatggctcaggtgcatggctgatactgattttcccagaaggctttaagttccactatgccttaagatttgattcgacacttcaaacaacgaggctgagtatgaagccttgatcgctggcttaaggatagccgaggtgttaaaggtcaaaaatcttatatgccatagtgatt

SEQ ID NO: 349560 - DNA, 1075 bp, Cannabis indica
ctgttatgcaagacttcttagttatcgacctgccctcggcttacaactattgttgggtcgtccagcacagatcggactaggggcactcagttcgatcaagcacctatccttgaaatttcatacaccagatggcatgggagtggtgcgtggcgaccagatgctagctcgcgattgctatcgcatagagctacatcatagaaaagctggtcatcagttgatggggatcttggcagaagaaactgagcagaaagacaaagatcttgaccccccgagttcaagatgagagaaacctgttgaaaccaatcgagaaattggaagaggtcattctcaacccaggaaatcccgcaaagtgtgtatacattgggaagaacctggacaagctgctcaaatagcagttaataagctttttgaaggcgaaccaggatcagtttgcctggagccatagagatatgatagggatcgaccttaatattatatgccatcacttaaatgttgatccaaactacccagcaaaaagacagaataggaggcccttggattccaagaggcaaagggcactaaaacaagaagttgaaaagttgttagccaatgactttatacgcgaggtgttttatccctcgtggatagccattcctgttctcgtcccaaatcccaacagaacttggagaacttgtactgacttctccgatctgaataaggcgtgcccaaaagactattttccactttccaggatcaaccagttactggatgcaactattgggcacgagcttatgtcatttatggacgcatattctggatataatcagataaacatgtatgtcccagattaagaacatacaagcttcgtaaccaacatgggacactattgttataaattcatgccgttcgaactgaagaatgctggggtaacgtatcagcgactggtaaacgaaatgttcacaaaccaaatagggcgaaacatggaggtttacatcgataatatgttggtaaagtcgataagaagtaaggatcatacctcagacctcgcggaatgctttaaaatgttaaaaaagtataacatgaagctaaacccaaa

SEQ ID NO: 349561 - DNA, 421 bp, Cannabis indica
tttttataatttatttttttattaagtaaaattttatttttaatttttttttgccatattatttaaaatttaatttatttttctttgatagatattattttttaagaatataaattggaagaaaaaggttaagaaaaacttagtataattaaagatataaattttacataaaataaaattattaaaatagattgtctttaaaagttttcgggatctcatttaaaaaaaaaaaaaaaagtttttgggatgtaaatgaaattttcctaatataaaatagaataatttttatcatgttgttcaaattgtccttaactcttttaaaaatggtttttgtttttatcaaataccattattgtacaaattaaacaaataaataataataaaattgtattttatttgatctaattattaaaacataaat

SEQ ID NO: 349562 - DNA, 600 bp, Cannabis indica
tagacttcgaccccaacgtagatcttggaactcgaactcgaaccctagctctgaccccgtacctagaccaattcccaatcctggcctctaacccaaacccaacttaaataaaatcaatattgaaaataaaaataaaatttacaaatacacttttattttctgtttttaaaattaaaaaacaaaagtgtttatagaacatattaagtgtttatagaacatatttttgtttttcaaaaatattttttaaaattttacttgtatttttgtgattgttaaaactaaattttggcttgcaataagaatttgacacgtgtatcagggctggaatctgaaccaatttaaaccatgcattattaaatgcacattaaatgactcgcttcggaaggtacatctaatagaatcattcgaactcgccgccacataggcaataccgagatgtgagtaataactattaaattttgagaccaacgagataaacaagtccatctcgggataaacataaaacataattaaggctattcaaaacgaataaacaatgagcttacaactcattgatccatatacttgtgagtaagagcttgcaactcattgatccacata

SEQ ID NO: 349563 - DNA, 607 bp, Cannabis indica
cggtcggtgccggaaaagtcgtcgaagttgctgcaagcgccgaaaaatttatcggaattggtattgtcaccaaaaaaatcactaaaaaaaataccaagaaacggatttcttcatgaggaaactactttcttggtgatttttccgttgacaataccaactctaacgacttttctggcgataacagctactccgacgactttttcggcaccgacagcaaatttcgttaaaatcaagaaaccaatttcttggtaatttttcaatgatttttctgacgacaatggcaattctgacaacttttctggcgttggtagcaactctgacgactaatacaccgatagctgctccggtgactttttccgtactgactaaaaactttgggaaattcgccggaattggcattgtcgctggaaaaattatcggaaaaatcaccaagaaactggtttcttttcttcatcaagaaacccatttcttggtaaatttttttgtgattttttcggcgataatgccaatttcgatgacttttttagcgccggtagcaactctaatgactttattgtttagcatttatatttcattatgatttttcatagtgtcgaatctggtttca

SEQ ID NO: 349564 - DNA, 534 bp, Cannabis indica
aaaataatttccaacaatataatagtaagattataacatctattctattttcaatatttgtgcagtccaatgtaaacctatgtattcgatacaagtctactttagcaatatcctagaaaatacataccacttttcatggtgtaagtgttggattttgtgccctaaataaaactctattttaatgtaatcttatacattcatttatcaataaagaaacaaatttatttcattacttgtttaatgtgttatttggttcacatgtttattttatgatcatttatttgatttataaattcatctaaatccgtatcacattgatatttttatttattgtgatgtcaacacaatagaaagtaatcaagatcatatgattaaatgaattcttatgatttatcagtacacaagattttttaatataataatctacaatgttgtttacttgcactttggataaatgctatgtccttttcagggaattggtaaaagtaagcttgggttggatatatggacgatgaatcggaagggatcgatatt

SEQ ID NO: 349565 - DNA, 380 bp, Cannabis indica
aaaattcactgctccgtcgagtcagctctctcagataaaagttgatgtccaaatgatgttgaatgctaaagtttatcttgtcaccaagaactgcgattgtcagatggagtgttatgtcttcaagcgtagaaatgacaagatttacattatcaacctcagaaagacatgggaaaagctctagctcgctaccagggttattattgttatgttcccagcgagatgtcacagaacgatacgctttacaacgtattcaatacacgtattcattgacccggtaaaagcggaccaatcacagctgtgtgattttcaaataataaccgcatttattttacttagggcctaataaaatctcataattttaggggattattgttgtaaga

SEQ ID NO: 349566 - DNA, 730 bp, Cannabis indica
taccactctttccaaagtccccgacttcgacttctcgcttcttggagctgaagctgctgagatggctgaagcgtttcgcgccatgtcgcctacccagactcaaggttggggaggcaaccttctggacgaggttgagggcgtacaggctgaagaagtcgagaatgaagttgtcagcaaggtcgcggacgaggctgctcctgatgagactactcatgctgctccagacgcttgattatcttccaatttatgttgttgtttaatttcacttttttgtttcttatatatgcggtacatgggtactcgcacttctgtactttactttatcttttggacaaatttctatcctcgcggggatagcttacactttaatatttacgcagtacacgggtactcgcgattttatatatttttacctttgattacagctcggtgtaatcgcacttttatatacatgtgcgactttaattacagcttggtgtaataaagtaggaaaattttcaaagttggtaaactaaatttaaatcacttgaaaaacttagcaagtaattttattcatgcaatcagtagtacatgcgggcatatatccccctatacttaggattttttgaacaaaaaatatctaagtataagtactcgaattaacataatcgaataatgcgaatattactgataataaaatttcaagctctcgctattccatgctcgtggaatcgcggttccatcgagtgtt

SEQ ID NO: 349567 - DNA, 531 bp, Cannabis indica
cctcccaaaaagactagaggtccctatttttgaaatcgttcatacagtggtaccaacctgttgcaagctataggatattctactggcaacattggtactggagcaataccattctgaggaaaaggagtaacctcagggccttgctgcctcagcctaacaatctcctcatcctgttgttgtattctagcctgcaactcagcaaacctttgctcccaatcttgtggagcttgtggtggattaacattacccagaccatgagcctgtccacgacctctacctcggcctcggagaggagggggttcatggtggccttgatcgccactagttccaaccacattaccctgacatcatacattttgtcgggtatccatatgatactagcctgtgaacccataagtcactttatcaggtagtggtcaacataataaacttaagaccgcatacatgggatcttagacactcacctaatcaatcaatatatcactaacatgattccatcatgcttttctaattataataagctactaaaac

SEQ ID NO: 349568 - DNA, 553 bp, Cannabis indica
ataataataataataaataacaattcttcatagtccatgagtccatcttattctaggatttataatttgtatacagaattcaataaaagactaatattaatacactctcttcttctcagatttggtcgtcctctattttatggatattgtccctatttatatgagttttgggtgacaattattctcttagaattttatcatttgtaatcgttcgtgaaatatggacaatccccatattttacatttacatcacatgggataatgataaataactttttacaaccgctcttttaactttatctatattaggggtggcaaaacaagtttcgacatggcacacgaacacgatacgaaatttacgtgttaaggtcgagaaaattagacgcgggtcaaaaacgaatcgacacgacttgacacgaaataaaaaggaatcaaacacgacatgacccccttaacacgaatttgacacatttgacatgattttttttaaaatataataacataaaaattattcataataatataattatttaaaaatatatatttagtgatt

SEQ ID NO: 349569 - DNA, 611 bp, Cannabis indica
aaaccaatctaaggccttattgtaaatagacgtgtgagagcaacacgtaggtttttgctatatagacagtagatgtggtggcatcaatattcatctgaattgtaaatatgtatattgcatattattattattgttactgtcttgctgggcttggctcacaggtgctctactgttcaggaaagggtaaagttgtttgtgatcagccatgagttcgagggcttggcggtggattgtacatgttcgggccatactagaccatgcaggtcgggtctaccagctactgcattttgtattctcggttttgtcgcttaggacgacatgtaaaacttgacttgtaaaattttgtaaaaaaatttatgggatcccgaaacgtaagaaatctttttggaatgatttggaaagtttaaataattacaagtttaatttttattctgtaagtattttaaaattaaaattttttcgctcttatttcttgtaattccggtttagcgggattaggttttaattattggaaatcatagcgtgcctaattgttaagatgttacagaggttctactgtatatatatattgttatatgcagtgacggacccaggatttttactttgtgggg

SEQ ID NO: 349570 - DNA, 720 bp, Cannabis indica
tactaagtaattattattaattaaataaataatttattttttatatataatttaaaatattttatacatctgtcgcgaagcgtgggatgtttcatagtttatagtaagctaaacgctaatgaatgtcatttattttaaataaaatgtaaaaaaattacattaaaacaatttaaaaaaaaaaattataaagtagggtcaaacccgaacaaagcgcggcttaattttcttgtataatatcaccaaaaataaaattaaactagaaaaagtcaattttagagccaaaaagtagttggaaacaaaaaagacgactttataatttgttttgtttttgaatgaatgaagcttttcaatttctaaagacgaatgacaaagtaagagggaccaataattatatattaattatttagacacatttcatgtaacctatacgattaattcagtaaaaatatgtatggcttaatatataatgtgaagagtttattgtatgtatgcaaaattataatttgttcaacgcaagttatctaaatttgaaaatcatgtaaggtgatatgatcaatgactgtagagatgcagaagtaagaggtctatgactagtgattcaatttttctttttttgtacaaatgatccttcataatctcaattcatatttaaattatatatatatatatatattctatataaagtgtgcctatataactaaaattcttggtttatgagaa

SEQ ID NO: 349571 - DNA, 1132 bp, Cannabis indica
aaaagaaaattttacattacttaacttagaagaaaccaagagaaaaggttcatctcttcttttctctctctctttcttttcgattctcttgggcatcagctgggagattgggattttgagtttaaaacaagggattttagtgattcttgggagctttgatccaaggtaattcttccttcttaattttcttggtttaagttaggttttgcatgtgaatttaggttttaggtcgctgtatgatttaagatggtttaatttggtattctggaaatggtttgatgttgtttaagcttatttgaattgaatctataggttgaattgaggtttgagcaaagttagagtttaagaactcaaacctagctctctaatggtgaattgagaatttgtgtggattgttgagttctattgcttgggattggtttagtataatgtttacaggtattctggaagttttgagaagatttgggattgatttgaattaaggggaagaattttcgggttcccagcgcagaaccggaattccggttcctgtgggcctgctgcaaccggtcgaccggttggtgccaggaaccggacttccggttgggaaccggtctgccggttggggctttttctcgagccttagtttttcccgtatttgcgtaatttagggtgttagcatcctatttatcgatagggttattcctagtgtcaattttaaatccccgataagtgttttagcgtgtctctcatcgaattctaaacattatggtttagggccctgtaaagcgtcgagctgcgtttccactcaggctgaccagcacacttgagcacggaacgaggtaagatagcataataatatatatatatatatatatatatatgaatatatgcttgttttagatgtttgcactactagcactagtatgaatgtgacatatagagtgttagtatagtgttgtatattagtgtggttacggtattaccagcacgagtaccaggggtacatcgtgcatgtggtacaacacttagcaattcccgagagtacagttatgactctaccaacacgagtacagggttggtactttagtgcatctggtacagtggtcgtacttcctgtaacgcccttacttacgtaaaataagatgccata

SEQ ID NO: 349572 - DNA, 938 bp, Cannabis indica
taaacaataaactttttttttgtaaggagattaacaataaactttgattctcgattcaaatgctatttttcaattctattttcatatattcaaaattctcattccataaactttctactaatatttttcaatcaatgaaacggaaaagcaaattttaattcccgtatgaaaaattaaactttcaatctcaataatcaatagaaacaacatcaaatttcaagttctcaaaatctataaaaataaataaattaattaataaaaacagatctcataagcacaaactcaaacattataaccccagtaaaatactaaaactcaaacattaaaaacacacataataaaattcgaacccagaacttaacacacacatcagaataaaaattaaaccataaatgaggatttatgttactatttttcgcatttcggtatttactagcaacaaatttaatattttaagtatttatgtcacaaattttttaataataaagttaaaattttaatataattttattaagtaattattattgattaaaatacacaatttatttatatataatctaaaatattttatatatccgccgcgaaaactaaatctttaaactctgtttttgacatagcaaattatttacaaatctgtaaaatcgaatgagatgcctactataactataattcgttatacaaaaaaattatagttttttaaaatattaaaagtatagattttcctactaggaaagacaaaaatagtatccctactatatatgtggtattattccttaaacccccaaccatgattcagttagttagttagttgttcgttacctaacttaactgtcaaatatgacagcaagtactttgggtcctttggcctatataaagggaactgctccttttatttcaaaggaaaaaaaaaataataagaataacaagagagacacaac

SEQ ID NO: 349573 - DNA, 895 bp, Cannabis indica
attgttacagtttgaacaaaagtcttttttgtaattacttggaattacattttaagaaatttctatttgcatccataaaattataaatacaccttattattaaaaaaatataaaattaaataatttctaaaaattattcttaatattttttttttaaattttttttcctcacattatcttatgttaatttcaatacttattttgattttatttttataatttagtctaattcatgtatatatattttttaagaaaatatttcatataatttttcattttaatttttttctcataatattaaaaatttgatttaattttgtttgataggtatattttttaagaatatgaattgagagaaaaaagttaaaaaatttagtaaaattaaagatattaattttatataaaattaaaattattaaaataaaggttctttataaattgttgagatgtaaataaaattttcaaatttctaattcttaaaggacttcctaaatgagcccttaatagtataatttcatatatagatgatgcatttatgggacccttatctaccataataagatttactattttttttttgttcaaactaggataaatacataggaaaaacacatatctttcaaaataatcaatacgcatagtgaaagtgacaagtatatgatcgatctacacgtagatgacatatcacactgtcaaaataaataaaataaataaataaaaaaatcaaacatgacatattggagacgaattgaacataatacatatcaaattaattttcaagaaaaccttgcacatttccttcaacgaaagtaaaaaaaatatttaatgggtgttttttggcaaattgacagtactcccaatgaaatgagtactgcgctgatatactatttttgta

SEQ ID NO: 349574 - DNA, 524 bp, Cannabis indica
ttttgaaacttgtcttcaactcgagaagatctgtaaaatattgcatgaacacatcaacttgttttctcacggcagctatttcatcttttaatccacaattctcgtttgttatttcagtaattttttctctgatttcagcattttctttcttaatttcgacattttcttctctaatctcaacatttaatgctttaagagaagcactctctttcattaaatcctgcaaacatataagaggcaaaacacaaaatcttttataaatttgtaaatagtatgaaaagactaaaaaataataatatatgaaataagaaaataaaaataatacctttaacaaaatggtgtgttcatctttattcatttttagactagaagaatgatgatttacttcaatctctttttgcaaatttgtccttctatcattcattcttggactagaagagtcgtgatttaatccaatttgctcagcggttgtacttctattatcatccacaggagccaaaggaacacaagtaatctatgatcaa

SEQ ID NO: 349575 - DNA, 1025 bp, Cannabis indica
gaaacatccataatatccaacaatgcagcatgataaggcaacaagtaaaattaggcagcaacaataatggaatgggcggaaagtatcatcatcgagcagaacactaggccaccgaaaaactcaaaaaaaaaaactctcaatgccaaactaacaaacacataaacaacatagaataaaagttccaagcacaaaagacaacacacaacgagcacaatacaatctaaaaacaaacaacacaaaacagaaaaatataaaatagcttaggtatgagaaaaactccctctactcggagtcctcgtggggctcctctgtgttcgaagctgatgggcctccccacgggtctagaacatgctgagggaagtccgggaacttgggatcaaaacggggcgtagtcctcttgaatgcacgttccatgacggcgtcacgcttctgctcataatcccacatcgcgtgcaatcggccacacatttgttgttgcacttgctcaaagcgagcaaagcgatctacgggaggctccgtggctgaggacgtcgctggggtaggcgttgttttcggggctcgaggtggaccaaaatttataggcccccgaggattcagggcgccttcttccttccatatgggtacacctgccttgcggcaaagagcagtgatggtagcagggaggaataacttccccttccccctgtgtgcacaatcagcaatctcttgggcaaggacagccccgacgtcaacatcccagcccattctaaggcaatagagcatccaggcgcggtctctgctgacggtcgaatcatgtgaggtggggcagagggcagtttgcacgaatgtataccaacatttcaactcgtgctccaagtcagtgcgccgaaatcgaagattgccataattatcgaaaccccattcggaccctggcttggcgagcaccggcatcatgtcacccacagtctcgtcgctcacttgccctttttgcgcggagtattggcactcgacagagtttaacccaaacaggttgttgattgctgcag

SEQ ID NO: 349576 - DNA, 865 bp, Cannabis indica
taagttttttctctttttctttgcttaataatttttgaaaattccctaacataagagcaaggaatttcaaagtcctaattctattgggaatgcttgaaaaatagaaacaattatctaagattgtcaaaattgatgcccatatgatagttttgggagaaacgagcttggttcacgtcatcaagtcaactccacacaagtataaagttgacttgggggcaaacgctaacccagaaacttttcctggtgacaaggaaatcaatgtttgaaaggttgcaagaaagatgacatctcaaatttgagtaatcctgagtcatagcagtcaacctgggagtggtcccaagccctgtgcccaagttgactttaggaactctagaatggattttcagacttttataactcatttccaactcactatctttcaatattgtataccatgaaaatatgaagcaaccaagtctaggctctgggagttgaaaatacagtaaccaacacctcaaaagtcaacctgggcacctagtgtttcgcccaacgcccaagttgacatcctgaactagggtttcaatttctgagaccttcttgaatcaaatgtgtcaaactttgcattggaacatgaactagatataccacaaacatatttgaggcattagaatcagtttcagagaatgttcatttttgagcacccggacacccggtgcttgggcaccccagcgcccaacttgaaaatctgtcaacctgggccagttccaagtgtcagataaaaaatcttcttccttttcatcaaaatgaggaaataggtactttcagggaagaaacaacacatctaggtgtcagaacaagggcctagtgcccaagttgacacctaggg

SEQ ID NO: 349577 - DNA, 536 bp, Cannabis indica
tcttcaagaaacctgatctaagaaaaagggaaactcaacacaagatcagattaacagctggttagaaaagaatcaatgtgtaatcaaaacttaccatatttacctcaatttccataaataggaaagctagacaactttccttccaagtttagatacacacaaataaggaaaccatattaatacataccagccgaaaacacattaaataataaaatatttttgtcaattaaatatgccaaaaatagaattaacacaatatggtataataggcgtaccaaacgaaccctaaaagtgtaattgtttgatgtattgtagtcttataaaatatgttcaagtcttgatataattacttttgtaataataaaaataattatatttttcacattttgcggtattcagagtgagtgtgaccatacaaagattttataataaatgttatacccgaaattcggctggaggacacgtgtcaagataaatggaatgtgaatcggtgtcatatctttttatggaataactcattaattgtgtaagtacta

SEQ ID NO: 349578 - DNA, 776 bp, Cannabis indica
aaaaacttttgagggtaattttggttaattaacccaaaaaggggtaattatcaacttatccccaaagtataatacaaaagggcacaaatgtaaaatagtcctaaatttttttctcaaaaaaataatataaaatgacctaaaatttaaaaattaagttaatatatgttcattttaaaaaaacaaattaaaaaactagttaaatataataaattagcaaataaaaattataaaaatattattttttttttttaaaaaagaatataataattaaattaagttaatataattttttagtatgatattgtttacccaaattttaacgacgatgacgtgtcgggagtagcaacacatggcacgaaaatattgagactaaattaataaaaaatatgtaaagccatgatcgttgggatgatcgttaatcatgaagagtggtcgtgacctttaatcatgaagagtggtcatgaccgttagaatggaacacaggcggtcacccttacccctagcttgagtaaggtgggcatctccaagaaggaaaaacgatggactaataccttcgtaagaggaatgaacgatcaccacaaacctgcgggagtcaaaccagtctagggggaatatactactacccttacctcaactgccatgatctacatggggtttagtctaggggtacatcccttaacctctaaagtgttagtctaggggtaccccttaccccttaaagggttagtctcgaggtacaccccttaccccctaaagggttagtctaggggtatacc

SEQ ID NO: 349579 - DNA, 604 bp, Cannabis indica
gagtcactctgctgggccactctatttctttccaacagattaaactaaaatataatattaacaagttctccaatcatgaactcaatccctattctggttacatttctagcaacttttggtgagatctttttgtttacaaacttgtcctagatctctttggtttaaagtatccactactaattttcttcccagaaaggtaaggaatcatactgttataatcttcaactttctctaaccatcggcgctgcctccttattaaattcttccaaatgataaaatattgaggctcctatgattcatataaactttgtacttttgccaaacttccaaggcagaagccaccactatcaattcaatatcataactggaatactattactcacactttcttaatcgcttagaagcacatgcaataactctcctagactgtatcaaaatacaatctaatccttgttagaagtgtcacatcaaatcacaatttctcctcactggctgacaatgttaacactagtacaatggttaacctctatttcagttctttcgatttgatttcactaagggcgtagaaaaccctcaacaaatattccatagcatccagttagtt

SEQ ID NO: 349580 - DNA, 646 bp, Cannabis indica
ttgatcttttgggtaggccttgtgatattttaaaaagagggtttggaaccctactgcctagctgggagttgattatctctaattggcgcattaggtctatggcggttaggatcgaggatagggagttgagtgctgaccttatagaattggaattaactgagtttgacatcatttctgtccaagtattcgacaattatagattgtaaacggaaaatggtgacttttcagccagaaggtgaagatccatttgtctatgttggataagttcaggggtctcgaatcccgattatttctatgctgagggctacagatctactacacagtggatgtgtaggatttttagcagtaatgattgactccagcagacccgaaaaatttgggactgaggtagtcagagtggtaaaagactttctcgacatgtttcccgaggagttaccgggattgccgccgcaacgagaaattgattttgtgattgatcttgtacctggagccgaacctgtttctaaggctccatatagaatggctccagcaaaactcaaggagcttaagttacgacttcaggggatgcttgatgttgggtttactcgactcagtgtatcgccctggggagctccggttctgtttgtgaaaaagaaagatggttccc

SEQ ID NO: 349581 - DNA, 720 bp, Cannabis indica
ttcatatttagggtgttaatcaacatacttgtgagtagatctaagatcctggtaaaataatttccaacactaccataatatcgcccccataaatatatataaagggtattctataatgcattacccaaaaagaggtatacatatgcactctttatttgtttcccaatttaagaaaaaaatttagtctaatttttttataattgtgtacgttatagttatttatgattgcaaaatttcgagaaatttgaaataatttacaatgtagaaaatattgttcaaacagtctatttcacacccgtataaaataaaagagccacaagtgtaatagattgttcgaatactgattttagtgtgttaaatttttataaatttttcaaaattttgtaagatgttttaaataactataacatacacacttataaaaaaaattgcactaaataattttttaaaatgaagaaatagatagggtgtactgatgcaccctttttacgaaggtgcattgtaaaatatttcaaaaatagaattattagcagttttttccctgaacttttgctaatattgattttggcccttaaaatatacgggttgttaagaattcctcatgaactattatatttacaaaaatttagtccttctgttaggttctgtcccattattctatttaaaagatgacatgtgtttgtcaattagcaactttgccccctaaactttgacaactat

SEQ ID NO: 349582 - DNA, 507 bp, Cannabis indica
cataacacatattttcataaaaagagggtctataaagcataaaatacataaataatcacacagtcatattaattagtgctaagtgtcccactaatcccatgtctaagtataacggtcattacaactatccccccattaaaaggatttcgtccctgaaatctaacctaaataaatctggatattgagtcctcatttcagactctaactccaaggtggcctcttccaccttgctattcttctagagtaccttgactaaggagataatctttttctgtagaactttgtccttcctatcgaggatctgaattggttgttcctcataggatagatctggtgccaactctagggtaccataactcaagacatgagtcggataagatacatacttccccagcattgatacgtgaaaaacattgtgcactattgataatgctagaggtaaagctagtcgatacgccacttgtcaaaccttctcgagaatttcaaatggccctatgaacctaggac

SEQ ID NO: 349583 - DNA, 510 bp, Cannabis indica
ggggtagacttcaggtcgaagaaccaagcgacctcgtggggagaaggagcatcccatccttgagaagcgtagaggacgaagagagcggacaaatacttaataccctttggagtaatctggaccgagcagaggccgaagaagtcttccacatctcagaagtacttatacaagggcatcagcgctccttgctggccgtgagcccccgaccaggcgcacatccccttatcagggtttgtggcacgattgtcgtgggcgggaatgtagcagtccagctcgcccaggtatccgtcctggtcgaaagtgtggaggcgtgccttcgaaatcttggacggaggacttacacacctggcggccaaggcaccctgcctcctgtgaggaatcgcctcagtaaactcctcactgacgtagtcaacgccctcaaccaggacgtccctgtcagtatcgactggttgcccagcgtcattgtactccccaaaattagggtgtccaatctcttcctctccctcagca

SEQ ID NO: 349584 - DNA, 601 bp, Cannabis indica
ctataaattttggtgttcttattacttaattttgtttaattattattcataatctcatcgctataaagacttagtgtcgttggctaaaagcgaggtcaatagtcgggatcaccatgacctgaacagtgtattatcacttttgtccaaaagcttgcttctcctacctctaagcactaagaactatctaggaaatagctttgagaattatcaagcgttaagattttctagcaaaatgtttttttttatagaaaattaggtcatcttaatatgaatactttaaacatctttatatagtgtttaggatatcatcatttgaaattttaactcatatagactcattaaatgagtataaaactcattctctaacaactataactcttatagcttttaagaattttaaactatgatggataacaccttttacaatattggtgataattatagaagttacttatagtaacaagtaactcttcctatgttataaaatgatgacaatttttcatagtcacttattagtatgttacaaatatttaacctatgtaatattatattattcaaaataatataacaattgtgccattaaagaataagaatttagtga

SEQ ID NO: 349585 - DNA, 444 bp, Cannabis indica
ttggacaactcgatcataagcaggtcttttttatggctcactatccctgatcacaagtggctctttttactttacttttagatcattaatttttttggtggctctttttatgtttttggctcattatttctaaatcacaagtgacttttttgactttggctcttagatcaattttttcggtggcccatttttttaactttttgctctgataccatgttagaatttcggaataagattaatgaggttccatctcaaaactaattgataatgggaggagtagtccattcctcttatatattcaattatctttccacacattaacaatgtgagactatttaacagtcattcctattcttatgttttcattcctcctacctaaatgccacctaactcttttttgaattatagattttaaacaactttattacctctaatatttttacc

SEQ ID NO: 349586 - DNA, 582 bp, Cannabis indica
ttttataccaaagtgtaccgttttggggaccgtttttaatttaattcattttttttttgaaaaagctgactgagacgtgtgtgatgtatgctgacgtcatcataccacgtccatcacgtcttcttttgttgcaggtttcaactgttcacacgcctatttttttgcaattgtaattcaaattgcagtcggtttttaaaggtttgtattcattattttcttttatttttatatattaattactaattttatgggtattaggtgtttgtataaataggtaaagtttctttataaataaacattttcagtttgtatttgctctgttttcctttttcttcagagtatatgggtacgggttagggtttcatcttctttggtggtttattttcgtgttattaagagtgttttgagtgcatcatttttcgtttatcgtctttggtgttgtgtttctgtttgattgttgagggttcttattatctgtaaacctaaaaaaatggttaaaactcgttcttcaatttctccttctcattctataaagttagctgctaataaaaaaaaatagaaaatgtatctgatgatgaagat

SEQ ID NO: 349587 - DNA, 1158 bp, Cannabis indica
ttcatatttaggatgttaattcaacatacttgttagtaaatcgagatcctggtaatatattcccaatagatagtacatatttctccattttcatgaagacaaagaatatgtaagtttgatcatcaatttgatactggtgcctgagcatcgagtgctttgggtgctcaaaagtaaactttctcttaatctaattttgttgtctcaaatatacctgtggtttgtctagttcatgttccaatgtaaagtttgacccattttcactatgacggttccagaaactaaaaccctagttagggatttcaacttgggcgttgggtgaaaccctaggtgcccaggttaacttttggggtgccggtttgtgtaatttcagctctcgaggcttggatttgattattttatgtcttcatggtacacaatagtgtaagatagtaagttggaaatgagttatcgaagtttaaacttctattccggagttcccaaagttaacctgggtgcagggctagggacccctcccaagtcgactactatgactcgggactactcaactttgagatattatctttcttgccatgtgttaaacattgatgtccatgtcaccagaaaaagcatttgggttaacaatgacattaaatgttatttgcttccattttacaaactatagcttctattttttgaggttaaattgtttttattttttgagtttaaattgtttttattttttgagtttaaattgtttccatttctcaatgtgagttatttctaatttttaagtttaaattttttccatttgttgatgtgagttgtttctatttttcgaggttaaatgctggttatttccattttacaaattatagtttccatttcgacattatattatttctattttttgtttccatttcaaatgtgagttgtttctatcttttagtatattttttttttcattcacagatatatatatatttatatatatatgaggttaaatgctagttattttcatttaaaggttaaattatttttatttttaatgtgatttgattttatttttcatgatgtttttttccatttcacaaatatctactctatataaagtgtgcttatataactgaatttcttggtttatgagaaattcatgggtgactttttatttatatttaataa

SEQ ID NO: 349588 - DNA, 779 bp, Cannabis indica
agtaggcctagagttcagaattatatttcaggccaataagaaaattttgcgacaaattcagctacaataattatgactaataactataagagcactggtcgaatctagcatatcgacattaagaatttagtcataaagaggcgtgataagtggtcattaagcacgcaaattgaattggatgatcgcatatctttgactaaaggcatgtcgcaacacaaattcaaggattgtaaagtaaatatgggattctgttaccccatatgcagtatttatttgtacaactaaaattatgcaatgaaactctacttttgatattttctcatatatatgtgcatcttaatttaatatgagaaaattatcgtaagaggactagaataaacataaggtttagggtttatttacttaagtacattcccacattaaatacattgttatataatgaatatatcgtaatacatggaagataattcgacatataatgaggacctatcactatgatatatatatatatatatcatgtaatgaggaacgttggattttaagtggtaaattaatttaaatactgaccaagtaggagagtgttagaatattttttatatggtaacaaatcaaatattttatttggtttgttttataaaatataattaattatttactaattaattaatatattctaattatggtcagatttaattactaaatatttcaattactcgatttaattttcagaattaatcgtcaaaatatttagacaattaattatggcagagaccttgatg

SEQ ID NO: 349589 - DNA, 589 bp, Cannabis indica
ctcatttcaaattcacttttcatttgatcaacaaatacctgcacttcatggttagatgtagaaccaaaaactatatcatcaacataaatttgagcaatgataaaatcagattttatatgtttgatgaaaagagttttatccacactacctctgtgatagtcatgagaaagtaaaaattgagtcaacctttcataccaagctcgaggagcttgtttcagaccatacaaagctttttcaagtttgtatacatggtctggaaattgaggatcttcgaatccttttggttgctcaacataaacttcctcactcaaaatgccattcaaaaaggccgacttcacatccatttggtacaatttgatttcaagaatacaagcaatgcacaagagtaaatgaatagattctaatcttgttataggagcaaaagtttcatcaaagtcattaccttctacctctgtatacccttgtgccaccaaccgagccttgttcctcacaattgtaccaaattcatcacttttatttttaaaaatccactttgttccaatcacattaatactttttggtcttcaaactaaaatccaaaccttgttgc

SEQ ID NO: 349590 - DNA, 750 bp, Cannabis indica
tattcctttttttaaaattcattttgtaaaacgttcagcaaaccgaccagcacatgttgttgctaggatgtctcggtctttatctgaacgtagcatttgtgtgtccaacgctccaacaactatgttggatatcatatattccgaatactaaatttaatgaagttctcattttaaaaaaaaaaaaaaaaaaaaacactttaaggcattacttatttgagtaattccatcaagaaaaagaaatatttatttagttataggatttatatcatgtttagacaagttaccaattatattttacatttttaagtaatttattctgaagtataattaggattagaggtagcaaaacatgtcattgtgtcgtgttcgtgtcatattttatgtgactcacttttatatttcgtgttagatgtaccaattcgtttttttgactcgtgtttaattttttcaattctaacccgacccgtaagaaattgtgtcgtgtttgtgtcggtccactgtgacccattttaccattattgaaactagagttatagagaaaaattatagatttaaattcaattagaaaacttatatacatttatttaaatataatttattatatataataataaaaataaattttttaaaataattttctaatttcattgtaaaaaaaaattaaatttaaaaatagctttaacttaacaattgaatcactaatatatatttttattataattatattattattaatattttttttatttt

SEQ ID NO: 349591 - DNA, 573 bp, Cannabis indica
aaacaatgattatttaaacagataaaaattcaaaactcaaaatgttgtagtgtgtatcttattgaaaaaattatattctgttcaactttactcaatgctgagaaaccagtttttataaaactgtcaatcactatctatttatcttgtagctgatcaatccttcttctttgactccttgcttttgtcattctattttggagatgtggaaagctgtggattattgcagttcttcgattgtgaccaacttttccgcaccttgtgcatttcaagacaacttttggttctccttttgatcttattcttttctttctaggccttccaactggttttcttgattttggtggccacactattcgttccatgctctcaggtatagtccattctctttcatttggtagaggatgtacaattctttcatatgttgccttcattgttactgttttgtggtattcggcaacatagtcataagcttttaatcctctttttgcaaatacagctattgcatgtgagcatggtatctcatctagttggaaccttctgcaactgcatgttctttccaatatgttgattgtg

SEQ ID NO: 349592 - DNA, 866 bp, Cannabis indica
gataaatatttgtaaatgcaacatcttgttgttcatccaaagatgacaacttagactagtgtttacaatatgaaacaatgaagagtttatcaaataagaatgactttaactctcgcctaacgggacatcgttggattcttattttattcaaaattatcctgtattttttcctcttagcattttcatttagaatttgcttaaataatatatcattggatgaatagtttataaatcatctgcttatgatgtcactctaatttttattatgaaattgaatggcgcagatgacaatattcccgacattctatcccgaaaagatatgaatcttcgatcttagaaatctcctacttgtatgtgctaatttaaggcaatataaacctagagttagattagtagtggtggtccaagagagaataatcactcattgtatatttggtataaatttaactctttgactttaaattttagattccaaatagaaatttttatttcagtttcccagaatatattggacaatacagtatgactttcacaagtttttaatatccattttctgtcaatggattcaaactaaatgttaatgtatgaaatatgagtttcgtattctgtgaccagaacccacttggactattctaagaactctttattgtaactagacctaagtcatcaaaagaccacaaccacattcttatgtatatctatggcatttgcatcttgtaattcgtagtggttttgacaagatgattctttgcaaagagtaaatatgctaatatctacttgaaagtaagatcatctatattcgaatatatgaatgtacattcaggggtggatatgagttttcgtgttcttaagacgatcactctaga

SEQ ID NO: 349593 - DNA, 740 bp, Cannabis indica
agggagattgtgagattacatggtatgcctagaaccattgtatccgatagggatgctaagttcttaagttacttttggaaaacattgtggggaaaacttgggacaaaacttttgttttctactacttgtcatcctcaaaccgatggtcaaacagaagtagttaatagaactttatccactttattgagggctatcataagtaaaaatattaagacttgggaggattgtttaccacatgttgaatttgcttataatcgttctatgcattctgctactaaattttcaccatttgaaattgtttatggttttaatcctttgactcctttagatctatcacctttacctgtttctgagcatttgaatttagatggcaaaaagaaagcagaatttgtgaagcaaatccatgagagggcacgactcaacatagaaagaaggaccgagcaatacataaagcaagctaacaagggtcgtcacaagcaggtttttgagcccggtgattgggtatggttacacatgaggaaagaacgattcccagcccaaagacgttccaaattgctacctcgaggagatggtccgtttcaagtgcttgaaaggatcaatgacaatgcctaccgactcgatttacctggagaatataatgttagtgctacttttaatgtttctgatttgagcccttttgatgcaagtgaagatttgaggacaaatccttttcaagagggggggaatgatgagaacactaa

SEQ ID NO: 349594 - DNA, 907 bp, Cannabis indica
tttatttatttatttatttatagcatttgctactttaatatcagagacgaactttattcttttttttcgattttaagcgttttatatattatatttgcataatctgggactcaaactcaggacttttaacacacacatcattttatgaccacttgaactagcgtcaagtgtttcagagacagagtccatttaatacgctataaccattacaaaaaaatatcacagttaaataaaatgaaacatgtatcttttaatttgataattacaaaataaaacattaaaatatagttccacaaaattaaataaagaataaatattattttggaccctgtattttgtaaaagttatctgttttgttaaatgacaaaatagaccctatattttctaaaatcgtacaaataagaccatgaagtgatttttttttatcaaaatataatttaataataatcctatctaaaagtattatgacaaaactgtttacattttctttatctgtttgtgttaggaattattttcaagttagttatattaaaaaaaacaagttgtcaaaaatcaagctgatggtcctatttttactattttagaaaatacaaggtcaattttatcatttaacaatacagagagtccaattagcaacttttacaaaacacaagggtccaaaaaaaatatttatccttaaataaatttaacatgatcagtgataattatttttgtttagtgtataggtacaaatattttttataataaataattagtatattttttatgtacatctttttttaatatgttaaaaaaacaataatatattgtaaactttaaaaaaactctagacaattttaaataatactaaatatatataatgtaaaatttctaatacagtagaacctctatttaagaatactctatt

SEQ ID NO: 349595 - DNA, 734 bp, Cannabis indica
agtcatcccccggcagttgagcaagcctttgagctccatctctaagagcaagagtgaagggagggcggtgatatgtggggatctgttggaaccgagtatgggtggtgcccatgccttccaacatgaagtattcatcaacaaaatgcccaattttgctaatggtcttatccccagtgctcgtcaaccacttgaagtccagttgagagaaatagaagtaccccgatctgccttgcctaggggtggactttaaatcaaaaaaccagcttacctcatggggagagggcatatcccatctctgggaggcatagagaacgaaaagggcggacaaatacttaattcccttgggagtaaattgggtcagacagaggcggaagaagtctgccacattcctaaagtacgggtgtaaggcaacaatgccccttgctgggcatgagcacccgaccaggcacacattcccctttcagggtttgtgtcccgattattgtgggcgggaatgtaacagcccaatttgcccaagtatccatcctggtcgagatcccgcaggcgtgcctcagtaaccttggacagagggctcacccacctggcacccaaagcaccttgccttctatgaggaaccgcagcagtaactacctcattggtgtagtccacgccctcaaccaggacgtcgccatcagcaccaactagcccccggcctcattgtatcccccatagtttgggggtgcaacctcctcctc

SEQ ID NO: 349596 - DNA, 525 bp, Cannabis indica
cggggattagggttatggtcaggggtatgggtgtctgatcataatccggcataaatgtatgttatatgatttgtgcttttcttactgagtttgtcgactcatagtgctatgttcatgtgtaggtaagggcaaggctaaagttgaggaactgtgagaacgagcagatgaagtttgtacatgtcggggcggttaggcctggagtgtacgatcgtcgggacatcaggacttttgctgttagttgctgggcgacaaatattttgtaaatgaatagcaaaattttgtaaagtttttggtaaacgggatcccaaatattttgtatgtaatactataagtttttatttaaataagcaaattttaattaatcatgattttcattaacctcattgattagcaacgagctgcacagtatgtttaaaatcacgttaacacacctatgctagttagggtgttacaatttggtatcagagccgccaggttgtcttccgaagatcctcatgacatgtacaatcatcatcagcagttagc

SEQ ID NO: 349597 - DNA, 674 bp, Cannabis indica
gttggggggttttgccgcaaattactcaatatattttcaaaaacaaaattaaaacttaataaaaatagtataattacttaaaaaatatgaataattatatattctatttaaaccgtggtttcgaaccaaaccaaaccgttcttaataattttggtttgagaaatttattggtctggtttggtttttaatattcaaaaaactgttatactggtttagttcaaaaactataaaaatcgagactaaaccaatctgtgaacacccctatcgttacccatgttaatgctctgcattcgagatgaggtgaaaattagaattttatcaattttgcctaataaaaaaatgaaataaaaagacttggaatagtttgagcaattataaatttacaacacaattaattttacagattctacaagctgtatagattataaaggccgtaatggtgctgttaagttgtaaatttgagtttatgcaaatcaatgattttgatttctcaataataataataataataataataaataataataataataataataataataataataataataaaaaaatattcagcaatgcactaaacttcaactataaacgttaaaagacatcatatgtgtatatatattttggagtaatttgcggcaaaactcccccaactatcaatttacttgcaa

SEQ ID NO: 349598 - DNA, 610 bp, Cannabis indica
aaatcaattacttaaaaagaaaaaatacataccataaaataattttttaacgataacttataaactaaataacaaaaatctgttacaataaacaacttagcaaaaatctaatatagagaaaccagttacgtaaaataattaaattaaaaattaattcacataaaccaattacctaaataactaagatcaaaattaaatatagaaaccagttacttaaaaatacgctaataaaaaaataaacaatagaaaatacagaagctccaaatgattacacaaaacaaaaataacttacgaacgataaaactataaacagaaaacctaaaaacaagaaaaatcataaaggaagaaaccagtttcttttgataagaaaaattaccaagggagcagcatcaacatgagtctcactcttcttcttgccatgggatttagaaactggtttctttttatctttcttaatgatattaaccagtttctcatcatcaacaacattagattcgcacactttttcctaacaaatataaaacacaattcaattaaaggaaaatgcaaaaaaaaaaaaaaaaactattaaaacaaacaaaaagatcaaaattcatacaactaaaaaata

SEQ ID NO: 349599 - DNA, 739 bp, Cannabis indica
gatgatagcccgatcggagatcaatctttgaaaagaccgtcatcccctgaagttgatcaaaaagatcatcgatcctaggtaaaggatattcattcttgactgctagcttatttaactcccgatagtcgatgcacattcttagagagccatctttcttcttgacaaacaataccggagctccccagggtgacacactaggccaaataaaccttatgtcaagcaacccttggagttgaattttcaattctttaagctcagctggagccattctataaggggctttagaaacgggttctgctccaggtgtcaaatcaattataaaatcaattttgcgctgaggtggtaaacccgaatgttcttcaggaaaaacatctagaaattcctgaaccaccttgatgtcttcaggccgaaaagagtctggccgagtggtatccaataccacggccagaaaccctagacatccatcacccaaccattctttagctgataaggccgaaatcaccgagatccaagattcctgaaccgaacaacaaaaacaaaaagttcttcaccttctggttggaagattacaatcttcctcccacagtcaatactggctgcatatttggataagaaatttattcccactatgttatcaaatctgctaagctcatttctatcaggtcagaacttaactccctatcgtcaatcctgatcggcataggcctaacccaccttttggagataactaactctccgc

SEQ ID NO: 349600 - DNA, 1343 bp, Cannabis indica
acgtttttcaagaaaattttttgattagcaaagattgcactgtaattgaaaaggcactatagcgtaccttagcattagggcgttacacgtacgctccaggcctaactgccccgacatgtataatcttcatctgctcgctctcacggctcctcagcattagccttgcccttacctacacatggaagtaacaactgtgagtcaacagactcagtaagaaaagcacaaacaataacatagcaataacctagattatgatcagacgtccatacccccaatcataatcctatcctcgtgacgcacacggtgctgagtctagaacgttcgtacaacagtactattaaccataacttcagcatatacgcggcacgctagtcatactccagtcgtgccgatgtgatactataaagtagtacggtactatcgaccataatatcagcctatactcgatacgctagtcatactctatacgtaccgatgtgatactgtcggatagtacaacatacatatctaatgtaatctaacaagcttacctaacatgcacactaaacatgtatatacatatgcataccgttatactaatcttacctcgtttccgaattcaggtgtccggccaacctgagtggagcaactactctgcgaattacaggctcctaaatcacatcaatcagctaaatcactttttgaggacttaaacttgaaactaaaagtttccctatcgataaacaacacggcaaaaccctaaacaacacaaaaatgggaaaaactagggttcccaaaactgccccaaccggtagaccggttcccaaccagaattctggctctgcggggtttcctggggaccaaccagaattccggttcctacaggtccctctgaactggaattccggttcagtgcaggaatcactcaaaattccattacaacttcaattcaaccccaaactctaccaaactttccagacctgttatttagaccataaagaacatatcccaagcaataaaaccacctaacatgctcagattcaagattcaccatatgagagcaaagtttgagctcttaagctcaaaccttgaacaaacctcacaaacagccaccaaaatacatcaatctaacttagataaactcaaattaacttcagaaacaaacttaaacaacagcagtaactacaaaacttaaacttacaatttcatggaaaaatcacaacgtaaagctctttaaaccaaagaaagagaagctagaaaccttaccatgactatgatacacttaaagcttgctaaaaccttcttgaattgctgaagaacaatctcaaaccctagctgttctaggtagagagagagagagagag

SEQ ID NO: 349601 - DNA, 788 bp, Cannabis indica
gtcccaggtgtcgcgacatggttttggcatgccgcggcccgccttggaatttttggacagttttgagtgcaaactttgaaaatgcatatctttgtgatccgaactccgatttgggagttctatatattgttagaaagctcgttccgagttctatgtgattctctaagttttaaatgccatgaatatattttatgagtatggaatcaggggttaaccctatttgtgaaaatcctagattgtgtgactaggattacccgcacctaatcaggagcacccagggatttggaatctttgctattgcgggacaacaggtaagacagtagttgcacgtagagttatgcacggtggcgcttatattggaaatggtatatgtgagtatatagtaactgagattaggattattaccctaacatgagcgttttaatagcctagggttattaccctagtgatattttttgtgtaaattccatgccatattaaatgtaataagatttaaggattatgcgctcaaggaataatcaagttggactcagtaatcaaaatcgagatgaaccattctaaggccttattgtatttagacgcgtgagagcaacacgtaggtccacgccacgtagacataaatagacgtgtgagagcaacacgtaggtctacgccacgtaggcatgtgagcgcaacatgcaggtctgtgtcacacaagcaaatttgaatggcattgttatttatattatgatgagcatattatttatatgttttctactgtcttgctgggcttggctcacgggtgctct

SEQ ID NO: 349602 - DNA, 1365 bp, Cannabis indica
gtgtacctgatttgatccatagcaatttatctctgattgatccacaacagttactccaatttgatagtgcaatactatcaactaagtcttcctccctagatctctaaatcagaagcagtttattttatctgattatcaaaaggtatacaattgtgatgagacaatatgtatttatagagttagggaggggacttagctacaaaaccctagttgggctgggcctgctcatcaaaggcttcagtcaactagaaaagcccacacttctgcttcacctagactttactcacagatgctaagcccattaacaattgatcaccaacaacatgggctaatacagcaaagaactatccaatcaacccaagttttaataaaaccaataaaatataatgtaagctcaaataaaagtctaacaaccatcgcttagggtagttgtacatgactgcggtaagctttttctttctctaaataatatttttttgtttttattaaacgatctgctaatatggttgctcattgttttgcaaagattatcatgttcttttttagatcgaattttcaacaaaagtgatgtttctattaaattacattcttatttattgcctgatttaacaaattaataaaatttcaatttgattaattcaagaaaataataaatgagatttttttgataagatattaaaatatattgaatcaagataattaatgtaaaaataaattcataatatataaatttataacaactatagaataatgtaattttcctaatattaaacattaaatgaatttgctgacttcattattaaaatatataaatatattaaatggtattagtaaaagaaatgatttaatccaatccgcacgattcgatctgattcaattaacaaagtgtgaatatttgcattgtgcagattaaattggattgaaaaatttaaaatccgcacttgtgcggattgagatgttgattgacaaaaataacgacccaatccaattcacacatatttgtaaaaaaaaattaaaaaagttatataataaataatattttaatgtaaagaaattagtaatttaaacgtctaatacataaaatacaattatatttcaaaacttaatagatcaaatgtatatcctattttatatataatttttttctatatacaatttaaaataaaataaaatattttttcatacataaaattttgtttcttcctttcaatttgttatttgttattttatttattttaatttattgttgtaacacataaaataacaactaatttattttaattttgttgttagttatatagaatttttttttctacattaaatattaaataatttaatattaaaaaagtaaactaaaccaaaata

SEQ ID NO: 349603 - DNA, 679 bp, Cannabis indica
aagctcaagtggtaagcgttctagtaacaaccacaagcaagggaatgggaagaaaggaaagttcactggaaaatccgaacaagctccccaggagaatcatgccaaatacactgcattcactattttgactaaagatctagaaagtgtatacatggcaactcagtcgctggccctcataagaagcccgggcccatgaagaaagatgccaacaaaagggacatgataaagttttgtcggttccacagagactacggccacaacactaatgaatgctacaactagaagcgggaaattgaattcctaataaggaaaaacaatccacacctgcaaaaatatgataagactgaccaaggtcacaggatcgacaacaaccaagatttgctacctccaccagcagatggaattctgcaagtcattgttggaggccctcacattgctggagattcgggcgaaactcgggagaggtattcccaaacagtgcagcacgagcaagaagtcatcctggctgtggaagaaaggaagccaaaagttccacgagcaggagagccgaccataaccttcaacgaggaagatgctgtgaaaattagatttttgcacaacgactcgctggtcgtggaagtcaagatagccaataaaatagtggccagtgttggattttgtgccctaaataaaacccttt

SEQ ID NO: 349604 - DNA, 507 bp, Cannabis indica
gaccaatactaattcgtcattcccaacgttgagcttcaactccccttgatttagataatcccaagtttcaagcaactacaatgaagaacaaacatgattagtagatccataatcaacaatccaaatggatttttcattccctaaaacatatgattcaaaaacaaaagcattaccttcgttccaatggttttgaagtctgggacatctagatttcaaatgtcctttctctccacagtgagaacacaaaagagtatgtctgctcagttgttctttaattgtttcaatttctggttcaattttgattctagctctcaaaattgaagtccaagaagcaacattgtcagaggcatcatcattaatttcttcagctttcctcttgcccttattagcaaaactggagggagccctccttccaggtggcaaaggtcgttcataagtacgcaattatgtatctagcttgtctatgtcggatgagttaaaattgttgatcatgtatgatacaacaaa

SEQ ID NO: 349605 - DNA, 695 bp, Cannabis indica
atatgattttagaataatttcttctctttttgtttgatgataatattgacaggtttaatgagattattgtaggattggctaatataaatcataaagttgatgaagaaagtcaagccatcattttattgagatcgctagctcctaatcacataccaagaaggcaaggttgccatcaaatatggcaaatatatgattgaattagaagatgttcttgctgcacttaagtcgaaggattttgtattacaattggaaaagaaatccaagaaggaagaagtgtatttggcaagagggagatcacccaagaaattaagtttaaagagtaaacacaccatcactctcaatcaagatcaaatcaaaagaggaggaaactcgaaagtattgtggaaggcccaaaaacttccaaagatattgcaagaagtacaaggagtagcaaggtttcaacaagtctcataatggagataggaaggagaataggcatcatcacgtcaggaaagattcagctggagttgcaaaagatagtgacgattgctcaacgaatggagaatcgttttccatctcgaaatcttcaatgaacaggagtggacactagatgcacttatcatatctgtccgagtcgagaattatttttcgattataaatcaattgatggatgtaaaagttctaaatgggaaaatgatcattcatgcagggtcatt

SEQ ID NO: 349606 - DNA, 721 bp, Cannabis indica
gaaattatggattttggcacaccatgcagtcttacaatctcgttaacgtacaaatctgcatactgatccactaagaaggttgtttaactggtagaaattgagcagacttcgaaatagatccatcacaacccaaatagaatcaaacaaacccgtggttcaggtaacccaaccacaaagtccatcgtaatatcttcccacttcatttcaggtaaagttaaaggctgcaacaaccctgccggttagtgatgtttagccttgatctgctgacaagttaagcatctcgatacgaattctaccacattcttcttcattccgctccaccggaagtaaggtttaagatcttgatacatcttggtagtgctgggatgcagggaatatggagtggtatgagcctcttcaagaatttcatttctaagctccacactattaggaacacagactctagtcttaaacaacaacattccactatctgacactgtaaagtctttcgcttgcccagctaaaacctcttctctgacttttattagctctggatcagttagttgggccactttaatacgttataataaatctgattgtagcgtcaagttatgaagttttcctacagcaaactcaatgcttgatctgatcatatcctctgctaactgaggtgagatctgaaccatgctagctacctgtccgggaccctttctgctaagggcatcaaccactacattggctt

SEQ ID NO: 349607 - DNA, 1688 bp, Cannabis indica
aatggcaatgctagaaaggtacgtagactctttgctttatataagcccttaaatttgtctacatcataattcttacttcatgtatgacaaatgacgggtcattgttgaaagatgaagtaaatcattattcaaatccaacctaaacaaaaatcacctgatacaagcatagctaaatcgtgtattaggtcatgcatttggagaaaatgtttttcttacttgaatattgaaagaatgaccttgataaaagatcttgtaggtaatcttctccgaattcctccatctttttacttgttttatcacgtggtaaaaaaccttctgccatccacaacaagatcaatttttctctttcgaattggtaatctttgggaaatatggaacaatacgcgaaacattgcttgagatgtgaaggtaagtggcgataacttaaccataaagctggaagaatagaaccctccttcatgtacaactcctcccatgtgtcactgataagtatgtcctcccattttttggaatttcgttcagaacgcaataatccaccaagagattttactgctaagggaagacctttgcacttgtccacaattttcctaccaattacttgcaaatcttgatagtcattgagatcaaagatatttccaaaagcatgtttgacaaataattgccagcaatcttcattcatcaaagtttgtagttgatgaatatgtccggtggtcatagtagaggcgacagttgtgcttcgagtagtaacaataattctacttccatgtgatccagactcaaaacaacttttcaaactgtcccaaagtgaataagactcgttccaaacatcatcaagaacaaacagaaattttttccccttcaattcttccttcaacctccttcgaatttcatttgagttatcaacaccacatttgttggaagtgactccctcaaagatctctttagttatcttcgaaatatcaaactcatctgatacagtaacacatactcttagctcaaaatgcttttgtactcgattatcatcataaacaagttgagctagagtagatttgcctacaccacccatcccaacaataggaatgacagaaattccattacattctcttagcaacatgtcgacaatgacttctttatcaacatccctcccataaacatcagattgttctactaaaggagtaggtgtcctttgagaaggtttggattgagaaccttctcttaggccaagagcatccttttgatcaacaagaatcttaagcttacaaagaatctcgtttccatgaagcttaacagatttatcaaattcagacatgaaaattgacatagatttcaattggctaaataccttgctagcaatactgctgctagaatgatcatgttcaaactcagatcgcagagcttcatagtcaatcctatcaagcaagtcatcagcttgatagataacatcttgaagctgaataagccacatcctgatctcctcgtttcgaagttgcttctcctctgcatcgttgagcaacatgagctgacaacaacatagtcttcatatcatatagctgctctagaatcaccttcttcccttggaacaaccgtggtatttcctcagaggccaatcgttcgaaacaaaacctgaagcgaagcagagagacaaagcaccagacaaaccaactcagcagccatgtagaaagaaagaa

SEQ ID NO: 349608 - DNA, 1055 bp, Cannabis indica
gttctagttcagttgcattatttatgttcttaaatctgttcattaatgtcaaccaaatgcttcttctcgtgacacatagattaagaacatggtagttcaattgaatgggagcgctaatcatagatacataatctatagcttctatccagacatagaagtcaaacgatgatttccttcgagcttggcttaatagagataaatagttaagtactcattttagtgattatattagttcactgaaatataatttataggtagctaagtgttttaaggataaaatacattgaagggtgtaacggtgaatttgtccctactcattgtagatcatctatagaggatcactgattattagaataataataaatggataatctcatagcgtatctatatcgtgaaacacatagaactttctatataattgagagtgcaattcaaaatctatagttgtgcaaggaggagttaataagttagagaatttacttggtaaattctagatctgcttattggaagctcggttatataggctcatggtccccatacttgttgagacaaactgcttgtaagactcagttaattgatttctattaatcaattttaactctaaaattagactatgtttagtttatgaattttcactaagatattacttgattgtgaagaaatagaattttagggtttattattaattaatagactttgtggagtctaattaatatataatataagtgacaattttatttgataattaattttaattatttaataaatagttttggcattaataggattgaaattgcaaaataaggtatttgtgaaaaatagataaatgaatgagaaaaatggaaaaaatctaactaatgatgggcccacatatggccggccactatactctgattttcgctattattttatcattttttattccaaataattcaatcctaatcctaaggcgtttggttgggaggaatgaaaatatagggataggaatgggaataggaataggaataggaatagaatggaataaattttaaaatgcataaaaaattgataaaaaa

SEQ ID NO: 349609 - DNA, 663 bp, Cannabis indica
caaacaccagcagcaaacacagagctcaaacatccaatttcatgcaaaattttattactttaagcttaagaaaataaaggagagggagtccaagaattctaccttgagttgggtcactaacaattgatctttaacttagatttcagtaagaaaacaccgcacaagttgttggttcctagggcttcgaacaagagaaagagagaaaaggtttctctcaaattcacttttttttatttacttaattctcaaaaaaacaagatcaatactatacttaggttaattaccgaattgtggccagctgccaccttaaaaccagccacaaaacaaagggtaaatgactaaaataccctccccacttaactaattaataaaagatcaaagggtaaatagtcatttctagctcatgaccaaacccgacattcccaatgtctaattataccgccccattatactaaaatattagattgtgattctactgagccatacaccgcgttccatgttgtcgggcaccgaaaatgcaaaattatgaaatttcactatatgacataaaaatgcattctgaattcaaatatagcaacataaataattatttaagtatcaataaataattttcataattaaactctaattatctgctaatttctaaatttaaactaagcggtc

SEQ ID NO: 349610 - DNA, 600 bp, Cannabis indica
tcagcacccaaccagggcattcataacacagccgttccgctttctacgaacgttcaaacgaccattggagatgatactgagatccaaaacctccgcgatgctcttggactcttgcaaggtcataccaacaccctacatcatgattaggaggaactccgcgctgcagtaaatcttgcgttcgaggaacagagacacatgtttgccgaatggagggacaaagagatggaagcgttaagggctcatcatacagagattgaaaatcgtagtcgacaagctgctgtgttgatacgaaaagcctacaaaactgtcgggcagcaacccccgagtgtcatccccctaggtgaaacagacaaagatccagcgatgaatacttcccatactataaatggtcagccgccaaatcaccggtcacaggttccgcttgtgggccaagcagtacgtgggcagaccttatctagtaattcatcaggagaagtcatacctgataattccaactaggttaatggtgccggtcaacacattaaccaaacaaatcaataactaagacagccaggcgtatctgtattcgaaaggttgaggaggactcatgatctcagaaac

SEQ ID NO: 349611 - DNA, 794 bp, Cannabis indica
tctctctctctctctctctctctctctctctctctctcaaaccataacaaaaggaaacccacaaatcccatcaccggcagactccggcaacccatctctggccactgtctggccccacgcacctgaccaactgaaaccccaagtgctggcgacctcaacccccaagcgacgtcgctcctttcaccgccgttagctcgagatcgcaagtcaaagtttggcggttcaaacgttaaacggatttcccggccacctcttgtgtttgtttgacgagttgtcttcaccactagacttagctcgacgagaagaacaacctatactaagctatttttcccaactcgctactttttccggtaatatttttgtagctccacccctttccaacaatttttcggcgatatcgtgtaccattttgacaaacggctggcatgggtgtgatctactcgtcggggtggtcgtttcgatatatactaccccaattttcggtgatgtttttggtacactaattttaccgccatcgatagttaatgtgcaccgcttaggtgaggctttggaactccaaattttaaatatagtcatattatatgtcattggactcgattttgaatgtagaattcaatgataatatttatttagccatttgatgatataggtgagagtaatatctaagattggactaaaaaattagagctcgggacttgagagcttaagatcgccttttagacaaaatttaacgacttgggagaggtagggactgaacttgattattggacttaatttttatatgtgttgtataa

SEQ ID NO: 349612 - DNA, 789 bp, Cannabis indica
aagtcttaaacaagacccctaggctggccaaggtgtgcagtggatcaaaatatgtgtttttcaagactcgaacgtgttcttcgtgttcttcgtgactcaatgagtcaagaatcacaaaaaatttcaaaatcaaatctctttcatcaagaaatcacacattatgcatcctaaaactatcatgcagatcaaaataccaaaaataccacaatctaatgtgagaatcaagaatgtaaaaagcttgaacacaacaatggaaaattcaagaaaataagtaccgaacgggatttggaagattacccactagtgaaatttgtcaaagaagcctgtgggaagcttagatcttcaaaataaagtgataatcccaggatttgggggacttaggggtgtcgagctccaagggaaagtgaagagcttctactttttccttttttgaagagagagagagagagagagagagagagagagagagagaagtaaggtaaaagggcaactagaagatagaaagaaaatgaggctcctaatagctaaaatatgtatatatagtacaaagtatttgtgcaggctttgcagttgggtcttttttttttctttaaaagttcgctcattagtgtcgctaatgagacaaactaatcctaatagtaccatcggttcaaaaccgatgctaacttgccacacctattaattgtgtcgatcttggatgttgatcgatggttgaaagtctattttgctactagtgggctcaaagttcggatctagagtcagggtcgattttatggtaaagatagcata

SEQ ID NO: 349613 - DNA, 798 bp, Cannabis indica
ttcaatttcccgcttcaagttgttgcattcattagtgttgtggccatagtcttcgtggaatcgacaaaactttgtcatgtccctcatgctgacatctttcttcatgggcttaggcttcttatatgagcctagtgactaagttgccatgtaaacactttctatgtcttcagtcaagatagtgaatgcagtgtactttccttgactctcctagggagtttgttcggatttgccgaactttccctacttcccattcccttgcctgtggctgttgttggaacgtttaccacttgagtttgaattatttaggtaatggaggagttgggcagacgttccaattgaaggagctttcaacttgcaaggcttttgctcaccttctgctcgttgaatggcttctttgagcttgatgaagccttcgacacggtcaacaaaatcactcattgagtctactgacccgttcttccttatatccttccaaagttcaccaaggacttcaatgccccccagtatcgcggataactttccatcattagttacccgtgaaactttggtcgcctccgtcatgaatctgctgatgtatgctcggagaggttcgcctggtctttgcttgacttcaaccaggtctcctagatgcaacggaagttggagagaggaggagaactgtgcatggaattctgaagagaaggctttccatgaactgaactttctaggggccaacttgaaatacaattgttgggcggcttccgacaaggtagcaggaaagattctgcaacacatgtcccctcgtaccccttgcaaatc

SEQ ID NO: 349614 - DNA, 716 bp, Cannabis indica
ggggaaagaagaaaaagctgagaaaacacgaatcactctaggccctaaaggggttattacgacagaaaaagacagttcccaaaagaaaacgcagtaaaaagaaacaaccaaggtgcaaaaaagagagattctatgcattacacagcaaactcaggcaagattacttcccagaaattcaacattcaacccagatactccaaacatgcaatacaaacaaacagtagacgagtataaagtgtccagagaacttacacgaagtttgaaaactgggggttggtgtatcgtcgatgaagagaaaactggcaacgacgaaggaaaaggagcagataatctatggtgtctggaattttttctctctatggaagctttgagaaaattttgtaaaatagcgaaagtaaccaaatgaaatgaaaaggttggcttttataggccagaacgggtgtgagacagctgtgatcaagcatcatcgtacagtcagaatagcaatcgatttggattctacagatccaactgttgggacaagcgttcatcaaggtggttagaaacgcttgagtactcgactgacacccatttaatgcgccggatcattaaatggataggaaacaaatcgttgcctgcaaaaagcaaaaactgcaatgatgatggtcataaatgcatccccacgcgcccaaggcacatgccaggaagttaataagacaaccggaggcacctaagca

SEQ ID NO: 349615 - DNA, 813 bp, Cannabis indica
ttgctcctcgcaagcagcttacattgataaggtgctagagcgatttttcatgagtgacaccaaaggagcagttatgccttttagtcctggtatccgtctatctaaggaatagtgtcccaatgacccccaagagataaaagacatgagaaaggttccttatacttcagcagttggaagtctaatgtatgctatgttatgcactagaccggacatttgctatgcagtaggaattgtgagcaggtatcagatgaacccaggtaacagtaggaattgttagtctacaagggtagtgctttaaatcccataggctataccgactcagattttcaggcttgtcttgatgacagaaagtctacatttgggatggtatttactcttgggggtggagcagttgtttgaagaagtgtcaagcaatctgcaatatcagactctaccatggagaccgaatacatagctgtcgctgaggctgctaagtaaatggtctggctaataaagttcttcacacaacttggtgttgttcctggaatggaaaaactaatagttttactttgtggcaacactagtgttatagccaacagtaaaaagcctcgaagccacaagaggagtaaatcattgagaggaaataccacatcaccagagaatatgtggcaagaggggacgtactggtggagaaagttgatattgaagacaacttacatatccatttacaaagattttgacaatcactacatttaaaagcacagcaaaatcatgatataaaatgtactgatatttatgtagtgcaagtggaagtttgttgagtttcgtgcccta

SEQ ID NO: 349616 - DNA, 859 bp, Cannabis indica
ttttactttttacgttttttttttttttttttgagttttatttatagtcaagatacataaataatatgttttcttttaaattttaatatattagaacattatattctaattctaaaaaaaattcatgtatatgtagtaataataataataaatcattggtaaacaattaaagaaaatgttaaatagtagaaaatatataattaataagttattattttattttatttatcttctatatgtataaatttaatttaaagtgttaattttttctaaatagttaatttatattttataatacatactttagattatgtattattagagactatatatgttttatatattatttatcatttattttgttttttgtgtatgtataaaattaacagggtgtataggtgtatatatgttgggaggccatggccactcttgccatggttgtggctccgctcctagacaagcatgatacaataataagttttgtcactcttaaattaaaaaatatgttattagtaaacgggtacatatatatatttggaacacttttaatgggtattactcataaatagttattaacaaatttaactataaatattaattttaaaaatatcaaaccatcgaattttgatttaaaaacgaataatgaaatcacaaatttgaatttctatgcttaatgtaactacttaattaaaaaaaatataaaaaaatattcctttttacactatatcaaaaatatgtttatacaaaaatatttaactcaaactcaactttttattttttatttttcttgttaaaaaacttttttaatttttttttaccgaatggaacaatctcagttcatatgataaaaaaatgagag

SEQ ID NO: 349617 - DNA, 1015 bp, Cannabis indica
ttttggggttttgaaaaaagtgtcatattttttgtagtgtaaaatgtattaggtttaaaaaaaattaaaatttttaagtatagaaaatcaaatttccctttgttctcatttcataattttgcattttcggtgcccagcaacatggaacgcggtgtatggctcagtaaaataacaatttagtattttagtatattggggcagtttatttagacattgcgaatgtcgggattggtcgggaatttagaaattcccacgaatatccttaagtgctttttaacccttttagtgtgggaggggcaaaatggtcattttgccccataatcttttgtcctttagtggacttagtagtaggtgattatttggtttattatttgttgtgttgggtgaaatgagtaaatgaaaccacttttattttcattttacaaaattggaaaaaatcaagaaaagcaaaaatcttttttctctcaaactctctctatttcggcccctctttgagcagcaataatcttggtgtttctttggtatttcaagcagattttgagtacaattcaagctctaggtatagctcttactctttccctctttagtttcttgaaaatcaagtaagaaaatggttgcctgcttagtttttgatgttgtgcttgctgctatgtgttgttgttgttttcagaagttttgatgggtttatttgagtgaattcatgctagttttgttgttagttcttgggttttagccttgtgtagagattttaaactcaaaactatgatttttatggtaaaatgaggaattggttgctgtgattgttaattgtgcttgggtttggtttctggggttataatatggttgtttatggtgaattaaagcaggtttgatgcatgtttattagatttaaccaagtttgagttttgaactcaaaccttggagctttaatggtagtttgtgtatttttgcatgaagctttgttttgttgctttagaaatgtttattagggtctaattagcaggtctggaaagtt

SEQ ID NO: 349618 - DNA, 517 bp, Cannabis indica
agttgactcatccctaaagatgacaatttagactagtgtttataatgctaaaacaatgatttatttaataaaataagaataactttgactctcatctaaacgggacatcgttagattcttattttaattgaaattatcctttaattctccttttagctttttcattaagaaagtgcttagatgacatatcattggaaagaaggttaataaatcatatgcttatgatgtcactctatattcttctataaaaatgagtggtgcatatgactatattctagatattctatcccgtaatgatataaatcctcaatcttagaaaaatctcctacttatatatatccttaccgatatataacttaaacttagagttaaattagtagtggtggtccaagctagaataattactcaaaaatatttggtataaatttatgtcattgactttaaattagatttcaaatagaaatttaaattttagtgtccagaatacattgaacactacggtataactttcacaagt

SEQ ID NO: 349619 - DNA, 1044 bp, Cannabis indica
gctttccatatcttaaatttttctagacactcatctttgtgttgggattttatgccttaaataaaatctatttcaatataatcttatttgttatcaataagagattggaagtcatttatgtttacatgtctttttcatgcttaaggtttgatatacaatatctattaaatctagaacatattgtaactcacaattacagtgatgtcaacacagtggaaggtagttgtaataatatgcttcaaaagtttatgtcctataattcatcagtgcattagatttacactaatgtgatagacaacgataaagtttacttacacattggataagttttatgtcctttccagggaaatggtaaagtatgctagtatcagatatatggagtatacattggactagactgatattaaacttggtaaagatattataaacttaccgttgtatctttctaagtcaatatcactttgttgatcttagatcaaaagatcttaatcctgatatggttaggttcgatctcaagagtgttatttatgttcttagagttgtttgttaaagcttactaattggttcgggcaacacatacatcttgggaacatgatagtacaattgagtgagagcaataattatagatacataatctatagcttctatatggacatagaagtgaaacgatgatttccttcgagcttggcttaatagagataaatggaagagctcttatttcagtaattatattagtttaatgaaatatcatgtataggaagctaagtgttttaaggataaaatacattagaatggtaaatttgtccttagtcgatgtaaatcatctatagtggatctttggttatttggattagaacgataaataattatagtgtatctttatcttgaaacatatagagcattctatataattaagagtacaatttccgaaactatagtggcgcttagtaaattttagatctgcttattggaagcttgattatataggcccatggttcccaccctaggttaaataatactatgtagacttagttaattgatttt

SEQ ID NO: 349620 - DNA, 1218 bp, Cannabis indica
  modified_base (574)..(574): a, c, t, g, unknown or other
atttgaagaactaaggtgagataaagcagaataagtgctaacctcaaaagtttcagtaatgtcagaggcatcataattcagtatcaagacaagtagaagcataagaactaaaacaaacaaaatattgaaaaatatcatactaaattgaaagaaacaactcgaggaacaaacagaaaaaaaaatcatttcttctcgtctcttctctttcatttcccccatttcaactacaaaaccaatttgagtctggatcttagaaatttgatcctttcaaataaatcgcattaatccatttgacccacaacaagtcatgtttatccattatccataagtcttactggggagtatctttgttttacctcaaagtgttgtgctggaggtagagagactttgcagagggtttctttgtgaaggagacaatgagaataaaaaaatgacaatacaaaacaagtaatagggaagaaaacttattattgagagcaggtgcataaatatttctggtgatataataataacgaaattattgtttggatctcaagtgactcattcatgtctttcattcttttttttttttttntttttttttttttttttttttctcatcatgctatccaaaatctcattataccattaaaacaaacatttgggacagtcacaaaaactctcataaaaataaaagaaaactcttcccattttgaagcaaaattagaatatgtaacgcaatcgtgcaagtatagcaacaaacaagccaagaagatttaatcgaatattaactaagataaatgaattcttctaagatttacaagaaaatatcagaactagtctcatgattgctcgagaacaatcctataaggtaagaacctttataactactctaatttgaaaaattcctatacaaaactaattattttaaacttaaaactgaattaaaccttaccttaagctttcatgttttgagaattttctatcccgctactatcagggcttgatcgctaagttttggattgaaaaccgaagaaaatgaatataaagaggagacagttttgatagaaaacgagggtttcgtttcatttacgtttactgttataaacttataatataatatatataataaacttatctgataagtttatataaaatatataatattataataataatataataatattaataataaaataatattaataaaaaatttattgttcataattatcttat

SEQ ID NO: 349621 - DNA, 848 bp, Cannabis indica
cttgcacatgtggtgcaatgaaacactttcttgactactactacaattaaaaccaagtccttcaattcttgactggtttgaatgagtcatatgcatctgtccatgcacaaatcttgctcaatgagcctataccaaacctctctagggctttttccatgttatccaagaagaaagacaacgctctcttggttctcgtgacaatcctccatttgcggcatctgtcaaacccccttctaccaatcctccaagaaacaagaagcctcgaccttcttattccaattacagtaagcctgggcatttggtcgataaatgcttcttcatccacagctttccccccagttatggagacaaaaagaagcaggacaaaggcaaagctaaagctcaccaggcctcttcttcatcccctgttgatacccctgccaacaccactgcccgtgttgattctgaccaaactcttgctgctgcctccaacttggctggtaataatcccctctttactgattttacttagattattgatactggtgcaacacaccatatgtgtgcacacagatcatgtttcaaatctttttctaatattgcctatccgaaagatgttattctccctattggtcataaaatccctgtggtaaacataggtactgttaatataaactcttcctcactttatataatgtcctcttcgttcctagtttcaaaataaacctattttccattactgaactattggacaacacttcatttaccatcaatattaacaaaaaagttgtgtaatctaggatctttctccatgtggagattgggatagctagaaagcatggaaaactctatcttcttcaacagaagac

SEQ ID NO: 349622 - DNA, 1060 bp, Cannabis indica
tttttgatacttccaaggcttctaaacttgaggacgaggtctcttaccctatttttgaccattttagattcattgatcgcatcagagttggcatttgagcaattaaaggaagcgtcccaggatgattatcaacttgggcactaggccttatttttagggctcgagcttgtgattttcttctcgagtttgcttgaatcttcattatttctgatgatggaaaaaatgctcgaaacactttttggtaaactcgatcggaaacagtccaagctgacaatatgtcaacctgggcaacgggcccagctccaagtgtcaacctgggcgttgtgtcccattttttcccattcagaaatttcgtttaatccccaaaaatagttgaatctcaatattttctaaaaataaagaagatgctcggaagtgttctcaaaatactccattttaaatgcttcaggttgacaaaatatcaacctggacgcagggccagccctaggtgtcaacctgggcattgggccctgtttttagcacccaggttgtgttgttatttcttcttcaaaatgacttatttcccaattttgatgaagacaaagaagatagaaaagtcaaatctccgatctgatacttagaaggcacttagattgacagattgtcaacttgggcgttgggtgctcagagaccggggccccaggtgtgcaaaaaatgaacttacttagattttgattctgatgcctcaaatttgtctgtggtacgtctagttgttgtctcaatacaagttttgaccattttgcactaagacaatcctgaaaactgaaactctagttggatacgtcaacctgggcgtcgggtgaaatcctaaatgtccaggttagctttcggattgcaggtttgtgtaatttcagctctcagggcttagattaggttgctcaatgtcttcatggtacataatatcaaaagttagtaagttggattcaagttattgaagtccaaacttccatcccaaagatcctgaagtcaacctaagcacaaggctagggtcccctcccaagtcgactgctataactcaagt

SEQ ID NO: 349623 - DNA, 583 bp, Cannabis indica
aaaagttagagaatcttgcggagtcaatgaaacatctatgagtgagtatgaaattcaatgttcaaactctatgccttcactagtagagagtaatccaattgagaatgtcagtggcatcactatccaaagtagtacatagcttgaatcactaccacaccaagaagttgatgatttgattccaagttatgaagtcaaaaattcatccattgaagagtcatctccaccaaaggttaaatctcctactttagttggtccaccatcactgaaaaagccatacaaaccaattgtaccaacttatgtctctcctccaccttttataagtagattgaaaaaatccaagaaagaggagcccatcgaggagatccctgagactcttctcaaaattgaggttaaaattctatgtcttgaggaaatcaaagaagagcctccttgtgctaacattcttaaggagttgtgtccaaatgagaaaaatttgaatggagatgagaaaataagtgtgggggagaatgtttgtaacgccctaaataattaggcacgctgcccaagatacttataaagacctaatcccctaaacgggattact

SEQ ID NO: 349624 - DNA, 1177 bp, Cannabis indica
tcatcatcatcttcttcctcttcgcctacttctaaacatattaagaagccttgaaattgactttgctatatctaagataatagtagtagagttattaagctagctatatatagttctaggagatatataattaaagatataataagacttttctttttccttagagaaaatgatggaaccatattgtgatattaatgtgttgaagttaggtagctagtattttgaacttttctcagcatataattaccactcaataacaacgtaactaaggaatattgtcacatttggatttatatacatatatatattttcttgtggtgaagtactattgttcaaaaaattgaaagtatttaatttttagtggggttttcttagcttctcctaaaaacactttccattaaacatgttaattaggccttaagtataagactatattatattaaagaaagaatattgtaaactacattataaacatggaggcttcaaactctagctataaaaggtagcgacatatgttgtaacacgataaaacaactcaaaaatagcatgaaattagcgggtcggcgtttaaataagcaagtatcaaaatagatcatgattaaatttcgggtcaaactcagattaacttactaaaccccaaaatattttaacactagtaagtgtgcatatatattaggggttttttttcttcataaatatagaaaaatataaaaaagtttatttttatatgacataaataaataatacaaaatatataagatcaaaaaataatcaaaatttaaaatatgaaaaaaaaaagataataaataaatttgaaaaaaatttgtaataataagtttcgtcagaatagtcaccggtgtcggaaaagtcgccgaattattcaccgaaaaagttatcatcgccagaaaagtcaccgaaaaaatcaccgtcgctagaacaatcattgaaaaagtcactagaagtagatttctcaaatataataataaaaatagaaccggttccataacataatgaataaaaataaataacacataataattcaaactggttataaattaaaatagaaccaattttatcacataatgaataaaaacaaaacaagtagcacgcaataattcaagccgattataattaaaaatagaactggttctataacataatgaataaaaataacata

SEQ ID NO: 349625 - DNA, 563 bp, Cannabis indica
cttcgaattacacatctcacatatgctcatgcatcactcatgaggtttgctcttagcaattggctcccaaattccaacaaaactgtggtgtctcaagatttggcatcctttctttttcgaatcacctcgggggcatctattgatctggcttcttcaatcttagaccagattgtttcatttcgaagaggtaaaaagcgaacttttaagcttgtgtttctaaatttaatctataaaattttgtcctctcaaaaagatgtggcccaatctcatgaaacacttgagcctcctcttactggaactattttccaaccctcggagtattttgatggagcttttccaaagcatcctaaagctggtactgctgctgctgctggtgcaagctcaagttctgcttctgcagacgtccaggaggtcaagaatgagctgcaactggtgaacaatcggctttctgccatggaggaggttcaacaagagatgtccaaacaactgtcctcatcgatcaagctatatggggcataaattttctttctttttatgtttttgttggacatatttctatattt

SEQ ID NO: 349626 - DNA, 800 bp, Cannabis indica
ctctctctctctctctctactaagtgaaagtttattacacaagccactgtgagtgctgctgaggcttacaaatgaaattctcatgtaattctgttgatgaccagtttggctttgagatctgagggctttgattttcttatctgttactcttttggatattacggtctatcaactcttaatagctagaagttcttattggattgtgtcgtgaaatttttattgtttgtatttcttgtgaaaaatggtgtactattaatttgctttcctggtccccaagtgtaagggttaggcatgtattctagttataaagccaaatttagttatgacatgacaattagttaaaagatttaagtttctttataacttggtcctctaaatttttcttccagtggcaatttattattatgattatctctttcatctgttgagtggggaaaaaattgagaaatgctgaaaagatgtaagctggcttgaaattgctactcttattacaggtatgtgattctcttgtcttatagtgacaataactgatgcatttttagtattttgctttatgcaaatatcattaaacagactatggcaacatctgtctattacaagtatgtgattctcttgtcttatgttctgcccaatgatgaagattatttgtttatttatttattgatttgtgcattgtttttcatttttgagcttccatctctttgtgcccccatcatcttcggtatattttatcattctcatttttgtgcacacataatatgcactaaagtgttgtttttttttttgttgttgttgttgat

SEQ ID NO: 349627 - DNA, 1029 bp, Cannabis indica
gctgccacgtattttgggaaaaatgagaggcaacatttaccccctagtctcatttagtaaagggtaaatgaggcttgtacaaggcctccagatagcttataaatgtaatggcacgtgccctaggtgtgtgggttgcatttatgactgtcatcattgatatttatttgtttttgcaggcaacacttcgcttcctgtctgttgatagacctgcgcatttaatcttggtgtcagagaggtgctcaaacgttttcaaccgccctttttcttcgttacacccgttcatcccatccgttggatcatagaatgcgaatcgataccaattcccaccgtacagtggtgtctgatcatagctgccttgcaccccttctggcctataaaaaccagcatttccccttcgttgggatactctcgccattttgactcagataacccctttgagaaaattccaaaaattatcgatttcttgctgctgttcctccgtcgttgccaatctaagttctaccgtcagacaacatcaacttctagctcattaccattgtgtaagttttctgggtacactccactttcattattcatttgcatgttagggcaagatttaggccagtgcctttattttaattgtatttgatttctacggtaagacggacgtggtgaagaccgttgtatgtgtaagacggacgtggtgaagaccgttgtatgtcgtagttttttgtacgttatcgtcgtttcccttttggattttgcaaaaaacttcttcacttggggactgtcgagagtatgagacaattttcatacgtttgtccctctcttttctttcttttctctattttcactgcctttgggatattttcacccgatgtttgcctaggagaatccctgggtttcctatctttggcagacatctggagggggtctccttctagcgcttaggggacccccattccctccttttatgttagggtttggtttgggggctaactgctgaatttttttttttttctagatgagtgaggttctccgcgaccttca

SEQ ID NO: 349628 - DNA, 624 bp, Cannabis indica
gtttgattacttcgaatagcctgaacaaagtaattatcaatttcaagctctatattataccagttcttaattcaacaaagtatttttgatctcatcaaccttgtacatgcccccccaataccttcttctctatagtgttaatattactaagtcatcttttctttgatcccatcaactttgtaatgttactctaattggcatttataataattagatgccccaataccttcttctctataatgttactattactaagtcatctttctttaatacccatttggccatttgatgaattgaatattaatttcatacattgtttcataattttcaaaggagaaataacaattacaaataaggcttaattaaataaattttatttattatacagagcagttgaactctagctgctcaactaagatttttcttttaatactatatgtaacagggccgtcttaaacattttagaggccctgttctaatcttaaaaatttagcccttaataataatgataagtataattaaattctaagttcaatttttttaattattttttttaggtagatcaagtttaaaaatttatttatagaagttttagttaaaaaaaaatgtttcattcatatttga

SEQ ID NO: 349629 - DNA, 577 bp, Cannabis indica
gtttgagttcaggttcgggttcgggtcccgagtccttgtttggtttgggatccaggtccgactcccaattctggtctaggtcttattcggagtccatgtcctggtcttgttacggttctagatcgaggtccaatttcatttatgattcaaggtccaagtcctagttccagtcccggtcaatttccagttttcgttccaattttgggtcacagggtacgggtttgcgtccccttttgggtttgggactgggtgcaggtccgggtgtgggttcgggtcctcgtcagggttcaagtctaggactgggtcccaaatccacacacagactacgggtttcgtccaagccttgggtctagatccggatccaatctcgggtcccagtctggttcgatttctggtgccagttcacgagctgtgtcttatgttcaagttctggtctgggtcggctacaaggtcccggtcctagttctgtatcccacgtccttatccatattctgtgtccaggtgccacttattgtctgtgtttgggtctcggtctaggttctgttttgagtcctagtctcggttcgggtttaggtct

SEQ ID NO: 349630 - DNA, 1427 bp, Cannabis indica
gtaaagaaagagattctaagtttatttattaattaagagactttatatgtctaactaattaatatattaaatgacaatattatttaataattaattttagttattaaataattagaatgggcatttaaatggttgaattagaaagttggcatttttgagaaaatgggattgagaaatgacaaaatggcaaaattgcaaagtgaggcccattatccactaatatggccggtgactttgtatagggtttaccatctatattttttattattttaatgccatatgtggtattttataaatagaaagtgatggtttcaggaaactatgcagaagcatctcattcctttcggagaaaactttcttcacttcccttctcttttcctcttaaatttagaaccctagtgatagagtagtgctcacacacatcaagtgttatctcattcatagtgtggaagattgtgtagaatccaatcaagaaggagaatcagcatcaaaggaaggagagaaagagatccaggttcagatcttgattatgttctgctacagaaaggaattaagtgctagacatctgaatggaaggagtcattatattcctctgcaaccaatgtaaggtacacggtagtaaatctagatccttatggttttatttcattgtttcagaattcatattaggatgttaatgaaacgtacatggtagtaaatctagatcctggtaaaatatttccaacagacctcgcttttagccgatgacaatgagtcttatttagtaagcgataagtgatttatagcgatcgatatatagtaaagcaatgtaaagacataagaatgttaaagaggttcagctccgagcagctcggtaatagcctaagcctcgttatttgtattgactcaagaacaaggagaaaggttccttttcttatagctcttacaacaatatctctgaatatgaattcttagataatatctctagtgtaaagtctcgactaaactgtttgcgaccttttgcccattgaacatgcatcactatttatagggttatgaacttggagaggaagtctttcccctctcgttaccatggatagtaaacagaaaagatcgtgggataaatgcataatacaaagatcatgggataaatgtagaatactctgatcgtgggatcgtgggtatcccatatctctgtaatctgatccccaagttatagggatttcgttgatgactcacgatgcgaaagctaaattcgctaagtgttggttgctctgtgcggatcgctgatcgttttgcttccggtatgcaagcgaggcatcctgttgggacagtattctccgaccagatactcaaaattgattccacgtgtcaccatcgtgtgatgccacatcagagtgcaaaaattgggataacatatttaaaatagatagattaaaataaatatt

SEQ ID NO: 349631 - DNA, 963 bp, Cannabis indica
attttaattttatttattattttcctaatatttataaaaaaattaagtaagtatattgttgttgcctcagatttttcccaaaatacgtggcagcggccgaaggtgacacgtggacctgaaaggatatccacttacgaaaatcaattaagtgttgggcagggaagtgcatctcatggagtgagcctcccggaggagagcattagacacgcccctactctctgggaggctagaactataacaaggcatctctgagaagttcgaacagtcacttcacccgcatggggggaaacgtatcagaacctccataagaggatttggcagatggcgtaagcccctttttacggcgattacacaacaatcgacgagtctagtggcggctacattatgaggactcacatcaatcaagggaggataaaagattatatccacctactccctaagatacctacggtataggtcatgtctttcctattttgtatatgctaggaatttgtgcccctaagaggctaacacaataagacaagtgatccctttctaggattcccccaaaaaacactataaataccccatagacagaatggaaaaggggtagttcgattaattaaggaatcgaagagagtaaagaagagagagagagattcatcaagaacattctctgtaaaaatactctcatacataacaaagactcgtggactaaggctcattaatgccccaacaatgtaaaaatcacctacattaaacctcctacagctcttctcattctactattggttgccaaaaacttcggtcaacaattgttatagtgtgaactttttcacctaaaaacttgagaccaggcttccataaggatgacatgtggactcacatccctcgaggattgttgcgctgtcaaaagaggatgtcttgagaataaacctcgcctgaaccaaacttaaaaagatgatgtgacattgacagagtcta

SEQ ID NO: 349632 - DNA, 676 bp, Cannabis indica
atggtctcccttcctttgactaaggaagctttgagaagttgcagagattgagtgtctctgtggaatggactccataagcaaccgccattgttgtctgctttcacttttcaccctctcaagtctcaagtaaatgctgaatccgttaagttcatgagtgaattttatattattatttatttagttacttaccaccagcaacagagagaccaccagaggctagaggaggagaagagaaactccactgctgcgactgggagatccactgggcttccttttaaaaccgaaggcgggaagagacgagaaatgccattgctggcgactgagagatcgactgtaagggcaaaaaattagggcaaaaaactttgaaagataaaatgaaaatgaaaggaaactgaacaaaccttcccgtttaggtcgattgagaggggctgcgtttaagtcgactgagaggggcttcttggagactaaaggggacagtgagaatagagaagaaatcatctgaagaggagggctgaagcatctgaatagaatcgcacgagagagagatgcgactgtgaggctgaagcatctgaagagaatcgcacgagctgaggtgagtattttgagtttttttagggatttcagtttttgttgcgtcgattattaactctcattattatattttgcgtcgttttta

SEQ ID NO: 349633 - DNA, 509 bp, Cannabis indica
tacaggggccatggctccctcatctttctatgaaatatatacatatatacaatatgttatagctccctggtgtatatatgtatactagcaaaaagctacgtgcaagacacatatactaaattttatgtcagtttttttctatgttagttgaaagtgatacaattaaaaaattatagaaaaaatattattagttattaggtgagattattattatatgtatctaaatattatagtttattaaacaaaatcagagagcaatatcatacaaagaggaattatacaagacaaacattctcagtttgttagagcaaaaaaagaactttcaccacatcaaaataacataaattcattttgcatatattagtggatggacatatctttctctacaaaagaagatagctaaaaatatataactcaacaatacacaaacacatagacacagacacacacatatataaaatttatttttttctaacaattcaacagagagtagagtacaaagacaaata

SEQ ID NO: 349634 - DNA, 759 bp, Cannabis indica
ataacctatattatatatatctattctatttaaaatgtggccatgtaacagagttcttggtataacagtatttttaagttttctacgttaactttaacagaatatttcaattacttgacaaaatattctttattattttataatattattatatatatttaaaaataaaaattatatagatattttatataaaaataattaattttattatatatatttatttataaaaattatatctatatataatcacatctatatataaaatatatatttaaatcttaatttcacgataaatcttttgtttaaatatgattaatgatattgtcaaaaagataattaatgatatatgcttttaataatttgtacactttattataatcatactctcctaattacaaattataagaatgtatctatcactatcattatttttttaaaatatatgtctggacataatatataaaatatattttaaaagtaattaattttctaatcaaactcaaattttgtcaaaatattttctaatataatctttatatatagagtctaatataaaattagggtttttttttttttttttttttttttttttcagttttaaccaaaaaaataacaatattacaaaaatactttcagctgcccaaagaaacaaatatacaacccaaataaaaaaagttacacaaataccacttacacacactttcaacccaggatccatgcttcctgggcaaccatcgcgcaaccacgcagcaacccaac

SEQ ID NO: 349635 - DNA, 788 bp, Cannabis indica
cccctctcttcttctctctttcttcatacccatcggaccccaattggggttcccatcagacccgtcggacccaaaagtttttccagtacatgcatcagacccccatcaggatcccatcggacccgtcggacccaaaaactaaattttttcgcacatgcatcggacccccatcggaccccattgggccatcgtcttccccaaatcgtagatctgaaccttggacattgttgggcaccgttcgagtctcctccgtgtcgaagtgggtctcctccgtgacgcaatgatgagggtcagaatggtgggtgtgggtctcggtcggggtggtttgtcgaagtgggttgtgtgggggattgtgcgatgtgagttcgggcgaaggggaagaggcagagagagtttgagggaaggagagagaaagggtttgagtttttgagaggagtatttttggggttttggaaaattggtcatatgtttttaatgttgaaaagtattagtttagggaaaaaattatcccctaatgcatgcatagaaattcaaatttcccttgtgaaatcaccctatattatatattacatacacttcatagtttgatgagtattgcacccccttaaaagtgatgcattgattcactatttatctgctcaacaccgagaagaattttttagtccaattttcgtcatattcctatacacagggccgaccctgagcataggcgagctaggcctgtgcctagggcccacctagctaggggcccaaaaaaaatttatcgccttttaaaattacacattttt

SEQ ID NO: 349636 - DNA, 570 bp, Cannabis indica
tattttactttaaataaactaataaaattctaatgttaagtattaaaatcaatgtttatgatgtatttgttaattaaactacaatgaaatgtgcaatactaatttcctttttttatctcttctaatatttaaataaagtcatagtaattaatttctataaggattgtgttttggtatattagtaaagacttatcaatttatccttttggtcacaagttcaaatcccaatagaccattttttgtatttctttttttttatccaactatatctatcatatatattacatgaatattattctaaaattactctaagtatttaaagattatctaaacatatataaaaaaaacattcttataaaattaagttaaagaaaggataccttaaacttaaaattatgtacttgacttccgataaagtcactttcgatacaatcctaacaaccaaagagaaactaaaaccaaatattatcctaattctaccaaaatttcggcagcataacaactataattgaacatttctaaaaaaaatcaaaccaatttataacaacaaaatacaattcaaaacaatat

SEQ ID NO: 349637 - DNA, 532 bp, Cannabis indica
gtactaaaccatgctccccagactttgatatctatcaaatcacgcccctcaaactttgatatgtactaaatcacgccccatgaactttcacccatgctacaatttttttactaaaattagataaaaggccttaaatttgacaatcttaatagttcgaggggaatttttaacggctaaaaaagttcagggggcacgatttagtacatgtcaaagttcggggtgaaaaattactaattagcctttattaaattataagattaagaatatgatattagatatatttaattttttaaaaaaattcaagatatatatattacattatcttattcgaaatttaattaatttaaattttgaataaacttgaaatttgaaaattggttagatatttgaatttaagttagaatttaggatatttaggagatttgttaggatttttgaattttttcaaatattctctcacaacctaaattttaaattctagttaagatatattttaaatttttaatttttaaattttaaaatagagatatct

SEQ ID NO: 349638 - DNA, 507 bp, Cannabis indica
tttagtttttaagtttttacttagttggagtttatgttttcaggaattagtggctgttaggtttagttatgcatagggttcgaattctaggtttaatttaaattgattttaagctctggatattagttttggtgtagggagatggaaattgagtatgcttgagctttgaagctcaagtttagggctttaatgacatcctttgatttaatgactttttctgagaacttctggttggattatattgtgtatgcattgtaaggtatagtggaaagttttgtatagtttggtgtgattagggcatccatctagcacaagattttccgttcaggtcggccagcacacttgaattcggaaagaaggtaagaactacatataatgtgtgatatgaatatctgaatgtatgtatatgttatgtgtatatgcatgcttaaattgttaattgcactaccaacacttgtacaattatggtacagagtgcattggtatagtaaatattgtttgtgagta

SEQ ID NO: 349639 - DNA, 563 bp, Cannabis indica
cataaaaccgccccatgtttatcgtgtcgaaatctgttcaaaacattatgctataaaatttaaaggcttatacaaatcaaaaaaaaaattccttaaagttaaagaactgtctaacctttgagaggcttgcaaactgctgccctcacccttttatcttctgaaaagataatagcccctaagcctactgaacttgtattattcaatactgctgcatcaaccataagtattgtatgtctctgttcttcttgaggatctctaggtagaaattctgaattatttctatttctttgatgagtaaggctactaaccttggctccatcacgagcagatacaacagtttcataataactgtcaatccaattaacaatctgttgtggttgtcctaattgttgaccatgagtaactttatttctctccgtccatatggcccaagcactaataataattttctcaaacaaatccttttctaccacctcagaagcatataatatcacatttttgaaatcaattacctctctcacttcatgtagaaatttaaaatccagaagtttccaaatttcttg

SEQ ID NO: 349640 - DNA, 949 bp, Cannabis indica
aattttttacttatgaaattcttttaaatagattttttttcactaaattcaatttaaaaaaaattaattgaaaaaaataactatcactattattaaagctaaaataaaattctaaaatatgatctgaaataaactacaagaaaacatagtcatgaacaatacaaaaaacaaaaaacaaaaaatgagattaaaaaaatatagattgtgtagttttttatttctttttaaaattatcatgttttatctattgataaaatcctgtcaaagaactttgcatttaaaaaatgtcattaaaactctgtcaaagaaaatagtttcttttctaattctttttttaaaaaaaaactttgcattttaaaaaaaaaaatcattaaaactctgtcaaagaaaatagttttttttctaattgcattccatatagggatgatagaagctcttaatctcttatacctaccctatttttttatatatatttttcagatcattccataactttttttttctctcatctctaaaagttgagaataaaagagaacaaagtcctatagtgtagtgattattatttaaaattagctgtttgtgaaaaaactaaggagtttttcatatttcttttaatttgtttatcttccatgagcatttcatttcttgtcagatgtagatatgggtccactaccataataataattcttttatacttttttatgctttgttatataaataaatttaaattatctactgcctcaaggtcacaccagcattatatatttaagctttctaatatctaaatctaataatatatagtgctccgattatcataataattgtgggtaatcaataaaataactaacttatatctaacattgactttgataaatggaggccaatttaattttttttttattttggctactgatatgaaaaagaacaaaaaaaaagcataatttaaatg

SEQ ID NO: 349641 - DNA, 587 bp, Cannabis indica
gcgaaaaatttcaaaccgcatttttttttgcggtacgggcggtttgagcggtttgggcggtttgatgaacacccctatacattagtagtaaaaagttagatgcgaggtacgtatatgttaagcaaaaatttcacatttaaaatattaaaaataaatgcaaaatacaatttcacctatgccaaatttatagcataagagtttattaatttaagttcgacccatcccagattataagaataacctcttaattacaatccttttatttgaaggaaataccgtttgattccaatcacaatgatattaaatgatttgaaataaattagggaaattcggggtaaatttggaattgcagctgaactcagtccatttaattaaccgagctgcctacataccttctttgtgacggatcaagccacttgtagttcagaatacggtaatttagaatttggatataaggattccggtagatgaccactttcaagattcctttgctatttgaatatttggaaaaattcctaggtgtatgaccttgtatggaattttaagatttgtattttgataccattttgtggtatcggcgactgcac

SEQ ID NO: 349642 - DNA, 828 bp, Cannabis indica
ttttactcttttttcttggattggatggatccagtccaatccaatacaatctggacctataatattggatggatctgatccgatcaaaaaaatactaggtctgaaatattagataaacccaaattaaaccaataaatatatatgaaatacatccaatggatggaaccgatccaatccaacatccaatggatgttggatcgatttgatgactgaaattgattggatatagttggatcgaatctggataggcctaaaaatattggatgtgatccaatgaacacccctagatgtatgcatgatacctcgacagtaacatcaacaaatagcattaagatctcaatttttaatattttttcataatttggagatatactttttctctttatgtcgacaacttcaccgtcgtcgatatttttaatttactcattagcatgaattatttaatgtaaaaaaagtaattttttttaatgataagctcttgaaattcatgaaaattgatgaaaaggctattgaaaactttttctttctcattctcatgtgatactctccattcttcattttatttttatctgatactctccattctacattttatttttatccgctttttatataattatttttagtactttttttcttcaaaaaagtattttaaatcaaactttataaatatatatatatatatatataaatacatataaatgtaggcaagactatggtagacctaacaaagtttcctgccggtaggtaacttttttgaccattgatttaagatcatgtggttattatgtatgtaaggtgtatactcttacgataagactgcttgta

SEQ ID NO: 349643 - DNA, 1115 bp, Cannabis indica
tataatgtagcctaaatgactttttatctacctttcacctaagccatgacatttcaattgaaaaagacctttgattcgagcaagggttgttgacattagtggagagaggtaggtcatgcaagcatattgaacattggttggcggaacattggtaagagtagaatgattgtgatatatttttccaattgaaatgttttgcatctatacataattttttctaacttgtgcatccgagttaattcctagagtttctgaattaaaattatggtttggccaattgattgaagttgcacaggtggtagtggtagttcaaatatttggaggctcagttatctgctgtgtcgttgtttctttgtcttagtttttagttttactcgagggcgattaaagattaactttgggggaatttgttaggctatttttagcctatgttttgggtcataaatagagtaatttttttatgttttaggacagaattacgcttgttttctatgtttttaggtttcgcatagttgtggacgtttggggtttcaaaagtacgataaaagacaagttgagccaagaaaaattgagaaaataggatttggttcagttccagccgcaacggttttatttagagttgcggccaaaactttggcagaatagtgttttcgtgactagccaagtagccgaggcaagatactccaccgccgcggccaaagcaacactcgccgtggcgaggtaatccatggccgcagcgaggttctgtacaaatggaggccaatttcatcttttgaaatatgggacgaaaaatatgaaggaaactgggagaaagagaatgggggaagcaaattttagacctaaaagcagtcaaaaacggcagaaagagcagagtggcggcccggattcattccaccaacagtttctttcttccttccattttatttcttttatgttaaattctgttttaggaattgttatggatttaaacatgaactaaattcccatttggggaagatgatgaatgttttttaaagttttccctagttaattgccattccttttatcttgatatgtgaaattattgtccggttttatgccctaaataaaactatttacaatctgattagttatca

SEQ ID NO: 349644 - DNA, 503 bp, Cannabis indica
gaccccggccccaaacccggacctagacctggatgttgggatttattttaccaagatctagatttactaacatgtatgtttcattaacaccctaaatatgaattctttaatatgatgaaattaaacacataagagtttagaaaatcttacactgatgcagcgaaacaataatgacttctttcgctcagatctctaacccttgttcttttctatcgtagagtaataacaagatttgagcctggatctctttctctccttcgagtttggttaccattgtcttccgcactatgattgagtacttgacttgctatgtgtgggcatggtactctatcactatggcttgaattggtaaaaataatgaataaggtgcgaaatcactatagaaaggagtctctcatctattagttgtctaacagagttagaaaactatatttggtaggttgaagggttttaatgagaataagagcatcatgttccttttatagtatttcaactagggttta

SEQ ID NO: 349645 - DNA, 640 bp, Cannabis indica
ttggtgttggccaatcccgaacagcttcaattttggtcgaatccaccatgatcccatctttatccactatgtgccctagaaatgagacacgggataaccaaagctcacacttcttgaatttagcatagagtttatgatctcgcaatcgctgcaaaaccgctctgagatgcaactcatgttctttatctgattcagattacaccaagtggtagccttcaaatccccactgattgtggcattcagtcctctcttcatccactgctccgcttttaatatgtcaatacctcccagaaaagttgaaggttgcagcatcacgaaccgctcaaacactgagtctctatgcggcataacaaacccctggttacccaccactggcacaggtactggtggtaacacttgataacaaggggcagctggttgccttaatcgttgtaactcttcttcttgacgaagtatgacacttcgcatttctcgaaacatctgctgctagtcagcaggaggattagcattgccaacccccgcattatttccccagattttgcagaggtggatgtagtgccggtggattggttgggtctacaccaggctctactaacttgccctgttgtctagatgattaaagagggtccactactagtac

SEQ ID NO: 349646 - DNA, 964 bp, Cannabis indica
tagcgatgatgccatccgcttgagagtgttcccattctcgctgcgggagtgagccaaaagttggttaatttccttgccacccaactcaattgctacattgacttatttggagacaaagttcttgtccaagttttttcctccagcaaaagctaccaagctgagagaaattaataatttttatcaactgaacaatgaatctctctatgaggcttgggagaggttcaaggatctcatcagaaaatgtccacatcatgggattgaaaagtggatgttaattcacaatttctacaatgggctgattggtaacaccagaacgattatggatgccgcagctggcggggcatttatgagaaaaagtgcaaatgaggggtatgatctactcaaagaaatggctatgattaaccaacaatggccaactaaaagaagctaaatgaagaaggtagctagtatgcacgaggtagacgccatcaccaaattgacagcctaagttgaggccctgacaaagctgatggatgtgtaagcaaaacaggctcaagttgcttgtgagctctgtgggggtccccacacctatgacaaatgccccatagatgtgaatagtttcccgatggatcaagcaaaagccatcgggaattattctcaaaacaacaactatgggtacaatcaaggaaggggtcgacggcagaatgtacaggggcagtcctctaatttgcaactataggggttctatcagcaacaaaatcagccccaatagaatcagcaacaaccacagaaacaaggttctagtggagggtttagtctacaaacagatttgttgctacagtttatgacagagactagatcatccattaaagtcttagaaaatcaaatggggcaattggcgactcaaatagctacccgccgtcaaggtaacttgcttagcacaacagaggtgaacccaaaagaaaattgtaaggcaatcaccttg

SEQ ID NO: 349647 - DNA, 786 bp, Cannabis indica
aaaaaatactaaccccctattcatgacaatgttctcatcaataaatttggaaaacttaatgcactgctcagcaccagtattaaaaccaatttcatctttaaaaggattgattccatgcacaataaatttatcatcttgcacaatcctcattaagtcttccttcgaagatgacgaagacccaaagtccacaacatatggcgacagaacaacagagcttggtttgggctgcctcttttgaacctccggagacaaatacgattcatcgtacaaaaccaaactcaacttatcactatcatcatgaaacgaaacatcatctgtcttcaaagcactcttaacagtgctatcaaccacacccttaagaaaatcaggatcgataaacatattttcaaaattcaaagtctccttttcctcctacaaaattgaataaaaaatatttagaacgaacattaacatccaaacaatgcaaaacataaatgtgaaaaagcttgtacctcagcttgaacagaatgaacggacaactgtaacgcaccaccatcatccgttatatcctgatagtatgcctgaaccataaattaattgaaacaagatttttaacataaatatagaaactggtttcctacagaaaataacacagaaacatggacagaaacaaagaccataaaccggttcctacagaaacctgttttcactaaaagtcaaaaatcataataacacatccaacacagaaactacattaaacaagatgatgaaaaaaatataaaaaaaaaaaccaagaacaacataaat

SEQ ID NO: 349648 - DNA, 965 bp, Cannabis indica
ggggctcctacccctcctgcatcaggttttagcaggggaggtagtggctcggccatagatcagaaaagaaaggcatccactgcaaccagtggcttgggtcagaacaagaggttccggggaaaccagggtcgaggtaatcgctagagcgacaccgaaacccgagacacttacccagagtgccctagttgtaaaaaaagcaccatctgggggagtgtaaagggcaagggtgctttcagtgtggcatgccaaggcattacaagagggattgtccccagctcaggaccgaaacaccaaagactgcagcgaaacccactacagccagggtgttcgcgataactcaggctgatgcaaaagccagcccctccatggtaaccaatcagctctcggtcaacaactcttatttctctgtgttgtttgattatggggccactcattcttatgtggtggccagaatttttagtaaattggatagatcgcatgatagctttgaaacagggtttggaaccctactacctgacggagagttagttatctccaaaatgttgattaggtctatgcggatcagaatagaggatagagagttgagtgctgatttgatagagatgaatttagtggattttgatattatactgggaatggatttcttgtccaaatactcaaccagtattgactgtaagaggaagatggtaatcttccaacctgaaggtgaagaaccgtttgtcgttgtcggttcggtttagggatctcggatcccagtaatttcagtgctatcagctaggcaattgatacaagagggatgtctagggtttttggccatggtattggatactactcggcctgactctgttcggctagaagacatcaagatggttcgacaatttctagatgtttttcccgatgaacttccgggtttaccacctcagagagaaattgattttgtattgacttggcacctggagcagaac

SEQ ID NO: 349649 - DNA, 666 bp, Cannabis indica
gaacaagactaggactgtgaccatgacccggacccagacctagaatcgaacacagacctagcctcacactcaaactgagactggaactcgtgcccggacacggtcgtgtacccagaccggaacttagacccggacctggacctaaatctgggacactatcccaaacattgacttggacctagataggaatccagatacgaacctggactcggaacaagacccagactaggatcgaaataccagacctagatctggactgagatcgtgacccagacccaaacttggacccgcactcgggacccaaacttgcacctagacccagatcagagaccaaacctggacacaatccctgacacagactcagacccgaactcaaacacccacacctagaatcagacacaaagctagaccaggacccggacccaaacgcgaacttagaccaggatcagaaccaagacttagacccagaactaaatccagacttagattgggattggaactttggactcggacccaacctagaccaagacccaggacacaaaccacacccagagcctgtcctagaccttgattgaaatccggacccgaacccaaactcagaccaggacttgaactctaacccgaactaaaacccaacctcgaactcagaatcgcaaatggaactag

SEQ ID NO: 349650 - DNA, 716 bp, Cannabis indica
tagtgggggctataacccccacactcttattactgtgtccgtcactaagcgcgtacacactatgctcgccatattacacgactgaatattggaggagggcatatgaaggatcaattatgctagttggtgacgaggatgattgggaatcgcccgatgacatcaagaacatgacagttagagtgcgtgttgagaagcaaccagtagggcgacccaagaatcaaaatgttggaaaaattaagaacaactgaactgctagtaacggtggaaggattatctaatcacgaaattgtagcaagtaaggtgccaaggggcagaacagaagcacttgcaactaccgagattaaaaatgttattttaatttatttgtaccgtgatgtgttggaatattatgtattgttattgaattaaagtttgactattttaaacattagaatttgtgatattttatgtttacataattattataatttgttgcatgaaagaacgacataaaatttgtgtaaactcttaaaaaaacataaacataccaataaaaaaaatcagttacattgttatcttaataaataccaaataaaaaacacatttgttcatgctaaattctggtaaaacaaatctacacaccaccgctctctaaatttcttcatattctcatcgtgcacattatcaaacgtagtctccagcatactatgctcgatgtgctctatcacgtacatccc

SEQ ID NO: 349651 - DNA, 640 bp, Cannabis indica
atattattaaaaaaaaatataatcaaaattttaaatttaatataattttatgacttaattattacttataaaatacaaccgcacgcaaagcgcagtatgtttttttagttttgagattttgaagcaaacctttaaaaatgtatatatagttttggaaaattttataatgcaccctcttaaaaaagatataccgatacatttctatatgttttagtatccaaaataattttgttgtcaatttttttctcatggtcatgaaaattatacttatttaagacattttgtaaaattttaagaaatttaaaaaagtttaacacgctaaaaattacattcaagcagtgtataaaatagactatttgaacattattttttatatagtaaattattctgaatttcttaaaattttgtaaaatatcttaaataactataacgtacatgaatatgaaaaaaaaaaatacactaattttttttctaaatgccaaaacaagtagagaatgcatctgtagccactaaggctagcttagtggtgagggggatggaaaaaagggagaggtcatgggttcgaactaggaccttgaaactattaagctattaaatgattgtaaaataccattacgctacacttaaaaaaaaaaaaaaa

SEQ ID NO: 349652 - DNA, 570 bp, Cannabis indica
atacaataatatcataaaatggagcaacctcattacaaaactaaaccaattttgaacatgtgaaccctttgaaactaattttgacactatgcaaaatcataacaaaatataaatgataaataataaagttaactgaagataatttaatcaatcaaccaaatgaaagaagaaaaaataacacacacacaaaaaaatccaagaaaaaaatactaatctcaaatataatcaaaacaacacacaatgcataataataatctaaaaatggaatatatgtaaaaatcagtttaaaacctagaaacaatatataataaaaagaaaacttgaaattaaaatttttacgacaacattataaaatggagcaacccattacagatccctcaaaacatgtgaaataagtttcgaacctgtgaacccggtgaaataagtttcgaaccgttgaatccggtaaaaccagtttcaaacttgttaactttgtgaaaccagttttaaccttaagaaaaatcataaaaatatctctgaaatcgtaacaaaacttgtgaactcatacaaaaccataacaaaaataaaatg

SEQ ID NO: 349653 - DNA, 569 bp, Cannabis indica
ctacctgtgtgtacccttgtgccacccaccgagccatgttcctcacaattgtaccgaattcatcacttttattcttaaaaatccactttgttccaatcacattgatacgttttgggcttcgaaccaaaatccaaaccttattgcgaacaaattgattgagttcctcttgcattgcattgagccattcttcaaaagtcatgacttccttcatattttttggttcaaattgtgagacaaaacaaagaaagctaattaaattaacataccttcttcacgttaccatgctttcttcaagatttctaagaatgagatctttgggatggttcagtttaactctagtgcttggttccttcaggatagtattagtagtgatgtttggatgactgagatagtgttctagttctcctgtatcaattgcagtggccgattcgtcatttgcgtcgttagaaacgagttctgttgcattagaatctacttttgctacttctagtggagtatccattaagctgtctatctcggcttctgtggaaaattgtgaaaaatctttaaaatcatcaacaaccacgtta

SEQ ID NO: 349654 - DNA, 619 bp, Cannabis indica
aattctataaattttatgggagtggttggtaatgatcgggtcacctgcaccactttccagttccaggaggacgccctcgtgtggtgggagttgataaccctcactcgggacgtcacagttatgacctgggaagaatttcaggagttttttaactccaaatattacaatgaagccgtccgcaatgctaagcgaaaagagttcactgagttggtgcaaaccgagggaatgtcggttactgagtatactacaaagtttgaccgtctgacgaagcttgctgtgggtatcgtaccaactgactttagcaagaaagagaagtatttggccagtttaaatgtgaagatcatgcatgatctggtgatcaccactaatgaagcaaccacatatgctgaaatggttgaaaaagttttgagagccgagagtgatgtgaaattccttcaggagccccgagtgactcagagtgttggtggtgttggagtttattttaccaggatcttagatctactcacaagtatgttgtttaatacactaaatatgaactttctaaaacgataattaaacacatataaagttaagaaaaccatacattggtagcagcagaataatgtctccttctactcag

SEQ ID NO: 349655 - DNA, 820 bp, Cannabis indica
caagtgagcggcattattagcagatcataaatatgagagacctgagctccagggaaattggaaactaaaagagaaatgtcgctaagcaaactatggaaatcagaactagctcttgcgaagatagtaatcctttaactactgccaaagaatccgtttcgatgaagtgtacttgtagttgaaggtctttgatccactgtagattatgcattagagctaaagcttccataatgtcgggtttaaaacatcctttgaaggggcaagacattgcagcaataatgtcaccagagctattcctaagaacagcaccaaacccagacatttgattccttgcgttgatagcagcgtctgtgttcagtatcaggcgacccgaaggagggttgagccaagagactgccgagtttcctgctgaagaaagagcagcagaagttgttgatgtcgtagttgctgatgtttgtctagcagagtgataatcctccaagtaagagagtgtaaaataaaggagaacatcatatggttttggtttcgtaccatgtttctctttattcctttttgtccaaatgctccataaaatagtagcaaattgttcaagctgcagagaagaccagcaggatgaaatatgaagaaaaaattccatcaatttcatttctggtgcaaacagatcagcgatattaaaggctgaagtttgccaaactttcttggcccttttgcagaaaaagagagcatgtgggatggtttctttagttctgttacacaaagagcagcgatcggtatccgaaatgtgtcgatagtgaaggatgtccgcaactgggagacaatcatg

SEQ ID NO: 349656 - DNA, 543 bp, Cannabis indica
ataaagttaatgtcatcattgtagttcctattgatattggtcaaactaataattattttagaaaaataattttaaaaaacaaaaaataattaaaataaattcatattattcaaaaaaaatatattatatacatattaaatgaaataaaaattaatttttccatcttcttcaagccatattatctttacagattaacaataaacttttttttgtaaggagattaacaataaaatttttttctcgattcaaatgctatttttcaattatatttacaaatattccaaattatcattgcataaactttttactaatacttttcaatcagtgaaacgaaaatgcaagctttaattcccgtatgaaaaatcaaactttcaatcctaataatcaatagaaacaacatcaaattttaagttctcaaaatctatacgaatataaataaaaataaatctcataaacacaaactcaaacactagaacctcactaaaacactaaaactcaaacattaaaaaaatacacacaataaaattcgaacctagaacttaa

SEQ ID NO: 349657 - DNA, 657 bp, Cannabis indica
gatatgggcactatgagtttctggtaatgtcattcggattgactaatgatcctgcgacctttatggatctcatgaatagggtattcaaggatttcctcgataactacattatagtatttatcgatgacatccttgtatactctcagacagaagaggagcacgagcatcacttcgaatggtattgcagtggcttagggatcacaagttgtatgcaaagttcaaaaagtgcaaattctggttgtctgaggtatcttttgtgggacatattgttggaaaggatggaattatggttgatccgagcaaggttgagtcagtgaagaattggcaaaggccaaaatctatgacagaagttcgaagttttcttggtttagtagggtattattgacgtttcatcgagggattttctaaaatctctatgcccttaaccaaattgactaagaaaaatcagagatttgtgtggtcaaacaactgtgaaacatgttttcaaaagttgaagcaacatttggtaacagctccagtgttagctttgccatcacatcaagagaaattcgttgtttattgtgatgcatccagacagggtctaggatgtgttctgatgcaagctaacagagtcatagcttatgcctctcatcaattgaaagattatgagtagcgcta

SEQ ID NO: 349658 - DNA, 279 bp, Cannabis indica
tgaagtcttgcacttttttggacgtgatggttgccagtggcttggcttccgtccatttggtaaaataatcaactatgaccactgtgtattgcacctcgcctttgcctttaggtaactgcccgatcaggtcaattccccaaatggtaaaaggccaaggactttgcatcggagttaattcgttgggtggtgcacgaggtagctttgaaaatccctggcatttatcacatttcttaacgtaagccttggaatcttcaatcatggttggctagaaataacctt

SEQ ID NO: 349659 - DNA, 612 bp, Cannabis indica
tttgatccaatggtcaagaataaaatatctatacatgggtaatacccattaagagcatacccatatatatatatattctttgatttagaaaacaagacagtagttggggtaatgatggttgtgtggtggtggtaataatagttgtgtggtggtggggatgcttatgataatggtagttgttgggatgaagaacacacaagaacaagaagaaatgaaattgaagaaaaaaaaatatattattataaatttagacagatatgagtaataatacttgtattcttttctgctctttcttcatttcacctttcttcatcaaacttatacatatataagagaatacatgcatgtatatgcatataaatattatactttcctgctacaagttgaatactattctatagtattgtaggtttattatgtagagtttactacatatctatccgtagtcattcataacactcccccttagtatactctacaatttgtttataattaatactgtctcgttaaaaaaaactttactaggtaaaaaaacccaatgggaataagaccatagtaagggaaaaagactacagttgaataaactccccctcacaataacattaccagtta

SEQ ID NO: 349660 - DNA, 598 bp, Cannabis indica
gttactcaagaagaagctgcacagctcctatctgaagtgcacgacagattctgtggaaatcatgccgccgggcaaagcttatctaagaaaattctaaggcaaggttacttctggccatcgatgattgaagattcaaaagcctatgttaagaagtgtgacaaatgccggagattttcaaagataccacgagctccacctaacgagttaacacagatgcaaagtccgtggccctttgccattttggggattgacctgatcggaaaattacccaaaggtaaaggaggagtgcagtatcaagtggtagcatttgattactttactaagtggactgaagccgaaccactcgcaatcataacatcaaagaaagttcaagactttattgtgaagaacatagtctgccagttcggactaccgcacaagacagtttcagataatggcaagcagtttgacagccaatccttcactaatttttgtgcgaaccatggtatcatcaaaagtttctccgcagtggcgcatcctcaagcgaatggtcaagttgaatcagtcaacaagaccttgaaggatacaccgaagaaaaaacttgaagatgccaaaggaa

SEQ ID NO: 349661 - DNA, 991 bp, Cannabis indica
aaatttacctgaacaactctggatattttgctgcatatccatctcgagttcccaggttgcctgttccactttacttttctcccataataccttcaccagtgcaattttcttgtttctcaagactttctctcttctatcaagtacttgcaccgattgttcctcatatgataaatcttactatagttccaatgcttcataactcaagatatgggatgaatctgagacatacttccaaagcatcgaaacatgaaacacatcatgtacagttgccagcgttggcggcttagccaatctgtacactacttgccctatcctctaaaggatttcaaaagctccaatgaaccttcttaccaaagcgtttgatgcctttcataggtgatacccggagaaataccatatctctaatctaaaaatcaatctcctatcactttggatcaacataactcttctgtctgctttgacccgcaagcattcctggtctaattttatctactgcctcacttgttatctgaacagcctcggggactaggaactttcattcaccaacttcatcccagtgaatatgtgatctaaactttcttccatataaaagttcataaggggccatcccgattttttcctgatagctgttgttgtatgagagctccatcaggggaaggtactttatccatgatccttcaaagtcaagcacacatgcccgaagcatgtcttctaagatctgaatagacctcttaaattttccatccgtctaaggatgaaatgctatgctgaatttcaactaagtacccataggtcgatgtagactctcctagaatcttgatgtgaatttcgagtctcaatgtaaaataatggactttgggactccatgaagacgaacaatttctttaacatataactcagcataatgatcaatggagaacggtccggtagactcaatgagtgattttctcgaccgtgctgaaggcttcatcaaacttgaagaggctattca

SEQ ID NO: 349662 - DNA, 542 bp, Cannabis indica
acttggcaaattcatcggcaaaaaataaggatcgatttgtcagatgcatcactagtgcttgcaatattagcagagtgttgttgtcgattcttaaactgtaacttcctacactcaaacttggtgtggcctggtttcttacaatagttgcacatgatgcttccagaatttggtgttcgattatcaggtccttgtgaattgcctcctttgaaaccacttggagtagagttttttccggtgcagaagtattacgactcaccaaggcgctattaagaggagttgaagaggtagtttctgtgcgaagaacacgagtaaacacatcttgtaaagaggagacatcagaaccagagagaacttgtgactttgcagagtcaaattcagatgagagtcctgcaagaaaactcataatagccatctgctctctttgacgctgttgaacttttacatcaggactaaagggtaatagcacattaagttcttcatacgttttcttgaaagccataaaataattcataagagacttatcttgtttctccgcacgataa

SEQ ID NO: 349663 - DNA, 571 bp, Cannabis indica
aaattttatataaaataaaatttttaaaatgggatgtgtttaaaaaattttaaagtgtaaataaaatttcccaattataattacatatttaatcttttgtaaaatgactaaaataaatacattaacatctttttttggtttattaatttaatttttaataagtacactccactatttttttcttataaacactacactacttaaatttttatataattataaatttagaaacaaattgatatgagtattttttaactccaaaattattaatggaaaacaccgagatgatacaaaataaatttctgtatatgtatttaattcaattttatattattaatagggaaatttgcggcaaaagtccccaaaaagttcacgttgatacagattagtccccaaggtccaaaaatagcggcaatagtcctcaaggtcacactttttatttgtccgttggtctccaagttaacagatccgttaaacccaattcaaatgccacgtgtcgaaatattattggtggatattattattttaatttaaaaaataaaaataaaaataaataaataattttaaaaaa

SEQ ID NO: 349664 - DNA, 521 bp, Cannabis indica
ggccgaaagtgtagatctcccattcactgggatgaggcaggggagaagaaatacctaggtccagcatcagtacagcggacaattgaggcaattgagaagattaaagctagaatgcttgtctctcagagtaggaaaaagagttatgcagatctgaaacgcaaaaatgttgagttccaagtaggggatcacgtatttttgcgagtatctccaatgaaggggatcaagcatttcgggaaaagaggcaagttatgcccaagatttacaaaaccttttgagattctcgagaaggttagacaagtggcatatcggttaccttagcctccagctctttcagcagttcacaacgtatttcatgtctcatattgagaaaatacgtttcggaccctgctcacgtacttagctatgaaaatcttgaactgcagccagacatgtcatatgagaaacagccagtttttatccttgacagaaaggataaaggtacttcggaataagaccatagctttggtcaaagtactctggag

SEQ ID NO: 349665 - DNA, 625 bp, Cannabis indica
ttcgtgacgtttgctctcctcaggtttccctttcaagatggtgacattagctggcttgtaaaattttgcatcggcataattcacttgttccccgtaaaagggattcgggtctgcattgacacttttgactttgccttccttgcaaaacttaaagcattggtggagtgttgaaggaatgactccatattcatgaagccatggtcgccctaacaacacattgtaggatgtatctgaatcgatgacatgaaataaggcttcagaatttaactcgcctatttcaatttttagtgtgatacttccccttactttttctccagcttggttaaaaccttgaatagtcaatgatgatggagacaattgacgtgggtgtaacccaacatctctcaaggtttttaaggggagtacattcacagccgatccacaatccaacatgatgcggctcacgcgattatcagcaaccatacccgtcacgtacagaggtcgattatgtaaggcagctcccaactgacgatctttatcatcgaaagttatgcatgccatacaagaggtatgcgtctcaagtgatataggtttcattggctctattttctccgtataaaattcaggacttgtcaatgcgacaaca

SEQ ID NO: 349666 - DNA, 661 bp, Cannabis indica
  modified_base (571)..(571): a, c, t, g, unknown or other
agggtcctatttgtactattttaaaaatacagggtcgattttgtcatttaacaaaacacagggtctaattggtaatttttgcaaaacagagggtccaaaatagtatttacccaaatttaaaagatgttaaaaaaattaaattatcaagttgattttataaaatattagcttaaaagatatatatatatatatttatatagttcagttgatattattgtctatataaaattagtgcatacatttaaatattttgggcatttattctcactacaaattcattcaaaaaataataaaattatattcaaatgtttcatcatcttctttttagattttaatatgatgaatttaaaatatattaaataaatttaaattaatccaataaatatacatgtttaatggatagaattgattctatctaataattattagattagttcagttaattaaaattattagaccgatttgattgaaaaaaaatccaaacattcattatttaatttgattgaatctcaataaacctaaaattaagtagatataaattagtgaacagactaattattactatacatanattatttgaagtttttgagttttttttgggtattcatttataatatttttaattactttttttttaaaaaaaaaaaaaaaaactttaaaa

SEQ ID NO: 349667 - DNA, 1104 bp, Cannabis indica
gcaacaaaaaatcgtagagaaactcctattgcaactagcgttgcaaccattttagaaactcaaaccgtaaatttaaaaaaaaataaaaaaaaataatatatggggtaattcctttttttttttagaaaaacataattcattaagataaatacactatcataaaagaattcaaaaatcgtagacaagcatctgtccaaacataatcccctaaactagtaacaaagtttgtcagtgtgtgggcaacaccattcgccgaacgcaaaatggcgctgcaagaccaaccaccaacatcagctaataaaaaatagatatctaataaaatagattgaaaactaaaattcatgtgaagcttattaatccaaccaattgccactgtagaatcactattaataatggagatattgaaaccatattaatgcgcaagagtcaggcccaaacgaatggaaagtagcttcgccacattaacagagaaatcacctaacacaccggatgaacacgccacccaaactacacccgcaacatcccgtatcactccccccatccgacaaaacccctctctggtaccaccgaagttagtcgctagagcaaaggaatcaggcagtggtggtatccatcgagtaggtcggtttgtaactgggtttgtaaggcccaatcctaaatgaaggccctgtctaccatattccttaaactccaacatgtgattatgggctaactttgggacaacatctaatctcgattgcttgtgaccaaatactactgagtttcaatcataccaaagccaccaaagagttgtcatcaacaattcaaaagcctcacgagatagcatgtcaaagagaaataggagaatttctgtaacgtcctcgcctcaagcctccattgggtcctcacacccacggaatgaatggctcttatacacgagtacgccactctggctgcttcctggattgatgactgaccctacagaccaacacgagtgtttccagcatgctttgtcctcactcgcacgcttcctgggaaaacttcccaggaggtcacccatccttaaattgctcccaagtcaagcacgcttaactgtggagttctttcgagatgggctaccgaaaa

SEQ ID NO: 349668 - DNA, 551 bp, Cannabis indica
gtaaaattcatgcaaacataaatcacttcaaatttcttatagtgataactaatcagattgtaaaggcttttatttagggcacaaaatccaacaagaacttggaaagacttgattactttaaaatcgaacaaattccgagagaactaactccaacaccgatgccttaccaaaactggcctcgcagaatgacttggatgaattgaccttagttcatgtggagatgctgtagcgtagccaagtatacgtgtaaacgaaagaacgtcgagatgataaacagctctcctacatggatgactcctcttatcaattacttactcgatggacaacttccaaatgaaaaaaaagaggcgcaaaaactattgtattcagttcctcaatacgcaattaattgaaggcaaactatatagaagagggtactcgatgcccctacttcgatgtgttctccctgcagaagcaaatgaaatcatcagagagattcatgaaggcttttgtggggatcatgcgggttggcaaagcctgtctaaaagatcattagataaggatattattgg

SEQ ID NO: 349669 - DNA, 555 bp, Cannabis indica
aaagagttttatttagggcataaaacccaacagaactgagtacgggtgatgcccgtgccatccacaatgaagtactcatcaacaaaacgcccaattttgctaatgggcgaattcccaatgcccgtcaaccacttgaagtctggttgagagaaatagaagtactccgacctgccttgcttagggttggaattcaaatcaaagaaccagctaacttcgtggggagacagcatatcccacttctgggaggtgtaaaggacaaagagggcagatagatatttaatgcccttgggagtgaactgggcgggggagaggccaaagaagtccgccacattcttaaagtattggtgcaaaggcatcaatgccccttgttgggcatgagcacccgaccaagcgcacattccctttctagggtttgtggcacgattattgtgggcgggagtgtagcagtccaatccgttcaggtagccaccctggtcgagagtccgcaggcgcaccttagtaaccctggacggagggcttacccacctggcgcccaaggctgttgggttttatgcc

SEQ ID NO: 349670 - DNA, 740 bp, Cannabis indica
caattcctcaaaatattatccatggttccaggtaattcactaaattcattataatataccttcacattttcttatattagttgtgtataaatatttatcggtaattaatagttttgtattatcagaattgtattggtacaattgatggaactcatgtgagtacatgtgtccctcaagataagcaagtcagctatagaggtcggaaaggtgtagtaacacaaaatgtcttgtgtgcttgtaattttgacatgttttttacttttgtatctgccggttgggaaggtaccacaaataattccaggatattttatagatgcaattacaaaactagaatataaatttttattgcccaaagaaggtattgaaagcctaatattgtttttttttaatgtgatgatgcatatactaattattcttttttggcatattaggtgaatattatgttgtgcattctgcaatcccatgtacaaaaggttttcttctaccatattgtggcgaaagatatcacttgcaagaatataataaagaggtaatcaacaacgtggtaagaaggaattgttcaattattgtcattcttcactaaagaatgtgattgaacgatgttttggtgtgttgaaagcacattttcctatactgaaaatgatgccacgttacaaattgagttgacaaactttgatagttattgcttgttacgctcttcataatttcattcgtcaacgaacacatcatgatcatatgtt

SEQ ID NO: 349671 - DNA, 647 bp, Cannabis indica
ttttgtttttatatatatatttttacggaattctacatagaaattcctattgcaactagttttgtaacttaaattgtaataaaaatttgtatagaaatccttactgcaactagcgctacaaccattttaaaaacccaaaccataaatttaaaagaaaagttagaaaaataatatataaattaatttatatgaggttaggcataataacactctttattcaccatgtggttttctgtctcttctggtggctttgtgtagttttgtcattttcttgaaataaatcatgtctcttcaacacatctgaaagttagatatgtgtatatttactatatctatcatatgcaatattaattctcaagatcttttctatatatattatgatcagtaatgattactatagattattgtgtaaaaagaagtatatatataattaatattaagtatagtatcgcagtcctttacactgttcattaactatggtccaagctactataataagtctatacccacatgtaataaaattatatagaatactaaattatattccttctattttttttttttgccgttaaaaattcccctgaattattgagattgttagatttaaagatttttgtctaattttagtaaaaaattctaacatggat

SEQ ID NO: 349672 - DNA, 660 bp, Cannabis indica
ataacataacaataataatatgctcatcatactatttaaacaataatgctattcatatatgtctgtatgtcacagacctgcatgttgcactcacatgcctatctatgtctacatggcatagacttatgtgttgcgctcacacatttatttaaatctacgtggcgtagacttacgtgttactctcacacgtctaattactttaaggccttagaattggttcatctcggttatggttaccgagtccaacctgattatgccttaagcgcattatccatgaatctcattgcatataacatggcatggcattttcacacatatatcactagggtaataaccctagactattagactgttcctattagggtaataaccctaatcatggttattaaacaatcattcatatcactttcaatataagcaccactgcgcatactctacttgttgatcactgtcttacctattgtcccgcaatagcagagattctgaatccccgagtgctcctgatcaggtgccggtaatcctagtcacacaaattcgagattttcacgcatagggtttaccccagatttcaaacttataaaataatctcaaggcatttataattcatataattatacaaagctcggaaccggctttccaacgatataaagaactcccaaa

SEQ ID NO: 349673 - DNA, 1075 bp, Cannabis indica
gatgttaataaaacatacttggtagtaaatctagatcctggtaaaataattccaacagaactaaacttggttccagtggaaatggtaaatgagccaagtatatgtgaaaaggagacatgaagatggtagatagctcgtccacatggatgactcctataatcaactatcaactcgacggaaaacttccaactgacaaaaacgagacacaaaaactcttgtattcaatgcctcgctacattaaagtagaaggcaagttgtatagaaggggatatttgatgcccctccttcagtgtgttcttcctgcagacgcaaacgagatcattaaggagatccatgaaggcttttgtggggatcatgcaggttggcaaagtctatcaaaaaagatcattagacaactatcaacaaggacccccatgaatttgtcaaaaaatgtgataagtgtcagagattctcacatatacctcgcgtacaaccaacggaactaagaatgatgacctcaccttacccatttgctatatggatgattaacctgattggggcacttcccacagggcaaggaggagccaagtacgcagtggtggtagttaatttcttcactaaatggactgaggctgaacttctcgtctccataacctacaagaaggtcctcgactttgttgtcaaaaacattgactacaggtttggaattacaatgaagatagtatccgataacggaactcagctcgatggtgacttattcacagatttctgcgagaggaacaaaataattaagagcttctcgttagtatccaggcctcaggcgaatggacaagtggaagctgttaacaaaaccttgaaggatactatcaagagaaagttagatgctgccaaaggtagatgggtcaacgaactacctcaagtactttgggctcatagaactactgagaggacagcaacgggacatactccattctcgctagcatttggctcggaggcaatgttacctgtagaagtaaatatctcgactcatagacgagagttttataatcaagtagataaccaagaactcttaaaattgtccttggatttacttgat

SEQ ID NO: 349674 - DNA, 538 bp, Cannabis indica
aaccaagaactcttaaaattgtccttggatttacttgatgaaaaacgtactgagtcgttgattactaatgcagcgtaccaacatcgagtaacaagatacttcaacaaaagggtcaaaaagaggctattcaatgttggagacttggtactaaggtgagtattcgcaaatatgagagacgcatttgtaggagtattcaacccaaactgggagggtccttatgtgattgaagtaatagtaggaaccggggtttacaaattagctcgactgaatggctcgctaataaagaactactcgaacgtaggacatttgcgaccctactaccagaaaactgatcttgtaactcacatttctgatgtattattttgtacttcagttatgaataaagttaatcattgtttccaagtaatgacaaagtattactctttaaaattacttgaggggtatatgtgtatgattaaccagtatttatctggatatacatgatatagtgcaaacccaccactttaaaattttttaaagttcttgttgatcaaacctt

SEQ ID NO: 349675 - DNA, 777 bp, Cannabis indica
cacaagggttaacccctgatttcaaacttataaaataatctcatggcatttaaaattcaaatattcagatagagctttccaacggtatatagaactctcaaatcgaagtccggatcacaaagttttgcctatttgaagtttacaaaaggatctgcccagaaagaaatgggtgcgccacggcatgctaaataccatgccgcggcacttgggttcaaaacccagaaaaccagcagcagaactcgaattttcagcctccaatcaacaccaaatcaccccaaaccacaaccaaacttcccaaccaacaaatagggttgctagcaaataagatgctcaaataaacatatttcatgcatcaattccaataataaatcctcaatttcagattgcataaacacataaaattcatacatctatctcaacaaagttcaagctcaaacacatgaacttcaacctaaacatactcataattccaattgcaaacacaccaattaaaatatattttccactagaaaaataccctatactcttactccaagatcaacaacataaattcccacaaaatcatgcaattccataaacaattcaccaagattaaaacccaacaccatgaacatgcaacttcacaaactcaacaattcaaaacatggtttttcaacaaataaaactagcaaggatttcaacaataatttccaaataagctcagctagaaaatacctcaattccaagcttaaaatccttccaattccaagctttaaaatcaagcaattcactccaaaa

SEQ ID NO: 349676 - DNA, 922 bp, Cannabis indica
ttgcattgtgagtcatcaacgaaatccctataacttggggatcagataacagagatatggcatacccacgatcccacgatcagtgtattctgcatttatcccacgatcttttctgtttatatccatggtaacgagaggggaaagacttcctctccaagttcacaaccctataaatagtgatgcatgttcattgggcaaaagggggcaaacaatttagtcgagactttaccctaaagatattatctaagaattcttattcagagatactgttgtaagagctataaaaaaggaacatttttccttgttccgagtcaatacaaataccgaggattaggctattaccgaactgctcgaagttgaacctctataaaattcatgtatctttacagcgctttattatatatcgattgctataaatcacctatcgcttactaaataagactcattgtcgttggctaaaagcgaggtcaacattaacaaacaacatgaaagcaactataaaataataaaaatataactacaaagcaacaaaaagataacaaaatttgatctaattgcaataaacaaaatgatatcaactcctcaatatatttttgtattataattttttttacttagttttgataacttaatttatctatttgatataatttttactaggtttttttttgttgaacttacaaaagtactataaaatgggagaaaatttacaaaaatactgtgatatagagttttttttaaaacatttttgatgtaccactttcacaaaaatactttgtttaaagttttaaaattacaaaaatactgcgttccaataaaataaaaaacaactttataacaaattaacaaacaacataaaaacaattataaaacataaaaatataactacaaagcaatataaaaataataaaatattgatcta

SEQ ID NO: 349677 - DNA, 598 bp, Cannabis indica
aagtttgaaaagccatggctgagttgattctgtctccgattgctgagaaaatcattggtggtttgggatctgaagctgtgaaacacatctctctgatttggggtgtggaggatgagcttgaagatctcaaagaaaccatttcaacaatccaagctgtgcttttggatgctgagaagaaacaatctcacaacaaccaagtcaagaactggctccaaaggctgagcactgtggtttttaaagcagacgacttgatggacgacttcaacactcaagctttgatcatgtctcacaacccaatggccaaccaggttcggattgttttctattttcaaaaatattttttttctaacatattatattttatatttttactcacatatatagaccttaaatctggactcggatttcaaaccagacccggacccaggccctgatctagactcagacatcagacttgaaccccaattgtaggtcgagactcggacacgaaccccaaggctaggtctgaggttcggggtccaagtctaagttcgggcaaaggtccgagttcaggtccaggtctaggatctgaaataggataagttcggtatagaatatt

SEQ ID NO: 349678 - DNA, 529 bp, Cannabis indica
aagcctcaagtttttggatattacactcataaggatttggtggagcaaatctcataaatcttgaatctttgttgctaaaaggtgtttcctttgacaagataaaagtctctgcatgcaaggcaattagaattctcaacttaacttgttgttggggtatggaagagtcgtcatcattcgaatatttcatttctagccttcctctccttgagaacttgactttgtacaatgggcgtaagcctaacaagttaaagcgcattgaaatctcgaatcaacacttggagaatctctttgtacataacccttttgatgatgaaatgagtgttataattaaatcaactccaaaattaaccacatttgtttattttggtggtatcaaatttagtgtgtcaatggagtcttcccatttattgattggagcctttgtgattgaggggcttgagaactatgacgcctattggtttatcaatttgatgaattttcttttgaatctcaactgttcttggagatgcatagacattcatgttgaatc

SEQ ID NO: 349679 - DNA, 534 bp, Cannabis indica
ttctatctttcagatgagcgacctgtcggatagtcaactgctcggctcgggagacaatgcattcgatggtgatgagaaccaggaggaagatagctttattccgacttcgatctcagaagaggaaatcacaccttctgtgggtatagaattaggtccgatgtcttccccagacatcgagagaatggtgcaggagctcgctgaaccaggggccaccgatattcgagacagcgagtctacggtgtcagcccgtgattatcttattcactcgaggcatgctcctgacgttgaggtcgaggagacggatgacgactggacggccccagctcacgaatcaggcgaggaggaggaagaggcaggagggagcggtactgactcggtggaggacacccagctgaacgagcctttctcgtgcgaggatttggtttcgagagttaccaaatcggacctcaccacctttacgaggctaaacctgttgcaacttgcttctttgtgacctaagccgactcagagggcgcaccttccttttaccaatcc

SEQ ID NO: 349680 - DNA, 844 bp, Cannabis indica
tatctccctatcttttccttttaattgctgagggtctctctgctgcaattcgattgcaagaaactaatgctcatttttctggcattcagatctgcaggggtgctcagcccctgtctcatcttctgtttgttgatgatagcatggtcttctcctaagttcactctcgagccagtgattcccttaatgttattctcgatctttacaataaagctacgggtcaattggttaatagagataaatcctctatccttttctcccctaacatttttgctgatgcccagcttcaatttcgtcaatcacttcaacttcatggggagggcttcattagtaagtaccgtggtgttcctcattgcgttggcagggtctctaattccatgttccattatctcctccaaaaagtctcctccaggttaaactcctggaatgaaaaattcttctctcgggctggtaaggaaactctcataaaagcggtggtccaagccattccttctttttcaatgtcttgcttcaaagtgcccaaattgatttgccagaaaattcaaagattgatagctaaattttggtggggatctcagggcactaaaaaagtccactggaaaaattgggatgttatctctgtctcaaagttttttgggggcctgggtttccgtatcttgtcctctcataaccaagccctcttagctaagcaggcttggcgtatttggaatgatacgaactcccttctccattctgttcttaaagctcggtatttcaaacattctgatttcatgaatgcccctactggtcacaattcttctttcacctggagaagtatcctttggggtcgccaattgcttcaaaaagg

SEQ ID NO: 349681 - DNA, 667 bp, Cannabis indica
taaagaagacaaagaaaaaaaacgtactaccacttttagtaacaaaacactatcttagtataataataaatacattaaacaaaaaaaaaaaaaaaataaatacttgaataaataaagaaaaataaataatctaaaagctgtattgatctcttggattccaagtttgcttccaccttactatttccttcctttgacttctctctcttaatatatacctttctcacaaatatttatatataaactttttttttctttcttcttcaaattaaggtccctttaattatatgccaaaaaaaacatcacaaagtgttatagggccacacacacactatgtataagaaacaaaaggattcgtttataactctttttccagaaagaatgtttttcagcatcaaaaatcactctattgtagtggaatatgatgtgaatctttaataaaggaatgatccacacatgatcatatatatctctattcatatatatatataaaaaaaatggggccaatgagattgttgggacttgaacactaaatttcttaaatattactctaattaaattactgttgagttgcaacatatatttagtattatgagtattattttttattttattatgaattatattttaattttttttttttgaaatggggtttgagcggttggaggcc

SEQ ID NO: 349682 - DNA, 515 bp, Cannabis indica
aaaaaaaaacaatagttgttagtagctttttaaaattgttaacaaccatttaacaacgttataaaagtataaaaacagttgtatatataatttaagtaatctacagattttaaccactgaaactcaacgtacaaacaacgtgaaagcaacatgctcaaaaagcaacaaaatcaaacaacgtatttacaactttaaaacaacggtaaaataacgaacaatgttattactaaatataagtaatttttctttatatttacaatatcttcctatcaatctctcactttattcaaaatcaatatataatgtgtgatctctttttattttatatgtcttaatgtaagagataagataaattttgttttgacatgaaaaattctattttttacttgttgaacaactagtgtagtgtgtactaattcataacaaactttacaacaacacgaaaacaacttgattttatgtaatattttcatgttgcaaaaacaacacaaaaaaaaacttcacaataatatgaa

SEQ ID NO: 349683 - DNA, 506 bp, Cannabis indica
ataatttataattagtcacaactctaattttttgtagtgtaaattaccttctaatatttaaccatatgagctcaaaatttactattatgtaaaggtattcacaacaattttacccatcaactacacccataaagatttttctcatatcaattatgattaagcctatcaatggtcacatgtataaataaaataattgcggcataactctcaatactttcacttcacttgcacttaaccctaagaatctaaattttggtagcaaaacctcccataactacaaaatcgttagcaatttacaatttttatctaaattttaatgttaactgttgaattgtccacatgtacagagtgtacacgtggctcatacttattggcacacatgattttgtttttttttttaaaaaaaattaaaataaaaaattagaaacaaataaaaatatatattaactcatttaatttttctccaagttttcattctttttcttattcaatcttcgtatcatcac

SEQ ID NO: 349684 - DNA, 628 bp, Cannabis indica
ttaaataattaataaatttgaaattaatctagatatttttatattctaaacataatattttcaaatttaaaatttgttacttagttaaaaatttaattgtttataaattataagttcgaaattacttatcgaaaatttataaatattattttaaatatttaaataaccaagatattaatgtagaaatttgaaaaaaatacttaatttgacatattttaacatataattaggataattattatttgtttattattttattcctaaaatagtaatttcctaaccatatctattttaaaatcggcttattttattatttttattttattaaattataagattagaaaatgatattgaaaatttatttttagttattttcaaatcatttatcttactagatatttaatttaatttgataaaaatattttaaataaatctagatattttaaaattagtttctctcaattttttttttttgaactttaaattttgaaaagatatttaaggttgtttttaacaaccctaaattttcaaaatagttggttagataaaataataatttaatcattttagtatcttatttcacatttgttacatggatgttttttgttatatttaattgtttattcaa

SEQ ID NO: 349685 - DNA, 688 bp, Cannabis indica
agattcactgtagaactctcagccatgaagaaaacagagcttgcgaagatgttcatggagttggatcgtcgtattgatcgattcttcgatgctcaattgaaggcatttaaagtgcatctcatggaggaattagatgctagagttgagcaatattgctcatcaacagagacatctatggctccctcggctcaggcaccatcggagaaggctctcgatcttgtcggcagtgacatttcagctggatccgatctaagtagatcgcaatcaatgtcggttcgatctatgacgaagatggcagctcgaagaactccaatgtcggagaagacagagatggcattggatcttcgcgcacaagattagaggaggattttcgatcgtggacgacagtggatatttgatcggcgacgactgtggatctttaacagcgaggggcggcacgaagtggtcactggaggacgatcggaagcttggtcccgccggattgcagaaatatatcgaagcagtggagtaaacgaggatcccttgctctgtattcattagtttgtagaagaaatatatatgtccttatgggttattttctacgaatataatatacatatatcatatatggtactgtgttgaagatgaaattcacgaactcattgctttgaactaaaaaaaaatgaaagaagacgaaggagaagtagaa

SEQ ID NO: 349686 - DNA, 519 bp, Cannabis indica
aatattattaatttaaatatgatatttaagttcaaatataatttaaaaaataattattttattttaaagtttagggtttagaaaattagaaaaaatcaaagttttagggaaaaaaatcccacaaaattctgttcttgggtgcacgctgcagccctaggaggctgcaaatggggctggacgcgcgcggaagtagggaacccagccgaggtttctcggcatctccagggtgtcacgggcgagcttccagggtcctggggggcgtgacgcacgggtttagacaaaatttgtctgaagcatccgcgcacgtatgctccttgtccgaagcacctcgtgcacgtgtgcacctagcttcgacagccatgacatccaatcttccaaaattcataactttctaaatttttatcggaatcgagttccgtaacaacaaaaattgcttaatttttcacaaggaatccaaataaaatattctcaaaaacagaaaaaatatttttcatggaaaaatttcgtacaacacataca

SEQ ID NO: 349687 - DNA, 758 bp, Cannabis indica
ttttcctcaataataaaaataaaaataaataaaatatgacaaacttaaaataaatataaatatatattataaaaaaacattaagacataccatacaaaaattcttaagaagtaacttataaaattaaacgattgaaacaaaaaatcagttatatcaaacaaccaattaaaataataacaaaaatcagtaaacctataaaaccaatttcgaccctataaaaattataacaaaacataaatgataatctgtaaaaatagctgaaaccagtttcattagtgaaacaaataaaaaaaaaagcacacacataacaaaatgctcataaatataataaaaacaatacacaatgtataaaaaccagtttcaatttttgtctatataaatgaaaactaaatatacaaataaaaattaatttcacttaagtataaaataaatattaaaaaaccagttttattaagcactcccaagctcaccaaagctccatgcagaggtcaaacacgagatctgaaagatctctctgaagaaagcatagttttcaaattcattttacaccacgagtcttagacgagactagatcggagtcaagaaatttagctccaacatgccctaaatggaaaacgaacggcgagggaagcttcaaaaatcttggggctcggggtttcaaacttattggcgaccaccgttgggctaaacaatgatcggaggaagcccgtcgggcttggcgtggtcactgtgaagatatatatatatgttggaaatta

SEQ ID NO: 349688 - DNA, 2056 bp, Cannabis indica
ggaatatatatttaatcacataatcttgattactttccactgtgctgacgacacaataaacaagaatataaatgtgataatgatttggatgaatatataaatcaaatacacaaataaatgataacatgaaccaaatgacataacaagtgatgaaaatacttctgtttctttattgatatttaaataataaatattacattgaaatggagttttatttagggcataaaacccaacagggacatcatctgacgaggtgggcccaagcgtcagaggatagtcacatcactgtaagaagacttccagatgcacctcttaggcttccgcattcggatgcgcctccttaaccctcaggagggcggtgtttgcttcatctcttggaaggaaaaaagggctttcgagagcaggagaatcttatcactaggggtgaggctcttggaggtacgaagggttgggtcccacctctggtttggacgcgacctttgcatgctggaaggctcgggctactgatgacgcagatcaggtacatccttaatatgtcacgtgtcattcatctgtaaacgtggataacatttaccccttaagcttctagtactttagagtggcggaagcttacagtctaccctccaaatgactctgggcacttttgacacgtggatgtttttgagaaaaatgttcatcttccatatcgtgagatacgaaaaggtaaaaaccttttgtagattacagcttgcattgcgcacgtgtcattgttcagttgacttgtgaagttcatgcattcttggtaagcgcttgtggcttgggacatcacaatgatggctatttgatacaagtgtaggtatcaagggaaatattaataatgggaaagcacctcaaatattatatggttcatttaatacatcccttccatttccccatttgttaaattggcattgtgtttcttcaaataagatttgggcccttaatttgaaagcacacaggtcgccagcccataatataaatacaaaagggggtaactctttcatcgcttttactttcacgccatttcaaattcatgctttaagagagaaaccataatactccacttttgttctcagaggatgttcaatcttttcgacattgcaatccaccaccttcttcgtattaaagcacgagagtaacctaacgcacctcttttaaacttgattgtaatcgaaccctagtcacaggagcgcttagacgttcatgcaaacatcgataggatccttgactggtcattcgcctatcgcgttggccgccacgatgttcatctacccgtgcttcctattacaagtaagcttcatttattttatgcattctttgtacatgtttttgtataatcctattttgcaattcgatgggtaacttgtttgtataggaaggtggggactgcatgtgtttaatttgggtaaaaccagagacattaggtccttttagcttatctatatgtaggattttaaaccgtcgcctataccctgttataggcgacgattttaaaccgtcagaaatgtaaaaataaaaaagagaaaaaaatacaattttttctgccattaattttcccctatttttttcttgcattagttttataattttacctaaattaaaataaaacaactaattaattttattacaataacaactaactttaaaacacattaaatttatacaataataaaataaatatatataataaataaaaaagttataaataaataaatgtatttataccgagcttggagagagaaagagagagaaggagacggacgggaagtggtggtggcccgacatatgagacggagatgagagggacaccgacaggaggtggtggtggtttgacgtatgcggcagagaggagagggagaccgacgtgaggaggggtgggtagagatcgatggacgagagagacgagaagaaagggagatcgagagagggaggaagacggcgagagaggagggcgattgtgcggaggtgtgggtggggttttggagagttaagatttttgtttagggtgtgggaaatggagaagaaataggtgagaaga

SEQ ID NO: 349689 - DNA, 2083 bp, Cannabis indica
gatccaccaaatggatgtaaagtttgcgttcttaaatggttttcttgaggaagaagtctacatcgagcaaccattgggctatgaagtaaaagggcatgaaggaaaagttttgatgttaaataagactttatatggcctaaaacaagcgccgagagcttggagcactcaaattaacaagcactttcaagacaagaatttcaccaagtgtccatatgagcatgcactctatatcaaaattaagaatgaagatatcttgattgtatgcttgtatgtggatgacttgatcttcactggaagcaactcaagtatgttagaggagtttaagaaagatatggcaaaagagtttgagatgacagacattgggttcatgtcttattaccttggtattgaggtgaagcaagaagacgaaggcattttcatcactcaagaaggctatatgctaaggaagtacttaagaagttcaagatcgatgattctatgatgttggaatcgttagccgctttatggaagccccaacaaaaactcatttgaaaatattgcaaagagaatgcttcggtacatcaaaggtacgaccaattatgggctattttattcatcttctaataattatgagatagttggatatagtgatagcgattggagtggagacttggatgatagaaagagcactactggatttgtgttcttcatggaaaacacaatgtcaaaaaccaatcattgcactatcgacttgtgaagctgaatacgttgctgcaacttcatgcatttgtcatgctatttggctaagaaagttgttgaaggatttgaacgtgccacaagaggagccaactgagattcgtgttgatagcaaatcaaagaacttaacctagaacaaaggtgcatcgagatactctgtgatagtcaaagtgctctgcacttatctaaaaaccagatgtatcatgagagaaccaaacatattaatgtgcggctccacttcatcagagatatcatagcagaggaaaaagtgaagctcaagaaagtttcaacagaggacaatgcctcagacatactcaccaagccactcaccactgccaaattcagacattgtctgaatttacttaggatcactaacacttgtgatctgtaattttctgtttacttttattcttttgtatacactaaattaatcaaccaaggtggaaattgttaataaatggtcagtttattcagttagcagttagtggaagctagttatttgttgttaatgatctgtcacatgtaaaccaatttcacacgtgcaactaggagttagttgaagttagttggttgttcagttttgacagttaattctattaactgttatttttgatagttttgcattttttgtccctcttagttcagtttatatatatagcttattaactcaatttttttaaagggttaagccttgtacatactctctaattgtaattctctccaagattaataaaacaactcaagattattcaatctgttcattactttctgtgcattagttcttgacaggttttgtagcagtattgttgcaacattgctacagcagcaatgctgttagttgtgttaatctttgcctttgattcctagtgttcaaactcgattgcaaggtgatcatcgatcacaacaagtggtatcagagcaaggtgtttagctcaatcaagattgaaactcaaagacatcaagaaactcaagaagatggctgcagcaagatttgaaatcgacaagttcaatggaactaatgatttcgggttatggaggattaagatgaaggcattgcttgttcataatggaatttcagaagcaattgatgaagagagtctcaaagaaattgaagatgagaagaagaagaaagagatagaaaccaaggcacatagtgccattcttctcagtctaggtgatgaagtcctaagggaggtatctagtgaagacaaggctgttggtttatggaacaaactcagttccatatacttgaagaagtcccttggcaaataaattgtatttgaagaagagaatgtacactcttagaatggatgaggggaaaggatttgaggaatcacctagatgagtt

SEQ ID NO: 349690 - DNA, 537 bp, Cannabis indica
agcttgaaattgatgataagcaagttgtgttggctggtatataggttgttgctaaatcaatgtaagtgtagtttatattctttgttaggttgtgttagcatgtcagttttattttagtggcttgacagttttatgttagttttgcaacttttactttttttgatgttcaaattttatatttcaagttccagattccaatccaagtgttgctgttgaaaaggcacctgccattgcttctgatgaagaagttgatgacactgttacttatactcctcttttaaataagagaaagcgtgcctcgacattaaaatcgccttttgttgattttaggtcggctgatgtgagcagcactccaatggaggtaatgtcctcagattctcaatctagaggagatgagagggattttaagatggttacgtatgtgaagggccttcacgctcttaatgatacatttgccgatcctgtctctcctgaaattgaggcaaaatttgatgcttggattggcaaatgattgctaaaacatcctaggtgattatt

SEQ ID NO: 349691 - DNA, 568 bp, Cannabis indica
tgagaaaaaatttgactaaaaaattattttcgatactaaaatagatagagatatatcgatgtatcccttttacgggggtgcattatagaattttccaattatatataccatatgaacaaaattatatatcacctttatataataaaataaaaactaaacatgcatcatctaagataaaatgatatactatacaataaaacttatataccatataacaaaaacatataccttagaatagaaatataaatataataacaataaataaaaatgaaaatgtataggatgctaataaaattagggttattttttcaattttaaccaaaaaaagtaacaatattataaaaatacttccagctggccaaataaacaaatatacagcccaaataaattttttttcacacaaataccacttacacacaccttcaactcaggattcatgcttcctggtaagggtgttcttcaaaccgctcaaaccacttacacaaataccacttaaacaaataaacaaatatacagcccaaataaaaaaaaaattacacaaataccacttacacacaccttcaaccca

SEQ ID NO: 349692 - DNA, 793 bp, Cannabis indica
aacatgaattaaaacccaaaaaaaaatttatcccataatgctgcttagaaacattaatccttctgaaggtttatgcaatggaacacgtttaatatgtcgggcattcgaccaaaatgtcatagatgctgaaattgtcatgggacacaatatcagaaaaatagtgtttattctaaggataccattccttccaaatgtagatgaaaatagtggttttccattcaaacgaacacaattcccaatcagattgagttttgtaacgactataaataagtcacagggacaaacattggattacgttgggatctatttaccacaacctattttttcacacggtcagttatatgtagcaatatcaagagcaaagacatcatcgacagttagagtcttgatccgacctgtttcaacttcgcaacaagataagaactcgactaaaaacatcgtgtacacaaagttattagcattatcttgtttaatttaatctcttcaaaaaacttgcaaagtgatcctgtaattagctatcctaaactcctacatgtttcatatatcaatgtaaatgcttttttttatatattatttattattgtttccatattaatattatattacattattattttattacatttgagatactacttcttctcacaataattaataaatattatttaattaacgaaatataattattaaatgagcatatcagatgccgactctacaccaatcagtagatgacatcactcccaccacagttggataataaataaaaatgacagttcaacataaatttccacca

SEQ ID NO: 349693 - DNA, 815 bp, Cannabis indica
ggtaaaataattccaacatctaggagccatctgaaaaaacacaaaacaaaccaatattactgccaaaaaattttaaaaatggtcgacatattatcgacattctgtcgacatgatatcaacattatcaaacagtgaacaccaacatgatttcatcgacaacctgtcgacatattgtcgacaacctatcgatactaacacacatatggcctacaacaacaataacaacaattatcgacaatgtgtcgagatactatagacaagaggtcgatattccaaataagtgaccactggaactaagcaatccacactatcgacacattgttgacaacatgtcgacatactatcgacaagatcgatattaacaaacatttaaaaaattcacatcctaccatcgataaaatgtcgacatactgtcgacacatcatcgaaaattaagggcaaaaataaactcaaccctcagtcgacatcctatcgacatacacatgaaatcctatcgacataacaaaacatcaatacaatacaaacagacaccaattctatcgacatcctatcgacatacaaacgatatcctattgacatacaacaacagcaatacagcacaaataccaaaaccatcgacatactatcgatattctatcgacatatcatcgataaccctataacaatcacataataccattgaaacaccaacatctacaacctaaagagcacaaaatctacataaattccactaatctcaataacatgcaataattggcatccaaatctatgaaaaatatatttttttttaaaaaaaaaacacttacctttgaatg

SEQ ID NO: 349694 - DNA, 671 bp, Cannabis indica
tacagtgacactctgtgggtgtggttgttatctttagagtctgacaatgtgagattctaaatgtctacagtgacgcgcggtgagagagtctaaaaaggttttagtaacatgcactgaagtgtcactaaatattactttttttgacacccacattagtgacacgcagtggagtgtcactaaaaatctttaaagtctcttaaaatgggtcactgaaccctatttttgtagtagtgcgttgggaaatagtataaatgacagttattaactgttggaaaaaatcaattttgtagtagtgttaaaataaggagatatcgcctatttttaacacattaaatatatgacaaaacaatctattaattattcttaaggaatagataaataattgaaattaaaaccgtattttgtgggtttttagacttatcccgcaactttgcttagctagttagaattgtctacaaaagttggccagccaaccctattttgtagggcctggccagcctatacactcccatggtcagccaagtattgctcatgcatccccgggatgtgcctgccaactttctatgtgccttccagcctttttatgtgttgtcagctttcccatgttcctactagctttttcttgtgcataaaagttatggtatgtgctggccagccttagtatgtgttgg

SEQ ID NO: 349695 - DNA, 632 bp, Cannabis indica
tccaaggccaaaaaggagaagattcccgtcgaaagtccaaaagacaagcttgggaagggtcaatgaagcctagcccaaggcagggacacagatatagatcctcgctttagggatcctgcagaaagcttcagacttgtaaaagagttggaagaagtggaggttgatcccacttttccaataagaagattgaagattgcaaaaggcttggctcaaaaaactaaatcaatactggtagaatttctgagggaaaactcagatctttttgcatggtcacatggagacatggtcagaatcgaactctccatgatgactctgttggaattattttaccaggatcttagatctactcacaagtatgttcttaaacatcctaaatatgaacttctaaaatgataataaacacatataaagtttaggaaaccttacattggttgcagcagaataatatgtctccttccactcagatctctaacccttgtatcctttctgtcgcagagtatcaccaagatctgagtctgaatgtccttctcttcaatttggattcttcacgatcttccaatctatgattcaagtaccacttgatgtgtgtggggaacactctatcactcaaggtattcgaaatttcgaagaag

SEQ ID NO: 349696 - DNA, 1002 bp, Cannabis indica
  modified_base (45)..(45): a, c, t, g, unknown or other
attatatgcatataatcatgaataaatcatgtgaaccatgcagcntaaaaagggcacaaaacccaatagtttagtgtttaggggttagggtttagttgtttattatttacagtttagcgaataggctttaggggtttagtttttagcgtttagggtttagggttgatggtgtttggtttaggattaagggttttaagatttcaatttacggtataggatttaggatttatggttttgggtgtagggtttggggcttagggtttagggttttgtatttatggtttagggtttatggttagggttttgggttttggatttagggtttagggtatatggtttagggtttatggtttagcgttttgggttttgcattcaagctttagggcttagaggttacggtttgggtttgagtgttagggtttagggtttatggtttatggtttagagtttacagtttagtgtttaggatttatggtttagcatttggggttttgagttttgcgtttagggtacaaggtttagttttatggcttaggggtttgggtttagggtttagattttaggctttagggtttagtgttagggtataggttttgggttcagggtttacagtttagagtttagggtttaagatttaaggtttgggatttaggctctagggtttagggtttatatttttgggtttaggttttttgggtttatggtttagggtatagtgtttagagttttggggtttatagtttagagcttagggtataaggtttcaaggtttaatgtttagggtttatggtttatagtttagggtttagggtttagggctttaggtttagggtttagggtttagggtttagggtttagggtttaggtttttggattaggatttacggtttatggtatttagtttagggtttaggatttagggtataggtaacgggtttagggttttgtgtttaggtttagggtttaggatttaggtttttggtttaggatttatggtttagg

SEQ ID NO: 349697 - DNA, 1068 bp, Cannabis indica
gcaaacaaaaatagtcttaaaagtttatatattttgaaaacatatttacatataattgtacattttaatctttaaataatataatgtattaatgattaaactaagattgtaaataaagttttgtaaatatatataatattaaacaacataataaatgattagtttaatattgaatgtgcaaacataatgtaaatatataagtgatatttacattaatttcttgcatattattaattttttagcttaataataatatattattatatcaatattttaaaacttattcataatatataatatgtttattaaaacacaaaataaaaatttaataatattaataaataagtaataacaatttaacaaaaataaataaactaaatacatataaataaaattgaagagaaaattaaatcatattaaaaactaaaaatcaatatcaaacaatttccagacactaataaatgtttaactactcaggtacattggaacaaattcacacttaataattttagaaaataaaaaaaataaagaagaaaaaaatgttgaaaaactctcttaagaaagcctctaatatttattttgctctccaaaattcgtactctttgataagagtttatgagtttttcagctttgaaacgtactaaaaacactaataataatgtgtttatataggcttacaagatcacttaaaatatactaaaaacaatttaaagtttaaacttaaacaagataaaaatcgtaactctatcattttttctcgctatctttttatcttttttttttagaaatttcttgctgcaacgactgatagtatttttgtcataactctcgatattgctcggaattagacgattcaatatgttccagaaagataaaagagagatctagaacttttacgttttgactttttctaaaatctgatcaaaacatagtcgaattcaggcttaaagtttcagctttattttcttagacaattttctctattttatagattattttttgtgagatctttttatcttttctccatcttattcctttgatattttctaatattcttctattttaaat

SEQ ID NO: 349698 - DNA, 708 bp, Cannabis indica
agaaagtgagtgttgttgttgtcaataatctttattaatcatctttgttttttttttgttgttgtcttgtgccttaatttgaagcttaattatttgacacatgtaacaatacagaatttcctaaattcccgaaaatcaaaatgagctagaagactttgatttttccaacaatcctcaaatgttcttccccatagaggcattgaccatgaattccttaaatatgtctactaatttcatcactaattgggagcaagtgtagaaagtagtgcttccttcgaaaacaggaaactataacaattgctatataggtattcaagaaggactcgaaactccttgcaggagcaaaccacatgcctgactcttttgagctactcttcttgggtgcatcatcaattacggacttaaacaacaatttttttttttgttgatttgtttgtagagtgtttgcttatttttttctcacattatatgattagagtaatttgcggtataaatacttaagtttaactccctgttgtaaatacatacttaagtttaatttttgacgataataatacttaagttataattttggaacttttgtaggtacctgactattatatgtcactacaaaaaactgctacttttcactacaagaaatgtcacttttaccagcacaattcgctactgtgctggtaaaagtaactttttacttttaccagcgcattt

SEQ ID NO: 349699 - DNA, 583 bp, Cannabis indica
caccataggtttcttactaaccttccttcgctattgtcagtcaacgttcaccgtcgatccacaacaacacccaattctaaaactctatgtaagtttttcgcatcccttactttattgtttgtgttcatggcatgcttttctgttcatctgcattttctgggtttaatgtttgaagtttctgggaatttttcgccttgagtttctgtgtaacacgttagattcctcttttctggtgtttgagtcactcttattttgcgcattatgtttttccaaaggcccatctgttctttatgtgatgaccttcaaaggtacagagaagactttgtctttctcgatttttaccctttccttttcttttcttttctttgctcatgtgtaatgtcactatctgtaagattcttgcacccgacttttgtccaagaaaaccttctaaggctttcttgttgacaaccgtccggagggggtctctttccagcggttaggggacccccattccctcttttgacttagggtttggtatggggcctgactgctggaattttaaatctttttcagaaccaaaatgtctacatccgattccaaa

SEQ ID NO: 349700 - DNA, 554 bp, Cannabis indica
ggtaaaaataatttccaacaattggtcttagagccatggtaatgatttactttcatgaaatatgaattcaaacgatgatttgtattgatttggatggcttcatgtggtttacgtgttatttgatgaatgtatctgttgtataaaattttttccatgaaaaatattttttctgtttctgaaaatattttatttggattccttctaaaaaattaagcaattttgttttttatggaactcaattccgataaaaattgaaaaagatataaatttttgaagtttcgggtttgagttggtgcatcgagtgcacgaggcactcggacaagacgggtgacgcgcgcggacaaagagggacggatgctgtctgaagcgcatgtctttagacacgagaggctgtaggttccgtgtccccaccctgcacatgccgagatttctcggctgggacacgctgctgcttcttctccccgcgcgcggaatgggtttttgcagcctcttggggctgtagcgtgcagcctactacaagcttcacccaaatttctgaattttgtgggattttt

SEQ ID NO: 349701 - DNA, 590 bp, Cannabis indica
tccatcattatatgcactagtttagcaaaaagtgcaatctctttgatattaattctttcacttgattcgtaatcaatatagtgcttgttgtgatcccaatgatcattgttctatactaaaatttacagtggtttcatgcctaaagctagtgtattaatttttctatattgttaagcaaccagtttaacacatgagaacaacgtataaacaactattacatgacggtaatcagtaaatgaccttaaatgaatcactatctttttcaaatttaaattatttgtaccaatttattcagatcaaccaatttttagtatgaatttacttagatatacttcagaaacactaaataacaacctgattacgaagaaaaatatttaaaatattggtacctttatgtttatttgtcaaattcttccgagttgtttaaaaaatttcgttaaaaattaagaaaaagttgatcatagtgttgaagataattatttctttatttcattatttattgttctaaatattaaagttatatttgtcattattttattattgttattatgttatttatacatttgttatttcacgatcatggacaacaa

SEQ ID NO: 349702 - DNA, 505 bp, Cannabis indica
tatgttcaatgactcaaaaaaatgaagactaaagacttcaaaagacacccagtaatcacagaattaatgcaccaaaaaaatgtctttagaattatgagcatagcaacccataaaaccatatatataaaaaaataagtacaaacatctcccctttcattgaatatgagcgctgcttgatcttgttctttgccagactccccttgggaaggtggcctagtcgacaccaagggtgttgcagtggttattggagacgagtcagctggaggatgcagatcaggttcggctggactggagataggggcaaatacaaacagctccccctgcacatgtgcgttagttccaaacgcatcagaggatgcaccaaacgaatctctatgaaactcaggcagagaaatgtcaatagatggaggcacaaaatccccagaataatggtgcaaaagagtagacttgatagtgcgaaccattttatacatggaggctcaaatgcaagctgacgcttttgatc

SEQ ID NO: 349703 - DNA, 633 bp, Cannabis indica
acacaataattttaaaaaaaaaaattccacccacagtataaaagtaacaaaaagttgaaaaatttcagtatgtggtagtaattatacccaaaaaattatttaaagaaaaaaagtgatgaatctttatagcaatatggtaaattacaaaaaaaaaaaaaaaagaaaattataaatgtggacaaagaatattgctaataaaatatggtatttttcagtttttcttttcacatttttattcatatttttctttatttatttttacgactaataatattgaattagttttgaaaattaaggtggcgtttggtaacacttttttaatcagttttctgtttttaaaagtggacaagtgaaaatatttttcaaaaacatgttctataaaactgtttttacttttcaattttataattagaaatcaaaattttaaaaacaaacaaaaagtactttcaatatttttttaaacagttttttttcttaatcaatcttttggattacaaccaaacccggacccaaatcccctcctcacggccttggcgctgaacccggcttctgacctgaacccgaatccaaccccgaatcttgacccgacttaaataaaatcaaaaaataaaaatgaaaatgaactttacagaa

SEQ ID NO: 349704 - DNA, 594 bp, Cannabis indica
tttaaaaatttacagggattatgttgtaagcataacaaacaccgtcgtgaaaaaaaaattgaaaataaatatttcgacatatgctttcgggtgtggaggttgactaagaggttgtaacaggaggttaacggtagcactcctctaaaatcccataccaattgaagtattatctattcttatatactcatgatccttcccctttttagctaatatgggactttggttgcacaatgcacacttaacaattctttcctccaacaaaggtccaccttacctctcctcaaacaatcctccttccatcaactctccaccaactagtgtatatttctctccaatatgttggtgcgcatgccctgcatggagcaccaccactacctcaagaatccttgcgctttctcaggccaactcctctatccagagcacaccccctgtctaactgagcacatccacgactcacatcgtaagattattgaggatcatctcctttgtttggcattctaagaatttattcatatatgactaacttttgttacgatttatgccctaaaaaaaacctataaaaatatttctaattattaataaagagttgaacat

SEQ ID NO: 349705 - DNA, 933 bp, Cannabis indica
tgaatgttacattattaatatttattaatgaataagtatatgaatatttaaaaattccttattcatatatgaggctttaacttgtagttgtacaaagaactaagatcaaataatgttggttccttttaagtgttaattctagagctaaaaagttgtgcacaaatttagattgaatctaaattatactttgttatacctaattctccccaaaaaataaaaataaaatggctacttttgcacaagggcccacatgccaagagtatcttgaagacactaaagtcaaccttgcgactttgaccaagattcataaatgtcaaataaatcaagacatccttcttgagggccccatggcacttctggagggttcaaaaacgtcaaccaacaatttggcgccgggactcacacccccaagtgtgcccaaactagggttcatgggcacgggcaagcgttttcaccttagagacctcaatccgccaaggaaaccaataaggacttgacttgtttaggcatgagaatgacttggatttatgcataaagtcaaaatagcactaaaaccacaagagaagaaggataagtgaccactgccacaaggaaatggtagtgatctctagttttggagacctaagccataagagaatggcacaggtcactcctcgcaaaccatgaaaggaaatttgttcgaacaagttccctcaacatcaaagagcaagggacgagtgagaaaagtgatttttgacctaggagtcgccttaggtgacatgtgccataagagaatggcacaggtcactccttgcaaactatgagaggaaaattgtccgaatgggttctctcgacatcatggaataaaggacaagtgagaaaagtcatttccagcctaggagtcgccttaggtgacctgtgccataagagaatggcacatgtcactcctcacaa

SEQ ID NO: 349706 - DNA, 535 bp, Cannabis indica
gtacaacattgcaatccgtgttttccacatatgggcacaaaatcggctgcctatacattagcttaattaggatttttgtccctgaactttcatatgtaccaaatcatgccccttgaatttttaaggtcattaaaaatgttccttgaactattaagattgttcaatttaaggacttttgtctaattaaattcatttttattatttcagtaattatttataggccttgagattagtctctagttttgaaggcctccatattagtctccagtttcaatatatcttgatttaaacataatgattccaactactcactgttagaaaaattaataataaacccaagatcaatttgtatataacatagaatacaataataatatataatgattaggtatgcgtacatgattgatccatatcaattctctcaattcaatccacaacaattacttcaattcgatagtgcaacactatcaactaagtcttcctccctagatcactaaatcagaagcaatttatttatctgattatcaaaaggtat

SEQ ID NO: 349707 - DNA, 563 bp, Cannabis indica
ctgtaaggtttcttaacttttgtgtttttgtttatcgttttagaagttcatatttaggttgttaaatcaacatacttatgagtagatctaagatcctggtaaaattgattccaacaactggcaccagagccatggtaattgatttgcttgcaagaaatttggacttaaaacgatttgtttatgatttggaaggtttcatggtgtgtcatattgatgtttgtaaattctgggaaaaataattgattatctgtatctgaaattatttttattggatagtttggaaacttctaagcaatttcttttttaaaagaattcgatttcgatttaatttgaattagttatgaatttttgaaaatcgggaaaaatcagggtagtgatcaccctactcacgcgcgcggaagggctgcttgcagcctcccagcaccaaggaaactcggaagatcactccctaggcgcgcgcgggtggtatgcaacgcataccatccgtacagtgtgcaattcttcttcgttttcttcgatttttcatgctatttcatgaaattgacttccgtatttttgtgtag

SEQ ID NO: 349708 - DNA, 806 bp, Cannabis indica
aaggagacttaccagaacctgaagtactggcatctggggcaccagtgttaggaaccgggaccaaaggctttggcctggagggcctccgctctggagcagcttccagacgaagggtcctcccggccatcctggcccttgatgtaagctagctcctgttccctcctaagaggtacttttggtaccggtcctccgccgaggcgattatgtccacccggagcgccctttctgcaaccggagtccttactttcggacagatgaccttagaaagattgaagtcatccaccgactgattctcgtatatcagcttggccttccgacagttctccatcgtgaccaagtccccaacgttgagggccttcttgtcataagtggagaaagtctttgcccgttggaggaatacttgagtagttacggtccgcataaggagggatcctaacccactccgtaagaagttccgggcagtccatggcctggaagccggaggaaaagaagaaatggtggcggtactccttcacgtgcttctggtgattaaaaaggaacgggccctcatttaaggggtgggcccgaagtccataatctatctttaagtttgtcccccttcttggggacagaaacaagttcataaaaatacaaaatttttgtcgaactgagcgaaccttagctccggggagcatacaaaatgaataatcctgaaagcaggcggtaagcttgaggaatcagttggtacggcgcaaggccaacaaaaactaaaaaatttacaaagtagtcctgaagagggagcatagccccggacatcaaatgggtct

SEQ ID NO: 349709 - DNA, 504 bp, Cannabis indica
gagagagagagagaagaaggctaaggtaatatattagaattagtagcttaatattaagagtgtgtttggttggaaatgtaatgaaatggaattgaatgaaaaagaagaaatattttttcattttatctatttgattggctttatttttttttaaaattttcttagatgccaaaacagataaaagtgtttactgaaatattgatgtactacaaatttttcttatatatgtatatacagggacggagagactttagcccatgtgtgggctaaagccctcactcaaatatatacatcaaattttttatatgtagatatatacataatacatatattaattcactttgttcaatttattaaagtccaattcacaaaagctctcactcaatatcttaatcatgattcatgagcctactcttattctaatcaagcccattttaaaagtagtccaatacaaataataaaaaaaataatactttattaaaaaataaaataataccattgaca

SEQ ID NO: 349710 - DNA, 1071 bp, Cannabis indica
aaatcatgctaatatatttgcacattatgaagtaagtggagaatgtgtgagagtgagatcattgacataacatattcagaaaacatatggattacacttaataaagctatgtcatcaatgctcaaccaaagctataataaaggagatgcaactaaagatattttcatcaaattcttactcatgatcttcaagaaaatgactatattagtgtccaacatattcaatcaagtgtcaatcatacatacttatttacaaagttattaacaatatcaacatttgagaagaggacacataagattggaattcgtcgattagaagatctccatgaatgtctaaataagggagagttaattcatattgcactctttttttcttcactgagtttttatcctattaggttttctggcaagctttttaataagacagttattatgaacatctaaggaggagtgctatgaaatattatatatatgggtgtccaattcacccaaatcttttctactaattaccattagttgtaattactattcctatccttattagtttcctaatctaagactcacatgttaaaggaatattcaagcaagagcattataatcactatagtcaaatattaattcaatgatgttcttacaactatccaagatccaagcatttatttagagcattaatggttaagaaaacatacctcccatattgctcattccatcatattgagccattgttgaatatccaagtccaaaacacactaacaatatgctagatagtgaagagtaatcaatagacaattgtggagcaaacccacttatgtctaaccatcaaccttaacacaaactatccatccttaatatatatatatctcatacccatctaaccctaaagcgttatatcgcttattgggttaataaggattaattgatggtggactataactcaatgggccaattatagtcatatgggtgctctcatgtgcctctaaataattaatagttgttaaccatcccattatggttgtatgagaaatattaggcacataattaatgattgtgattatggtattatattagtcca

SEQ ID NO: 349711 - DNA, 939 bp, Cannabis indica
atctaattgttcattattaggttgggggaaagaattgacaaatttgagttgggattgtacattacggatttgagtagcaatcgggggacccagagattgcttccaatgtttgagtcgagaagagcagtttgataatctttcattaagaccaattaaaggattggaatgagcatttgaattggtctgcgcccaagcatcgcgcaagcaatcctcgaacccaagttcagacatccaaagcttatcaaagatgaaacggggggcatgattacgatgatcgttcatatgatgcaaggtgagaataggagggcgatggtcagaaccaaaaaagtcgccatgatttagacgagaagcaggaaagatggcatcccaagcatcattagagaggcaccagtcaagcctttcctgagtgtgatttggttgtttttggcgattagtccatgtgaaaagattatctaaaggggaaagagggtgaagtttgtgattgtctacgaatgattgaaattgcgtggatggagcacgtgacatgtcacccccaattttgtcagaaagagacaggtaatcattaaaattgcccatgatgagccaaggctgaagccgagagttagaaccgagtcgatctattaaatgcgaagaatggaatttattttgagcgtgtggtgcactgtagaaagtagtaaaagtaaaagcggtaaagttaggaaatttaagataacagtgaaaatgacttatattataggaaagtaaggttacatccacatcatgtgtccaaagcaacaaaagaccaccactaagcccgacacgtgggacctctaaactgttaggaaatttaagactcgaagcaaacttatttaaagctccaacagggagtttagactccattatatacaaaagtgttgggcggttttgcttcaccaacagggagagagaacggaatgctcg

SEQ ID NO: 349712 - DNA, 770 bp, Cannabis indica
tgcaaatttgtctttacaaaagtaccacagggggcaaacaattggctcagccttagggccactttcctaaataaaaaaaaaccctaaaaatggagcctacattatagggtccttggttggatcttcttgttcagcttcaacctcttcttcctcgcctagttcttccctcagagtcttctcgcaaaaagcaagcatgacatcatccttctcgccctagaaactgaagtccaactcggggttggcttaacaaatttgataaatggtcctcctaccgatactattgaccctctctttggtttcagcctccaactccttcaccttttggtcatgatcaacctattttttatcaagatcagcatagagggacttgagagagtccttcagttccttgattcactgttggtcggcttgatgttgctttcctgcttcctcctttgtacgagagagcttgacctcggaatggttcgactttttggccatgatttccctatgttccctgatctagcgaagcttagtctcaagcatttcgactcgatgatgtaacgccctaaataattaggcacgctacccataataattataaaatcctaatcccttaaatgggattactactcaaatagcacagaatttaaacttttgtaataaacggaatgagaataaaacttgtgataatttatactttacaatagttgggatcccaaatatatttacaaactttatttcaagtctctttcagttagccggcctaagcggcaaaatagagttttaaa

SEQ ID NO: 349713 - DNA, 870 bp, Cannabis indica
ttgggaaatagaaaatagaaagttgcagagaatatgaacagtccaactctctctagtcttgtcaataattaatatcaagaaattattttcgaaaaattaaaaattaaaaaaaaaccaaattttccttcaaaaaaaaaaaaaaccaactattttggtgggacccaccacaccacaccaccactctctctgtctctggcttccttctatggtacgcttttgagttttccctcctctgtgtgcagtctcattcctaattaccgtagacactcaataacattttgccacgtgtcactaaaacggtactttagtaattatagcttcgtgtacggacaaaaggcacgtagcggtagtgggcgtaggataaataaaaaaaaggaatgtctgtcctttgatcttatctaataaaaattacttttcttactacgttgtactcgctctcgttgaatgacacgtggcgagttaatgagctttgggttatgcacgtgccactcacgtgggtagaacgcggcggttgcaggctttttttactctacgagtgtgtgggtgtgagagtatttcgattcggtaagacggttacgtcactcccctcacgccatgcttacaaaatgactattttgcccttcactattttttaaactttttttttggtgggtttttgttttattttgtagtttttaattttgagttatgttgagatttgttagagcatctccaatggtaaaaaaaaaaaatacttacttaggtggataaataatgtaataaaatgtttagatgttataccattggagtaaaaataatgttattttaagaatttgttgggatgctatacagtagcatcaatgctatcataattttttaataaaaaattaa

SEQ ID NO: 349714 - DNA, 920 bp, Cannabis indica
tattaatataatttgtaacaactatatttcataacatttaaatcctatcatcaaattgtgtaacaaccattttattacaataataatgtgtgatcaacacgggagttacaagtgataacaaattgtaactcatctctaagttacaacataaagtttacaaaaacgtaggttaaaactatagtttacacatttatttaccatacatttaatatatattatttatataataatatatttatcgcattttaatctatacttattatatcataaaataatatagcaataacccactatattaaaatgtctgatacacttataatatttatttaatcaatcaaaatataacatttctccacttttaattaaataaatacagacttttaaaaaagtcttgcttaggtactgttatctcaatttttgtactctgatgtggcatcacatactggtgacacgtggaatcaacttcacatatctactcgaaagagatatgccgaacagaacaccgcatacatctggacggaggaagccttcctggccgaacagtggacagtccgaacagcatgccaacacttgcatcgtgaatcacaaaagcaatccctataactttgggatcaaatcacagagatatgacaaactatccaaatcccttaatcagtgtattttgtatttattgtgtaatcttaccaattatagatattataaacagaagggaacctttccctcaagcttatagccctataaatagtgatttattctcactgggcaaggggtcgaaaaacttatctaagaggatatactcaaagatatcgctgtaagaactctaagagaagaatcactgcattctttgttcttaagtcaatacaaatcaaggggagtaggctattacctgtaatatccagtttatttttattattattatt

SEQ ID NO: 349715 - DNA, 640 bp, Cannabis indica
ccatcttctgtttacagtcaatattgcctgagtacttggataagaaatccattccaagtattacatcgaaattcgctaaacccattcccattaagtgagcactcaacttcctatcctcaattctgatcggcatagacctaatccaacttttggagaagactaattctccgccaggcagtagggctccaaacccttgattataactatcatgcggtctatccaacttactaaaaattctagctgccacataagagtgagtggccccaaagtcaaacaatacagagaagtaagagttgttgaccaagtgttgacctattgtaactgaggggctagcctctgcatctaccagagttagagcaaacacccttgctggagcgagttttagagcagtcttctgttcttctttcttaagctatgggcaatctcttttataatgccatggcaatccacactgaaaacacccttgccactacactcacacagatgatgctttttacaattggggcattcttggtaagtgtatcgggtttcagaaccacactgacggttgcctcgaccttggttcccttagaacctcttgttctaacctgagccaccgggtgcagttggtgcttttcttttctgattagtggtcgagcca

SEQ ID NO: 349716 - DNA, 775 bp, Cannabis indica
ttatacaggttaaaccaaccactgaatatttgtttgacggtaactataatgaaagaatcatggacagtaatagttttacctttcattgaaatagtgaaatctagaagaccaaagaaaaagaggatggaagctggctggaaaaataaacaaagtaacaaatgcaacaaatgtggggagttggtgcacaacaagagaacatataggagaagacatcataaatgaaaagaagcagaacaactaaaaaacaacagtataacaacagagagaaactgaatatgatactgaataaaataacttgcatactaatttcattatttttctattagtattaaaaatagagcagtacaataatatttggaaaaatattgtaaaaaaaatgaaagaaaacaacattaaaacaaccttaaaacaatactaaaataaaccattaacaaaaaaaagtatgttggagaaatatggtggacttagaagtaaagtagagatggagccaacgctttgagaccaaagaaactgaatgacatgaacttagtgtgagtttctgaaagatatctacaagaagttcatcacagagcaagctctccatctctctctcacacacacaaccacactcttatctttctcgattcttcttcttcttccttcacacgctattttttttttaccaactacaaaaggagatggttcgcttttatttgagtaatgttatagacttaggaaaaaaagaaaaaaaaaatgaagaagaaggtgaatagtggagagagagctcaaatacaat

SEQ ID NO: 349717 - DNA, 1940 bp, Cannabis indica
ctttttgatcaacttcaggggaagacggtcttctcaaagattgatctctgatcatgctatcatcaattgagaatctgagaggaggacattccaaagacgacctttggtactaggtatgggcattatgaatttctggttatgtcttttggactaaccaatgctcccgcagcttttatggacctgatgaatagggtattcaaggactttctcaaaacctgtgttattgtgtttatcgacaacatccttatgtactctcaatcagaagaggagaaggagcaacatctccggatggttttacaacgacttcgagaacataagttgtaagccaaattcaagaagtgcaaatttttgatatctcaagtgtccttccttgggcacattgttagcaaagataggatcaaggtggattcgggaaagatagaatcagtcagggattggcccagaccaaaaacagttacagaagttagaagtttcttgggtctggctggttattatcgttggttcgtagaagggttctctaaaattttaacacccttaaccgagcttactaaaaagaatcagcgtcttgtgtggacggataagtgtgaatcaagtttctaggagttgaaacagagattaatcacagctccaatgttagtcgtaccttttgataaagagaagtttgtggtttattgtgatgcatccagacaaggtttggggtgtgtactaatgcaggtcgatcaggttattgcctatgcctctcgtcagttgaaagaatatgagcagcggtacccaactcatgatttagaacttaccgcagtagtatttgctctgaagatttggcggcattatctctacggagagagatgtgaaatttatactgaccataagagcctcaaatatttctttactcagaaagacttgaacatgagacagagacgttggttagagttggtcaaggattacgattgtgagatcttttaccaccctgggaaggccaatgtagtggctgattccctgagcaggaagggtctcgagcaggtaactagtatgattcaaatttcacctcagttagttgaggacatggtcagatcaaacattgagtttgtgtcatgcaaacttcataacttgacgctacaatctgatttgttagatcgaattaaagctgcccagttaattgatccagagttagtgaagatcaaagaagaagtttcaactggtcaggccagagactttacaatgtcagatagtgggatgctgttattcgagactagggtttgtgttccaagtagtgcgaaacttagaaataaaattcttgaagaggatcttaccactctgtattcttttcaccctggcaccactaagatgtatcaagatcttaaaccctacttatggtggagcgagatgaagaagaatgtggtagaattcatatcgcgatgcctaacctgtcagtagatcaaggctgaacatcagagagcagcagtttgttacagcctttgacacttccagagtggaaatgggaggatatcaccatggactttgtggttggattacctagaaccactggtttatttgattgaatttgggttgtggtagatcggttcatgaagtctgcacattttctaccagttaagacaattttttagtggatcagtatgcagatttgtacgtcaagaagatagtaagattgcatggtgtaccaaagtctatagttttggatagagatccaaagtttacttctaaattctggcagagtttgcaacgggttatgggtaccaagttgaaattcagtacaactttccatgctcagactgatggacagtccaaaaggacaatttagatactggaagatatgttacgagcttgtgttatggatttccagggctcctggagtaagtatctaccactgatatagttctcgtataataacagttatcagagtacaatagggatggctccct

SEQ ID NO: 349718 - DNA, 586 bp, Cannabis indica
agacttagttgatagtattgcactaccgaattgaagtaattgctatggatcggattaaggtaattgctatggatcggattgaggtaattgctatggatcaatcaggtacgcatacttaattattatatattattattgtgttctatgttatatacaaattgatcttgggtttattattaatttttctaacatttgcaagagccccaactcacttttgtgcttgatatagtagtgaatttgtcccctgatttttgtcattaatattattttacccttgactttcgacatagtattattttaccctttatttgataaattgagtattattctacctttacttataatattattaaaaaggttaattgcggtaaaattctcaataatttcactttacttgtaattaacccttaaaatctaaattttagcgccaaaacttctaaaattacggtaccgttagcaagttacaattttcatccaaatttgagtgttaactactaggttagattatccatgtgggtacaatgtacatgtggcataattttattggtctgcctaaataattatattaaaataaattaaaataaaa

SEQ ID NO: 349719 - DNA, 540 bp, Cannabis indica
aggcttttatttaagtaaaatttaagtgtattataagcaataaatatttatagtttagttggttgaggtggatggcataaagtccaaggtcatgagttcaaatcccataacactcttcttttaatttttttttatatatttttgagggccccaaaatttaatttgtcttgggcccatatattttcagggccggccctgtaaactaccataatataaaataaaaataagtaattgatttaataaatgtatagaaataaattttggaggtaactaaaatatatcacaaattatgatataaaaataaaaaaaattatgtaaatgtaattaattagtttcttatcaatactattagtaaccaaaaaattacttttaaaaatataagaaaataaaaaaaaatgtcaaaaaatgttatatttagttgactgttatgtaaattaaatgaaaaaaataattacataatatactattttttgtaaaaaaaatacgtttaaagaattttttttttttacatttataaggtttttataaaaacaacacgaa

SEQ ID NO: 349720 - DNA, 1250 bp, Cannabis indica
ggtcgtgtacccagaccggaacctagaccgggacctcaacctaaatctcggacacgatccgaaacatagacttggacctagatagggatccggatacgaaccttgactgggacaaggacccagattggaatcaaaatgctggaccaagatctggactgagatcctgacccagacacaaacttggatccgcactcgggaccttcactaggacttggacccgaacctagacccagatcggggtccagacctggacccaaacaaggacacaaactccgacccgaactcaaacccacacctagaatcagacccaaagctagacccggacccagacccaaacttgaacccagaccaggatcagaaccaaggacttagacccagtattgaatccagactcagatcgcgattggaacttcagactttgacccaaccaagaccaagacccaggacgcgaacccacacccggagcctgatctggacctaaactgaaatgacccgaaccaaaacttggacaaggactcaaattccgacccgaacacaaacccaaaatcgaactataaatcacaaatggaactagaaccaaactaggactaggaccaggaccaggacctaaacccaaacccgaacctagatcaaaaccttgatagagacctacactcgaactgagactgggactcgaacctgaacctagaccgagacttaaacccacacaataaccggaccaggattaagaatcaggatagggacctgggaaacagaattaggacatggacctattacccgacaaagacccgaacttgaaactagtacccagctcgtgacccggcaccgaaaatggaaccagactcggatatgggatcgatctggacccagagcttggtcaaaacctgtagtcggtgtctggatttgggacccagcccaagacccgaaccctaacgaggaccagaacccacacccggacctgaacacagtcccaaacccaaaagttgacccgaacccatacccggtgaccctaaattggaactaaaacaagaagttgatcgggactggaactaggacttggactttgaatcataaatgaaattggacctagatccaaaaccgtaaccagaccaggacccggactccaaatcaaacgtagacccgaattgggagccgtacccggatcccaaccgaaacctatactcaggacccgaacccgaacctcaactcagacccaaacatggaaccagactaggtacacaggaccaggg

SEQ ID NO: 349721 - DNA, 614 bp, Cannabis indica
ccaaaggggttacatcaagccatgatagcgtcgagtaaaaaccatggtagcagcaacaccgtaggtttaagtctttcttcagctctcaatgaaagtaccaaaatatttaccaagattttcaaaaactagatatttaagagcttaaaaaataataaaatacataaataaatgaaatggagatttttacgtggttcagatgttaattattcctactccatgagtaagtctattggcctcaaaaggcgtatgtgatatttttacagtgttttaggaggaaaccctaactctatattatgagtttctctttgcagaagaggatagtttagaataatattaccagagttttggctatttaggttgtgatcccccattcgaatggaaatagaaaggtatttataggctgtagagaaggtatggacatgcccatgacccacctagagtttttgtaaaaagcccactaatggggtaaatacatgcaaaaagagatgattgttgggcctcttggaaggaattgtgctcgtggcgttggagcagcttgacaataggggaccactgtacgtactggatgcatgttgccaaaagttttaaccttgaaaagtaaatgcctggaataa

SEQ ID NO: 349722 - DNA, 547 bp, Cannabis indica
tttaatgtgctatggtatataatgaacgaaacacggaaattaaaaaatgtggaatattagtttaagtttgaggtatagctatatttcactaggaaatattatctttatgttcattagtatatatcgtgaaggaaagaaaaagaaaaagaaaaaacataaggaatattaaattaaataatttttggtattatatattttttccaatatactagtggtatattaatttttcactatatatagtatttatgcttatgattgcagaatatagtttttatatgctattgtatattgtagaaaaaaattatttaatagtatattcgtttaagtttatggtatattcatattggtctaaggtatataatttgtatgtgatatggtatatcgtgaaggatagaaagaaagaaaaaactattaaatattaatttaagtttttagtatgtttttttattttgcacgatatatctttattatgtgctatgtgttggattaaaaatcctattgtgggcacatatgtataatgtatatgctattataaagtgtgatacaa

SEQ ID NO: 349723 - DNA, 538 bp, Cannabis indica
atcagattgtaatgggttttatttagggcacaaaacccaacaattattactccattataaatatgaaattgtattcttttaaaaatatagaatcatatttacaaattttttctagtagttcacgtcctacaattattagttcataattagagttagtcaaattaccattttttccttttaattatcatttgaattttttatctactataattcaatgtgaacagttaatctataatttaattatagatttggatccaactgttagaacttccagaattaatactataagggaactgatattcgatcattttaaaaaatttagattctattattgaaaattctagccacttatgttattaggttcccaaaacaaaagttgtaaaaattatcttgtgtgagaaacttcaacgagttaatcaaataacctaatgaatacaaacacgagttcatgaatacttaggataaagattgatctactagtgattatcgttctcatgtgaataactcttttatgataaacgacacgttaataaaagat

SEQ ID NO: 349724 - DNA, 889 bp, Cannabis indica
gataaaaaagattatattatatggtactgatttaattttataatctcagtacactttattaaataattttcaatttttaggttagtttaaactaacaattatattaatggtagtaaaacattatgattttttttaaaacttatattcataatcaaaataaattttacaaacatgtcgcacaacgactataaaatgaaacccaagtcattccgaaattgaactctccaggtcacaccattttgacaagtacaatcatctctgagttgtagactcactggtgctcagccttagccttccgtttacctacacatattcaaacaatatatgtgaaacaacaaactcagtaagaaaagcgtataacatataatatattattggcttgtatttaggcacccatacacatatccacaaggctaaatagatgatcaagaatgttcttaacataagtacaacctgtgtaccacatgaataagtactcgtcccgtactagtgttggtagggctgaaccgtaccccgagtactgctaagtgttgtaccacatgcactacatacttaattgtactagtattggttacatcgtattgtaccctttgaacatcatataatgtaccaatacactcagtaccgctaccgcactagtgttggtagtatatgaatcacatgtacaacatgcaatttacataagtacacatatacatatacatgttctatgctagttttacctcgcttctaaattcaagtgtgtcgatcgacctgaatggaacatcacaccctgaactagatgccctatgtcaccataacataaatgggtaaacaacttattaagaccttctcggggactgttacacccgaaattggttgtacttcagaaagtgacacgtgtcaatct

SEQ ID NO: 349725 - DNA, 651 bp, Cannabis indica
atactattcttacaagtgtaatgtagctaaaagttttaaataattaaaacaacaacaacatttctaagtaataaaattgaacaaaacatcatgaaaataaatacacaaaacaatcaagtgttacaaatttaacatgcaaaacaaatctaataaaaatataataaatatatattatatttttcaatattttttattatataaataattttttaatgtatataaatgtaattagattagatcggtttttaattgaattttgagattgacatccaataaccgatccaatccaattagaatccaacttttgacatccaatccaatccaattgtaattggatatccaactttttgtaattggattggattggatcggttcggttcaattagattgggttggatgatgcccactcctactatatagtcttctacagactaatcttctctctataagatcccactcaattgatgagaatggaggagaacacataacaatggttgaaattagtcttggaaccaaaccctaatgttttttatatagcaaactaattagagccccataaactctaattaagtttacgggtattacacaaaacatatactaaataaaatgtttattgggctcatttaattagatcaattatttaactcaatt

SEQ ID NO: 349726 - DNA, 552 bp, Cannabis indica
aaaaaaaattaggctaactattcaaaaagaaaaagtaaaactaattattattattattattattgttaatttaaaagaaatctaaattaaaagtgaaaaatttgcataaattaaaaaaaagtagtaaaagaaaatagaaaattaattattaaaatattaataaaatttgaatagacatgttaactgtgtaggaagttccacttttactatcatgttccatactttcttattacccttggatcatccatcaatgtacaataaaatatctctatctataaggacaaaacaagtactatatgtcctaaatatataataaaagagtaaataatattttggaccctgtgttttgtaaaaattatcaattggaccatctgttttgttaaatgaccaaatagatcttgtattttctaaaatagtataaatagaaccctgaattgattttttgtcaaaataaaatttaattataatctgatctaaaagtgttatgacaaaattgtttacattttctgtatctgttcgattaagaattattttcaagttgattatattaaa

SEQ ID NO: 349727 - DNA, 1215 bp, Cannabis indica
aataggatgctcgagctaagaaacgagcaacactatttgccaaacgtctaataaaattgacataaacctctcgcaagtcatttaacaacatcttacaatcagaaataatactcccaaagtatgaaaccataggagtagagctacgtaacacttgcacaacagtaagactatcagtttcaatgacaaccttcctccaatctttctgtttaacccaactcagtgcctccttaacacccaaagcttctactatttcgggttgcaacacccctgaccgacagcaggtaaaagcttccaccaatgcaccagtttcatccctaatcacccatgcaaagctataagttgcagttcctgaaaaaatggcagcatctacattaatcttcaaggtgttttcagctagtttggcccaaatttcagcaccatcgacatcaaaaaggaatgcaaccataggattaaatgttgaatcttgagcctgagtccaatctgcgagtaaagcttgagctaagtgagcaacacttgcaacagtaaggggcttatcagaccatactagctcatttcgatgtttccaaattgcctaacatgtcattgcgatcaacctccttttctccccatccgcctgctgtagaaccgtagcaaaccagttggcaaaagagcaatccaccaagcaatggtagatggtttcatcaattactttgcacacagggcagatggtatcaataggcacatgtctagaacgaagtctggatttcgtaggcagacagttagtagcaacacgccataacaagtctttcactttcggaggaacacttagcttccaaaagacgaaattatcatcctgtgcacccaactctttgctcaattgtgagaacttataaaccgattttactgagaaatggcccgagctctcccaactccaataccaaacatcacataaacgacttgaaaacaaggaaatactaagaattaagttagcatccctttcattaaacatatcatgcaccaagtcaaaatcccaagccaacgtatcagtttccataagtgctttaacattttgatcaataagagcaggattattcgaagttactcttggattatcttcattcgacaaccacggatcaaacactatattaattcgagaaccatcaccaactctgcatctcgccccttttcgaacaatctcttgagtttcataaatacttcgccacacgaaacttggat

SEQ ID NO: 349728 - DNA, 700 bp, Cannabis indica
agttatagaccttaagacaccttatgagatgtagtacaatagaacccccaacctaacgaatttaagaacatttaggtgtattgcatatgctcaccaatccattgacaagctggaacctaggctcgtgaagggaacttttctaggttatgccttgagaacaaagggatataaaatctacatttctaggaacggcaaaccaaagattgtgattgctagaaatcttgttttcattgagttagaatatcctcacttgacctccgggaagggtagtgtgtctctgtgtattacaagaaaaactagaaacaaagacaccagaagtgtggaagtggagtacggaacgaagctcctggaagaaggttcacaggcagaagatagtgtggaaccgaaagacaatgcacatccggaaggttttatggagccagaagaataagataacgaagacctaacaaaggtgccagaagggttcggacagacaggtctggaaggttatcagttggctcgtgatagaattcagagagggattcaacctccagcaaggttcgcagaagtagacataatagcatttgtgctggcgccagttcaacaaactaaaattgaagagcccggaagctatgaagaggcaattttaggcggaaacaagtctaaatggctccaggccatggatgaggagatggattctctacgaaaaaacaagacttgg

SEQ ID NO: 349729 - DNA, 79 bp, Cannabis indica
ctattgttataatcctaatttgatcaatgatcctctatatagatgatctacactgtaaagggattagaataccgtaaca

SEQ ID NO: 349730 - DNA, 847 bp, Cannabis indica
atttatttccttccgaacttttaatataatacttaatataaaacatagcatacgtgtatcgcacgtaacaatatactaatttttttatacacatataattattcttccaaatattccattcaaatttctttttcagttttaattaattttaaaaaaaaatctactaccaaacatttttttataacaaaacttgatttttttaagaaaatatatatcatttagtttttaataatatattatatatggtcaaatgtcttataaaaaataataaaaaattatgaatatatatattaatatatatattaaaggctcatacaaaatatatatatatatattaaaggttaacatatatatatttttttagattttagtgtgtaaattaatacattttaaaagaaaaaatttatttgtaatagtattaagctattatagagagtcatatataccatattgaactaatgtaatattgttgtgctattatgccctatttatggtgttctcttattcgacttcttcgtgttttgttttttttttctcatttaaaatttgattataatatattggtatattacaaaatttgatatatttactataatttggtgtttacttttaacaaaaactaataatttatttattatttttatttctaacgttcgtttatttattatagttgtatttagttattctcaaagattacctttgagaatcgagatatgttcagtaatcatcatcataccaaaactatttagaaatatgcaaggaatttataacaaaatcatacactaatgtataaaaagttagtagttaattaactcaagtatataatttgttttatgtacagaacaaa

SEQ ID NO: 349731 - DNA, 521 bp, Cannabis indica
ctcttcaaagatttagtgaatttgaaattttcaaaactatatttatttggtgtgcaaaatttaacttcttaatattcgatttattttcttgggattttttagcttcaacatcattcgcatctacttttagttttttcatttgtgttcgttccaataataattttaataatttctcattacaaatttttgtatttggaggctttctaaattttttataaatgagtctaatctctcaaccatataactaaatttgacctccattaaaacaaaaatatcatcaaataaacttacacacatctaagactcatatatgcatcactatatgtaatatttttttcaaaaaaaaaattatcacaaaatactcaattttgattttatacatcaaatatattaattattgttgatatctcttcaagagtaggattgatatcaattagattatttgtgatctttattattttgaatataaatatttttaaatttttatattatttgtgaatttgatatcacaagtatattga

SEQ ID NO: 349732 - DNA, 588 bp, Cannabis indica
cgaccctttaaaacagatgggtacattcttaagtataggcgttggtttttaaactctcacttaattttattagtaacgatttttgaaaaaagtagaccaatttaaaaattgacgagaatagtatttttttttagtatatcaaaatacctcatggatattaaacaatataaatgatatgatgactaccactatttttttttttaaataggtgaataaaataagatatatcaatgaaaacatgcatgtacgaagactaattaatttattgtacatagcttgaggaaacttaaagttgctaatcgacatgcaatttataaatcataatacaagaaatgtcacttttaccagcacagttcgctactgcgctggtaaaagtaacttttaccatcgcattttgcaaattacactggcaaaaaagccaaagttttaccagtgcacatttatagtggctaaaatctaacttttacgcgctatgaaaactcatttttgccagcacttttttcgttttgtgctggcaaaaattctaataccaacgttgatttatcaattccttttgccaacacatcagaagtaaaattcattttacca

SEQ ID NO: 349733 - DNA, 1138 bp, Cannabis indica
aaaatttgggatatattttcccataacccatgttcgaacatctggttggatagggactttctagctctcgtcttttttgtagtagtctctgttgagcagccttgtctaaccaagtgttgaccttttgcatggcatgcttttagatctttgatctcctctctctatacatgtctcttcttctcttctttgtaccttccattgataagtttcaagctttttaagcttttggaaacttttttaattatcatgttagattgtaattttttttggtatgttgatccacatgacagttttaaaatgtataatgtgtgacttcctgattgaaaagattcaattatagccttcgttgtgaatcttggctctttgagtcataaagaacacgaggcacatatttgagtttaaataaaaataaagatttggattcaataataaccttagccggccttagagatcttgcttgagacctggcccgtcctaggagttaatcatgggagttggctagttctatgatttaaccctataaaactagctggttcatacgtaggtttggtgaccttggcgagttcttggctgagtcatgggaccctggctgatccttttaaggcttgggaaccctggccgacttgggccttgacttgaagcgggtggtcagctttgtgtcctcttttgaattcgataaaaatcttgttatggccttgtaggcatatacatcgttagtctcatacgtggtgttataccaaaaattcggctaccatctcagtgggagacatgtgttttaggataaaaggaatatagatcgatgcaatcactttttatggaagaactcattaattacgtaagtatcatagtatatttgtaacttactgactgtaaggtcttatgcaaggaataaatatagaaactgttgcttagtatattagcgagaaaccatatgtcgttgaatgcgaatagtgaggcatcaagtacattacatctaggaagacaaaagcgacacatgtcaaactcgaaaagcccttagtgtataatgtacaaactaagtgaaacagtcgggtcggctcgagacctagtaagcgaggtgtttatctcgctagtgggaaggcttcttgtaacttcactcagttaacttcagtaaggttta

SEQ ID NO: 349734 - DNA, 583 bp, Cannabis indica
aggtcatattctatgaaattaccaaggttttttacctaaacaacatagcctcaagcataccatctataaacattcatccttaaacaaccctcatgcacactaaaaacccagaaaatacagtccccactcaaacagaaaacgaagcacggtgaagattcgaaaactaaccttttactttgctaaatctgttcccacgaatcgccctagacaacaatgcagaatcaagaagaacccacgaagaaaggcgaagatctgggcaatgtatggagattttccttagtggtttctctgagagtgaaggaacaaagaagttaagggagttgaaggaaaatgagggaaaatggggatttgtggttcaaatcagcgggtttaaatacccaaatccctcattaattgggatcacgacacgtggcagttggaatacctaaagtcgcccaatccaacggccagagatggccacgcctacacagaaaccgaagagttttgtgacgtggcaccataaatgcaataaaagtaatgattatagccgtcatttttcaaaaccctcgaagggacaaccaaaggtcacctcctcgtgacaacc

SEQ ID NO: 349735 - DNA, 1795 bp, Cannabis indica
gaccttgcctgggaattttcttagggtactacctgttgcacgcatgtggaactgaaaaacaataattttaagaagttaatcttattagtaagtggtttagacacaataatttgaacataaacatagttttttactcattaattggtcattgttggtgtgcaacgtacataaattgaatctataagcttatataacaaatttttgcttctaggtatcaaatggctacccctacttgacttacatagcagaggccaccattgaagaatgatgggaggtcacgcaaaagaaggctgtgggtactcgctcttttacactctaatgttgggttggtagaactgctactacaaagtagtgttctgtaagctggttactaatagtatttgcgaaggttccgtccattcaaatatcttggtaggagaatgagctccatgttctcgttgtaccttcccagcttgtaggctcccttactagttatctttgtaacttgataagggccttcccaagttggtctgaacactcatgttgttgtatctttggtattgaagaaaactcttcgaagcactaggtctcctatgaagaatttcctgtccttaacttatttattgaaatgccttgcaaccttagctagtaggcctaaaactttaggttgacttgatctcttctttcttctacttcatcaagggactctgccagcaggatgttgtttgtatcttggtcataggttgtcctcctgtgagacggtggcaccagctctataggcaacattgccttatagccataagctagagcgaatggagttttcctagtgtctgtcttctcagtagttatgtgagaccataagacctctgggtgcaattcgtgccagtttccttttgcttcctcaaggcacttcttcaaggtgtccttgagggttttgttgacaacttttacctatccatttgcttgaggatgggccacgacagagaagcttttgatgatgccatgtttgttgtagaaattagtgaacatgtcactatcgaactgctttccattgtttgacacaatctttagcgaaagtctgaatcgacatatgatgttcttgacaacaaagtcaagaacttttttggaggtgattgttgccaggggttcagcttctgcccacttggtgaagtagtctactacgactacagtaaattgtacccctcctttttcctttgggagttgaccaataaggtctatcccccatgatgtgaagggccgaggagactgcatcatcgtgagctcattgggtggagctcttagaatctttaagaatctctggcacttgtcacatcttttgacgtattccattgtgtttttgatgattattggcaaaaagtacccatgttagagtatctttttggataggctttgccccttggcatggttgctgtaaaagccttcgtgaacttctatcattagtcgctcgaccttagccttggcgacacaccttaagagcaggattgagaagctccatttgtacattagtccatttaggattagatacctagaagcctttcttcttatcttttttgtttcattcttgctttctggcaaggctccaattcggaggtaagctgtaataggtgtcatccatgttggactgtattggcatgtcaacttcttcaaagatgataatgcttagttcctttatgaactgtattggcactaggtttgccttattggcaatggttccgctttcaagaccggtaagtgtatctatgtagcattctattctctggggatctgccttattgtatagcctttgagctgactt

SEQ ID NO: 349736 - DNA, 702 bp, Cannabis indica
acaaaccttgttacaccagaatccgatgagtgagcagctgcaataccaggaaaaagaagttagagatcgatttatcaaggtacataaagattacttttcatttttacaacagaaatctaggctacattggctcaaagagggagatgagaattcagcccttttccactcgagcatcagagaacgaaggcagcataataatattctctctatcgaggatgtgaatggattcatacatgaagagccagagaacattacaaaagcattcttagatttctataaagacttattgggatctaagatggtgaatagagtgcctgtgaatattaatttagtcagaaaaggagcttgtgttactgaatatcatagcaagatcctgactgctgcatacacaatggaggagctgaaagaagctgtctttggcataccagcagcaaaggccccggggccagatgggtacaacagttcgttttatcaggataattgggacttagtcaaacaagatgtctttgaagcagtaacctcatttctccattcgggtcaattacttaaggagctgaactcgacgatcataaaccttgtaccaaagagtaaatgcccgaatgttgtaagtgattatcgtccaatagcatgttgtaatgtactctacaaggttgcaactaaaatgatttgtagcaggttgaaactcatattgccagatcttgt

SEQ ID NO: 349737 - DNA, 834 bp, Cannabis indica
ttctagaactgaaaagttgtgtaaaaatatagattgaatctaaattatactttcactagtcaattaacggtactaaaagataaagaaataattagaatgatataacaataatttgaccacaactaattacaaagaggactaattactaaaattaactatatcaatgggcacactaaacttctcatattaatttttttttatattcaaaattcactcaaaaaagttacaccacataaacccttgaaaatactcctaaaaaagttagtattaaggtgtccaaattattattcatgttccatctcaaaatccattatttttttcaaaatccaacatttatggaatcctaactttctcaacagatcgaatgttggttctaagtgttaattctggaaatgagaagttgtgtccaaatatagattggatctaaattatactttcactagtcaattaacggtgctaaaaaaaaaaagtaattagaatggtaaaacagtaatttgaccaaaactaattataaaaaggactaattactgaaattgactatatcaatgggcaaactaaacttctcttattaatttttttataatcaaaattcactcaaaagttgcaccacataaactcttgaaaatactcctaaaaaagttagtattaatgtgtcccaattattattcatgttccatctcaaaattcattctttttttcctaaactaaatcccaaaatccaacatttagagcttgtttgatttcataacttaaaactgttttttgttttttaaaattgaaaacagtttttaaaaactaataggggtcataatagttttttaaaaattgaatttt

SEQ ID NO: 349738 - DNA, 620 bp, Cannabis indica
taaattctaacttaaattcaaaatatctaaccaagtttcaaatttcaagtttattcaaaatttaaattaattaaatttctaataagataatataatatatatatcttgaattttaaaaattaaatatacctaatattatattcttaatcttataatttaataaattaaatattacaaaataaacaatttgaaaaataagatattttatggttaggatattaccaattttattaaaaaaaaataaaataaaataagtttgaaaaattttatggttagaaaccctaaaatttctattcaaacctaaactaaccaatttttcaaattttcatgttatttttgccaaaattaattttaataaaaaaatatctaataagataaaatgttaaaactaacatttttcaaatcttataattttaatttaataaaatatatttcaaaaataacaaatttgaaaaaaaaaaagatatggttagcaaattttgaaatttaaactagattatttttaaaaaaaatattttaatatcaaaataagatcattcaaatttaataataaaaaaatgtaatatctgatcttataattaaaataaataaaataaatcaacaaaaaaaattaaaataaa

SEQ ID NO: 349739 - DNA, 639 bp, Cannabis indica
gattgatcggctacgagatcaccataaccattgacgcaacaacttggttatatggaacaatggaatggacacggaagtatggaggattgatcagaatatgcaaaagtgtccactgtaggggctttcattgtccgaaggacatggaaggttctctaagaattcgctttccctactagctagtggagaaacctatccttaacacccactgattttggatataaaaatcgtttaggtgttgatagttgttgagcacaacataaggtgttcatgttcaccttaacaaagcatggatgattgatcacaatatgtgaaagtactagattgatcggctacgagatcaccataatcattgatgcaacaacttagttatatggaacgatggaagaatttcagcagaacatggagtagctagtaaagaaagggggacttcgtagttcgtaaaataaacaaaatgacaacgattattatacctgaggaaagagattcaaagggaggattagtggattaaaaattacaatgcaaaaatctggttgaaaaaggaaggaggattcacaaacttggacaaacttggtgaaaaaatcattgaaaccacaaaagaaaaaaaaggattgcaattaaagttatcagggggaagaaatg

SEQ ID NO: 349740 - DNA, 997 bp, Cannabis indica
ttccctttaggagttgaccaatcaggtctatccccctataatgcaaagggtcaaagagactacatcatcatgagcttgttgggtggagctcttgggatattcaagaatctctggcacttgtcacatattttgaacatactccatgaatcctcaatcattgttggccaaaaatacccctgtcagagtatctttttaaataggcattgcccctagcatgattgctacagaagccttcatgcacttctatcatcaactgttcgacttcaatcttggtgacacactttaagagcgacattgagaaactctgtctatacattactccatctaggattagatacctagcatcctttcttctcatcttttttgcctcattcttattttcaggcaacgctcgagtttggaggtaaactgtaataggtgtcatcaatgtttgattgtgatccaacatattgacttcttcagggatggtaatacttcgctccttcaagaattgtattggcaccaagttttccttatcggtcttggtgttgcttgttagatgggaaagctcatttgttgtggcattctgttctttggggatctaccttattgtatagcctttgagctgacttagcaagtcttggatcttgctcaagtaggccatcattgtttcacctcgagctatgtattcacctaggacttaattcacgactagttgagagtcgctatatatgtctaggtggtcagcccgtacttcatgcaccagcttgaggccagcgatcaaggcttcatattcagcgtcattgtttgaggctttgaagctgaatttaattgttgtgtgcaattgttgcccccaagtgttataagggcaatgcctgaactggataagtggttagtgcagcttccatcaacatggagtttccatgttgattcttcatgattttgctgctactcttgctctcgtttctgttgggttttatgccctaaataaaactctgtttcaatgtaatccagatta

SEQ ID NO: 349741 - DNA, 538 bp, Cannabis indica
ttttaataaaatattagaaaaaataataaaatacaatttaaaattataaaaataagagaattaaggagaaaatagaaaaaactatttaaagtgatttgagagtgccacgtcaccggctcatacttctcctttatagatatatatagattattatcttaatggtttagtataatctttattttagtttttaaattaaaatttttcgtaaaaataattaatttaaaatactaacacatttgaaaaatataaaataacaataaaaaatactaaatattaaataaaataaaaacaacacaaccatttgttgggttttgtaccctaaataaaatccatttcaatataatcagatttactaattataaagatcaaaaattacattttatgttgcatggttcacatgatttatttcatgattataaattcagttaggtccagaacatatgtatttgtacatgattatagtgttgtcagcacggtggaatataatcatgttaatatgttcgaaagtttaattccctaatttgtcaattcactggat

SEQ ID NO: 349742 - DNA, 1120 bp, Cannabis indica
ccagatgggcttaatcaacatctacactccatctcggaggggggctcttaggattagttggaattctgttataagctttgtattaaatcagttataggttgttaagggtaatttagtcatttatcaatattgtattacagctgtacattttctgttacagctattcttgattttattatgagctatacaaagctctttccttttctgtaaaagatcaattcaataataacaaaatcaaaggcaaatattctctctgccttttcctattctttctcataaaatatttctctcaaaaaactcaattcttgaagcattaaactgaatcatttatcctaatccactaatttttagagtttttaaacaatcaaaatattaatctcaatattaggtatttattgagattataagacttaaaagattgtaaataattgaaacacaaagaggtaagcataagaattttaaaaacattgaagaatcattattcgacttcaatagatctttttgtttctgtaaaatgtcaattaaactaaaatactaatgttctatgatgatacacatatatatgccaaaatcatcacctaaagggtcaatcgtattttttttttttttttgattcgaacttgggaccttctctttatgaggagaaatgttaaaccactaagttatgcctatgaccacatcttaattcttatttagttggtgaaaatgacaaataaagtagaagttacaatttttgagtatgatattaatacttgggaagagatattaaatatgtatcatagtattacattgtaaagtatgtgttactaaaacacatgaccattttcaatataaaaacaatccatatcaatgaataattacatcttcaacaaaaatagaacaacgaacaaaaaataaagataaaaaccagtacccaatgtataaaatagtcaaattaaactcttacacatcttctaaagaagaaatatgttatttactttaaatatagtaataatcttcctcttctatttttcttaaataaacatattcctaattcaatctaaaatattttgacctttatatatcaatggttgcaatactggtcaagctactaaaaaaagtaacaacaacataggtaata

SEQ ID NO: 349743 - DNA, 620 bp, Cannabis indica
caatctgatgtcttgatcttcagatcaagtgtagtatatttgaatccacccaaacttctggaaactagttcataaatacacttatgaaacatcctttactatatgctttactcatcggtcaaagttataatcaaggtaaaattatatttgactttattaaatagaatgtgaattgtacacatatttcaatatattcaaatttaaaatataaattttacatatattagtaatgtcataagcaaattaatacatacatattttattatttcttaaaaataatggtttcaaactattactgttacaagatatgtatatatacatctactacttaattcactttgcatattctttgcatattcctagaagtgaatatataatttactaatattatagtaaaatttattaataatccaatataatctaatataatcaaagtaataaaatcacaaaatgattatttaaaaacctttctaaagaagttttacatacaatttctacttgaaatagttgtatgtacctagcagggccggtcctgagcataggcgggctaggcctgtgcctagggtccacctagctcaggggcccaaaaaaaatttatctccttttaaaattacacattt

SEQ ID NO: 349744 - DNA, 830 bp, Cannabis indica
catacacttttaccaaagcactatgtaccacaaccgtacaagtatcagtagtgtatgaatcacaacatattagcatgcatatacactaaacatatacatacattcagatattcatatcacaaattatatatacagttcttacattctttcaagattcaagtgtgctggccgacctgaacaaaaagtcttgcacgaaatagatgccctaatcacataatgaaaccgggtaaatcatatgatcaaaaccctaattcgggaaacccaaacccacaactctaggttcttttatatgttggaattattttaccatctgtaacccttgtatcctttctgtagcagggtatcaccaagatctgagtccgaatctccttcacttgaaattggattcttcacagccttacacactatgatgagtaccacttgtatgtgtgggcacttactctaatcactctagggtttgaattgaagagaggaagagagagatagggtttcagttttggtataggaaagaaggctcaaaatttactgaaggaatgagatgcatcatctttttcctttagcagcactacctatttataggaaaccacttagggttatgttagatttaattaacattaaaataataaaaaaataaagtggcaaaacccttcccaagtggccggcaatggattgttggccccactttgcaatttttccatttatctcatttttcatctcattttctcaaaaacgtcatttttctaatttaaccacttaaatgccaattttaattatttaataaataaaataattattaaataatatttccatttagcatatttattaattag

SEQ ID NO: 349745 - DNA, 737 bp, Cannabis indica
gaagtttctgggctttattgttaatgcccgaggaattgaagccaatccaaagaagattcaagccctcctagatatgaaatcgccaacaagaaccaaggaagtgcaaagtttgactggtcggatcctcgcactcaacagatttgtttcaaagttaacaaacaagtgtgttccgtttttcaacatcctgcgtggaaataagcaattaaaatggttggcgaaatgtgaaaaagcttttcaggagctaaaaatgcaactcacaaagccccccgtactctcgaaacctcttgacggagaagaacttgggatatacttagctgtcacagaacacgctgtgagtgctgtgctgatcagagaagaaaacaacttacaacacccggtctattacatctgtaaaagactcattgaggcctagggacggtacccattgatagagaaactttcttactacctgattctaacaatgagaaagttaaggccctattttcaagctcatcttgtttgggtgtacactaacacaccattacgccaaatattgcaaaagtcggacgcctctagacggttactcaagtgggcagtgaagctgggtcagtacgaaattaccttccaaccccgaacaacaatcaaaggctagaccctaccagactttgtggtagaatgcacaggcaaagaagatagcataccagaaagcaaccccgagccggcacaaacacctcagctaagtaacagtgaagacaagc

SEQ ID NO: 349746 - DNA, 590 bp, Cannabis indica
atctttttgttaacaaaactcatttattaatttacctaatgattacttataatttttcaattaattatttttcttacttatttacttgatgaatatctataaattttaattatttttttgtaatttttaaatttatattattaatttttaattagttttatttttcactcaacaataattgtagcgagaaaagtacaaaatatttaaattatttaatcctacaataaataatacagctaacaatataatcatggtgtaagtctatcatcaacggaagtaacataaattgctattgggggacccacataaaaaaagtaaccaatcaacattaaatttatttttattttgttgttagttatgcgagaaaaaaataatcaacattaagtaatttaatattaaaaactaattaatccaatccgcacttttgtagattggatttgagttattatgtgaattagattgaatccaaaatatgaaattcccacttagtataaatcgaatacactcaaaatagtgcagaattgatatacatgattatcgttattgagagaatgataaagaggagataaaaaactcttaaaaaaatgaaa

SEQ ID NO: 349747 - DNA, 843 bp, Cannabis indica
tcgcaacataaacacaaataaatgagtacatcgagatgaattacttcaacacttaggtggcgtttggttgggagaaatgaaaatataggataggaatgagaatgggaataggaataggaagggaaaggaataaaatttaaaatacataaaaaattgataaaaaatcattaaattttttctcttgttacattggaatggtatttccttccattttaaaatggtatagtcattccaccaaaatagtggaaagagcattccatgggaatgccattccaatactttaaaatgtaaccaaacaaaggaatgtaatgaaaattgtttcttttccattccattcaatttcattacctacaaccaaacgccttagtatttttactctcaaaacgaataagaaggataactcaaatatgacgagatgcaaccttccaagttagcataaccgtctaaaagataaatacaagaagcagttgagtagttattacatattatcccatgtgtaaataaataaagcgtagggaatgtccatgtttcattagcagttgtaaataaatcaatcccaacaaaataactgccaaccctatatcctataaatagagacagaatctatgggaaaagagacggcaaaaaatagcaaaagattctattatttttaaatattgagatttgtattttgtaatttaaaaaatattcctaataagaactcgtagattatgtaaattttaactacaaaaccacataaaatatctagtgttatttatgattattaaattatgtagtatatttattgcaaaaaggctattaatttagtaaatgaaaatccgggttaacaattatatatgtaat

SEQ ID NO: 349748 - DNA, 552 bp, Cannabis indica
tttcaactcatagatccttgttattgacttaaaagaaaaaacatcaaagaagaaaaagaaaaaaagaacgattaacaaacccatgctaagtacaacgtcccatacataggaggagtttatatattttaaaaataacaaattatatttttaatttcaatactattaatttgtttataatacacacatcaaaatatctcatattttagattataccgcttattataagtataatatatataaaaaaaatttaaaaattggacaacattgcacaaagaaagttttagttccctagttataatatatccatacaaaaaattaaaagatacttattgtaagaaaaatttacataatagactaaagctttgaaaaaatttacaaaagtatatcaacacaaattttttttgttatttttactttttaaacttttttatttacaaaaatatctcttcagtacaagtaataaactattttttttagttcttttatagtttatttatagttgtattatagttgtcatgagatttttttttattattttatagttgatttata

SEQ ID NO: 349749 - DNA, 794 bp, Cannabis indica
aaaaaccatttaaggctcaaaaatcacagctcaaatgcatctaaactaaggttcaaacaacaaacaacataaaattcaaagcttcaactatgagctaaattcacatgttcatccatgaagaagctatatcaagagtaaatccaaacttcagcatgctttctaattatttcattcaaattaacaattagaagtttccaaattttacaatccaaagcatacacaacacaccctctactaatcacaacatcaccataattacaacatcaagaacaacccacatctcataaacatacaaatcaatcttcctccaaaattgaaaatcatcaaaacaacatcaatttcagctactaaaaattagaagtcaaagacaaagaaactacctcaagcctcaagtagcaagaatcaagcacaagcacaccaaattccaagcttaccctcaagcaatttctcaccaaatcacaaagtttaaaatagggttagagggagagggaggggtcgggttggagggatggaaaccagaaaatggtttttccatttaataaaaaaaatcatcctttgttgtagataaatcaagggtcaaaatgaccacaatgcccctagggccatataacatgcaaaataacattcaagggcatttaagtcatatccaacacaaaacacctattcaaataattttcagatttcccctatataaataaaatgccaacatttaatcccaaattacatttcgggcccgaaccccgttcggcccgaaatacccgattgtgactgtaccgcgccaacatgtcagaaca

SEQ ID NO: 349750 - DNA, 1420 bp, Cannabis indica
tcagacagtcgatgatcacaaaaactgtcatgacatgtggtatagtatactttttttttttttacttcaatacttcagttatgttggccgacctgcttggagtacaatcgatgatcccggggcgtatgtcataacaataataaaccaacaagtgtttatcccaaaatattgcttaacagttacaaaggacaacctaaggtttcctaccaaactccgtagttcaaatacaataaaataaaacttatatttttactctaaaatatataccatatgttagagctcatcgcaagcttcgaaagggtatatagaatgtccaaaatggacaccctagtacaaagttatggtaaaaatatgattcccgagttcccaagatcgcctagaaccggttaactgcttctactagaactggttgactggttggtgaggggtaaaaaatataattttccaagtttatgtactcaccaaaacgctactgaaacctatccaaaccactccaaacttcatagggcacatatatactatacatactaccatacttacgtaatagaaactaaaattaagcccttaattggtaaacaccactaatgttcagacttaaagctatgaaaagtctcaaactcaatttctaactcaaaatcacctcaaatttaataaagaaacatcggaactagtcccatgattacccgagaacaatcctataaggtaagaaccttcataactattctaattcgcaaaatccctatacaaaactaattgttttaaatttgaaacagaattaaaccttaccttaagcttttattcttcaatgattttctatcccacaaccactggagcttggatcattaagtttcagattgaaaatcgaagaaaatagatagaagaagaaagtttcatcgaaggaagaaataaaatttgttcagtaagttatgtttcaaaaacttaataatatatataggaaaatttgattttttatgcttacatttggttaaaaaaaaaattctaaacaaataataactaatatttgtaagatatgacaacttttatgatatccctaaaatacccccatttacatcaccccatttacaccatcggaccacccatcgggccacccatcggaccacccatcgggccaccccatcgggccaccatcggaccacccatcggacccatcggaccacccatcggactaccatcggaccaaatctgctaccaatttttttttatgtttttgtacatacaaaagtagcatcaggtgaccatcggaccaccatcggacccaatcggactaccaatttttattttttttaatgtttttgcactaaaaaaaagtatggaaaatttgagaggggtatttttgggttttagataaaagtggtcatatattttcaatggtgatatgtattagtttagaaataaaata

SEQ ID NO: 349751 - DNA, 644 bp, Cannabis indica
tatgtacattatatgatgagcataagatataattatatatatatttgtaagaataaatatgtagaaatagtgatttcaatatagatgcatatataatatatattatgtgtatatgatatatatattgtgaaattaatattgatattttgtgtatgttatttatgatagtatggtaacatatatgcaatactaattaacataaaattatttgagagttataattttatgggagttatatattaattttgtgtattaagatatgtatataaattatcatattaatatatgtactatatggtatgataatggagatgatgataaaaaaaaatgtgttcattctatcattattattacgagactatattgtgactaaagataattacttggaaatgaagttccatttggtgatattcatctcattttatgagataagaaaagtgaactatacttttttgtatttttcttgtcatggcaagagtaaagtgatcaaagtggatctagattgtgaaatgggctcaaaaaattagaaggacaattttagactcaaagaaagtagatcattgtggattcaaataatgagaaaaagattataaaattggagaagcaattttgaattttaaaaagtaaagtggtgaaacaaaatt

SEQ ID NO: 349752 - DNA, 987 bp, Cannabis indica
atgcttttcttcatggagatcttgaggaagaagtgtatatggagcaacctcctgggtttattgctcagggggagttagagcgagtttgtcgtcttcgcaaatctttatatggattgaagaaagccctcatgcttggtttggtaaatttagtcaaactgttgagaaattcggtttgttaaaaagtaagtcagatcattctatgttttataaaagattagctgctggtatcattttgttagtggtgtatgttgatgacatagttattactggaaatgatactgaaggcatctcatcccttaagtctttcattcatatacctagtttcacacgaaagatttaggggagcttaagtatttcttgggtattgaagttactcggagtaaacaaggtatttttctatctcaaaagaagtatatacttgatttgttaactgagacaggaaaagtaggagcaaaaccttgtaatgctccaatgaatctagcagtgcatcttacacgtgatggggaaccatttgaagatcctgagaaatatcgcagattggttggaaagttgaattatctaactgtgactcatccagatattgcattcccaattagtgtcattagtcagtttatgtcttctccaacaattcatcattgggcagcactagagcaaattttatgttatttgaaaggagtaccgggacgaggtattgtttacaaggatcatggatatacccagattgagtgtttctctgatgcagattgggcaggctctaaggtagacagacgatccacttcatgatgttgtgtattcgttgggggcaatctgatttcttggaagagtaagaaacaaaatgttgtgtctagatccagtgctgaatcagaatatagggctgtggcacgatctgtgtgtgagctaatatggatttattagcttttgattgaatttgaatttaagacttctattccagcaaaattgtggtgtgataatcaagctgctcttcat

SEQ ID NO: 349753 - DNA, 1147 bp, Cannabis indica
gatgaggagaggcaacaactttgtattgccaaacataattacgccatggatgagtacagccggggaatgctgaggtggaagccttgaagaaggtcttgtgggaagctcaacaagattcattacgcgaggaggccttcaagaacgcctgggatgtgagcatggaccccctgacggattggttcaaccgcttcgtcggtccgactctcgctccctttacttctgagttaaccagccagttcgtctcccatctgacccaactcccggccaaaagatatgcagcctgtgcttccacgaagtctatttaccaggttcaggatatcagcgctcccatggctgcggtaagttttcgtgattcattcctctctttttgcttgtattttgtcttaaggcatttggtctcattcttgttttctttttcagattacggtagagaccgaccgcctctcaaagaccctaatagaccatgggtacgtcatgtctgaatttgggggcatggacgaggccatgaagagtctgcgagacttgtcggctgagaggaaagcattccgggaggaggctcagcaaagggaagctcaggcggaggcgagacaccaggaggagctaaaggttcagggcgaggctgtggccaaggccaagcgcgagttgcgggaagccaaggaagctatggatgagctgactgccaagctaaaatccatggaggagctgcaccaagcggacttgcagtcgacggccaacctgaccgtggaggtgaaggagctgagggactttaaagattaagccttgaagaaggctaagagagatgagctcctagcccctgtcgtctgcaagcattgcaccaagcgcttcgacgatggcgtctttatggcctggcaaacaaacgcccaaaacatcaagctcgacttttaccccaagcctgaggaagtccttgttcgcttttgggagaagaagaagagacttgatgccttgctcgaggagcatagggggcctcgtcttccatcccgcattgactagccaaccagtttatcactatcactatcttcttctttttttttttattatttatatttacaacctcttttcccttttttcaaacaattttaattattatctttaagggtagacaattttaaggcccgtccccaggccc

SEQ ID NO: 349754 - DNA, 799 bp, Cannabis indica
ggctctaacatcaagacttacaattggatccctactatggggagatcttcaacgtaaaagggcagacaccctaagtgaattcttaacaagagctcaaggattcatgaacctagaagacgcttatgcccaagcatatggagtactttccacaccttccaccaaagtaacaaacacctaagcttcatagatcatgtctctatctatttaccctccgccaactgctttcactactcccacggtatatggaccaagtacttccgtacaaccagctgtacaggctagtttctccaggtttggggctgcacaaaccaaatacagtgccgctcctagacaaacaaatcggaaagcggaagctccagcatccaatgtgacccactcgagaagtaagaggaatgcgaagggaccaaatcgggagtgagtctacgaagaagggtaagacttaagaatcgaggtacaccgagtacacaagtctcatagatacttgggaaaatatataaaaggcaacctgtaacatggtacactacaggcggcctccgctaatgtacatgtaaaagaccgcttaactttaatttagaaattagcagataaataggatttaattatgaaacttgcatgttagttatgaattatcattttacggagatttatttgaattcagaatgtattttatatgtcatatatggaatttcatatttttgcatgttttgtgcccaacaacattagaacgtggtgtttggttattagaatcacatcttagtatttttagtatagcggggcaatatagttagaccttgggaat

SEQ ID NO: 349755 - DNA, 665 bp, Cannabis indica
caaaaatgctagaaaacgataccattgaggaggtacaatatccaacttagctcgccaacctcgtggtagttcccaaaagtggagagtgtgtatagattttactgatttaaacaaagcttgtccaaaggacagtttcccactgccacacatcgacatgataatcgacgccaccgcaggacacgaactaatgagcttcatggacgccttctcaggatataatcaaataatgatgcaccctcctgatcgagataaaacatcattcatcggtgagagggggacatactattacaaagtgatgcctttcggactcaaaaacgtcggggcaacgtaccagcgaatggtgaacaaaatgtttgcccaacagttaggactgactatagaagcctacattgacgacatgttaataaaatccaaagatggcgccgaccatgttgaccatctgcgagaatgttttcaaatcctcctcgcccactcgatgaaactcaacccagccaagtgcgcctttgctgtcggatctgggaagttcttaggccatctagtaactcgacgaggggtagaagtgaacccgaatcaaatcgaagcctttcaggcgacaggacaaccccgaaccataacagacatccaaaagttaaccgggaagatagccgctttaagccgcttcatct

SEQ ID NO: 349756 - DNA, 560 bp, Cannabis indica
gaagtccatggcaatgtcttccctttttcattccagaagattcagtggctgcagcaaccctgcaggcctttgattttcagccttaacttgcaacattaatgaatgtcttcattaatggtatcttgatttcttccaactcaaagaaagcatttgagaggaatttttggatggtgttgtaatgtcattaggagcctaagcttcatgttgaatacaaaaagtgcaaattttgctgaccctaagcaagtttcttagagcatgaggcggacattaggggtgttcatcaaaccgttcaaactgctcaaaccgcccgcaccgcaaaaaaatgcagtttgaaattctttgtggtgtggtcccagtttgaattttcctaaaccgcgtggtgcggtgcagtttgcggttttgaattgttaatatgcggttcaaaccgcaccgcactgcacattataaaataccaatttttatatttagttaggtctaatatgtgaatgtccaacccaaagcccactaattattgtattattgaaatttaatttttttttcatatttatttttaagcctta

SEQ ID NO: 349757 - DNA, 613 bp, Cannabis indica
aattaaattttttttgaaaaaaaaatataatgattttgaccaataagaaattaccacgtggcaatttacttaacacttaacagccatatacatacaaaagttctataattataacataggtattattattgtcaaaaattaaagttatgtatttatttgaaattgggagttaaaattaagtatttatacaccaatttactatttctttttatgtgttaaagtttgaaacttgaaatatattttagagaaaagaatgtatacaaatttatgagagagaaagaaagagagaagaatcaaaaggatagttatgagaaattatatagcaaaacataaaattgaaaaaataaaataattatatttttcttggccattggattcaatgattaataatcatccaatggtcattattattattattattattattatttaaaaaataaataataataaaccataaatatatgaagttttgtaacgtccattacactaggctctaaataagtgtttggactcttaaattttcacatggcaaaagaaattcaactaattaataaattactaaagtaatattttaactattaattttttatttatttatttttaaaaaatttaa

SEQ ID NO: 349758 - DNA, 1099 bp, Cannabis indica
attaacaaacattagaataattagaaaaaacttttttattaaaaaaaaaatatttttttaacaaacttaaatttaattatttatattaagttaattatattttttaattttttaaataatatgataattaaatttatttgtaaatatatttatgtaattattaaattgatatatttatttataagtaaattaaatatttatataagtaattatttaaaaaaaattagagaaataaaatgagtttatttaatagtattgaatattaattttaataaataaaatataattaaaaaattcgtaaatgaatatcatgaattaataataaataaaaaataaattgataactaatatttcataaaactttaaccaaataaagtctttaaccaaataaaactttaaacaatgttggtgtacactttgtttcaatatactaaaaataaaaagaacacacatattcttaggatttaggataaggtgaataaggttccatctcaaaaccaattgataatgggagaagtagcccattatatatgacaatttatttctacacataagcaatgtagacaccctccccacgtttggcctgaaaagtgtaagtataacgaacgacctttaagagaccacaggaccgaacgtgacattttaaagagtcccacaagtctaaatatcaggaaatttgtgggtgtacaagttggaaaatttgtagatttttgaaataggtcaaagaccccaacactggaaattggcacacattggccgaaaggtcccaaatggaggttcaaggggagacagtggaagtatctttttggatactcggatcacaaacggctttttagaccagtggcactttgggctcataacgaatcacaagtggctctcatacatgttagaatctgggatgaggtgaatgaggttctatctcaaaaccaattgctaatgggaggagtaactcatttctcttatatatgacaatttattttcacacgtaaacaatgtgtgagactaactttacatacagggacggagggactttagcccatatgtgggctaaagccctcactcaaatatatacattaaattttttatatgtagatatata

SEQ ID NO: 349759 - DNA, 1227 bp, Cannabis indica
gaaaagatttccgtgtgacagtatttttgtaaaaattaacccaaaattaagtatttttgtaagtttcccttttctaaatccaattactattttccaaatccaattactaattggaatggaacaaaagaaaaaaaaaaaaggttggattggatcggatacccacccctatctaaccttaagttcattaaaagagggaaagacaaaatttttctcgattagtattaattatataatttattttcataatcatatcaatatgttatataatttcttttggttgatggtggagaaagttaatgttattgattatttttttttaaatgattgtattaatattttagaataggcatttacatttattctaataccatgtatatataatgggcatcttaacttaaactcttaactcagaattttattaacattaaatgagattaaataattaataccttaaatatatataatctagaataaaagcaatgattttaatgttgaattataaataaaaaaatataaaatttttaacgtggttttaaagttaattctaaatactccacgtgtgtatgctatttttgagattgttatgaagaaggatacagattggcataatttcttgaagttccaaatttggttgtgtcatttacctatgtgtttctactatttatagggattagatagcagttatttgattttatctatgtaacagtttatgaaacgtggacattcttcacgtttcatttatatataatatacgagaacggtttacaatcaacatttgaaatgaataatcgttgatttatgatttggatttttattacatttttcaccgagcagcttcctcttaatattttactgttggaatatattttaccaggatctagatttactaacaagtatgtttttttaacatcctaaacatgaatttctaaaacgatataaaataaacacatcaaaggtatgagaaaccttacagtggttgcagcggaattaagtgactccttacgttcagatctctaacccttatatcctttctgttgcaaagtatcaccaagatctgagcccaattctcctcctcttgaatttggattcttcacagccttatacactatgattgagtaccacttgatgtgtgtggacacttactctaatcactatagggttctgatttgaagagagaaagagagagagatggtttcgaaataggtatagagaagatggctcaaattt

SEQ ID NO: 349760 - DNA, 973 bp, Cannabis indica
gctgattatgggagatgaagctgttaaaaatgttcgctgtttttttgaagatgggttacttgccgatggttgtggggatgctaacgtggtgcttattcctaagatgagaaacccatagcgtatgtctgatcttcctcctattgccttgtgtaacatcttgttcaagattacaacaaaagtcatggtgaataggttgatctctgacaacattcttatttcttttgaggttttgtattaccttaggaggaagcgtaagggtatggatggctttatggctttaaaactggatataagcaaagcgtatgatcgtattgaatgggactttcttgaggcaatgttacgggagttaggctttgttgaaaattagattcagcttattatgaagtgtgctaagtctgcaagatactgtgttactcatggtaataatgaagttggcccaatcattccaactagaggtataagacagggtgaccctctatcactgtacctctttattctttgtgctgaatgtttcacaaccttgcttcgaaagtatgaacaaaaagggtggcttcatggatgcaaagaggccaacggtgctcttagagtctctcacatgctattcgctgatgatagttatctttactgtaaggccacagaagatgaggcccttcggatccaagaagtgttactcaaatttgaacttgcctcgggtcaaaaagtgaatttttccaaatcatctatattttttagtatctaacacgtgagttccatgaaagatagaatcaactctattttgggcatggtcacgggtgctgaaggtagtttgtatttgggattacctagttcaatggggagaaataaatcatgctttgggtttcttgaaaaacaaagtgaagaatagacttcttggttatggtacaaagtttctatcaagggtgggcaaggagattttgataaaaacggcggcgcaagcacttccaagctatgctat

SEQ ID NO: 349761 - DNA, 736 bp, Cannabis indica
gaaactagtgtgtctccaagataacacaatatccaacaaccgactttctgtcatctatgcaacatgcccaatcggcatctgaaaaaccagcaatgtttagcttgtgactatggcaaatgtggagaccatgatccattgtccctttgaggtatctcaagatcctttttgctgctccccaatgaactgttgttggtgccttgagatactggctcagcttgtttacggcgaagcaaatatctggtctggtattacacaagtattgcaaccctccaattaagctacggtagacagtaggattaccaagtttctctccatcattgatagacatggcttttccagtggcaataggtgtaggacatggcttgaggttggtcatatcattcttctccaagagttcttcaatgtacttcctttgtgtgagatacaaccctgtgacatcccgtgcaacctcaataccaaggaagtagtgaagttgtcccaagtccttgagagcaaactgcttgttgagttgctggataaagctttgaagttttgagctaacattccctgtaacaactatatcatcaacataaatgagaacaaaaataatcagcttttcatccttatagtaaaacagggaagtgtcagctctggagttcttgaagttccagtttagtaaggtatttttcagcttgtcgaaccaagctcgaggagcttgtttcaaaccatagagggacttgtgcaacttgcacacatg

SEQ ID NO: 349762 - DNA, 661 bp, Cannabis indica
tgtcacatcaatatggctagagtatgactagcatattgagtataggcaggcattatggtcgatagtattgtcgtatgggacacgaggatagagttatgatcaggtgtatgggcgctaggttataacctgggatatagtatgttttatgttatgcttttcttactgagtctatcgactcacaatgctattctcatgtgtaggtaagggcaaggctaaagtggaggagccgtgagaacgagcaagtgaagattatatatgtcagggctgttaggcctggagcgtatgatctttgggacatcaaggctttggctgaatagtcgctaggcgacaaaacttttgtatatgaatagaaaacttttgtaaatgtattttgtaacgggatcttgggattttataaatgtgttactttatgcttttaattaaatcggaaaaatttaattaatcatgtttttcattaacctcattgattaggaacgagctggacaatacatttaaaaaatcacgttaacatgcctaattagttagggtgttacaatttggtatcagagccgcaaggttgtctttcgaagatcatcatgacatgttcaatcatcatcagcagttagttcatttcacggttcagtaagcttttattgctttgtatcttattttaatagtatga

SEQ ID NO: 349763 - DNA, 595 bp, Cannabis indica
tgattgttgtggcagtttatggccagtcacctgtgatatgtgttaacgcagatttttgttaaccaaatttgagcctcacaatggtaattcaacacagaaaaaaataaaaatctatagaaaaataatatataaacacagggttttttacgtggtcttacagttaaaattctgcatagtccacgagtcaatcttgttcagatttctgagtatttttttttcaaggcctctttcataagagttttttcgtcatttttttgagattgtttgccactatttataattgcatagtgacagttaattacaaagctgaccaaaatataattacagtcattattccaaaattgtggcatctgattacataaaaatgtaaatgcggtgtatgatttttaaaatcatatagctgtgatttttttcgcttttactgggtcaagaatatcgtgtattaaacacgtctttaattgttgaatctggagatgttttgatagaaacttgattgtagtgatcccaatggcgagctggaaccattcttctttccgaggtcgataagatatttcttacgtcgatcgcgggtatacaaaaatcttctgacttgcca

SEQ ID NO: 349764 - DNA, 611 bp, Cannabis indica
ctgttgttgtagctttgaacttggctcttctatcgtaccaagtaccaaacaggccactgacacaaaaaagaatgcctcgtagagaaaatcgtcaaacacctgatactagtagtaatcgtccaggcgaaactagtaatgctagaggaatcactgttggtagaggtcctagtgatgctagaagaaccagtgaagttagagggacaactgacggtataggtgctattaatgctagagagaccaatgatgctagtggtcctagcgatcctagaagaaccaatgagattggatttagcaatctattttcttctttgacaagttatggtaaattcaagacaaaaatgtttacaagaaacgacatcgaggatcataatcattatatacctatgggtggcacatcaagaaggggagttacatgtagtaaagttttttagagacaaagagcatttaaagatggttgttggcttgtatgcaatgaagaaatggtttgactacttcgttagaaattttggtattgatgtttggtacgttacatgtaacgatacagattgtgggtggagattaagagcgaagaagaacatactttctaacatgtttgaggtgattacatttca

SEQ ID NO: 349765 - DNA, 784 bp, Cannabis indica
cggtattcacttttaattgacaacaatataaactataatatttagatacacataataataataatctcatctaataactaataatattttttctttaatttttaattgtacactttcaaataacatagaaaaaattagcataaaatttagtatacgtgcctcccacgttgttttttgctagtacataaataattgtgaatttgattgaatcaattattattttaggccaagcaacatctagtccgcataagtaaagattttaggttttttaattcaattaaattcacacaagtgcgaatatccatatttttgtagattgaatcatacaaattggattggataagagccctactaataaactcgtaaaacacattacacatcaaaaatcgaagaacaaatacaataaatacgtatattaataaaatgaaaaagaagagactagctgatgatgagagtggaaggtagtggctcttacaacactcttgttacagcccacctaacctaacgctcttacaaagctaatgttaatagtaaccgaacaaaagaaacggaaccattacttatttatttatttttaaaaaatagcaaaaaactgaaagcatcacgtacgtgagcttttgagaaatcagacatgttgttttttttttgataataatcagacatgtgttttatttgctaattaaggtgatagagatgagatagagttttggagacacaagatttttattggccaaatctatgggtttggtccatgtatttatcttcttgtttatttatttatttt

SEQ ID NO: 349766 - DNA, 649 bp, Cannabis indica
aaaccaaagacataagaagcttaaatcaaattagagttattttccactcagtatatacagaaattcttgttttaagttaatcatttttcctggtagtttcatttgttttcttggtttcaggggtgagacttactttagatcccttttgtgtgcattgctttttactcctattaaatatattagtctcattctttaatttatttgtacatgcatatatatgtatatacacccacatgaaagtatgaagtagggctatccctacctacaaatttttgcctggttcaatggactgcaaaaagtaaatttcattctcttgtagttgctttgttatatataactttgtctagtcatattacacagcagaaaggaggtagaccaattgcttgctaatattgttaaacgttcctattctgatttatgatatgtataatataatcaataatatatatatataaatctgaattgtgacacacacacatagcagtccaaagaacaaggttcatgttgtaggatccctcatcaacaaagtatgggattagttgctgtatttttagaatctcatatcggctaagtatgggattgcggattggttggtggtttatagtctacttgggcaccctccttttggggtgagttctacctaagtggt

SEQ ID NO: 349767 - DNA, 1869 bp, Cannabis indica
aataatttccaacaggaagaacagggcatgaagaagcgagtgtaacctcgggctgcacaagaatcaacagtcggtcaacacgaggagcaaaaagtacttgtcgcaacaatgatcgagaaagcacaagtacaaataagactgtaagtcactcaaggataaggtccatgagtaggacgaggtccatgagtaggacgagttccgtaagtaggacatagaccatgagtagaacgaggtccgctagtaactataaccaaccgaatctgcgagagcacttgaaccaaaaaaaacctaatctttgccaacaactcagtccaaagcaagaggatccaatccaattgcgaatagatgagttgtaggataagttcagaaggtatcaagtgggggagctaggaaaacaatttggatatgactcagacgaggaactcgagccataccatccagatatcatgaatactccttttccctagggatttaaaaaccctcatgtctcgttgtatgatgggaccaccgatccggtctcgcatttgaataacttcaatactataatgcgagctagtaatgttacaaacaatttacgttgtattttgtttcccacctcacaagttggagcagcaagcagctggttcaataaatttactcatcattccattacttcttgggaacagttttccaaggacttcaaaaagcagttccaggccgcaagggataggcgactcaaagcgtcctcactcaccaacataaagcaacagcctagcgagatgtttaaggcttacttaagtcattttagcacgggtgctgcaagagtaagaaatttggatgatagtacgcaacttactgcccttcaggcagggatcactactgatctctccaccactgggggtaaattgtgggacgacttacagggtcgtccagtgaagaacatcaccgagttcaacgagagggctcaggtgtttgttcgaaaggaagaagcttgaaaagagatgaacttgttaaaaactagctcgggaggcaaacccagcactgttttaacatgtactgtctcgactaaagctgataactcaggggcctctagctcaaagaggaaagatgactctaaggggtcatacaaagacaagaagaaacaaaagaagcacgacaagtacgtgccaatttatactatttataccgagcttaatgaaactcaggaatatatttacctcgcgcatgagcacaaggttgccttcagtaaacatgagcccatgaggcacgcgaggcataaaagagatccgaccagatactgcaagtttcataaagacattgggcacacaacagacgagcgtcgtcagtttaaagatgagatagaaagtctcattgcgcgaggccacttcaagtaatatgtgaggagacatggcaatggacataaccagcccaatctgcccaataacccaagcaaccagggattacaacctccttggttgaaggagaggatattctggttatctcaggagggccgcatattgcaagagagagcaacaatgcccaaaagaggtacgtgaaggaaataaaaaaacgagcagtcagtatttgctccagaaccttccaagaaggtaaaaactgaagaacctccaattatattttcggaggaagatgagaagaacgtgaggtaccctcacgtcaatccattggtgattactatccaactagccaataaaaggataaagagggtgttgatagataatgggagttcaatgaacaacctttatatggaaacaatgaagaagatggagctcgaaaaggccaaattgaggccttgcatggtaaatctatgcagattcactggcgacagtatcgctagtcaaggtataatcgagctcgcattaaccttgggtg

SEQ ID NO: 349768 - DNA, 1101 bp, Cannabis indica
acaagcagtttggtttgacttaattcttccaacaatttgcttcttgggttgccctactggttgcttctcaataggcactccaactgacatattctttatgtcatcaggcaattcccaatcatcctcgtcaccaactggcataattgtaccttcatatgtgctcctctaatattgtattgtgtaatatggcgagcatagtgcatacatgctaatacttcgctgctgagctgcagcacatgcatgaggacaaggaaacttcatgcactggaacaagccgcaagtgcaagctctgttcctgcaagtccactacgccaccggtctcaactgttcctccaaggtgaagctagaacgtgcaaggtccacatgtgtcaatgcttaaataccaagatttttcaaatttcaatgccaagtcctcctccatttctggtgttaggatcttcgtccacttgtcagctttttcctttcgtgtagcaaaccactgttcgactttggacatcaagaatgttgcaacaacagtgatcgggaagcctcttgcgtctttagttgtgttgttaaagctctcagcccagttactcgtcattacattgtaacatacctttggaaagtacgatcgaacccatttttcaaatcaaatttcctcaagatattgtgcaaccgcaacattcattgcccaaatgttctcaaattctctgtgaaactctaattttgaaaacgtgtaggcacacgtgtaaatgtgattcgtgaagacatcagtcttgaacttgttgttgacgttgataataatgtggttgtagcatgcagcgtggtgtgcatcaaggaacacgatatccaaagcacaaacaatgttttgatgcctattcgaaacaaaggctatgttctcaacatcaccaatcgtttctttcaattttctcataacatagttccaaaattgttgttttcaatatcaactatagcaaaagctatcgaaaagagacggctccctgcatccagtgccactgcacacaacattttcccaccatacctagtcttcaagaaagacccatcaatgcatcaacaggtcgacaaaacctaaacccctagatacaaggacctagagagaag

SEQ ID NO: 349769 - DNA, 1903 bp, Cannabis indica
  modified_base (41)..(41): a, c, t, g, unknown or other
  modified_base (103)..(103): a, c, t, g, unknown or other
gtgactacacccagccatttgcgacgtatagccagctttcncttttctgtacaactacgtagtttcgactagtaggttttactcgaaacagtgaggagtttcngttagcccaatggtttatgcaagaaggcatgtcccttgggatacaggagactcctcagctgtttcttgaggtatgccactagttggatatgcgaggtatgttcgcaggttgtgcttagctagatttctcaaaatggtgggtgtttcccagtaactcaatggtcatacttaagaacgcatgccccttgggtcactgggatatgcccaaccattttttgaggcactctgctaatcccacacgttgcgatttacaccttgggagggttggttggattttttcaaaatggtgggtgtttcccagtgactccatggtcatgtttaagaacgcatgccccttgggttactgggatacactcagtcattttttgagaagccaagccaactttccaaggaaatcttatagttttttttatgcgggtgaggtcacttgtattattctcgcactttcaccacgctgaaaagatcttctatctttcagatgagcgacttgttggacagccagatgctcggctctggaggtgatgccttcgatggcgaccaggtccaagaggatagctttattccgacttcgatttctgaggcagaaactccagtcgccagaactgcgaatttaggtccgctgtcctccgcggatatagaaagaatggttcaagagcttgctgaaccggggacaatcgagatccgtgacaacgagtctacggtgtctgcccgcgaacatcttgttcactctaggcatgctcctgacgctgaagttgaggaaatgggcgaagacttggaggttcttgattgcaagtcagatgaggaggaggacgctgaagggagtggaactaatttagtggataacacacaactgaacgagcccttttcatgcgaggagttggtttcgtgagtcaccaaatctgacctcaccacttttatgcggttaaatctgctacgacttagcaccatgtgtccccgctctactcagagaccgcatctttctttcaccaatcctgcgataattcctacagagaatgtggttgtttctatacccattcttcgttgtggggtatcgcttcccttccactcattcatcactgctattcttaagcggtatgacgtatctcccttccaactaaccccaaacagctatcgcatagctcttgggttttatgcgatgtacatggagtacgcgcatagggagccttcaatggaggatttcagctttatgacataaagaatgtgggccttcataacggtttctattgcttcagcaagtgggcttcttctaaaatcaacagggtggaaggcatggtttctaatatgggagattagaaatctaaatggttctatgtttttaaagtaccaggaattaggactaactttaatcgtcaacctagtacgttgcacttttcaatacttagttaatattcatgttaccttataatatcgattaacatgtactttcttattgatcgcagatagaccggctcgacctgctctggacccagctcgcagagaaatcggtgaagttctcggtagtcaacctgttcaagatcgtgactggcgattactgtgcacgacctagaagtttcgggaacacaaactaattctgaagaacgccagccttcatcgagagccagcatacaaggagccatctaagaaacaaaaagagaagatagacaagcgtctttctaaacagacctcccgaccaacatcaggtaacacatcgtgcgtatatgcgatatatatatatgagttattgtttatttttaacttatcttttcttgtcttcgcagaattgactttcctgaagcaagct

SEQ ID NO: 349770 - DNA, 751 bp, Cannabis indica
aaaatggagatttaaattatatcttgagaagaaaataaaagaaaaacctcatatcggctccgtactttttaacatgattacattaaaatttcgttgatatattacattagagaaaatgaatcaaaatcaaggctatcaactattagtattttatttgaaagagagtaaaaacctgaaaaatagtaatctaaagcattgacataatcttattttctttaattttctactccacaacatcctcttaatatatatatatatgcatgattgtatatatagataaatatatcctaagaatggctattcgtattcatagtttgaccattagaaacataggataagattgatcttctatgataatactttaagataaatatgtatacacataaatagagccataatattatttgtaacacaccaaaaactatttttcatttaagagttagtaataatggatatcgataaattgtgtaagttataaaaatgaaaggagacattgatcatttaataatatacaacaaataaataaaattataaataaattaaaaaattaagaaatcaaataataggatgaagaaatcatgcaaattgccacatcgtaatgtttgtgtttttctttataaatagatataaaatatataggttaattctaccatgcagccccttaaaagggatgtactgatacaccagaaaaaaaactttagtctaattttttttccatattcatgtatgttattatagttatttaagataa

SEQ ID NO: 349771 - DNA, 699 bp, Cannabis indica
atattattatatttcataaaattcaaataataaagaaaaaaacaacgaagcttgaaaaatgaaaaaaaaaattaaagaatgttcaaatattagaatgtcatataataacctataagcttataccttcataagtttgtatttgtaattttgtaatagttatttttaaacaaaatatgaaaatgttacaaaattttaaaaatacaatgaaaaaaatttaagataccaccaagactcttttgcactttttttttttttttttttttattatatttgtatatagatatagattttctatattaaataaaaatttaaaacttattggataaaatataaatcaataaagaaatatatttattggacatggaaagttgcataacaaaagtgttatttataacctacatgaataacaccttaggtgtttctaaaccatgtgggactttaagtggatatgtgtggtagtttatttcttaacaaaatatgaaaatgtcacaaaattttaaaaatacaataaaaaaaatgtaagatgccacctagactccattgtgctttcctttatatttatatatagattttatttaatattttatataatagaagattatataatagttatattaaatatataataatttttatttttttatatattaataataaattacctgtaatatgatattaatcaattttatttatttttta

SEQ ID NO: 349772 - DNA, 447 bp, Cannabis indica
atcaaatgatcttaatcatgacatggttaggttcgatctcaagagttttatttgtgttctttgatttgttagttaagcctaccttttggtctgagtggtacgtacattttggctaaatagagataatgatagaagtgatagaagctatagatttcatgactatcgtatcacttattgagtgggagtgctaatcatagtcatgaaatctatagcttctatctaggcatagaagtaaaataatgatttccttcgagcttggctaaatagagataaatgatagagcactcattttagtgaatatattatttcactaaaatatcatttataggtggctaagtattttaaggataaaatacattgaaaaggtgtgacggtaattttgtccttatgcaatgtaaatcctctatagaggatcatttatttttggcattataacaatggataatt

SEQ ID NO: 349773 - DNA, 777 bp, Cannabis indica
tacagttattattgttatgtaataaaaagattgcctgattaggcaatgacaatgtgatgataccatgaatgtgatatatgagctcacctggttaggtgatgggacatacttgtcggtgatacctgattaggtacgggcagcaatggcatatgaatgtcgagttatggcatagactgaaatcgttgttaggtttcttcctatcggcgatgcctgattaggcacgggcggcaatgacatgtgagtgaaagattttggcacaggctcacctaattaggtgatgtgaaatgttggtgccaggataaggtacaggctcatctgattaggtgatgcaatacatgggtgtcaggttttggcacgggcttacttgattagctgatgcagttatgcaatatatggtttacatgctatggcacgggcttacctgattcggcaatgcaatataggattaccagattaaagaatgacttgtttgattaggaaatgagatgtaataaagatggttattttatgatgtaatatatataatttatattattaaatgaatatgatttctattattggtataatgattttatattaccgaatatctatactgacgtttaattgtgacagatgtcagtagcgatttagatttcatcttatgagcaatgtgtgatcatttgattttaattatttgagtataaatgataatatttgagtaatatattatatgattattgttattacttttcttgttgagtccttgtggctcatgggtgctatgtggtacaggtaaag

SEQ ID NO: 349774 - DNA, 1090 bp, Cannabis indica
attatattgaaattggttttatttagggcacaaaacccaacagaggacccctgcactcttccaatacaacatcaagcctcttctttttctcctcaaaacgggctagaacttcctcaggcttggggtaaaaaggaagacgaaggtcaaagtcgttagctgtccagcacataaaaactccatcattgaagcgcttcaagcagtgttgacaggtgacaggagtcaggatggcatccctttttgccttggccgcctccttgtgggcctattccttgaactcacaaagctccttcaattcgacagttaaactagctgtggtatttaagtcattttggtgcagctcctccaaagatcgtaagttggcagttagttcttagacttcttcttgagactttataagatccctcctagccgcggtaatgatctcgtccctagccgccaacacctcgtgatggtttcgctctataaggacctccttcctttgggctttgtcccagatcgcttgcttctgctcctccgactcttggagacgcttcatcttgtgccatcaaactcagacatggtgtacccgtggtcgattagagtctttgaaagacgaccggccttggcagcaatctagcagtcaataggaaaaaattagagccttgtatgaaaaaaagcataagaaatctgagaaataagcaacaggagcagccggttgccttaatcgtcgcaactcttcttcttgacgaagtatgacactttgcatttcttgaaacatctactaccagtcagcaggaagattagcattaccaaccctcgcattatcacccggattctacggaggtggaggcggtgtcgctggatcgggtcgagcagccccgggctctacttgcttgccctgtggtctagatgattgcggagggtccatttctagtacccctgtaattaacaaccccaacgagttaagcaccaataccacacttacgcacttactgccttaaaccctaactcatctatttacctcatataatattcacataaacaaatagcatttaaagcatggcatcacataatacatacatactcgagatgcttgcatactgcctaaaat

SEQ ID NO: 349775 - DNA, 950 bp, Cannabis indica
caatatttcaaaactttaaatcttatcatcaattttgtgtaacatctcttttattacacatatttgtgatcaaccaaaataagttagaaaagccattaaccttgtaactcctctctatgttacaaagtgtaggttattattttaggttcaatcatatgttacacaatctatttaccaaacacttaataaatattattcaaataataataataatatatattaccacattttaatctacatattatattattaaataatataacattttacccctatcacttcacaataatttttattcttctctaatcaaaattttttcccaactttcccacaaacttacacatccatctacaaagattacaaatctattatgttgaaattatgtcttagttttgtgagtccgtgaggataattggggtacaatactcataaaaagaggtatatttaaattaaattttatttagagataaatttagttaatatataaaaaataaaaaaagatattcttcaaacttctcaaaaaaaaaaattactttaattttgaaataatttccaccagtacatgtataaattaatcactagagttatttgtgtaatattttttaatattacgtatacaattaaaaatttcccttaattttatttatttttcaaacaatgaatgtatttgtcctataattttttttggaccaagatgcaaaatgaccctaaatctaacaattaagttaataaatgttaataaacatttatttttattaaaaattaacaaaatgtccattcagttaaaaatttaattatgaaattacaattataacattggataataaaccctaactttctaccctattcttattttcttgtatctagacaactcgtctctttcttctccctcagcaccaagaccatacttgcctctaccagtccgaccgccaccccttgagtattaccac

SEQ ID NO: 349776 - DNA, 707 bp, Cannabis indica
ataacactcttgagatcgaacccaaccatgtcaggattaagatcaactgatctaggatcaactaggtgatatcgaattgaatagatattacggtaaatttatcatatctaatccaagttcaatatcggtcccttccaatgcatactccatgcattcaacccaagctttacattaaccaatgccttggagaggacatagcacttatccaaggtgcaagtaaactatgttgtagattatcatatcagttaaaccctatgtactgataaatctaggaatatatttaatcacataatcttgattactttctactgtgctgacgacacaataaacaagaatatcaatgtgataagggtctggatgaatttataaatcaaataaacatataaatgatatcatgaaccagatgacacactaaataagtgatgaaaatacctttgtctatttattgataattgaattataaagattacattgaaatagagttttatttagggtacaaagcccaacacatacatgttctccacttggtaaatcaaatttcctgaaagtgttggcaaatgactccttgcgtcaatcttgttcttctcgagttgttctgaaacttttagtgctatgttagacggccagatgactacagagcgtctatttttagaaagtctttccattaagtacattcgaatcctctcaagcatagacaagatgggctt

SEQ ID NO: 349777 - DNA, 626 bp, Cannabis indica
acatccaaattaaaagttacatgtattaacttttaaaacattgacattcatttaaagtaaaacttaattacagtttttttaacaacttaattactgttaaaagttaaataacgagcattgatattggggttctgttgaaaaatactattttttttttgtatccaataattaaaaatactttcatattatattttgttaaaatatacaatttttttttttttgaatggattgcctatcttaccctcactctctacttaagtctagcatataatttatgttaacctaaggagtctaatagggacatcatctataaaagtggatatatcttaaaggatataaaaatggaggtacaaattaaaacaagtaaaataaagtggatataccatgtaattttctctttatattgggcactagtagtgtctaacaccatttaaaggtgtcaacctatgatacttaatcacacaaatagcaatatgacacttaagaaagtgctaaacaacaccaatgtcttttaagatttttagagagcatctctaatggtagcatcctttaagtaatttacacatcatctaaaagtataatattttattttatttctttttcatatcatttttggtaattttatt

SEQ ID NO: 349778 - DNA, 510 bp, Cannabis indica
ctttaatggtgaaatttgattcttagtttaggtactagttttattgcttggattatgtctattgtggtctaaataacaattctggaaggtatggtttgatttggggttgttttgagtgagttatgaatttttgtgtgaattctgcactgagctggaattccggttggtccccaggaaaccccacagaaccggaatttcggttgaggaatcggtctaccagttggggtagttttgggaaccctagtttttttttcccatttttgtgatgtttagggtattgccatgttgtttatcactaggaaaacttttagtttcaagtaagtccccgaaaagtgatttagcgtgtcacttgtctatgtttttttttttatagcacacttacctatgttatgattgatgtgatttaggagcctgtaattcgctgagcagttgttccactcaggttggccggcaaacctaaattcgaaaacaagttaagattagtataacagtatgcatatgtatatacat

SEQ ID NO: 349779 - DNA, 623 bp, Cannabis indica
atatacactaaacataaacatacgttcaattattcatatcacagattatatacagttcttaccttctttctagattcaagtgtgctggcggacttgaacaaaaagtcacgtgctggatggatgccctaatcacatattagaactggataaatcacatgctcaaaaaccctagtccgggaaatccaaacctacaactttaggttctgttatactctctatgactcacactaacttaggaaacagggaaacacccaactacggtactgaaatggacgaggattgagaaaactaatttttcggggaaccctgccaaaaccggtttaccacttttataggtactggtaaaaccggtaaaccggtttttataccagtctccccaaaaactcaccaatttgctcaaaacttgtccaactgccaccaaacttttcagagtacctaaacaatgtatacacaacatattctaaccagaaaatcacagaaaaacccaatgaaactcaacttgccattaaagacccaagctttgagttcaaaactcaaatttgcataaattcaaccccatacactaaaaccagctgcaagaagcttaaaccaacttaaatgaaccttaaaattcgaaccctaaa

SEQ ID NO: 349780 - DNA, 929 bp, Cannabis indica
aaagctaaaaaaatctctaaaattacctaaaggcattttgggaatttcactgattcctcaacccgacattctaacaaaattctaacctaatctgcaatattctcaaaataattcttctattaacgccgtgacattactaaccacatcgcaaaatttccaaaattgacggacacgaaaagtattttatttcgaaattgatatcctcggtactcacatatcccaatataatctccgtaattaataaattacgctatttatctcattgagtaaattctcaataattaccctaagcaagatcataatcttacttcattaccgaaataattacatattttaaaaaatatgtctctttaaatattatttatttttccgggatattacaactatccccccttataggaatttcatcctcgaaatttacctgaaaagctcgggatacaactcccgcatctgcgactctaactcccaagtcgcttcttcaaccttgctattctgccacaacagtttaactagcggaataatcttatttcgcagcaccttttctttcctgtccaaaatctacaccagttgttcttcatatgacaggtcagtttgaagctcaatgtcttcataacttaagacatgagttgtattagatacatatttctgaagcatcgagacatggaatacgttatgaaccccaaataaagttggaggtagagccaaccgataagctacctgacctactttctcaagaatctcaaacgaaccaataaacgtgggactcaattttcctttcttcccgaaccttcgaattcctttcattggggatacatgaaggaaaacaaaatcccgaatctggaattcaacatctctacgctttggatctgcgtagcttttctgtctactttgtgaagcaagcatattagctcgaatcttttcaatggcct

SEQ ID NO: 349781 - DNA, 888 bp, Cannabis indica
ctatatcaaaccagcaagcagaatactattgaaacatcaattcttaagttatgcaaggtaaatgaaatatttttattccacttacaaagaaaaacctaaatctaggatttctcttgctccatccaagtttaactactagatctagcccttccgaaataagatctagcttaacaaattgctactcatggccaagaactaacaatcaaataaaatggcaagctcacttgaatgaataaaggtaaagatgctaaaataagcttaaaaataaatcatacccaacatagaagttcatagccattcaaatctcaaaaagtctagctcatattcaaataagaaaataaaatccaaactaaaaagtatttctccatggctgctgtcctttgtttacaattcaagaagttttaatatctaaataaaagaaacaagaaaagaaaagaagaaagaaaaataataagggaaagtaaaagaaaatcaaacacaaaagcttgtgtccttctctctttgcactttggtccccttggtcccccctctctttccttcctctgttgtacttttcttctgcaattacttctttttcaaaaatggcagttgtatcatgttcatcatggaggtgtgtacttagtccctcttttagttgttgggtgaatagggtacaaaatagtagaatttacgtggtgtatggtttttttaaaccttttatgataaatatggcatatttaactatggacccatttatatggcttttttaaactttggccacagtttatgggattttaaagcccttacggctggaataattttgccaaaagcccatattgtgtgtattgtattttatttaggttattttagtaattttaggtgtttaaattttggtttcagttttttttt

SEQ ID NO: 349782 - DNA, 525 bp, Cannabis indica
cgagtgcaaccgccgtcggccgtggagagagaaaatcggatttcgaaatattaattgtgagagcattaattagccgaaaaccaaagagacgcccagtcagcgtcacatcgagtctcgaacggtcatgctcgacacgtgttcccatccaaaggtagagccagctcggaagaagtctacacgcaacctcagaggtccagtacaaacttggggggggcaaatgttatcccaaattttgcactctgacgtggcatcacgagaatggtgacacatggagtccacttggagcatctactcgtgaagaatagaccgagcaggatgctcgctggcacatccaggatcagatatccagcaatccctgcagagcactcaatacttagcgaattcagcttttgcatcatgagtcatcagctcaatccctataactcagggatgaacttatgtggatacggcatacacacgatcctactatcagtgtactcagcctcaatcccacgatccttgcattcagcattgatcacacgatct

SEQ ID NO: 349783 - DNA, 547 bp, Cannabis indica
attaagaaaatgaattagcaaaaccctaacaggttaattgagtattattgtggaattatattattatataatttattatatgtgaattaatatgagatatgacatgttaagaccccgtaggtgagctaggggcattttagtaattttgacctaagaagggtaaaatagtgaaattaatttatttacgtgcttatgaactatactattatatagtatgcttgtattgtcctttttgtaggtgtgttcagacaagttggcatggtatagtcacaactgggtatttcgggccgaaccgagttcaggaccaaaatacaattttgggtttaatgattggtattttatttatgtgggaataatctgaaaattatttgagtttatttgtgtgtgcaagtggctattttacccttgaagtgcttatgtaggtgttttatggccttaagggaaattgggtaattttgctattttggagtaaggttcataaaagggattttaaggaaaatagagatttatttttctgcattttttcccagccctttggctgaacccc

SEQ ID NO: 349784 - DNA, 1405 bp, Cannabis indica
ataaaaaacataaatctacaaatggttattttactattattttaataattttctataaaaatataaattatttttaaaagagttagaaaataaaaataaattaccaaaaaaaaaacttaaatcaaatataattaatcgtaaatttcgtttatacatgcatatatacataaaatatcaatcaatatacaccttaatatttttagcttttttttaataataataataatataaaaaatgataactctaatgtttacatttttggctttttttttaaaaaaaaaataaaatataacaataatactaatactaataaaagaatcagttgtatgtgatacttaaaataatattttaattattttttaccacgtttatattttttattaaaaaaatattaattaatttttaacaaaaccctactttacatctttttttgaaatgataactttaatgtcaagtatcacataattataactaaagagcattgttattgtataccagtagtgtacaacacctttaatatgtgacactctacgattgcttatatgggacttgctacttaattaaactaatagtggtatgataccaaggagagttgcctcttagcatttctcataattaaaatatcaatttttttttatttttttctttttttgtaattaaaatattttaaaaaataataatcacttgtttaaaacatactaattaatagtaacagaacaaactaatgaatattctctaatgtcttaaaaatattaaaaaaatatttaaaattcgagctgaaatctaaaattaagatataaatttggaaaatataatagtgacgactacaagtgaactacggtaatgataaacgatgagatacagtgatgacaacgggtgagatacagtgatgaaataagtgagatacaatgagacaacaagtgaaatacaataataattatagttttgaatgatcgagatatgaaaataatacattatggggaacactgtaatttttttctacaccactttatttatttatttttttaaaaataatttcttttaacaaagcaatttaaaacaataattttgaatgatcgagatatgaaaataatgcattatggggaacactgtaatttttttctacaccaccttatttttttatttttataaaataatatttattaacaaaacgtataataattttaaacttcttaataaataattccaaataataataaataaaattgtgcatttagtttttaataaataaaattattaataatcatatgaaataagaaaatatatctataattttactttatattagaattatatttttaaataattatttattatagagtaatttgcggcataaatacttaagtttatattttagttgcagattaatacctaagttaaaatt

SEQ ID NO: 349785 - DNA, 443 bp, Cannabis indica
caagtagtgcatttcaataaatcgattgtcttgatatcaagatcaagtgtagtatatttgactaaacccaaactacttgaattgtaagtctgtggtaagctactgctttctccaccattacttccttcgtgttcataaaacattatgcaacatcattttctatatgcattactcatctagggatactgaattctttactgcttataaagcgcatcagaatatatagaagacttgtctctaattctatccaaaatggaatagagataacacaattaagaactttcttcagtttgaataactttccagtgctttcgaaagcaactaagttatgtatcttcactgatggagcttaaattattataaagggtttttacatctttatagaataattcctccaaccccagagtaaccaccatctcgaatagattatgagttggtgtaga

SEQ ID NO: 349786 - DNA, 503 bp, Cannabis indica
aaaaaagtaaaaataccgcctaacagtatttttgtaaaaaaaataataaaagttaatatacaatgtaaattttcctatattaaaaatacacagtaataaatatattgttttagatgcactataataaatatattttattataataataatatttatcttattcatttgatttatatatatatgttatataattagtttctatagggtcatcttatttattgggctgaaccattaattggtttaatttgtgagtttttagttttagtcgttggacaatgctttttaagggaagagagtaagtcttcctttggtagttgcattttggtgttgggctttgggcttcttaaaattattgcatgattgttaaattttagaggaaattacactagaattttaaaagtttttatgataaatatggcacatttaagtttgaccaatttatatgttatttttttgtttttaggtctttttatggtatttgatataccatatatatgtaatta

SEQ ID NO: 349787 - DNA, 587 bp, Cannabis indica
gaccacttggccggtcatgatgtcttaaaggccttacggccatatattatatgtatataaacaggaggaataaaaagatcaatgttcaaacagctggagtcccaggctctggatttggttcttctgagccgactggagtaggaggatctgttgttcgagcaggagaagcatcatcagcctggttagaagcttggccagaagttgaagcagccacctctttcccaccaaaggcaacttgggccgcacagtagtcgaggtacatgtccttggcgtcgcctaagtagtcaaagttggactggggattagccttccaaaaatcaaagaagagctcgaggtcggcagtctccaaagcatcaaccttctccttcaagcggttcgcctcaaccgcctgagtgtccttatcttccttcagccgaagaaggacctgccgcagagaagtcctctcatcctgaagatgatcaacttcagcagacaaggtctcgatggtttcctcaaagtgatcagcagcctcgaggtcttttgtcagcacgatgaccttcttctcggcagcaaagagcttcttgtggcctcacccaactcatggcgaa

SEQ ID NO: 349788 - DNA, 686 bp, Cannabis indica
atcatttcacttctatgtccatatagaaactatagattctatatctatgtttagtgctcccactcaattgtactatcatgttccgaaaaggtacgtatcacccggaacaaaaggtaggcttaactaacagatcaaggaacacaaataacactcttcagaattaacctaagcatgccaggattaagatcttttgatctaagatcaaccagtgatattgacttagaaagatacaacgataatattataatatctttaccaagataaatgacttataatcttctattgataacaaatcagattgtattgaaatgggttttattttgggcataaaatcccaacaaactcccacttgcactcacataaaacaagtagtgcatttcaatcaatctattgtcttgatatccagatcaagtatagtgtatttgactaatcccaaattactggaactgtaagtctgtaataagcaaatgctttccccaccattactccctttgtgttcattaaacattatgcaacatcattttctatatgttttactcatctagggatactgaattctttactacttataaagtgcatctatatatatagaagacttgtctctaattctatccaatatggaatagacataacacagtaataactttcttcaattgaataactttccagtgcttttcgaaagcaac

SEQ ID NO: 349789 - DNA, 1038 bp, Cannabis indica
tttaaaacttaaatatatacatatatcatagtcggggcaggttcggggcgggtatctattcccccgcccccgccccatttccgactcgggtatgaatctttaaacctatacctggccctgcccccgaaagtcaacccccatacccgccccatttggagcgggtacccgtgggtacccgaacccgcgggtataattgtcatccctaaattctaatcttaggtgattttatgagcttttttaccaatgataacaacagtgatgcacactcttaaaaattactcataaagatgagtgttaattaatacttcatatgataattttttagttaatttctacgcttgaaattacatgtttgattatttttttttttataacggtattcgttataattataattgttaaaagattaatacctactctacaagaatctagaatttttctatcattgtggtaaaattatagaatttttttagaatcatagagagttaatagtcataagaagtttcaagaatattttaggttataataaattgacaatttgctagaacattctagcataataatgtaccattctttgggtaatataaataggggagtaggccctttgatggtgcatggtgagttgagtgtacaagtaaagtgtgtcctagtgtattcaactaagtcccaacaaaactctaaaagagtctcccatcaaatagtgtgcaagtaaacctttaagtctgagtgtatagtaaataaaagagtgagtgcttggtgtatattaagttaaagtatttaaatcttagtgtaattgcttttacaaataatgaagtaattactttttcacgtgttgtgtccaacaacaatatcatttcatttaattttttttttttttttttgaatagtttacaacattgaaaacagaatttttcgatattccaatttattaaaatttatttttaatattgtaattatttgaatttttttaaaatatttacaatgatgtaagtctaacgaatattgctgtgaaaaaaaaaaatattttgacatatattt

SEQ ID NO: 349790 - DNA, 991 bp, Cannabis indica
tttttaagtttttacttggtttgggtttatggttttgagaattagtggctgttggggttaggttgagttgtagttcgaattttagggttcatttgagtttgtttcaagttcttgcagctggttttagtgtgccgtgttggagttatgcaagtttgagctttgagttcaaagctttgatctctaatggaatatttgttaacattgagtttttctgtgaaatactggctggaatatattgtatgtaccctaattcggtactctggaaggtttggttgcatttggtggatgattgagcaagaaatgaaaaatttggcgtgatctggtccacgtacgtgtaaaacaagctactcggttttggcagggtccccgaatgcttcgttttcttaattttcgtctatttcagtgccgtggttgggtgcttccctattcccagagtttgtgtaacccctagaaagtatagcagaacctagggttatgggttcgggtttcccctgattagggttttgatcatgtaacttacccggttttataatgtgattaaggcattaatctagcacgagactttccgttcaggtcggccagcacacttgaatctggaaagaaggttagaactgaatataatgtgtgatatcaatatcggagtgtatgtatatgttatgtgtatatgcatgcttaatgtgttagttgtactaccaacacttttacagttaaggtatagagtgcattggtatagtgaaagttatttgagagtgcatttcaatgataccagcacaagtacggagaagtacttagtgtgcgtggtatatcacccagtggtactcagtgtatgaaacaaaccctaccaacactcgtacagtgaggtacgtagtgtatgtggtatagtgactatacccaagtattgaacgttcttactcatctgttgagccttgtaaataagtgcatgggcgcctaaatacaagtcagaaattatatgatatgttatatgcttttc

SEQ ID NO: 349791 - DNA, 578 bp, Cannabis indica
aagttgtcaaaaattaagctcagtgccatatttttacttttttcgaaaatacagggtctattttatcatttaacaaagcatagggtccaattagtaacttttgtaaaacacatggtccaaaataatatttactctatattaaatgttatattatttaataatataatatgtagattaaaatgtggtactatatgttattatgtgaataatatatattaagtgcttgataaataaatttgtgtaaaatattatttatttaacctaaaattgtaacctacacttcataacatagagaggagttacaaatttaattgtttttgtaacttcttttggttgatcatatttttgtgtaataaaagagatgttacacaaaattgatgataggattcaaatattatgaatatagttgttacaattatattaatgttcattatatgagagaaatgagatggtgtgtttgaattctaagtgtgatcacctaaacactatataaagaggtctaaggtgctcatattgagaagagaaattttctatcaagaaaacacattgctagaaaaccctaaggcttgataattccc

SEQ ID NO: 349792 - DNA, 689 bp, Cannabis indica
cacttgtccaaccttcttgagaatctcaaaagttcttgtaaatctagggcatattttgcctctttttctgaaacgcttgatccccttcattggagacacccgtagaaacacataatctcctacttgaaactctacatttctgtgttttggatttgcataactcttttgcctactctgagaggcaagcattctggctttaatcttctcaattacttcattagactgtttaattgattccagacccagatatttcttctcccttgtttcatcccagtgaatgggagatctacactttctgccatataacaattcatagggagccatccctattgtactttgataaattattatactagaactctatcagtggtaagtacttactccaggaaccctcgaaatccataacacagggtcgtaacatatcctccagtatccgaattgtcctttcggactgtccgtcagtctgaggatggaaagctgtactgaactttagtttggtacccatagcttgttgaagactttgctagaatttagaagtaaacttcggatccctatccaaaattatagactttggaacaccatgtaatcttactatctccttgatatataaatctgcatattgatccactataagggttgtttttaccggtagaaaatgtgcaaacttcatgaatcgatctaccacaacc

SEQ ID NO: 349793 - DNA, 1138 bp, Cannabis indica
agataaaaactcacacacaaattaaaattaataaaataccaaacaaaaatatccattcaacatgctccaacccaccaaataattacactcattatccgcctcaaaaatactcattcattatgttatataatcgattttattttagttgtaaccggtttgagttattccgtgttatttgtttttatttattataacattgttatagaaccggttctaatttaattgtaattagtttgaattattttattttatttatttttattcattatgttacagaaccagttatatttcaattataaccggtttgagctattttgtgttatttattttcattcattatattatagaactggttctatttttgtttatatttgagatatctacttcttgtgacttttctagtgacttttttcggtgacgatgatttttccggtgacttttccggcggcggtgacttttccagcgacttccccggtaccggtgacttttcggtgccttttccagtgccgacgacttttccagcaaaacttattattgcttacaaatatgagatattaatctttttttttttacaaaaatatagcataaaaaaaactcattaaaatttaaaaaaacaaaaaaacccataatcccttagcattatttatttatgccataaaaatataaactcttataacttttcaaataaagtttaatttctactatttataaatctaacatccaaactcatatttcatgtttttatttctaacccaattgattttatctttttctttagtttattttgcatttgcattttaagattcttatttctctatcttttccttcaactctaatagttttagttggttttgtatttgattggggtattatttgattagtagaatatataatattaacctacctctatttttcttgttttttatatacgatttctctccctcttatgtttttatttattttttttgttattcttttatggtttgtattgcatttttatctctctttaattttctttgttttgttttttctttggttttagtttatggttctctttgttatttttgctccatattgtatgttcgagaatgaagttagaagtttaattattaggtactgatataaaatttatatgttc

SEQ ID NO: 349794 - DNA, 800 bp, Cannabis indica
ttgttttgcaactttttctttttctgattttccaatttaattttttcaggtcccagaatccaatacaagtgttgctgttgaaaagacagctgccattccttctgatgaagaagctgatcacactgtttctgatactcctcttttggataagagaaagcgtgcgccggcattgaaatcgccttatgttgattttggatcggctaatgtgaggagcgctccaatagaggtaatgtcattaggccattaatcaggaggagatgagagggattttaagatggttacttatgtcaagggcctttatgctcttaacgattcatttgctgatcccgtctctcctgaaattgaggcaaagtttgatgcttgggttggtgaaggtttactaaaacatcctaggtgacttttttattctttctgttttgtagtttgttttttgtttgaattctgtttttatttttgcaattatttaatttcaatattattttttttgttgtttgtttgttgttttaggcattacaattgttatgtggatggtgtgaagaaatttttccctgggtttagattaggtgttgttatgttgaaaataaaacctggttttatcatttggctacctatggcatgtttatcaatgactcggtaaagtttctgttttcttttaaaaaatttaatagttgttttattattgttttttagtttagttattgtaattaagttttgtttaaatattttttaactttttttttgtgtttctttgttgtcttgtttcagcatatgaacactatattctattaacttaggaaaaa

SEQ ID NO: 349795 - DNA, 733 bp, Cannabis indica
ttgctggtttggctgctgcaagtcgagaagcctcttctctcggacattggctggtcgatatgtttagtcgtctgcaagctgatctccacgacagcatcgtgatgttgtgctgggccctttggtgtgctagaaatgacctcatatggtagcagcgatcccgtagcgtgaaggacatggttacatttgctaatttgagtcttgatcaatggttgaaagctgaaggtaagggtaatatcccctcgttgtctcctctcaaagatggagatggtttggagctttggttaaagccgagtgtaggtatcaaactcaatgtcgatgcagccattttcgaacgctcttccaagcatggtttcgggtgtgttgtccgaaatgcagatggtactttgattgctgcctttgctggtgtgaaacctggcaaagtttctcctgaattggccaaaataatgggcataagggaagctttgagttggctgaaaaatcactcctacacccaggccattgttgagacagatagcctcgtttgtgcagaagccattcgtagtgcagaggtgtttgtttcttctttcggttcagtggtgcaagattgcaagaagatccttgagagtttgtttaatgtttcgcttttgtttgttaagcgttctgcgaattgtgctgcgcactttgttgcccgacactctatttctttagctgaacgtatgttttctattaatagtgttcctatagaattgatgtc

SEQ ID NO: 349796 - DNA, 556 bp, Cannabis indica
cttaatcaaagtatgttttgtatattgttacatgagttagttataattttattacttttattattaattacaattttaaggtattaagttatttgacttataaaattattgatgttattggagttatataattatttaaatgattgactgaatgctcgtggatctactacagacactaattgcatttaacaagataagttagtttcacattttctttttagttttttccgttggaaatattttatttatggtaagtattgtttgtaatttctatactttttatttattgatgcttattttggttatttaaaaaaatacatttacaataatatttatttatttattatttttatgtttaatcccactaatatacagtttgtttatgtacagttaaaatactaatgtcccttgatgttcttagagaaaggataacaagtttttaaaacaaattgcgggacgctgatgacattggattgcaatctgttaccaagattttacaactgtgatttatttttcaatgaagtttccctactctaatgattttaagatcattgtt

SEQ ID NO: 349797 - DNA, 1233 bp, Cannabis indica
ctgtcttcggtatgtcttcatttttgattcttagctgatgatatcctgaacgaagatcaatcttagaaaacacctttttcccttgaagctggtcaaacaagtcgtcaatcctcggtaatgggtaccgattctttatagtcaccttgttcagttctcggtaatctatgcacattctcatagtaccgtctttctttttaacaaatagaactggtgcgccccacggagagtagctaggtctgataaaccctaacttaagcaattcttccaactgtattttgagttcttcaattcagatggtgccattctatatggtgcgcgggaaactggtgctgtcccgggcactaattctatcacaaattcgatttctctgtgtggtggtaacccgggtaactcctctggaaatacatcaagaaactcagcaactacccgtgtttcctccggctttctttcaattttcttggtgtcatcaaccacattaactagataccctaagcacccacgctgcaatagttgcccagccttcattgccgaaataataggggtgcggggtttctttcctaccccctgaactcgaatgtctcccatcttctggtgtgaaaacaactttcttttgcttgcagtcaattgatgctccatatttggtaagaaaatccatgcccaagattacatcaaaatcaaataaatctaatacaatcaggtctacaaataattctctaccatctatcctgacaggtatacccctaagccaacttctagagattacaacctccccagatggtaacatggtcccaaaccccacagtaaataattcactcggtgcatttatatgattaacaattgtgctagcaataaaggaatgagttgcaccagaatcaaacaaaactttacaagtggtgttggccataggaatctgacctgatacaaccgaaggactggcctcagcttctgcttgagtgatggcaaaaactctggctggaacatacttgtcatctttcttgggttctgctctgttcccagtctgtccccacagtgggcaattgcgtttgatgtgtccttcttttccacatttgtagcatgcttttgcgcgacactcgccgagatgacgtttggtacatttagggcattctggaatgtttcgcccactgctgccattaaatcgttggtcgttatcacttttgtacctcttgtcttgacttggctgcccggactggtcctgtccccttttcttgtggt

SEQ ID NO: 349798 - DNA, 674 bp, Cannabis indica
ctgctcagtcttatgcgagacaatataattactatcaaactggtattgacgagatatatatttgcctcaggataaaatcatttacatacacaagaagaggatactctcctgcacgagtaaattaaatgtagcaacacacaactgcctcacattatacatagcgacaagatcatcgtgcattgcaaataccaataaaggaatacaatgaggtgaattattttccaaccttagcgattttttcctattgagatgggcagaaaggagaactcatatctgacgaggcacaaccttcaaagtcagcaataaccgtctagaggatcagaataaagaacgattgggtagttattagatattatcccatgtgtgattaaatgaaatgtggggattgtccacgtttcatgaacatatatgaatgaaccaatcccaaaaagaataactgccaacctatattcctataaataggggtagaatccataggaaaaggaacaaaaaatttgagagaaaaaatattattattcaaatactgatattatactttgtaacccaacttatcctccaattctagtacctctgggagctctatcaatgatgtttcaattcattgcactgctcccctttgtctgctggatacaagtcagcccctcgtaggattgccaactgttgggttttatgcc

SEQ ID NO: 349799 - DNA, 1872 bp, Cannabis indica
aatccatgattaatctgaaacaaaatagacataaaagagaaatagagggtagaagaaataaactagatggtgacatcgctccgggtcttcaagattgcttcctctcttccttcattcacttttcaggccactttctgcttatcttggccttctgaatcgatcccttatatatgaatgagaggtgtgcctctaattgggaaaaattcagaattaggtcattaatctcgttttccgtgcctggtcgcgacccacttaaaggctgttcgcgaccacaggcaaaactcaaaaaactgagtttctgccaaaaccccaagtcacgaccatagtcgcgaccagataaaagggtcgcgactaggcttcaagctggtagcgactactgactccccttgagcagctttggccgatttttcaccagtttgtcccgtcttttcgtcaattgactgaatttgaactctaacaccccaggaacctaaaacaaggaaaatcaagcgtaaaaatgctccaaaagacaacaataatcgagaaaatgcttatctataagacccgagacataggctaaaatagcctaacacttttaactacagggtgccaaatcagtaagttagagcctcttttcatatgttgacttgaaaagaatattggaggaggctttattgtccaccatgcatcttaccacagtcatattcttgatttgtgtagtgatgaacaggggtcattgtgcgggaaactaacttgaacatcatctccttctgtgaaagatatcgtgggctctcaaagctttgatttcttagagcccctttctttgatagttaatgcttttgggctcgtgttggagtgtccaagcgtagtgctccgtagctgtaacgccctaatgctaaggcacgctacaatactttttcaattactgtgctttgctaatcaaagaattttcttgaaaaacgtgtcaaattaaaacttttatattaaatatttaacttcatattatatcaaaatatttacaaaagtcgggatcctgttttcaaacttctaaaacgtaatataccataatacatattaatcaggtcgcgcagcgactacaaaatacagttcccagatgtcccgagaccgaacactccacatcgcgctgcttcgacatgtacaatctcatcctagctcaggttcactcctattcaactttcgcctttcctttacctacacatggaagtagaattgtgagtcgacagactcagtaagaaaagcatataacatatcatataatttctgacttgtatttaggcgcccatacacctatttacaaggcttaacagatgagtaagaacgttctatactagggtatagtctctataccacatacactacgtacctctctgcacgagtgttggtagggtttgtttcataccctgagtacctctgagtgatgtaccacacacactaagtacttcttcgtacttgtgttggtatcactgaaacatactctcagataatagtcactatacaaatgcactctataccttaattgcataagtgttggtagtgcaactaacacattaagcatgcatatacacataacatatacatacattcagatattcatatcacacattatattcagttcttaccttctttccgaattcaagtgtactggccaacctgaacggaaaatctcgtgctagatggatgccctaatcacattatgaaaccgggtaagttacatgatcaaaaccctaatcccgagaaacccaaaaccataaccctatgttctgttaaaatttctaggggttaatctaactctagaaatagggaaacatccaaccatggcacgaaaaggacaaaaattgagaaaatgaaaggcccggggaaccctgccaaaac

SEQ ID NO: 349800 - DNA, 684 bp, Cannabis indica
ttaatcgtcagcttgtttagttcccgataatcaatacacattcgagggaaccatctttctttttcaaaaacagaaccggagctccccagggcgatacactgggtcgaataaacccaatgtcaagcatcccctgaagttggaacttaaactctttgagtctcgctggagccattctatatggagctttagaaacaggttcgactccaggttccatatcaattacgaaatcaatttctcgttgttgtggcgcggcaaccccgacaactcttcggaaaacacgtcgagaaaatctttcaccgccatgactgcctcaggcccaaatgtttcaggtctgctgaaatcaattaccactgctagaaattctacacagtcactgcatattaaatctctagcccttaatacaaagataaccgagatccaagacccctggactgatccatcctaaacaaatggatcttcaccttcgggctgaaaagtcaccattttctgcttacaatctattctggctgaacacttgaaaagaaaatccattcccagtataatgtcaaacttagttaattccaattctataaggtcagcgctcaactccctatcttcgatcttaaccggcatagacctaaagcgcctattagagataaccaatgccccactaggcattagggttccaaaccctctttctaaaat

SEQ ID NO: 349801 - DNA, 747 bp, Cannabis indica
tttgttctgtatttatttttttttttgtttgtttgttactttagacacttttaaaatttttaggaacatccaattacagccgttatgctgtcgaaattttagtagaattagtagcttgatatatagcttactttacattgtgtttatttatgctgaatacataatgtttgtttatgcatttaatattttgtatagattacttgttatgtatatagctaacttaaaattttgtttgtaaatggtgtagatatggccaactcgggtttaggattagattcaaacccagaggcaaagtgttctaggtcgctgcctacacgaggagctactcaaatgaatgaaatatccaagctgatggatcaaggcaaaagagtggccctcgaggtgaatgacaaaggacaatattatggtaaaagctactccaagctcgtatcgactttaggagttagatgcaattagaagatagggttgtcctataaaaattggatagaagtcaaccctacactgaaaaataaagtttggacagatatacaggtaagaagttatttgttagaatttttatttgttttttattaattcagatgttaactctaatcgtaattgattaatttagatgctaactcgtaatcgtgttccttcaaattcaaagtcaaatcaatgtaagaaacaaactaactctaacaattttttgggctggcgcatctgggagagcatcaacggtttgagaaaatttttcaagttttacgaccc

SEQ ID NO: 349802 - DNA, 565 bp, Cannabis indica
aactatatctcattttgttctaagtcttctccactctttattagttgtaatttttcttttataagtagaacttgtaattttgccgctcataatgtggtttgctcatcaggtatttgggtctatcccggtttcggttgtacctaacaatattttgtgtaacgaccgagaggtctaattttatatttaaatagaatacaatataatgtatggcgtaaaaagaatatacatcgttaactataaatttttaaaatatagcataatgtcaaaattgaattagaaaaaaaaaattattcacgtatttcatgaaaacttattttgtaataaagatatagaataaagcaaaacacttttataataaagatataaaataaagtaaaacaaataatttatcaactcatcataaaaaatttctagccaaatctagctagttcaagacatgaaggataatttatcctatcaaattaaatgaactcctccaccaaacaaattagtctttaatttcctcaatatcttcataaatctttggccatagcttgcttccgttagctttcaaagtgtatctgca

SEQ ID NO: 349803 - DNA, 774 bp, Cannabis indica
tgttaattggaatatatgtgtttaattatcttattttggctgaagttaaaaagggattatgtggcatttacttcatttttcccaaacttagaaaaaattacaaaattttaaaaaagaaaagctctctcttttcctctctctattcggccatttgagcagcaagaaaagaggattttcctcttgaatttcaagctctctttagcaagattaagtgttcataagttgttggtatgttttctacatctttcttttatgttttcttgaatttttgaagagaaatggtaggttgcatgcttagttttaggttattgttgttgctgggattttgttgttgtttgctgagaattaagcatgtttaaatgagttgaattgagctgcttgtgatgcttgatagttaggttgattagagttatggtttttctatgtaaaagctttagttttcaaagtgaaaattgagaaatttgttgctgtgaatattgcatgagtttgtttttgttttctgcagctttagtatgcatgtttatgtagttttaatctagttttgaggcttgtaagtgagctttagccaagtttgagtttgaaactcaaagcttggagctcacatggcactttttgtatctgtgcattctgggctgttttagtgctttggttttgtgctttagggtatttagagcaggtctggaaggtttgagattaattggatttgatttattgaagttatgaatttttgagttctgcctgcgaggaaccggaattctggttgtgcatccagaa

SEQ ID NO: 349804 - DNA, 857 bp, Cannabis indica
aaatggcgcttttcaagcataaagaaggtttaggaaatgagcctaccagattcaaggcaaggttagttgccaaagggttcactcagaaagaaggcatcgattacaatgagattttctctccagtggtgaagcaagcttcaatcagagccatgatggcaaaggcagcaagcatggacctagagattgaacagatggatgtaagaacagctttcttacatggtgagttagaagaggaaatctatatgcaacagcctgagggctttgacaatgggaatccagatgaggtatgtttacttaagaagtctctttatggcctcaagcaggcacctaggcaatggaacttgaggtttgacacttatatgctaaatattggatacactaaaagtaagtatgactcatgtgtgtatttcaataatcaaacctatttgctactatatgttgatgatatactgatctttagcaaagaaaagtcagagattgacaagttgaaaaggaaactcagtgatgagtttgagatgaaagatctgggcaaagcaaagagaattcttgggatagacataaagagacctagacctggcatgatagtactttctcaagctgcctacctgaagaaagtattgaacaagtttggcatggacaagtgcaaacctgttgcaacaccacttgctcaacacttcaagttgtctgcatctcagtcaccaaaaacagatgcagaaagagccaagatgagcaatgttccctatgcaagttgtgttgggagtctcatgtactccatggtgtgttcaagacctgacttagctcatgccatgagtgtggtaagtaggtacatttcagacccaggccctgaacattgggaa

SEQ ID NO: 349805 - DNA, 526 bp, Cannabis indica
tttatttaaatcactattatgctttcaaatttcaataattatcactacattgaatattattaattttaaaattatgataattaaaaaaaactaaaaactaaaataaaattacatacatgacttggcacgtacatctatctagtagaggtaaaagaataaaacgtaatagtaatttgaaaaataaaattaattaaaatattgagtaaagtttaagaaataaaatgaaaaattaatgctagtattatatattaaagcaataatagtaaaggttataaaattaaaagcaaaataaatagtaaaaaaaaatacacacattgtatgaagtttggaaaagtaaaagtttcataaaccaaggtccgtttagtaacacttttgttttctaattttttaatcacaaaatgaaagtaaaattttgtttttaaaaattttgtttttgaaaaataaaaatgcgttctgtaaccacttttgttttctaattttaaaaaagaaaacaaaagtagtgttctgtaaaatttattttaatttt

SEQ ID NO: 349806 - DNA, 690 bp, Cannabis indica
ttaggaaagatttgcagccaaccattatttaccagagctttgtccagggctgacttaatgtgattaacaccgtctctatgattgtcccaagtcatgatatcccctttaataggcaaatcaaccaacgcatgacggttaattaactccgaaatgaaggggataaattgatccctccccttggacccaacccgctccgagttgctcagaacaaaatttacatcgcctaagattaaccaagggccaccaaatttttcaccattaaccatcaagctagaccaaaatttcttcttttcatggaagtacggaggaccgtaaacacaagacaacagccaggggctccttacagggtcagagtacacaaaaccggtaatctgatttttagaaacattaatactttcaaattcaaagccctctttccaagctaaaattaatccccctgcacataccactgtcggcacaacaatattatgataaaagtgaagtttcttaagggaacgtaccagatttgaagcatctacttttagttcggtaataaaaataaaataaggattgcacgaccgaatcagggcttttaactacagaattatagaggtctgccctaaccctctacagttccacgctacacctcgtagaggtctaccttaacccttatttattaattagaccttacaaagtctctaaattaataaa

SEQ ID NO: 349807 - DNA, 539 bp, Cannabis indica
ggtaaatattttttttgggccccctgagataggtgggctctaggcacaggcctagcccgcctatgcccagggccgggcctgttaagtggtagtggtggtagtagtggtagtagtggtatgtctctccttcctcactacgaagaattttgacactccttaaggcatctccaatggagaaatctaaatttgctgttaaatcaacaccaaaaaattttcaatactaaattttttttcaattccaaccacaacaccaaaaaattacaccaaatattatattctttattattctattattttattaatataataagaatattttaatattaaatatttattgaatccaataagttatattagtaaatatttaactatttcattagcgtgtatattttataaggggtgttaatcaattcatttttaatatgcgattcaaaccgcaccgcaccacatattataaaaatactaatttttttatttagttaggtccaatatgtgaatgtccaactcaaagcccactaattattgtattattgaaattt

SEQ ID NO: 349808 - DNA, 514 bp, Cannabis indica
aaaaagaaaggaaaaaaaaaagtaaaaaccaagtgaaaatacaaaggcgaaaggaaaaatgatgaggaatgcaagtggtttagtcacatcaaaccataatgtaataacacataattataatgagatgagagtagggtaagcatgatctgtatgcactgtaaccaattgtttgatcgagggcttcgaactcaatccaatgataagctgatttttttggaccaataacccaatcccatgatgaaaaatatccaattcaatgttttttttttttttggataggtcatgttaaacattcacatacattatgaactatccaaatatacattaagcatcattgttcataatcattaaaaccaaaatcaatactttatttagagcatcacaaatgtaaaacacatacctcccatattgctattctccatttgttgctaagacaccaaaaccttcaatgtgaataaacaccaaattggtagaagagaacctacgagagcaaacccttttcttttcaccacac

SEQ ID NO: 349809 - DNA, 725 bp, Cannabis indica
ttttgtccgaagatgaagataattttttttttcatttcatgagttttgtgaaaaataaatgtgaagaagatgtctctgacatgagtaacagtggaattgagcatgacagtgaagatgctagccatgaatggattgatcctgatgtagctgtttggagtgaatttttaaattttttgcagattgataaaaatttagaagactatataagtccatccacacctgtagattaggatgtgttagacaaatttctctcattggacaactttaagcaactaattattttagcattgcatttgggagacaaaccttttggatagctcggacaagaaatattggaactttaacttttttgccctgtacataatgaaataccaacagccttgagccagaattttttaatcaaaattacattgaaaggcactcatcaatggaaactgttctagaaagaaagtgctagcagcatcaataacatttaaaattgactctcatccctatgacacattatcttgcaatcataaactgtacccaagttggatcgataaaaaaaatatacttttcaagcacacatagttgatgatgaaacaaatctaaacaagaataagataacaaatatagtcagaacccagatgaagtacaatattgacaatacaagagaggatatgattaagatagattgaaatacaagaagtataataaagtgtcatcattttaaattaatattataa

SEQ ID NO: 349810 - DNA, 2263 bp, Cannabis indica
aattacaaagttgaccgtaatctgtttacaaagatcatcccctaaaatcacgggatttgattacatattacatagtgtaaatgcagttatgattttcccgcttttactgggtcaaaatgatcgtgtattaaacacgtctttaattattttgtatttggagatgtctcgatagaagcttggttccagtggcctcaatagcgagttggggccatttttcctactgaggttgacgatgcatgtcttgtgacgatcacggttcttatttacaaagagttcttcgaagctcatttgaatgttagcttctaacttgccaggggtgtaagcctcactaacattaactagatgaagttacaggaagcattccaatagcgagacaggcacctcgcttacttagtatcgagccaatctgactgttacacttagtttgtacattatacactaagggctttcacaattgatatgtgtcactttcgtcttcctatgtgtactgtccttgatgcctcgctattcgcatttagtgacatatagtttctcgctaatatactaagcaccagtttgtatattgattcctcgcctaagaccttacagtcagcaggttacaaatatcctctgatgcttacgtaattaatgagttatttcataaaaagtgattgcatcgatccatattacctttatcttgacacgtgtcctccattgagatggcagccgaatttcgagtataacaattgccccttaaaaagttcttttttagtaaaaagtgctttttaataattaaagagggcattttcattaaaatcccttcttggaaaaatgcatcctttgattatgacagttgtacggtttcgagggtcattatgaatcgtctcttcatattctgccctactcccaaccgttagatttcccaatccttagatttcttgtcactggaatttgtgtataaaagggcgggtcaagcttgtcatttttcacaaacttctggcttcttggtgagatccatcttgaaatggatcatctctttcttgcttgaatgtcccctctgagtttagaagtttaccctcccaagctcatgataccaggatgcaccaaccattttccattcgttcccaagaacttcaaacctcaattggaaccggaaacgatggattccaaggctgaggagcttttgaccaatccaaaccaggggaaccctgtagcccgttatgggcgatcctcacatgtgatccttgatggtaagtgttattccttgtgaatggtggtttgagtcggattattatatattattttttttctccactgaccctttttttttctttgtctccacaggaatggacatagatcttgtgaacgatcttagagttcctcctcaggctgacaaggaattcctgaagaaatttggcatggttttagatgaatccgggagggaagttggcctggtttctatcagagaatccagccaacccaagacccaaacctgcacctgaaaacctttgcgtcaacctctttctggtatcgaggaattttctgaggctgggagtagggtctcggctgcaggaaatgggatcttctgatgaggagaatgaggcttgtgcagagaccaaggctctctacatgtagccagtctttctcgagctatgtgtagccgatctttctccaagctatgtgtagacagtctttctcaagctatatgaagacagtctttctcgagtttatcgacatcccctctcatcctttgtttaggaagatgacttaatggttttcccctagtggaatttttttaaagacaagtttgtaacgctgcctgggttttttcttatcttaaatgccttgtactattttcattcaaacttaatacaattgtgtttgcttgtgtttttattcacaatgtaaataactatattttgatcaaatgtacagtacttttgggtttttccattgctcgttatcttcatgtttaagtagttaatgatctaccaaactttttgaatctcgagcagttgtcgattttgcctcgctatagcagttataatctgccttaagcaaacttaataatactataatgattttatcactttgtatattttttgattttcttgtatgaatagttatattatctatccattttctaggtttaagtacttttatcaaggcgtcgtgatgcctcgcttagcactttcctagcacgcaagaaccattagtattcagttttatacgcgagtaataacttttgacttttctttcccgtcagataggttttaaataaaaa

SEQ ID NO: 349811 - DNA, 540 bp, Cannabis indica
atagttagttacacgtaaaatataatttttttttttagtaattacacagtgtaattatacctaattcatttaggggtatgagaattagaaagtgtaattgaaacctctaaatttttactaattatacaattatagtataattacgtggttagaaaaaacacaaaactatatgggatgaattgaggaatatctcttttttgtatctattaatcaaaaacacatttatattatatttcattaaaatgtactcacttttgtgggtaggttacccaatatattattattcttcacttaaatctagcacataatttatattaatctaagggatataatatggacatcatctataaaagtagatatattttttaaaaaataaaaataaataaaataaaatgaatatctcatataattttcacaaattatggtgtcgtttggtaacttttgttttttaattttttaatcacaaaatgaaagtaaaatttttgtttttaaaaattttatttttgaaaaataaaaatgcgttctgtaaccacttttatt

SEQ ID NO: 349812 - DNA, 770 bp, Cannabis indica
aacacaatttttatatctctcattggagatggtcttagatattatttatttgtctaattaaaaaaatatgagaaaaaaaaagagaaagaaagaacaaagaataaaaataataataaaataagtttgaagaatgaataatgtttagctattccttgagctccacactttgattctaaataccattttctcaataataaccttagaaattttaagatatatttatttttagtattctttttttttcatatcctatctttcatgtttgcatgtttaaaaatttgttaagtcatgcgaatagaatttatattaaactaagcgtcgatttctattattgataatgtatttttagaaatggaaaactccaatcttatcctctttagctaaagaaatagtttatgaacatatccttattgttgaactcaaaaaagtggtcaaacgacagtaaagttatatgaatctgatgtttaccacatgttacacaattagaactcaaaagtaaaaaatacaaagatttttgtgaaaggtttcgaccccttagcgggtaatgatctactccccttttagttggaatgaaaacctaaagataatactattcagatcattataggtgagattttaatatagctctctataaggttacaaagcataaatcaaagtaggccaatctctaataagagagagatatagacttagattcgtgtgagagagaggaagagagagccacgtggacgtgtacaagagagagagagagagagagagagagagagaga

SEQ ID NO: 349813 - DNA, 967 bp, Cannabis indica
tgaccattgttataaaaaatcaatctaaccttcagatacgcgaacaacttctgggcgcacggctggtggcggcctgggtgggcgcacaactaggctggtggttcacgttcatggctgggtaatgggcagtggattttttcgcggctgggcacaactgtttattttgtgtgttaggacttagggtttgatttgaatagagagaaaagaaaatgaaaatgaaatatatatatatgtttaggatttttcttatttgggctgggatagtgggatggggccggctagtgcatatatatatgtgcatatttttttttttggctgggcagtgggctaaacggtgcgggttgggttcattgggttagaaaaataccaatccgaaaatcaacccaatagcagcgggttatatttttatcaacccatatgtatttcggcccacaaaaaatgaccatgttttggcccatttcgggttgggttggccgggttggtcggcccattgtcaacccatgctcagccctatggccgagcattgatcatttggccatgtcagtgctcgcaacttggacaaaacatcataaactatccttagtaaaataggcataactctctcaatttttatccacatgacctagtttaacttgcataggaaacataatttcaagttggatctaagtgtgtctcatagtcatagcccaattctgaatttattgggtccaaaattagcttacaaggtagattggtacactttactcaggaattgagtagtgtagttaagtaaggggtgttggaggacactaccacaatccatgtggcattatatgtgaatagtggaaacccaaaatacttgtttccagaacttatcatcaatattataaagtctaagccgagatgtgacatcccttgtcactccatttcaaattggtggatccttagttgaaaataaacatttgcccaatgtttgtgggattttggc

SEQ ID NO: 349814 - DNA, 686 bp, Cannabis indica
atatatatatatatgcatttttccttgttcaaataatcaggcgagttttcatgatctgccgacaattttattttggttaactaattagaggttctaattactttataattgtgtcttaatctgtcaattaattgattagatttatttctaattaaaactatttgattaacaaatatttttttaataaattgggcttttttcaactgcgcaaccattgcaaccacgcactaagcactctgcaaccattctttgattgtgtaaatgatagtattagtgatattttagtaattaaaatcacataataggtataaatgttgtgttaagatatttttacattaaaatattatattttctatgtaataattcgtaatataatcaggacatgtctactagcttgcaatataaaaattaattaaacaaattaattctttaaaaagaatatatattaatagcaaaaacaaagttatgacaaccattcaattttatttttcttttacatatattggtggaatagaattctatcttaattgctacatcttattttttttttttaatagagaggtgtccaaatataaatgttaggccatagtcactacaagaaatgtcacttttgtcagcacatttttggtgctggcaaaagttggtattgcgctggtaaaagagaatttacccatgatgtgttggca

SEQ ID NO: 349815 - DNA, 703 bp, Cannabis indica
aaagcataaaaaccaagcttcatgcacacacaccaaaatcaccattgaagcttcaagattgagttctaaaactccaaacttgtctaagcaacaaatcatgcattcaaaacagcccaaaactgcttaaacattctcactaaagctgcagaaaataaacacaagcttatgcaacaatcacagcagcaaatttcaaaaattctctttgaaaactaaactttgagctaaaaacttccaatcatgaatcaaagcaaaaaccatgcattaacaagatctaatctacttaaaataacaagattaaacctctgaaatcaacatcaaaacacagcagcaactacccaaccaaatcaagcatgcattacttcatttcatcaaaaattcaagaaaacaaagaagacaagagtaagaacaatacctaaagcttgagttgcacacaaaattagcttgaaaaaccaaagaaaatcccaagttcttgctgcttcaaagggccgaaaaagagagagagagttgagagaaaaagttgcttttcttttaattttcaaactttgtaattttttgaaactttgtaaaatgaaaataaggaatttcacttattcattccagccaacaaataacattaataaacatataatttccacatactaagtccacaaaaggcaaaacaacaatggggcaaaatgaccatttttccccttcacactaaaat

SEQ ID NO: 349816 - DNA, 1692 bp, Cannabis indica
acccatttcaactcaaggccggccctaattgcaggatgtatatagtagagcataatgagcataaaatgctacaacttccatttgataatatacatgatgacaatatgaagcaatttacggagcgatgatgtgtagatttattctaccaaaacttaagatgaacttctatgttttttttttgtatataagtatataatgggacaatgtaacttggtcttttctagttgtttaattatgtttttagcaatttaatttgatactttttttaataagtattgggccaccataaagatgattatcatcatatatcggacaaaacaaaacccataaaaataatggttcttaaccactaaattgacgaactatcgggccaccacctggatgaccatcgtcctatatcgaacaaaaatccacccatataattaatggtgcctaaccactaaaataacgaagtatcgggccaccatcaagaggaccattgtccttcgttggactaaagcatagaaaaataattaatcacctctaaccactcaagtgaagcactatcgaaccctctatcgtacctacattgaacacaatcgggacatcttccctaaatctaagttgagttgaccatcgaacaacctatcgtccttatatcaaacaccatcggacattaagaaaaaaaaaaccaaaatccaaaatacaacataattttccaagaataacaatttccacacaaaaatctgttataagtaccaaatttcaataataatacataacaatacgatattttgaaattcaacaagaatttttaaccttggtagttgcaagactttctgttgtgcccctaaccatcgcacttgctataggttcgttttatcacaatcctttcaccattacaagcagttttgtttgtcttaattcttctaattttttgtttctttggtcgccctactgtttattctcaacaagcactccaactgtcatgttctttatgtcatcatgcaatttccattcattctcatcacaaactggcataatagtgcattcatatgtgctcatccaatattctacggtgtaaaatagtgagcatagtgcgtacatgctaatatttaattgccgagctgcagcacatgcatgaggacaagaaaactttatgatttggaacaacccgcaagtgcaagtttgttcctgcaagactactacggcaccggtctcaactgatcctccagggtggacattcaatgtgtaaggtccacatgtgccaacgtttaaataccaagatttctcaaaccgcaatgccaagtcctccaccattttcggtgctagtatctttgtccacgtgtcaactttttttcgggtaacaaactactcttagactttgaacctcaagaattcaatagaagcagtgataggaaagcctcttgagtccttagttgtgttgttgaagctttcagcctggttactcgtcattacattataacgctcccctagaaagtacaaccaaacccatctttcaaatctaatttcctcgagatataatgcaactgcaacattcattgcctggatattttcaaattctttatgaaactctatttttgaaacgtgtaagcacaagtgtaaatatgattcgtgaatacgtcaatcttgaacttgtggttgacgttcatgtaatgtggtggtagcatgcaccgtggtgtgcatcaagga

SEQ ID NO: 349817 - DNA, 722 bp, Cannabis indica
tttctgtttctgtagtactgctctgaattttgtttctctgcctcttaattaattgttgttcttgctggtttttatatatgttgtattatagcacaaagagaggaaagttagttacaaagtgttaatcaactttgtaactaacttaactgcttttgtctaggttaatagaggccaaaggccacctagggattattttactggcttgtaaatatttgtgtaataatctgatttttacagtgtacaggtaatatgtggtttaattcaacaggctaaacagacatactaaattaattgaatttttttttactgctgaaacatttctaagcatattagaatgactatttgaatgtaaaaataaaaattgaagaaatatgcatattttatcacttgctaaataaaattgaatatatatatatatatgattaagcatacgtgcaatgcacgtaactttcgcctagtataatataagtgtatgaataagaaaatataagatatttatctcacaaatatttttataatatatagggtaaacagcgacataaaactaaaagttttaagtttgtaagcggcataaactctatatttatttttagcgttataagtacctaatgtttgtaaaaccataatttttctctaattgtgtcagtactaactctgttattatcttaaatatggcacatataagacctgaattttaaatcattgggtctagatagaaacat

SEQ ID NO: 349818 - DNA, 856 bp, Cannabis indica
tggctctataggcatatacaaccttagtcacatacgtggtttccttggaaactctatatgaaacttaatggtgagtctattatagttgagtgtccaacttaagactcaacatggcttggaacttgtaaggaacgctaccttagttgtagcttggtacatggcccctatagaagctctattcggttcttttatggctatatggttcttccagggccttggcctcatgcatgtgaacagattttatatttggcctcaaggctttcatgttcttgctttggcctataggccctttattttttaaaactactatcatttagccttaaagccatctatggcggacatataatcatcatggctatcttcttatggccttgacaggtaaaggttcagattcactttgtcaagcccaagtatgcctgcacgacttataggaaggtttagtagcttattctaagcattaaaatttctctacgtaagttctttgtgctagtttgatgcattgcaaggtaccaagcgtccatccaggcaagtctcttggtcattgctattcaccaagtttcacagactttgcgtgcgttcttccttagggtgctatccatagtacgcatgtggaactgaaagagtaactttaagaagttaatgttctgagcaagtggtttagactgtcggtcttatatgtaacaaaagcgtacagcttagtgtctgcttttgaaatcacgtagtggctacccctgcatggcttaccgcgcaacgaccatcactaaagagtgatgggaggccatgctaaaaggcaatgggtactagctcttttatgggtcctgcacaatgaaacattagaggaactaattgacaagtt

SEQ ID NO: 349819 - DNA, 813 bp, Cannabis indica
tagggattgttagtcgttaccaatctaatccaagtttggagcactcgatagctataaagcacattctcaagtatctttggagaacgagagtctcatgcttgtgtagtttggtggagagttaaattctactgggtaaactaatttttattttcaatcaaacaaagatagtcgaaaatcaacatctgggtcagtattcacttttggtggtggagttgtagttttgaaaaacattaagcaaaccaatattgcgaattcaatcacggaagctgaatatatagcagcttgtgaaaccgttaaagaagaggttgaagaaattctacaatgatctagaagtagttccataagtagaaaaattactggtactttactgtgacaatagtggagcggtgaccaactttaaggaactaaaaagccacataatcaaattgtaactggaggggtatatttgtaacgatttgtatagtttggaagatatttttgcaatagataaacttttataagataaaactatacttaaatattatagtttggaggacaaaaatcttatttattatcttattaactaagtattgagtagtgaaccaaaaataaagtaacatgttaatctatttattatttatgtatttatttatttattttaaaagacagactacataaactttaatgagaagaattgcaacaaaaatatatatataacataaaataagcttgaggcaatatacatatatatatctttatatattaaaagtgtctatctaacgacatttcttggtttaacagaatgtactttaaaaataaaagaatattctgtta

SEQ ID NO: 349820 - DNA, 647 bp, Cannabis indica
aacttaaataaataaactcttatgctataattttggcataggtgaaattgtattttacatttatttttaatattttaaatatgaaatttttgcttaacagggcccagtgaaaaagtgaagctattgggatttgaactctcaacctcttagttgttaattaatcaaattatcactagactacaacacatatttaacattaaaagtattattatttattttattacgaactatatttaatttttttttcgaaatggaaccctgagcggtggggcgcctaaggcggccacctccttcgtcttagctcagggccggccctgaactccattagcaatctaaatttcccaaaagaataaattaataataaaattagtcaagaataatcattcaaataatagaaagaaaaacactaattaatctttccaaacctttttaattcttaaaatttctatgcagaaacatggggattgtataaaaactcgtaaatttaactataacatattaattgtctgcacttttgagctaaaagtactaaattatcaaactttaagaatacatttacactttcaaaaatttcaaatgtagatcaaaatggttatcaattattgaatgtttaaacccactttctatggataaattaaattctccca

SEQ ID NO: 349821 - DNA, 762 bp, Cannabis indica
gtcaatcttattcagatttctgagtatttttttcagggcctctttcataagagtttttctgtcccctcttttgatcttgtctaccactatttataattgcatagcggcagttaattacaaagctgaccaaaatatgtttacagccattatccctaaaatcgtgggatctgattacaaattaagccaaataaattagggttttacacagctgtgaatatcccgcttttattgggccgagaagaacgtgtaatcaaaaatatacggtaagcgttatctcatagggatgcctcgccgagaatggagtcaagataactttgatagcgagcggttgcttgtcgagatgatcttctcgagactaatattgttttaactatgataactatgctttctggtgttgagatgatcttcctcgcatgcataccatcttcgagcaagataagtgcctcgctgtctgctatcttgactcgtcacactatctatactcagtttttatatcgtataatatacactaagtattttaagtgtagtcattttctctttcatgcacggaggttgaggccctgtcatgaacgcgtgtacccacatggtttcttgtcaatacataagttagtagttcgtacatttttgtctcgtagaaggctcttcagcaagccgagttataaacatacgctggaaattatatttccaacaagttgttccatgctaagtatactttcgcttgcgtgtttgagttctcttcttcccagctcgacacatgtcttc

SEQ ID NO: 349822 - DNA, 754 bp, Cannabis indica
taattaacccctatgacatatccatgatcacaggatctagaaagtttagtgaatactatagtcctccctcttcatcatctaatgattatggtaacttcccttaagtgggaatttatttcccattttaccctttatctattttttaaataagtattgatgcatctctttgtctcgcaaatatggatttagaggatcttctccattcttcaagcaggaaggggaaaaagaggactactgcctcggaaacctcttctgatgtcaatttggaacctctcaatattgatgcatctctttgtctcgcaaatatggatttagaggatcttctccattcttcaagcaggaaggggaaaaagaggactactgcctcggaaacctcttctgatgtcaatttggaacctctcaagagatctaggaagacgactgcgaacaagaagcgtgcctcgcagactatagacctcgagactcttaagtccaaatttaggttcacactccagacattctgttgaccaaaagtcattcactcatttattttgatgataaacaaatatttgattattatttgttactaatcttttcttgatcattttgcaagcaagttcacagagtatctatatttactcggtaaagtcaaacataatcaaagaagtagattcaacaagtatataaactacttcatacttcataagagcaaaagattcatcaagggatcaacaactcaagaccctattcaaaagaggtcttcaaaaagcctaaa

SEQ ID NO: 349823 - DNA, 1181 bp, Cannabis indica
tgaaattactattgtgaggctcatatttagttaacaaaaatctgcattaatagtttggtgctttcattgagagcgtctatgaaaaagctcaggaaagaaaaaaccctcccttctttagaagaaaaacgacctcctacatggctgaaaatccagaaaatgctaacaccccacatgaggaaaccaatcatcattctggaaaagagcccatgggctccagaagatctaccaacccgcagtccaaaaggaccacccgttccaggagggttcaacctgagggtggccccaatgcacagacctcacgttcccacagaattcgactcgacattggtcctagtaacggacaacacgctcaaggagaacttagtctgggaatggtcaaaaccctgggatgagggatgaagagcttagccgtagaggtgcccaatctgtgggagaacaaacttatgaaatggaaaaccgtcgcttgatacgccatctggaagaggcgcaacgtcgaaacgctgagttagagcgtgatgcagcctcggctagggcgacacaggggacaaatgcttaaaattgacctgtagctggagtgagaagaccacgaggcagacttcgtggctcacgaaccaggagacaggaaaaggcctgggaagaacaacccacagaaaatgagacacccctgaaaatcagaacgactagccagatgggagacaaccggaaactgatgaacgagcaatacctcatgataatgaggaggatcttgggactcaaccaggggaatagaggtcacctaccagaaatcatcaacattcttcccaaacccatagagcgaggactcgtacagaccctgatgggggaaatatgacaaatcgctatcgggaggaaagaacagaccgtgaagaagcaagtgtgacttcgaggcagtcaagaacccatagtcaatccactcgaagaggagaaaatactcaacgagctaatgatcgagaaagtatgggaaactgtaaatctgcgagccactcaaaaacaaagtctaataagtagacgcgattagtgagtaagacagatctgccaaaagtactcccaaccggatctgcgagagcacttgaatcagagaaacctgactcgcaacagctcggtcaaaacgcaagaggatccattccaaattcgacggataaacaaaacgggaggacaagttc

SEQ ID NO: 349824 - DNA, 700 bp, Cannabis indica
tactctcatatttatatataaggctgagaaacaatacaactaacattaagcttgtaaattaaaagcagcgaaaagacttgactttgtaagaaacggattttgttcttcctcaattctttgttgagtcacgaaaataaggatttagtaacatttcaaaatgttattatattgtttaggggtaaatattattttggaccttgaattttgcaaaaattaccaattaaatcttctgttttgttaaatgacaaaataaaccctgtattttctaaaatggtaaaaataggatcctgaattcaatttttaacaattttatttcttaatataaccaactttaagacaatttttaatacgaacagatacagaaaatgtaaccagtttgtcataacatctctaaatcaaattattattaagttttattttaataaaaaaattagttcaggatcctattggtacaattttaataaatacagagtttattttaccattaactagtgacattttttaaaaatgtaagatataccagtctgagtgaaaatatagatgttgaagcaatattatacaggtgctgagtttaataacttccagtattctattgctgccatgtttaggaaatatgagcaaactctcaggtggcgtttggttgggatgaataaaaatatagaaataggagtgagaatgggaataagaatagaaatggaat

SEQ ID NO: 349825 - DNA, 983 bp, Cannabis indica
atttgactaatctatttatttattttttcttgttaggaattctggagctttgggtttggaacatgttatacgtatttaacatgttctcactgtttgctttttttatagtgttgctgttgtggtggttgttttaatttctatagtgctctcacggattttaacatgttttggttattttttttctcaagatttggaagatggaacatggtttttttttcttagtgttgctggttgttgaattttggagagggtaatacatggtttatttttttaatagtgttgcactgttgcggtaatatggttgtggttttttttttttaacttgttattgacttatgaaagtctaatgcgttgttgaagattgagaaaaagttatttgtttgttaaattttagttgtgttactgttagttttttcttttctcatttttaaatttttaataaaaatattaaaaatgcaatccgcactaaaacaaccgatccaatccgcactattgcgaattggattggattggatttaaacggttatgcggattggattggatccaaaatatgaaatccgcacttagtgcggattggatcggatgaacagccctagtttatatgatggaagcttcgttgtttttcagtctagattataaaggttggaacactccaagaagtttagcattttctgctagagaaattaccattaatgttgaagacactggcaccctccagattttttctctttaaacagaggaagcctgttgaaaatggagagctttgaatgttttgattatgtttcaagttcttattgtagatgttttgtgggacaccgttgagattcttgcaatggtttgagttttaactcataaaccttagttagattttcaattgggtagggtaactctctaatcccagttcagtgtaacccaaaatttgttaaatgttgttgcataggcttcaaaatttctggcactatttactagcttaggccttatgc

SEQ ID NO: 349826 - DNA, 480 bp, Cannabis indica
caacaatagaataaaaattgtttattttcaatttcattccatttcattacctccaaccaaacgcccgaattatgcttttatttgggacatattttgtgttcgaaaatataaattcattgcttggttggctttgatggagaagagatcttccaatccttttatgcttgattggataagaaaaggaaaatcacaaaatggaagaagagattgtctgtgatcttccaagtgtgtgataaaatgcattttacaggatgtcgcaatgtttacagggaaggaagctagtagagctttggctttgctagttaaaatttttacatggactaatataattaaatgttcctaaatcaatgtcggtattaacatataataaaaattatataatcggtcatccatggtattaccatcgggccataatagaatggacataacgtactaacacgttcgggacccatggacatactgttgggttttgtgccctaa

SEQ ID NO: 349827 - DNA, 547 bp, Cannabis indica
ttattatattttattgtatacaaaaattataaatttttttaaaaaaagtgtataagagtttcccataataataagtttaattaatatactattataaaaatttaaaatagtttactttgtcaatatatatatttatactgatcaagcatatatcgattcttcaatataagcacccaacacgcttctctatcaagttgttgtctccctaccgaccagacgacaacttgcccttaagggaaatacttctatgtacaatcttaatgtatcaacgaggtataattttatgatgacctatcttgctacatgttacaattttgattgcatgtcatacaacccaaaatttaggataacaattatattgtgcaattgttgatcttaaaaatataaaaggatagcaattcgataattctgcacatctgaaaaatctcataagttattcaaagttatcatatactatctaatttgaatgagatcaacggtaatcgagatcattttagatttttttttagtacaaaactttttatctatttattatgcagtaattttc

SEQ ID NO: 349828 - DNA, 635 bp, Cannabis indica
acataacatatgtgatattataaaaaaaaaattattattagaggtataacaaataatatacttactcaatgaatgagtccacgacattgcaattaaatagcacatatcgatgtgccttaactttagtatcctcatttaaacttttaatatacttttttcccaaatttcggcccgtcatttggaaaataggaagcaaattttcattgacttccaaattactgtaatttctaggcttgcgattaaactttgtctccacgccttccatgtatcttgagcaaaatgtcaaacattcatcagctaaatatccttcagcaatacaaccttctggtttgcttctgtttcgaacgtatgatttcaacttagacaagtacctataattattcatatgaacattagaaaaaaaaattagaacattttcaaatttaataatataaaaattaattcagattttacctttcaataggatacatgcaacgataaactgatggtccagcaattctcgcctcataagctaagtgtatcaccaaatgaaccattatatcaaaaaatgacggagggaataatttttcaagattacaaagagtgactgatatttcttgttcaagttgcataaaatcttgtggtcgagcaacttt

SEQ ID NO: 349829 - DNA, 1767 bp, Cannabis indica
catttggggaattgacctgatcgtacaattacccaaacgcaaaggaagagtgcaatatgcagtggtagcggttgattatttcactaagtggacggaagtcgaaccacttgcaaccattacatcaaagaaagttcaagactttattgtgaagagcataatctgccggttcagattgccgtacaaaatagttcagataatggcaagcagttcgacagccaatccttcacttacttttgtgagaaccatggtatcatcaaaagtttctccgcagttgcacatcctcaagcaaatggtcaagttgaagcagtcaacaagaccttgaaggatacaataaagaaagaacttgaagatggcaaaggaaattggccagaagaacttcctgaagttctatggtcaaatcggacaattgaaaaaacggcaaccgaacagatcccatttgctatggcatatggatatgaagctatgctgcctgtagaactcaagccaccatcccatagaagattaacgtacaaccaagaaaccaataatgtactcctggtcgaatcacttgatgaaatagaagagaagcaaaccacagcaaacttaaagttgatagcccatcaacaaaaagtagctcgatatttcaacaaacaagtgaaggctcaaaaattcttcatgggagatatggtactaagaagggtatttctaaacaccaaagacagtacgacaggtgtactcggacctaactgggaaggaccatatcaagtggtcgaagttcttgaatccggagcatacaaattatgtaactatgatgaaaaaatgcaacttgttctaataccccggtattggaatggggagcatttaagaaaatactaccaataaagtacaaggtcgaacgaccacaatttaaatgtttcgagaaaagagaaaaattactcagatcggatgaccaccatttaaagtacaatctcttatttctgcaattggttttatttcatgttaagctaaaagatcagattagatcaaatagcattgatgtaagtcactacgtgttgttgaaggaattttacaacaccaaaataaataatagtagtaataatgataataataatatgatgaataagtgcgagtattcaacctagaacggtgagtacctaaactgggaacacaaataattaacaaaaactggaaatacaaagaacacaagtgaatatagtggttcagtcagatcacgatctacttagtccactgttgcaaggattctgtatgtgtcatttcacggtggatcactcctttatatacaaaggaagtgtctgatcatttatgttatagtgagatttctctcacctagaaactcgagaccagacccccattaaaaggacacgtatactcagattttccacagaaggccgagatgtccctgagggactcctcgaagtcttaaacctcgcttaaaggtataaccagcgagaagtggcgagcatgaccgaagtctaatcgcatccaagataagagagtagatcgcatatatcgaatatatgcgatcatcctccccttgtcctcgtatcaaccaggagaatgattctctgtaagtacgagttgatcttaggaaccctacagcctttataaagcgatatagactcgcatgtctaggttctatcagctcaacacacgatgtctagaagaagcgactacctaaagacgtagacataatgataaccctgcgagttgtacatcgaaatatgaacagtcaactcgcaggtacggaagacgcatgcgttgatgaac

SEQ ID NO: 349830 - DNA, 545 bp, Cannabis indica
ttggaacattaatcttaaaaagtttgaaaacgggatcccgacacttgtagtgtgccttagcattagggcgttacgctcaagcttctggggctcttcgagttgttggagcttacaatcttctttcgacttttgtagataagtttgaacatggtgattgacagtgttgacctcgcttttagccaatgacaacgagtctaatttaataagggataagtgatttgtagcaatcgatatataataaagcaaaataaagacacaggaattttatagaggttcagccccgagtagttcggtaatagcctaatcctcgttatttgtattgacttaagaacaaggagaatggttccttttcttatagatcttacaacagtatctctgaatatataattcttagataatatctttagggtacagtctcaactaatctgtttgcgaccttttgcccagtgaccatacatcactatttatagggctagtaagcttggagaggaagagtttcccctctcgttacaatgtgtataaacagaaagatcgtgtgatcaatg

SEQ ID NO: 349831 - DNA, 1333 bp, Cannabis indica
attagattttagaagattttgatgtaatcctgggaatggattggttgactaagtacaatgctaccatagatggtaagaggaagatggtgacttttgaaccaaagggtgagaccccatttgtttttatgggaagggattccaatgatatcggcacttaggaccaatgagttattgcaagaaggatgtatggggtacctggctagtgtgttggataccacaaaagatatacttaagggatcggaaaaggtttgagtagtatgtgaatttctagatgtatttgcgaaggaattactggaattaccaccaaagagagagagagattgactttgagattgaattagtaccaggggttgagccagtttctaaggccccttatagaatggcatcgacagaattgaaggaattgaacgtccaattaaagaacctacttgatctacgtttcacaaggtcgagtacctctccttggggtgcaccagttttgtttgtcaagaagaaggacgagtcgttacgtatgttcaattattatcgagaattgaacaagtatagaataaagaacaaatatcctttgccaaggatagatcatttgtttgatcagttacagggaaaaaccatattctccaagattgaccttcgatttggctatcaccatttgaggattcgagaagaggatattcccaaaactacttttcatactcaatatgggcattacgagtttatagtgatgtccttcgacttgactaatacaccagcagcatttatggacttaatgaatagggtgtttaaggaattcttgacaactttgtaattatgtttattgatgacattctagtctattctaaatcgaaagaagcccatgaacaacaccttcatatggtattacaacgtctctgagaacataagctttatgcgaattctggtagatccagtgaagattgaagctgttcaggattggccacgacctaagacaataattgaagttagaagtttcttaggattggttgggtactataggagattcgtagaaggtttttctaagattgctactgttgggttttatgccctaaataaaactcatttcaatataatcaaatttactaattaataatagatcagaaatcacttttatgttgcatggttcacatgatttatctcatgattatgtttgatgtataaattctagtaagtacaaaacatgtataaatatgtatatatttgttgatgattatagtgtcatcagcacagtgaaatataatcatgattatatgttcaaaagtttaattctcatgatttgccagttcactagatttagattgacatgataatcgacaataag

SEQ ID NO: 349832 - DNA, 566 bp, Cannabis indica
aaagtacatcacaggataaaattgtgtccttatatatgtatgtctcatagaaatacatagaaatacatagaaataattatttctacatatttaatctcactaatatatattatatcacatgctctacatatatataatatatattactcatatcatattatatatcactatatataatatatgatatatactaatgatcacatatatacatatacataactcacatatatatatcataaatatatattacgatcatatgaaatagtaaatcacataatattcaccattatgctcaccaatgaatgactttcacataaaatatcttatcattttattatcaaaatcttgatttatctctttttccattgaaaagggataagcttttgattgttagagatattattgtaatggaagaaatcaagatattacaactctattgcaatataatacaaggaccaacaaagagattaaaaaaatgttacaacgcatagtatacaatatatatacactatatattatatataaaaaaggtagaagaagatatatatatatatgtatacacttac

SEQ ID NO: 349833 - DNA, 608 bp, Cannabis indica
atttttatttgttccataaaaaaaaaataaatctcttataaaaataataatcatttaaaattaattctgttttactattgttattttgactaatataatattgacacatggcatccaaataaaaaactaacggagctgtgaattgggtaccaataaaatagtttgttttgaagatttaagtatttatgctaccaatttttgaatttgggtatttattagcaacaaattatatattttaagtatttttgccgcaaatttcctttcttttaatatatatataatatatatacatatggtgattctcagaatttggtacagtgaatcataaatttttatttcgctacgtacacgatttagtaccgcaataccaaccgtcagttcaattagatatggagggcatggctctgaatgaggagagaagccaactgtccctactacaagaaatattatttttaccaacacagtacgctactgccttggtaaaagtaacttttactaacgcatttcgtaaactacgtggcaaaaagatcaaagtttaccagtgcacatttgtagcagctaaaatctaacttttactagcgcatttacactactacaaggaaaggcct

SEQ ID NO: 349834 - DNA, 604 bp, Cannabis indica
ttgttcattttaaggttaaattcctctcttttgggccttgtgtgagagttaggggggcatagcagtgggtacgacatactgaaccgagccctgcctcacatgaacaacccgaaccgtgaaggccatttgcctgatttgaataactgtactaggttaattaaactagtttaacctaataaaattgattagcaacataattaatttcaaaatatatgaaattaaattttcatttgattattttgaaattaatttagaaaaacacacttagtttaatgaaattcaaattcaagataaactaaatgtatttttctgtatttaattaaataaagaattaataactaattagattcttctagatacttaattatttagtatttctaaaacattttaagttgaaaatttattatttataactaattttggatcaacttgaatttgaatatttttgaaattcgtaattaagttgaggaattctaggaattagttattgaaagattcttgaaatattattttaagttgaaagtttgttaatttttggatcaacttaaaatggaatatttttttaaattaggtggttagtaatttaatttgttatttaattaaa

SEQ ID NO: 349835 - DNA, 571 bp, Cannabis indica
ggctgtttaattgaattggtattgaaagtgatgtttagtgcaaattttcctgtgagatggtaattttgagttaaatggtgaagcgtgattaaatgatgtgttggatatgttgtacttggtatattgaactgtgctggaaatacaatttaggtctgtaatggttttggttcgagctggggaaaagaacccagaatttttctagtctgacagcaatcggtcgaccggttggttctggtgtaccaaaacccgtcgaccggttacagcaggggaaaatttctcgggttttctccgaaccttgttttaactcggtgttgaacgcctttgaatgtttttgagttatttgaaagttggttaaggctaagtctaatcagttttaaattagggttttaatccggaaaatatcaagttcagttattcatttaagttttaattgtcatgacataggaccgggatcgcctagcttgttttccactcaggtcggcccgtactcttgactgctgaactaaggtaagaaaagtggtaagcactgtatgtggttaaagattaacagttgaatggaagtggcattgat

SEQ ID NO: 349836 - DNA, 723 bp, Cannabis indica
aaaataagggaaaatcagttcctaaaacactaaaacataaattaaaaacaaaactagttctacatcttaacacataatacctcataaaaccgattataattttttttaaaaggtgaggatcaatttgaaaaaatactgaagcataaatatgaaaagaaccagctccgtaacaaaataaataacacaaataataacacacaataattaaaaatataatataaaaaaaccagttatatttatcaactagttaaaaatttgagaaaaaaaaactagcttcgtaaagcaactaagataaaaactcacacacaaaaaccagttaaataaaacaaatcaataaaaaactggttccttaaattaactaaataaaaaatcagttctcgaaataactaaattaaaaactagtttctaaaataaataattcaagaattaatttttgaattgattaaataaaaaaccagatgacataaattaaaatagactcggttccacaataaaatgactaaaaacaaataacacacaataactcagaaaccggttataatttaaaaatagaactgattttataacataatgaataaaaataaataacacaaaataacgcaaaccggttataattaaaatataactggttctgtaacatagtgaataaaaacaaataacacaaaataacttaaaccagttataattaaaatagaaccggttctataacagtgttataatgaa

SEQ ID NO: 349837 - DNA, 474 bp, Cannabis indica
gtggctttgaggctctttactgtgctatggctccagtgttatcacaaagcaaaaccagtggtttttccattccagggacgacaccgagtcctgggaagaactttctaagacagataagttcttttgcagtctctgcagcagctatgtattctgcctccatactagagtttgaaattgcagtttgtttagcacttctccaaaccactgctccatctccaagagtaaacatgataactctatatatagagttattttttatgcttttaagctgaaaatattgttaggggagtagtaaaaaagtgttgagttgcttaattttgagtagttttagtttaatttctagttaggaagctatcatttgagtcttgtaaaaattatggtgttaattgtgtttgtttcaattaaatgtgcttatttgttatgggaaagaagaattaattggctaggaaaaaggaagtgatgcaaaggagaagt

SEQ ID NO: 349838 - DNA, 1539 bp, Cannabis indica
aaagacaacaacgaacaatccaacaaattcacacgatatatcagaactaaccaaaaatatcaattagatagctaactcatttacagaatgaaactagctatttatagacaatagttcaatcgacctaagaacaattaataccaacagttaaaacataacaaacccacacggactttaacagaaagctggtatgcagttataacaaattaaaaccacagatacgactggactcactattaatataatctttcaaaataatgatccttacaatctcccccttgacagattatgttcaatgaccacatatttggccgtatctaccatgatcccatctttatccaatatgttccctaagaaagagacacgagataactaaaatttacactttttgaacttagcgtacaacttttgatctcgtaatcgctgcaatactgatctgagatgcaactcatattcctcttctgatttagaataaatcaatatgtcatcaataaacacaatcacacatctgtcaaggtaatcctggaatatccgattcatataatccataccaaatatggtacgcagccttggcccgacattcaccctgatggtatttcttgcatgtcagacattctagatatgatctgaaagaggatccgtgaccttgacggccacctctatttacccaaaactttctaatactccctgatgttccggaagcttctaccttccgtttgtgatcagggttgccactgtcggccccttactgatattaccactaataagaggattcgatgccatggcggcatcctgcacaatctgctcctttattgcttgttgatcagtctcctcaacaattaaggctagtatgtccactttcctatataagatgtcgtgagcaatggcaatcatcaagtcccgaataattgtggcattcaatcctcacagcgatgttataaatttttccctcaaacagactcttgaactctttccaagtcatcaacttatatctcgagtctgtcccactatataccacaaaatgcgggcatgatcttgtaacataaaggcagcgcaattcactttctctgttcctctcaccccacgttagcaaggatgcgggtgacattactcatccattgtttagctttgattatatcagtacctcccaaaaacatcaaaggttgtagcttcacgaactgctcaaacactgaatctctacgcggcgatacaaacccctggttaaccactagtggcacaggagctagtggtaacatttgctcaataggagctgccggttttggttgcctcaaccaatgtaattcttcttcttgacgaagtatgacacctcgcattccttgaaacatctgttgccaatcagcaggcggattagcattgccaacccccacattatccccgagcatgattggaaaatttcagtttgagtcaatatttgctatattttgttaccaagttgtgattttcagagttcttttgtgcactttccaaacatgtggtaaaatggttgttaacacatatagttgagaaaaattttgagtg

SEQ ID NO: 349839 - DNA, 636 bp, Cannabis indica
tagattccatatctatgtaaggcgctcccactcaattgtactatcatgttcccaagttgtacgtgcgacccgaaccaaatggtaggctttgaccaaaaacttaaagaacaccaataacactcttgacatcgaacctaaccatgtcaggattaagatcttttgatctatgatcaaccagtgtgttgacctcacttttagccaacgacaacgagtctattttaataagcgataagtgacttatagcaatcgatatataataaagcaatataaagacacgagaattttatagaggttcagccccgagcagtccggtaatagcctaatcctcgttacttgtattgacttaagaagaagaaagattccttttcttatagctcttacaacagtatctctgaatatataattcttagataatatctttagggtacattctcaactaatctgttttcaacctctgcccagtgaacatgcatcactatttatagggctagtaagcttggagaggaagagttttccctctcgttacaatgtgtataaacagaaagattgtgtgatcaatactgagtacaaagatcgtgggattgaggctgaatacactgatagtgggatcgtctgtatgccatatccatgtagtct

SEQ ID NO: 349840 - DNA, 565 bp, Cannabis indica
aaaaccggttagccagttttacccagaaaacaaacaaaaatcaaacccctgaccaaaacattttcaaactcaactaaactttccaagcctgcatattataccccaataacatattccaagtgatagaagaacaatcaaagctcagaatcaattttcaccactgatgagccaagcttgagttcaaaaactcaaagcttgctcatccaacaaacaacctaacaaaacctgcccaaattaacttatttcaacataaatcaactacagaaaacataaccaaactccagcagcaagaacagcaacaaaaaacacaaaaataagcatgattcactttctttaaaaacaagaaactaaaagggaagttgcttaagaccttaccttggcttggagattactaaaacttgctgagaaatccctagatgaagtaaaaaatccaaaaccctagctgggttctaagggaaaggagagagagagagagaagagagagatgctatccttttttcaaaatttctattttttttaataattgaaataaagattggttttactaaatcaatctcagccaaaa

SEQ ID NO: 349841 - DNA, 1386 bp, Cannabis indica
cgaacagctccaagttctaccctagcgtcatcaacgtctttcctggccaagtccacctccgccctcatggtgttggatagagccgcgttcttggaagcagcagacttagctcaggagtatgtgtaagccatctccagaccagccaaggcagagaaaaaactttagaatctgagccaaataaagaggatcaaaggaaactgtcaagaaaaacttacccttgtgaattccttcaagactcctcccattagcagctccaaagaagagtcgttgtcaacaccgggcagttgctcactaacctcaggaaccaaccggttcatgtagtggccgagcatctccttgcctttcttggcctctgggagcactagcagaggaggagtacgagcctgcatctactcagatccgcccttgcttagctcggatccaccttttggttgctcaggcctgtctgaacttcctcctcgagaatccttggacttagaaacttttggagctgaggggtttgcaacagttagttcctcgaaaaggtcaataacctccctagcaggggccttttccttggaaggggtcccctcgccgcctctggatttcttagccggaggagatgcactcgagctttcaccaactctcttcttcagagcatcaagcatcttctgagacatgtttccatggaaaaaaaataacatggttagagaaaatagacatcagaagcataaagcataatagtcaagaagcttaaaaacaagacggagtagtctgtaaaacgattgcccgagcaagactcgaaagtccatcatcacctgacaagcctcttatctcagacataacagctttcccttttccgagcacgggagaaggtagccgagcaggcgaactgggctccctaatgtgaattgcatgttcaataggcctgggcttggccgaaactttcttcctccttttgagcggagtcacctgctcttcctcagcctcatcttcacgattcaagggctcttgagcatattgtttagcccttgcaccttccttcaacttagcctcgcacttcagttgaatcagctcatcctcttgatgagctcgctcagcccgtctagcaccagatttcctttttctccccttcactggcttaggaatgaaaccctttggataaagcccgtacttcacaaggttgtcctcggaggttaactggatgatattccagtcatcccccgacaactgagcaagctcttgagctctatccctaagagtaagagtttggggaaggcggtaatatgttggaatctgctcgaaccgagtgtgggtggtgcccatgcaatccaccatgaagtactcatcaacaaaacgcctaattttgctgatggtcgaatcctctgtgtccgtcaaccacttgaa

SEQ ID NO: 349842 - DNA, 748 bp, Cannabis indica
cccatatcccttattaattgggattacgacacatggcaaccagaatgcctaaggtcgcccaatccaacggccaacgatggccacgcctacacgaaaaccgaggagttttgtgacgtggcaccataaatgcaataaaaagtaataattacagccgtcattttttgaaaccctcgatgggacaaccaaaaggtcacctcctcgtgacaacctttcacctgtctctcgagtaatagtttccctctgtgaccgcacctgtcacatcgcgaaactaggggcatgttgtgaaaattatattgctttataattgcgcaagtgtacacaatcacaaacaagtaatacaatgataagtaatcaaagttcgtctccacagggactttttactaaataatgttaaatcaactaaaagcaattccaagaatttcaaataaaaataaaataaaatcacacatcaattcacaagaaaaatttatagccttgaatctaaacttgagaactaattttttaaactaaataaactaaaaataagaaactaaaagtgattaaagtggtggtaatttcagatttggaaaatagacttgggtgattaatttccacttgtatgtcccagttgatacagcaatgacccagcaatgactcagcaatcctggcagagttaacagatttcaaaaaaaaccagcaagctttttccaaaacttgcaataaaccattcacaatctcacaatgcattcctacatcagtttagatcaca

SEQ ID NO: 349843 - DNA, 722 bp, Cannabis indica
tgatcatggaagaggctactagaaaaccaaactaagaacaaaatcaagatactaagaactgacaatggtcttgagtactgctcaaatgagtttaaaggattatgtgccaaaatgggaattaagagacataactgtgatctaaacccttaacaaaatagtgttactgagaggatgaatagaactttgattgaaagggttaggtgcatgttactaggagctgatttagacgaaaccttttggggagaagctcttaaaatagcttgttacctaatcaatagatcaccatctgtgccaaataacttcaaaaccctacaagagttagagacatgtaaaccctcaaacttagatcacttgaaagtgtttggatgtactgcatttttgcatgttagaaaaaataagttgcaacatagagcattgagatgcatgtttctaggctaccctggagaggttaagggatatagagtgtggtgtttaaaacttggattcaaaaagtgtttgattagtagagatgtggttttcaaggaagatgaaatgaccatgaaaactaagagcacttccaaagatagtgaagctggtttagatgagaatgtcttgattgaggcggagcaggtttctcctacaacaccaactaatgttgttccagatggaactgaggcaacagaaagggaagacaatgaagatcagcaggaactaagcagctatcaattagctagagatagaga

SEQ ID NO: 349844 - DNA, 846 bp, Cannabis indica
aaataacatactgaaaaagaaaagaaaatatgaaaactaaatcaaaaaaaaaaaatatataacgaatcagtataaaaaaaaaatcaacaacatatccaaacaaaaaaaaaaactaaacaaaaatatatataaaaaactcacaataaaactacttagaaaaaaaaaaaaaagctaaatcaacaccaatgaacaacacgaaacaaaaataaaaaaaaaaaaaaaacaacagcataaaaaacaacttcaaaatcatacaacataatatatatataaaaaaaaactaaaaaataaaaataaaaaagctaagattaaaaaaaaataacctttgctccattgaaggttaccatggggaagacgatgacgtgtcacgtcattatgttcccatttcaaaaataacgttatttttgtaaaaagttacctaatttagtatattcctaaaaaaatccctaaacataacttcttctttcatgtagggcgaccctaggtatagacgggttaggcccacgtttagggcccactcattttagaggtccaaataaaaacaatatcttttaaaaaatatacatatttttttttgataatttttaaaaatactatttatctttatagtaaggattcaaaaaaaaaaaaaaaatttaatctatgacccatttcaactcaggaccgaccctgctttcatgttgtataaatagtgttggtgttacttatttagatactagaaaacttttaaatttgaaatattataatatttattgtaataaccctcaaaattagttggcttttgttctaatttaaaatttagttacttctttgttaataatttatgaaaaaaaaaaaaaaaacgtt

SEQ ID NO: 349845 - DNA, 904 bp, Cannabis indica
caattttgtgaaccctagtttttcccctttttgtgatatttagggtattgtcatgtcatccatcgataccaaaatttctagttttgattttaaattcccgaaaagtattttagcgtgtctctcatcaaaattatgaatatcgtgttatagggccctgtaaagtgtcgagttgttattccactcaggctgaccaacacacctgaatacggaaacaaggtaagattagcataaagtatatatgtgtgtgaatgaatgcatgttattattgtttacactactaacattgggatggttgtagaattaagcgtgtaagtacagtgtagggtatttaagggtagttacagtgttaccaacacaagtaccaaggctacggagtgcatgtggtacaacactcagtaactcccataagtcaataatggccctaccaacactagtacggagtcaatacttcagtgcatgtggtatagcggtcgtacttctgttaagaacgttattaaccatttagtgagtcttgcatatgggctcaggacggcttaagtacgaagtcggcattgcattgtctatatgtattttatgcatatcttacggagtctgtcgactcatcagttttctaccttgtgtaggtaagggaaatgctaaggtggaggagcagtgagttggaggctcagcaaggattgtacatatcgcggcagtacaacctggagggttttagtctcactatattttgagttgccttttgttgtcgctaggagacttataaaaaaaactaatactatgtaaatttatgtatatattattgggattttatgctctaaataaaactcatttcaatataatttaatttgttatcaataaaagataagaagacgtttatgtttacagtagttttcatgtttatggttta

SEQ ID NO: 349846 - DNA, 885 bp, Cannabis indica
aaaaaaaaaaaaaataactaatgcaatatatcatatatatatatatatatatatatatctttatagtgtggttatgtaacaaaattatataaaagattaattttaacagaatatattattatttaacagaatattcttaattgattttatagtattattgtatatatatttaaaaataaaaattatgtagatagtttttgttgacgcgattttttatcaactgatctaagaagatcgtaaaataaaagagaatcacggtgaattaatctgattaataaaattgcaataaattaaatggacaccaggaatttatagtagttcacccccatgttgcgatggtaatggggctacatctatttgtttttattgattggatccaatacacgagagttatgttttcaaaagtgtgtggataaaagtatagcaaaggatttttaggtgaaatcttaatcgagacttatgaatataagactaatgggagacttgacattcatgaatctgatctaaattaatggttgtaaagttcttgggaacaataaaccaataatttgtaaagaaaagtgtgcatcaatggtgttttaaagtttggcgtcgcctgagtatggtggacccaatggagaaggtgaaggaatcaatgtggtgcacttggttgccttcaagtaattttctaggagaaggtttcagagtagaagatccaaaagagagaaaggaaaagggtctcaaaaggaagaagctacaaaaaaaaaaaaaagagatccctttctcagcatcctacttgatgtatatataagctagaacatttgttagtgatccctcacacatcagatatctcattaacaaatctcgtataccactcttttttatgaataaaatattacaaataaa

SEQ ID NO: 349847 - DNA, 828 bp, Cannabis indica
gtcggtccccttactgatattaccactagcaagagggttcgatgccgtgacggcatcctttgcagtctgctctttcactacatgttgctcagcctcctcagcaattaaggctagctctaccactttcttgtacaaagtgtcatgagaagtggtaattttcaagtcccgactgattgtggcattcagtcctctcacatatttctgtttcctggtgaaatctgtgggcaccagatcaccagcaaacttggacagccgatcaaactccagagtgtactcggccacagacatcttcccctgagttagtttcacaaaatcttccatatgtgaagtcctcactgcgatgttataaaatttttcttcaaacaaattcttaaactcatcccaagtcattacactgacgtcacgagtctgtcccacaatatcccaccagacgcgggcatgatcttgtaacatgaaagctgcacaattcactctctctgttcccgtcactcccatattatcaaggatacgggtgattgtactcatccactgctcagccttaattatgtcagtacctcccaaaaaagttggaggttgcagcttcacaaaccgttcaaacacagaatctctatgcggcatcataaacccctggttacccatcactagcacaggcgctggtggtaacacttgctcaacaggggcagccggtgccggttgccttaatcgacgcaattcttcctcttgacgaagtatgatacctcgcatttcttggaacatctgctgccagtcagcaggaggattagcattgccaacccccgcattatcccccagattctgcggaggtgcagg

SEQ ID NO: 349848 - DNA, 478 bp, Cannabis indica
catatcaaaatttataccctaaactaatttgtacaaattaatgcctataattttaaaagatacccaaattaccctttaattaaaattttcctctaacagtttccatttcctctctctcttcccacttcggcttccccaaccccccacctacctccgagaaacccaaccagcgaggcacctccattgaaggcgttcccgacctccattccctctccctcgcaacaacgaaagttcgagaacccaaacccacttcccgaacctccattccctctccctccattccctcttcgtgtgcatccaatcgacgaacccacaacccagtcgaggacgacaaaacccacgaaacaaccaccacaaaatccagtcgacacccatcaccgtcctcaatcgacacccacctcagtcaaaaaggtaccattttttttaaaaaaaaaactaattgattttaaatgttcaattttgctagatttttgtggat

SEQ ID NO: 349849 - DNA, 1487 bp, Cannabis indica
taaatcctaacctaaacctaagtggttgcctataaatagatagtgatggctcacacttaaagatgataaaatttcttgccttcaggaaaaattgagccatctattttatacccatagccaaaccacttcttctctttctctcttcagattttcataccttgagtgatagagtgagtgcccacacatatcaagtggtatctcaatcatagagtgtaaggctatgaagatactctgcgatagacaggatacaagggttagagatttgagcggaaggagccattattattccgctgcacccaatgtaaggttttctgaaactttatatgtgtttattttcattgttttagaaattcatatttaggatgttaaataatacatggtagtaaatatagatccttgtaaaacatattccaacagttagttcaattaaacacctatctttgaagtattcagacaccaataggtgtaggtgtagtgcgaggtgaccaactattggtctcgtgaatgttatcgcatagagctacaaaataaaaaaggcttgcgatcaagttaataggcagtcataagcggaggaaggagagaagcaggatgaggatttagaagttattttagatctagaaaatcccacaaagtgtgtattcattgggaaaaatctagatgaaaaactaaaatagcagctaataagttttctgaaggcaaaccaggattagttcgcctggagccattcagatatgatagggattgaccctaaagttatttgccaccacttgaatatcgacccaaattacccagcaaagagacaaaaaagacaacccctggattctgaaagacaaggggcactcaaagaagaagcggagaagttactcattaacgacttcatacgcgaggcattctacccctcgtggatatctaatcctatccttgtcccaaaaccaaatagaacttggagaacttgtattgacttttcagatttaaataaagcatgtcaaaaggattgcttttcactacaaaggatcgaccagttggtggatgcaactgctggacacgagctaatgacattcatggacgcatattctggatataaccagatcaaaatgcatgtccctgatcaagagcttacaagtttcgtaacgaacatgggactttattgttataaagtcatgccttttggtttgaagaatgctggggcaacatatcagcaactagtaaatgagatgtttgaaaagcatataggaaggaacatggaagtctatgtcgacaatatgttggtaaagtcggtaaaaagtgaagatcatacaaaagatctcgcggagtgctttgagatattaaaaaagtacagtatgaagctgtaaagaccgcttagtttaatttggaaattagcagttaatcacgtttaattatgaaaattatttatagctacttaaataattattttactgttattattgaattcagagatacatttctatgtcattcagtagttttca

SEQ ID NO: 349850 - DNA, 580 bp, Cannabis indica
aatggttttccaccattgctagaaattcatgaaattttttcaaacatttcaaatttcttttgcataaggtaaaatctagagtgatagtcttaagaataaaacgaaaactcatatccacccctgaatgtacatccatatttcaatatagatgattcactttcagtggacataggcatattgactctttgcacaaaatgatcttgtcaaaaccactataaacaagatgcaaatgccatatatatatataagaatgtggttgtgatcttttgatgacttaggtctagttacaataaagagttcttagaatagtccaagtggattcggtcacaaaatattaaactcacatttcatattaacaaacagtttgaatccattgatagaaaatagatattaatcacttgtgaaagttgaactgtattgtattctagaaaaagaaatgcaaaatttctagttggagtctaaaatttaaagtcaaagacttaaatgtataccaaatatacatgagtaattattctagcttggaccaccactactaatctaactctaagtttaattttcctaaagtaagcatatataagta

SEQ ID NO: 349851 - DNA, 610 bp, Cannabis indica
taagcatagaaattcaaatttctattttattattcgttattggaccaaaatctaatggtttaatatttttaaaattaatatttatagttaaatttgtttattacctattaatgggtaatacccattaagaagtattccatataattacattgtgtattacattattttaactagtaaacatctcgcgctttgtggcagatgtataaaatattttaaattatatataaaaataaattatgtattttagttaataataattacttagtcaaattatattaaaatcttaactttactatcaagaaatttacaatataaatacttaaaatattaaatttgttgctaataaatattagaattcgaaacatagtagcataaatcttcaaatttctaaacttaatagttttattgccacccaatttaatggtcttgaacaaagaccaagccaaagaataagaagaagagagatttgagtttgggtttgattcatttatagtttaatttttattttgatgtatgtgttaagatttgggttcgaattttattgtgtatgtttttaatttttgagttttactgtattacggggttctactatttgagtttgtatttatga

SEQ ID NO: 349852 - DNA, 618 bp, Cannabis indica
tatacattaaacatataatcatgaaataaattatgtgaagcatgaaacataaaatgatttctgatattttattaattggtattatattgaaatgggttttttttagggcacataacccaacaaactcccacttgcactaatataaaactaaaagtgcatttcaattaatctcaacaccttgagatcaagtgtattatgtagtattgtctttgtaataggacctgacaggttgtatttagtaacaaccttccctccaccattacatctcctaagtcacaaaatccttgatattgtgaaattcttttctatatgtttactcttcttgggatactggattctttactttttggcaactatatctgtgttagtcaggaagtaacactattagttaattaattattggtacaaccccaaaaattgtagaacattccataggctaaaaaattatctagaggccttcttggtcgctttaacattcagtctcactggtagagttagaggcttcagataggtttttatacttttccaaaaatcactcctccatccctagagtaatcaccatctcatcagtggactttctagcattaacgcaacactagaaacctaatttggtgcagt

SEQ ID NO: 349853 - DNA, 1360 bp, Cannabis indica
ctcaagtttgagtgaacaaaaaaaaacgatgaggaattgcaagaggttaatgaagggagtgatggcaattgaattttattaatgaaagaatgaaagcaagaaatacaattaggaacgacaaagaagcatctactttctgataacccaccatgagcttaccttggagttaagcatacttagcttatggtaatctcaagatgggaaatcttccaaggagttatctcggaaagcatatgagtgaggaaaaagtacgctagaaagaatcatattaggattcagaatcagtagtcgttttagagattatcaagaagaagggatgtgttaataagcagaaatttacaaggtattgagataagtatatatctatcaaaaatgaatacttaacttgttattaagttaaattgataaaccaatttaggatgtcccatagaaggaataaaaagacataattatgaattatgtattgtgggatcttatgatttggactgaatagtaacagttggacataccgagttaatacgctgtctatcagtatagacaatttatacaatatataaggatatggaattcatacgaaggactaatctaatcttgtgaaattccaaggttaatatctttgggtatggtgttaagaattaaagaaggttattgagaaccatggagattaaggcagaaatagtatgatgctttatttttgaaaggtgggtaacctgagaagatcattggaatattagaaatatgtcatgggtgtatttaataaaggttagattatcttagaataatctcttcccctgacaaagtgtttgtataaaagtgataattaaatgtaccactggttaggtacctggtacaagaaaaatattagatacttgttcacaggagtaaataggcttggtagcctattgttggaaatattttaccaagatctagatttacgaccaagtatgtttcattaacatcctaatatgaattctaaaacaatgaaaataacacatataaagtttagtaaaccttacattgggtgcagcgtaatataattagtccttccgttcagatctctagcccttgattcctttctatagcagagcataatcaagatcgaaacctggatctctttctctccttcttttgatgttgattctccttcttgttgtttggattcttcacaatcttacacactatgattgagatacaacttgatgtgtggggcactactctatcactcaaggctatttcgaaattgaagagaggaaaagagagagagatgggcggctatggctttctctgaaagaaacaatgtgcaagtcatagtttcctgaagccaacactttctatttatagaatgtcatctaggtttagg

SEQ ID NO: 349854 - DNA, 553 bp, Cannabis indica
gcaggaacaataatattaaaatataagtgcaagcttttcagagatcgtaccaaaaaagcgtgatcgcttttgagttcagaaatgaagatgaaatcaagcgagcacgaccgaaccggggctttaacttctagaactgtagaggtctgccccaaccctctacagttccaagcaatgcctctcattgttcctgtggaggagggctttccacctcctccataggggtaacaatgtcaacaggagcgcctacagcagagcccaaatcattaatgagaacatgattcttcttcgggatagcaatatcagccagtctagccttcttcttccaggctgagagtctcttggattggtatgtagagactggtttatcaacattctgtgagcgtccaacagagagattattggtggacactggggtgctctcatcatccataaacggctcatccgattcaccaaatccatcgttctccccagacactaccggattgatgccgcttggaccaacaccacgagggaaatcccaaaccacacttttcactcttctcatggtccattt

SEQ ID NO: 349855 - DNA, 601 bp, Cannabis indica
atataaagaaagtaaaagaaaaaagaaaaaagaaatgatgaattggatcataaactagatgaattcataataacttattacacaatgattatgcaaactaataattttttaaggtagttttttttttttttaattttggtttagtttgtatattaatgatcgggcattgttattgggtagtagtggtggtgtccaacatcttttataggtgtcactttatgattggtagcgatattctctaaatacttaattacaccaataacagtatgacaccgaagagaatgttaaacactaataatatcttttagcaattctatttataattacacttgtgttttgaggaataaacttttgtcattattttgtttcgatcatttttgtattgtttaaagttttataccatttagtgatcgtcgattattattttgttatagggtaaatactatttagatcctgtgttttacacaagttatcaattggaccctctgttttgttaaatgacaaaatagacactgaattgttcaaaattatacaaataggaccctaaattgattttttgtcaaaataaaacttaataataatctgatctagagatgttatg

SEQ ID NO: 349856 - DNA, 1012 bp, Cannabis indica
ttttaattaatcacgattttcataaacctcgttgattagcaacgagctgcactgtatgtttaaaaatcacgtaatacgcctatgctagttagggtgttacacttaatctctgaattgctgaagaaaaaccttaatttcttgttggcttctagggttcacgagagaaagagagagaaaggagaggaaaatatagattttttgctaattttcataatttaataatatgggataaacgaaactttatctaactaagttatcaaagaataatcataatatatctctcttaaaatcccactaagacaaaagtaacctagggcaaaagactactttacccatcactaaaccaaaagcttttaagtcacttaggggtattttggtcatttcataaatcccaactaatcgcgacattcccaatatctaatacatttccccacttctattaaaataccaaattgtgattctaatggccaaatgctgcatttcgatgttgccgggcacaaaacctgcaaaatagaaaaattcatatatggctttcaaatatatctccataaaatgataaatcataattattattctaattacgtaattaaatcctaattatctacgaatatccaaaaccaaactaagcggtctttacaattatccccccgttaaaaggattttgccctcgaaatctaattttaatagctatagatattgaccacccttatgtcggactctaagtcccaggtggcttcttgttgggttttgtgccctaaataaaacccattttaatataatcagatttactaattaataaagattagaaatcattttatgttgcatggttcacatgatttatttcatgattataaattctattaagtccagaacatatgtatttattcgtgattatagtgttgtcagcacagtggaatataatcatgattatatgctcaaaaagtttatttccgtgatttgtcagttcactggatttagactggcatgataatcagcgataggtatacttaca

SEQ ID NO: 349857 - DNA, 662 bp, Cannabis indica
ttatattaaaattggttttatttagggcacaaaacccaacaagatcatcccagcctccatgctagtccatcttcgactagtgacgatctttcgaattctagtttcaaagattgggaagtaagtagcgagcatacaccttcctcgaaacctgaggtgcaacactatttctatcctgaccaaattcatggcaaaggatacgaccatttcatctgggaacttaaaaaatgttggagatgctatctttttgctagctggacgtataaggtccatccgagcgtagttgacactttgcccatgggctgtccaattccagctactaaagtaaattctattgccaaatttactgtgactattgtaaggcacacttctaataaaacttcttccaaacgtaaaattatggcacaaaccaagcagactgtcaaaaaacctttatctgtcaaccctcatatcgcccatctagctactctggcccggaaaaaataggccccccctgcggttgaggaggaggagactattggagatgttgaagtccaggaggtggaagaccaaggtgaggtccgtcccacaactccttctaaggccaaaggcgatgaggaagagggggtagctcgtgcctttggtggcttcaacgaaaaaggagaacctgtttctgagacaggtga

SEQ ID NO: 349858 - DNA, 996 bp, Cannabis indica
aagacagtattttctgtaaataaaattaaaaaaataataaaaatatttaaatttctacaaaatcgtatttaagtaaatttttttttgttgtttttgtgtatttgtgaaataatcccatttttcaatttatttctattttgttttattttcaatttcaatttttttattagaaaaagagtaaataccattttagactctaagttttgcaaaagttactaatttgaccatttgttttgttaaatgacaaaatggattctgtattttccaaaaaagtataaattggaccttgaattgattttttgtcaaaataaaatataataataatctaatttagagttattatgacaaaaccaagtgtattttctgtatctgttcatgctagaaattatctttaaatttgttatattaaaaaaattatcgaaaattgtgcaagattatttatgcttaaggtcctaattaaaaggctctatttatttcaaatgttttttattattattattattttactacacaaaaactccttaagttaaaaaaaatgatattttctatatcttttatacacgttcaacaatacattgtttagagtttagaaaaaaaaagaatagaggtgctgccgccgtcgattatggattgtcgctttgttgatcatgtgtgattttgatcaccgcgtcaaaaaaaaaactaatgataattttgaaagtactagagaaaagatgtatattgttgtaagggattttttttttggactttgggctggatctaagcacaattctggtccaagctagttttatataaatagaagaggaaattacactctaatattaggggtaagttgaaaaatacatcttttattaatcaattaattaaatttacctctaattttatatttaattgaaacatatctctttttatatgtattgtatctaaaataccctgacataagagagtcacattgagagtatcttaaagtgacaggggcaaaattggtacaatgtt

SEQ ID NO: 349859 - DNA, 928 bp, Cannabis indica
tttgtactattttagaaaatacagggtccattttgtcatttaacaaaacacagggtccgattggtaacttttgcaaaacagaaggtccaaaatagtattcaccctttaaaatatagtgtaattactaaattgtgtaattaccaccctagtaattacactacctagtaattacatagttacttccaaacacaccctatgtgtcactctcatatttaatattaatatttaattaattcctcttatattatttttttaatatggaaagttacttattttcaaaaaataagttactaattaaatatatgatacactcttaataactctaaaaatgatttaaaaaataaaataaaataattatagtgcattgtaatttatcctctaaaaaaaattaaagaaaaactctaaataaattttttaataataaataaaaaacaaaaataaattacaatgcacaattacattaatagatatatcttacagtttgcaccgagatagtttatcttctcgttgaaactagtgtctaacaagaagaatttattgtaaaattgtgttccttctaaactccaatcgttaattatctaatgaaagagaaaacattttaacttcatcaatgaaagtcaccgaacaattaaaaaggtctatcaccaagtctttttattttttattttttgataaaaattctgacaccaaaatctcctacaaaagatatctataatacttctccttattagggtaattttatttattagggtaattttattttttggcagttattattttttttaaatcctatttaaagttaataggggtgtaccatatataatgatatcaaaaaaaaaatatatatatttaattaataaattttcttatttatttatttattttttttagattaagtaatttttcttatattgatatcacaaaatta

SEQ ID NO: 349860 - DNA, 519 bp, Cannabis indica
gagactctctatctcatccttcacatgacgacactcatatgtcatgtgcctgatgtctttgtggtacttacagtatctagttagatctcttttatgcctcgcgtgcctcatgggctcaggtttactaaatgcaaccttgtgctcatgcacgagatagatattttctcgagtttcattaagcttcttataaatggtgtaaacttgcacgtacttattgtacttcttttgtttcttcttgtctttagatgagcccttagagtcgtccttcttctttgaggcagaggcccctgggttatcagctttagtcgagacagtacttgttgaaatagtgcttggtttgattcctaagccagtttttaacaagttcatctctttttgagcttcttcctttcgaacaaacacttgagccctctcgttgaactcggtgatgtttttcactagacaaccctataggtcatcccacaattcacctccagtagtggagagattagtagtgatccctgcctgaagggcagtaag

SEQ ID NO: 349861 - DNA, 567 bp, Cannabis indica
tctcagtcctaatatgatatagaaacaatctatgcaagtaccaagtctatggtgccatacaagaaactattgcccatgaaaaaagacatgagcaaaagagatacaactaagttctatcattttcatgcggactatggccatgacacaaatgaacgtaaaaatttaaagcgagagattgagttcctgattaggaaaaataacccgcacttacaaaaatttgtcaaggccaaccaagaacaatgggccacctaggtagataataaccaaaaccaactaatgcccccaccaatgaatgggtatcttcaagtaatcattggggccccgtaccttgctggagactcaggaaaagctagataaaagtatgcctgagccttctaataaaaaaaaaatgatgcaatcctggtcgtcgacgaaagaaagcctaaagctccatgtgtaggaaaaccaataataacattcactgaagtagatgctagccatgtcattttttgacataacaaccctttggtggttgaagttcaaattacaaacaaaatggtggagcagactatggttgacaatggagct

SEQ ID NO: 349862 - DNA, 581 bp, Cannabis indica
tatttttttagatgaaatatcaaattcattgaataatttagcattctaaatacaaaagatgtaagagttcaccagaaatagaaatatcaaaaattctatgattagattgataccgagaatgtctagcaacataacgtgctactcgatttgttgatcgtctaataaaaaatttaacatttgggagggtagataacaaaagttggcagtctttgattaaaaggccgaaagtggacctcattgcttagttgcttctcatagcttgtactgaaacaagaatgtccgtctcaatttgaacatgttgccaattattggtcttcacccaactgagagcttctttaatcaccatggcttcaatgacttcagctgcatatcttccgccatggcaactcgcccatgctgcaacaaggtgaccaagatggtttcgggcaacaattctgaaaccatacttattgtcgctatcaaagagtgttgcatctacattaatcttaattgcgttttcagcgggtctagtccatgactcagcgccatcaccgatgctttcctgacagattgatgacaacaaaattgttggaaattatttt

SEQ ID NO: 349863 - DNA, 723 bp, Cannabis indica
cattacagtattgaaattatttatgtgtgagaccagatcaatagtcccaccatatgaagaaaagtgggggtttttgaatccttgaggaaaaggagtattcatgatgtctggatggtatggctcgagttcctcatctgagtcatatccagattttttccttgttccccaacttgatatttcctcaaacttatcctccaactcatctattcgcaattggatttgatcacgttgttggtgaagatcaggtttctcctagttcaagtgttctcgcaaatttggttggttataattgctagcagacctcgttctactcacggactttatcctactcattgatctcgtcttgctcatggaccatgttcttgagtaactggtagttttactcgtgcctgtgctttctcgatcatggttttaatgagtactttctttacatcccgtccttccccttggatggttcattgtgtgccccatgcgggggtttgtacatgccccttccctatttgcttgagaagaatgttggcaatgccccgttggtgaccttcgtgtcccaggctgagtccaaagattttcctcgttttcatgaggaatttcctgttccctgatttttggtcgccttctattctcattcttgtgagaaggctgtggctgatcatttggttgttcattttcaagaggaccctcagtttccccagaatgttcttcctaggcattctgagggttctc

SEQ ID NO: 349864 - DNA, 503 bp, Cannabis indica
aatgctatatgattaagtgtctagttatattaatgtgagttagggtttagggcaataagtgcataagtctggtattggtgcttaactcgctggggttgttgattacacgggtactagtaatggaccctctttaatcatccagaccacagggcgagttagtagagcatggtctagaccaaaccaatccatcgacactgcctccactgccgcagaatccggggaataatacgggggttggcaatgctaatccttctactgaggagggtgagcaatatatagtaaaagagcagaccgcaaaggatgtcgtcatggcatcgaatctgcctgctagtggtaacgtcagtaaggggaccgacagtggcaaccctgatcacaaacggaaggctgaggctttcagagtatcagggggtaatagaaagcgtcgcagaaattgaggtggccgtcaaggtcatggatcctctttcaagtcatatcttgaatgtccaaaatgtaagaatcaccat

SEQ ID NO: 349865 - DNA, 493 bp, Cannabis indica
actagtgatattgacttagaaagatacaaccgtaagattataatatcttaaccaagatcaatatccgccccagtccaatgtatactccatacatcagaaagtcgcatactttaccaatattctagaaagaacataacacttatgcaaagtgtaagtacacttcatcgctaattatcacatcactgtaaatccagtgcactgttgaatcagggagttcgtcttttgaagcattaatcacaatcacattccattgtgttgatctcactgtaattgtgaatgactatatgttctgaacttaacagattttgtatatattaaaccataaacatgaaaactaaatgtaaccttaaatgacttccaatctttcattgataacaaatcagattagattaaaatgggttttatttagggcataaaatcccaacacatggtccccatactagttgagaccatactgttggaatttattttaacaggatcttagatctactca

SEQ ID NO: 349866 - DNA, 547 bp, Cannabis indica
ggataatactcagcaaagtgaatcaattttcttttgtcaaaagcagaaaatgaatcaactggagacaaacatgcaagacaaagaagtaaatcagtattcacctcgttgaaacgatcattcaactcttgaatctgcatatcaatgatattgtaaaataactccactcgaaaataatgcaaatttgtaatctcttgagagttacgtcgtggtcgaccaagagctacaaatctatcatccatgtttggaatcattatattgtattttgtacaaaaagtagacacttgattaaaagtagaatcccatccatcatccctcataatttgtagtcattgcttgcataattttactaaattcatggcattaacaatatcttggtctttcctttgcaatgctattgataattcatttgtgattcctagtaaagttctcatcaaatggagactgaatacaaagtcgaatgagagcatcaagcgtaataagttatttgcttcagatctttgttcagaatttgctccatcatatgcaactatcccaagaacatcaatca

SEQ ID NO: 349867 - DNA, 778 bp, Cannabis indica
tcagggggaaatagaaagttttagggaaacaaaggtggccgttagggtcgcaggtcctcattccgatcatatcccgagtgtcctaaatgcaagaagcatcatcctggggagtgtcgagcgaaggcatgtttccaatgtggcatggtgggccactttatcagagattgtccccaagccaagaaagaagagcccaagaagaatactgctcagattccggggcgacttttcactttaactgaggctgacgctgatgctagtccgtcagttgtgacaggtcagttgtctattaatggttgtacttatactgtgttgattgattcgggagctactcattcttatgtatcgagtagagtgatagaaagttttcataagccatgtgataattatgcttcggggtttggaaccctgttaccctcgggagacctgatagtatccacaaggtggattcggtccttgtctttttggattgacggttgtgagttgaccgccaatctaattgagttacaattatctgattttgacataatcctgggaatggattttctgtctaagtatggagcgacgattgactgtaaacggaagatggtagtgtttgagcccgatagtgctaacccagcggtgttcgtgggtaaggttcaggggcacgcataccgagaatatcactgttgaaagctaaagacctgatgggtagaggttgtctggggttcatagtcactgcagtggataccagccaacctgtgacatcagggcctgaaaatatgagattggtatgcgagtt

SEQ ID NO: 349868 - DNA, 804 bp, Cannabis indica
aaaagttacaaatttgttactaaagagacaatatttaatcttgtgagggattgttatattatttataaatagtataatatatagactaaatatgggtaataaactaataatatgtaacatatgacaatatatattagttgccactattttataacatatgggggagttacttgttactatgagtaacctccacaactatcactaatattaagcgtgtaaaaaggtattacacatcttaatttgaaattcttaatgctataggagttatggtgtgcgtatttgttacatttgagtccataacatccatgggggttatgagcttaaatttcaaatggtaatatcctaaacactatataaagaggtataaggtgctcataatgagatgaatcaagtttctatcaacaaagcactttgcaaggaatcctaaaaggcttgataattttcaaagctatttcttagagagttaccttagtgcttagagataggagaaataaatttttggataaaagtgtaataccttattcaagtcttggtgatccccgctaatctacactcaaggttgagagtgagtatttttatacgtattcttcttattctacatttcttatatatatatatatatatcaatatacatataaatacatatatatgtagtgtagtatatgtttcgtaatatttatttaatttctttattggtcattgtattattttgcaatagagttgtaatgtcttgatttatttctattgtaataaaatctctaacaccggccccatctggcttcgggtattgaaattgtttcccac

SEQ ID NO: 349869 - DNA, 1039 bp, Cannabis indica
ttccattatcagacactatttttattggtattccaaatctgcaatgatgttcttgataacaaaatcaagaacttttttacaagttatggaaactagaggttcagcctcactactaactacccaaccagtactctttacttcaaatctgttggataactactaactacacgtgaacagattcaactacacttcaactgctctttacttctaccatttagatggttcatccaaatcacgtgtgggataatatctaacaactacccaacctctctttacttctatcctttagatggttattactgacgtggaaggttatatcttctctgatttgagttatcttgcatatccatcttgataagaaaataagctaagtgttgggaaggtttccatctcgctatattctctttgtgatatttgttatgcaaggtgaccttctcactatttgaaatgcgaggcatcttatgctgatacacccacttcgctcggatggatgaaggttcatttcttataagtatattttgaggcatgtatatgtctcgttaatctcagattaatagttactattcttgtctcgctattgactataaagtcaatgagttttgaatattatctatttaacctttaattaataaacgagttatttaatatgtattttgtaacaccctaactcttaggcacgctacccaagatgattaagaaaccctaatcccctaatcgggattactaataaaataagcgcgggaaaagttaaactttaaacgaaaacagaatgaaaataaacttgtaataattttaactttacaaaccaaagttacatgtttcgggatcccaaaaatattttacaaaatattacaagtctttacactagttggcctatgcagcaaaatagagttacaacagttcattcctggtagaccccaacccgcttggtctagtgtggcccgaacatgtacatacaccatccagctcctgcacacatgtctgatcagagacagatttaccctttcctacacagtagagcacccgtgagtcaagccca

SEQ ID NO: 349870 - DNA, 658 bp, Cannabis indica
catcaatattgttctgcgacaacaatgcagccgttcatatctcaaaaaacatatctactacgagcgcacaaaacatgtgaaaattgactgtcaccttatacgagaaaaagtcagcaatggccacatcaaaatgaatgacattgcttccaagtccaacataaccacatcctcaccaagtctctctttttcactcactttcacaatgttgtatccaagataaatgttagaaacctttatatttcattttgagagggcctattagacttaagtggataaattagttatgttagttataggaagttagttaggtagtttataacatcaagttggttaattgtcctaaccgactctacactgcctatatacttatattgctgccattgctatcatttgactcataattcaatatcaatgaaatctgaaagtcctaattactacaagttctaattgatgattcttaacagagtaattctatgttatgaactgaacttaaaatcaatgaatacagaatttacaagcttcctctgcattggaaacgcattccaaccgagtagtgcttggattcccttgaaccgggtatagtaactttcactaacaatcaattcaattacaaattccagttctgattcttcaaatcaaacaatgtaatctaaattga

SEQ ID NO: 349871 - DNA, 610 bp, Cannabis indica
gacctaagaaccaaaccatgacccagaccaagaccaggccatgtctcgagtgaaggactggtaccgaacaaggaccgggacctgcactcgggtgggacgctaacccagaccgagacctagcaccctgacctgaattggggatccagacccagtactcaggaccaaagacccaaacctgaacctgagacccgaaccaggacccaagacatgagatagaactagactaggatctagatttggactctagacaggacccaaggctcgaggcttggacccgacccatagtcagtgtctaaatctagaaattggaccttaacccggacccagacccgaaccaaaaccagaactcaaactagactcgacatgtggttggtgtttgaatttgggaccaagactcggacatgaacccaaacatggacctagacccaaaccaggactcagacccagaaccacactcgaaccttaaatcgtacccttaaaccctaaaccttaaaccctaaatcctaaactctttccacttatccctaaaccctaaaccctaaatccctaaacactaaacccaaaaccctaaaaccctaaaaccctaaatacccataccgagatcggaacc

SEQ ID NO: 349872 - DNA, 672 bp, Cannabis indica
tacccaacgtcacgattgcttttgaaccagctgacttggattttgaaataatgtgtaacgccctaactattaggcatgttacccaagatactttagaaactccaatcccctaaacgagattactaataagatcagcgcagaaattaaactttaaatacaaatggaatgaaaaataaacttgtaataatttaaactttacaaataaaagttacatgtatcgggattcgaaaaaaatattttacaaaatactgttacaagtccgtttccactagccgacctaagcggcaaaatagagtcaaaaaattcatcactggtagaccccaacccgcttggtctaatgtggcccgatcatgtacatacaccgtccagctcccatactcatggctgatcagtaacagatttaccctttcctacacagtagagcacccgtgagccaagcccagcaagacaatataacatatcaataaacatatttatcatactatataaacattaatgccattctcatatgtctgtatgttacgctcacatgcctatttatgtctatgtaacatagacctacgtattgcgctcacacgtctaaatataataaggccttagaacggtttatgtcggttctagttactaattctaacccaattatgacttgaacacattgttgggttttatgcc

SEQ ID NO: 349873 - DNA, 539 bp, Cannabis indica
atccatggaatatgtttgggtagactgttgctactactttctttatgcttttgtgctagtctgagatgattgtcatgcctgcgagtcaaagtttatcgaatatcagtttatgtctgttttaaccggtttttttgttactttttttttaaaacagttatttatgttaagtaagtctaacaacaatagaaaaactattacactaaagatgatgtatttgctgtaaatttctactttaaccagtttcttaccttctctttctctgaatgtttctcttagcttgtggaagaaccactcccatgatgaatcattctccgagtctcctattccaaatgccaatataaatatgtggttattagcatacattgttgatgttgtaaacaatgtccctccatatgttgtttttgttgggttttgtgccctaaataaaactcatttcaatataatcagatttactgattaataaagatcagaaataaacattttatgttacatggttcacatgatttatttcatgattatatatatataatgtatgaatt

SEQ ID NO: 349874 - DNA, 548 bp, Cannabis indica
ataaaatgttgatgtgaaaaatttcatgctgatctctagttaagagttggttgtgtacagtttgccaaagtataaatctgtgcttggggatgttatatctgttccaaacagctttgtagtactaatcttcctcacaagagaccatgttgttataaagaaacgttgccctgaatttgccattccttcctgcaatcataatcttctgttgtttgaagtctttccttaaatggcaaaccttcttccaatccagattgtatccactccaagcttgtagttccagatgtatctcctttcatatatacaacatgaattcatttgacccatagaacatcatgcttcttcataatagcctacaagaatttagccaaggtagccttgttccatttaattccttccctgaacccgagacctcctaggtgcttaggcctgcacactttctcccaagaaccaaagtggactttacaccgatacccagattgtccccaaaggaataatctgcaatgtttctcaatctctttgattacactttggggaagaacaaaaatgtt

SEQ ID NO: 349875 - DNA, 620 bp, Cannabis indica
atgttagttgataatggtggtatattaatactcttaggctacaacaaatcaagtttctagacttgcgttaatgctagaaagtctacttatgagatggtgattactctggggtggagcagtgatttttagaaaagtgtaaaaacttatctgaagtctctaactctaccagtgagactgaatgttaaagtggcccagaaggctactagataattatttagcctataaaacgttctatgtaatttttggtgttattccagtaatggattaagtactagttttacttcatgataatacagatatagttgccaaacagtaaagagtccaataccctaagaggagtaaacatgtagataaaaatttcacaatatttaggattttgttactaaggagatgtagagaaggttgatactgaatacaacctatcaaatcatattacacagataatactacatactacacttgatctggatatcaagatgttgagattaattgaaatgcacttttagttttatattagtgcaagtgagagtttattgggattttacaccctaaataaaactcatttcaatataatcagatttactaattaataaaatatcagaaatcattttatgttgcat

SEQ ID NO: 349876 - DNA, 571 bp, Cannabis indica
gttctacatagttcttgttttagtgagtaatcctccctaatggaggaacgttcattagcaatttaacgccgtagaatctcaaaagataagtattatttgtaagtgttttatttttagtatggatcaccctaatggtggtgactattagtaagacttacaaaagtatgaaacaatggtgggggttcatgaaatatgaatgcacttgactctcgcctaaacgggacaacgtcggattctcttttcgatcgaataaaaggttgctagaatctttatcattttagatgagttgactactcttttcaatggatgatgctttgactctcgcctaaacggaacactgaatcagtttgttgaaaaccttggaaaataaaaatatgtttcaatttttggtatttttataaacatatttgttatacttgttattttctgaatttgtatataaatttgttgaaccaagtgatttacttctgtttattgatgtttgtagtgccaaaattaataatccacaccccgaccactcctagttaatgcctttgtcaaatgaactctatagtgtgaaaatgcaccctgg

SEQ ID NO: 349877 - DNA, 1397 bp, Cannabis indica
atttttatttaacctaatataaatgtcagtttacaaaattttaagtaattttgtccaattgagaaaaaagaaaatagtaacatgtccaatgaaattgattagtttggttgggttaacttgtctaaaccaaccactaatatttttttacattcaattattatatttttgttaattataacaatgaaataaatatatatagattgaattcaaatttcaaatcaaacactataaaagaaacatattagtttcaattttatatgttttaaatcatcatattaattatatgatatataaatcctcttaattgggttagttaggttgattaagtgggtcggtattattttcaacctgcctaatataaagattgggtgagttatattttcgtcagatttttcgatttatatttttcgtcaggttatcttagtttagttttgagcgggttatttgggttagatggtttacaaaaaattatgtacaaccctagagattagagaaatactaaaaggcaccactgatgcctagtatcctctttggtgttatattgctattagtataataacttaagaaaataacttttaataaataagatatttactgaaaaaaaataaaactagtttatataaatatagtaaggaaacttaataagaaaaaatatggtatttaaaataaaaacttaacatatataacatgtgtcactttgaattaccataaaaaataataaaattctcttcatattatttaaaaaataaataaatgaaactacattgatcgccggagttgtcacaggtgccggaaaaggcgtcggggtagctgtcggtgccagaaaagtcgtcggagttgctgttggcgccagaaaagtcgtcggaattgatagtcgccagaaaaattattggaaaaatcaccaagaaactggcttcttcttcttgacgaagaaactaatttcttagtgatttttccagtgataatgccaatttcgacgagacgactttgacttttttgaagtttgctgtcgatgccagaatagtcgttagagtagctgtcggtgtcagaaaagtcgccgaagttgctggcggcatcagaaaagtcgtcgaaattggcgttgtcgctggaaaaatcacaaagaaagtgattttttcatcaagaaaccgatttcttcatcaagaaactagattcttgattttttgggtgattttttgagcgacaacgccaatttcaacaacttttttggcgtcggcaacaaatccaacgacttttttgacaccgagagctactccggcaattttctggcactagtagctactctggcgactttttggcattgatatctactccaacgacttttctggtaccgacagcaaactccaacgactttttcgacatcagtgacaaataaaact

SEQ ID NO: 349878 - DNA, 945 bp, Cannabis indica
cttcgcgcggcttagttctctagtttatatatatgatcttaaaaataaaaaagagttagtatacgttcttaattaattgtttaacttgattatttatgattaaatagtagagtttgttttacttatacttatacgacgaagtataattttttaaaaaaaaaattatatgaaaaatataggtatactactgaactcaaccaataaaaatttcttatttttttattataatttagagattttttttattagaaaatttgataaatatctttaaaaaaaaaatgataaataggttagactaatgaccagaaataaatacataataaaattagaaaattcaatattgttaatgctaataaaaaaaaaataaaaaaaacatgttctttggttaactttttgattatatataaaacatgcttttgataagcgtgagtactattttttttttctgtactccctaatctcaagaccatgtgaagtaatgcaatatatatttatatgaaatacgggtattacctattaatggctaataaacaagtttaattacatattaaaattaaatattaattttaaaaatattaaggaataattacacaatgcactattttttgtaaaatacttacattttaacgttcaaagaatatttttttacatttttacagttttccaagaaataacacgaaaacaatataaaataaacaagaaaactacataaaactaacattaaaataacatcaaaataacaacaaaaaataacatacatattaggggtgttcgcggtgcgggtggtgcagtttttaaccattttttcaaaccaaaccgcacccgcaccgcgatactaaaaaatcgcaaaaactgcaccgcaaaaaatgatgcggtgcggtgcggtttttgcggtttatgcggtttgaactatcacaatttcttttttgaaatcatcataaaata

SEQ ID NO: 349879 - DNA, 764 bp, Cannabis indica
gatttggcctaagggaacgctcgtagaggacctccctggggttaccgtcaggtcaggtgcctgaggccaggcggggtcgggactgtaagtctgggcaagagtcgccaaaagctcgtccatttgcctagctgtttcaagaaacaaacaaacaagtgtcagaatggtcacgagaaattatgcacacaagaacaaaggagtagaactaatcctacccagaaaatctaatttagccctagcaaagtcctgcactataatactagcttcgtcatccccaagaaagttgtccgaggggagaaactagctagaagacagataagctaaatgatccagaaggataggtgcgggagacccagaccccatccgtgaccggcctagaaaatgacctaggtttgaaaaataaaagcccttggcatgatcaccccatcgggtagggggcatcttaaatctaaggagacgctcatcaaactctataggtctacattgagaataatcttgagcagaagggacatgacaaacaactaagggagacttaccaaatccggaggtgctggcgtcaggagccccagtgttgggaaccaggaccagcagcttaggccgggaaggcacccgctctttaccagcctctacctggaggatcctcccggaagaggcttgagccttaatgtaaagcccgcttagttaatttgggaaattagcagatgtttatgtttaattatgaaattatttatagctatttaaataatttatgctgttatttatggaat

SEQ ID NO: 349880 - DNA, 493 bp, Cannabis indica
tctctctctctctctttccctagagcaggtagggtttgattttgttcttcagtaattcagagatttctagcaagtttctagtgttccaatccaaggtataactcccttagactctcctctttgtttattttatgtttttagttgagttcaagcatgtttttcttgagatagggttctgtagtagtgagtgatgtgtgtagttgttttctaaagtttagttaagattttttttataatgaattgaagtggtgttaggggctgttgtggtgtttgagcaagctttgagtttaagaattcaagctttgctctctaatggtgttttatgattttgagcatgttaggttgttttattgccttgtttatgttccttgggatatattgaacatgtctgaaagattttggttgagtttggggttgatttgagtgagttgtgaatttttgaagttttcctacattgaagttttcagtgggacctgtaggaaccggaattctg

SEQ ID NO: 349881 - DNA, 579 bp, Cannabis indica
agttcaaagatcattaagttgattttttgaattatatccaaacttacctccccagaatatcgatttgtaatttgatgatagtataaggtgtatgattagttactagtcgttgcctaagtccttctaaggtgaatttaagaatgatggaatggttgtgtacttagtgtaaaccattactagattcatggatgacctaatcataatcttaagaaaaagctagaactgttaaccaaggtttgcatgtttgatagctattctaagtgattaggggtggaccatcccatagttattagataagaaagtgtgttttaacaaatactacttttccaaaggaaatgactaagtctgaaaacaaagtagcaaataaaggagatatttttcttgattccaaaagtgttctatcaacttattctgtataaggtggtctcactgcctctgttgccttaacacaaccgaagaggataattccacttatgttcttagacaaaaagtcacggtaccttgtcatagtcggagagtttcaaggaacttactctgttatgacttggaagtcaccggtgattaaaatccattgttagt

SEQ ID NO: 349882 - DNA, 929 bp, Cannabis indica
tttttgtgatatttagggtatttccatgttgttttgataggaaaacttttagtttcaagtttaagtccccgaaaagtaatttagcgtgtcactcaccagttttacgaataatgtgatttaggggcatgtaattcgtcgagcagctgttccactcaggttggccgacacacctgaattcggaaacgagataagattagtataatgatatgcatatgtatttacatgtttagtgtgcatgttagttaagcctgttagattacattagaaatgtatgttggcttaagtactattcgacagtatcacatcggtacggctacagtacgactagcgtactgagtatagactgatattatggtcgatagtactgtactacttgacagtatcacattggtacgactagttgaacgactagcaaactgagtatatgatgatattatggtcaatagtactgccgtacgaacgttctagactcaacaccgtgttggacacggagatatgattatgattgggggtatgggagcctgatcataatccaggatactgctatgttattatttatgattttcttactgagtctgtcgactcacatttattatttgcatgtgtaggtaagggcaaggctaagggtgagtagccgtgagagcgagcagatggagattgtacatgtcggggcagttaggcctggagcatacaatctttgggacatcagggattattttgtatagtcgctaggcgacgaacttttgtgtatgcacaatgaaaattttgtaaatatttttataaacgggatcccaattttatataagtatgttattttaatgtttataattaattaagcaaaattttaattaatcactattttcaataaactcgttgattagcaacgagctgcacaattagttaaaaatcacgttaacatgcctaatata

SEQ ID NO: 349883 - DNA, 564 bp, Cannabis indica
agaatgtaataactctaatgatgaaagttatgagagttattggtacaataaaggagggtcattagttgaatacaaggaagataatgagtccacaattgaagatcaagatccttttgaggtggtatttactcaaaatttggctacatcagattcttacttgttaaataatgaatgtcgtgaagtgaatgaaattatggaagagaatgaattcatccatgatcaggaaatcattgaatatgaaatcacaagtgagggtatggatagccacgtggagagtgagcaacaagaagaagggttgttagatgaaagagtagatattgtgacattggaggatgaggaagcacatgacatcattgattaaacttcatcaatgatattgacgaataaactgccaatggatccatatatgtcatcaacaccatattatatcctctacgagctacaaaatgcttctccccaagctcatcatccaaagtcttatgttgttggtgctaactttggtccaaactcatcgcttgccaaacttgaaggcaagtactgttggaatttattttaccaggatct

SEQ ID NO: 349884 - DNA, 2169 bp, Cannabis indica
aacattaaatgttatttctgatctatattaataagtaaatctgactatattgaaatgagttttatttagggcataaaacccaacactaggttggagtcttggtcatagtccgactacggttccgggtcatggtccaggtcttgttacggttccaagtccagattcaagtcctggttctagtccctttcccaggtcctggtctacttccagtttcggttccaattttatgtcatagggtacgggtttgtgtccaggttttggtatggtgctgggtttcggtccgtatctgggttcgggtccgaggctggtcccagatctagacaccaactacgggttcggtccatgccccggttgcagatctagatcccgatctcgggtcccgacctgattccattttggctgccgggtcacgagctgggtcctaggttcaactcaaggtctagggtccggtattgggtcccggtcctagtttcgctgcccaagtccctatcctaattttaggtcaaggtcccagtttttgtcgggtttttcgtccctatctaggtgcgggtttgagtcctagtcacgattcgggtttgggtctcggtctacgtttttaattaggtttgggttcgggtctgggtgtttgtcgtggtcctagtcctagtccttgtccggttctagttctagttgcgattccgagtttgagtttgggttagagtttgggtcgtggttcgagttcgggtcagcgttcgagtgctggtccgagtttgggttcaggttcgaatcaggctacggctgtgggttagggtcctaggtctgggtccaagttcgggttcgagtcccaggttttgatctcgatctaagtcagggtttagttccgggtctaggtcctaggttccgatcccggtctgggttcgagtataggtcttggtgcagttctaggtttgggtctaattttcggtttgggtctgagttcgagtcccgggttcgggtttgattttgtgttcaggtctaggttcgggtttgatcctagtatggattcgtgtccaggttcttgtcatgatttgggcccagggcaggtttttgttctgggtctgggtctgactttgaattcctgggtccaagtcaggtcctggttcgggttcgaatctcggatttagatctaggtttgggtttcgaggcctgtgtccctggtctatgtcccccatctatgtctggttcctaggtcttggtttgggtctgggttcgagtccaggtcttggtcccaatcatggtctgggttcaggttcaagtccttgtcagggtttggatcctggtctaggtcgtgggtctcaggttccagcgagggtttaggaccaggtcgagtacaggtcccggtgtaggttcgggtcccaagtctcaggtccctgtctattcaaggtctctgtccaagttcttatctgaattttggttatggtttgggttcggttctgctctcagctatgggttctagtcatagttccaattctgattccgggcctgggttttgttctgggtccgggtttaggtcgaggttgtggtcgcggtatgagtcttagtttgagtccgggtgacgggtttttcagattccaattttggtcgaggttcgtgtctctggtcagggtctgcgtttggtggtccaggccctgtgttttaatcatggtttgggtctgagtcggtattccggtccgggtatgggttcgtgtcaatgtcctggtctgaatcccaattgaggttaggggcttggtctaggtccaggatcgagtcccgagttcgagttcgagttcaggttcaagtcttaatcttagtctgggtcagggactgagttcgagcacgagtttcggggctgggtttttgtctaaatttggttcccagtcttggtccagatcctggtcactatcccgatcatgttccaaggtcctgataacgttttggttcagttttcggttttgggtcccaggtttgggtttgggtctaggtcctgctccagcttcgggtccttctttgagtccccgatcaagacaccgactatgggtattgtccaagccccggttcccacatcccaggacaagatttggatcccattcacgggatccagtctggtttcggttcatgtcccagatctcgatctgggtcttggtctagctctgagaccgagacttgggtgca

SEQ ID NO: 349885 - DNA, 718 bp, Cannabis indica
agctgtgctttgagcaatggccacaggattcggtgtccacaattaatcgtatatgtctggcagccactttacccacgtgtacggacactttttttataatactttttctgaggggacctatttatcaaaattcaataataactaaataattttgagatttttgtcaataaaaaatacaaaataaataggagtctcccccgtttaagacttagagtatttttaatagtagcattttaaaaatgcgtaataagatggaatgagtgataaaatacaaggatgttatacattaaaaataaaataatattattcttgaaatttatattaatgtcacacaacgacgttaattttatatttttttaaaaaaaatataatttaagttgcaatatagacatgggatatgattttgttccgttattgtacttttacggattgtaattcatgatgtacggcagctgtcagatgagggagttatttgatctgacggctgagattgatctaggggtaattagggctaaaaaatagaaatgtaccctgacactcatttaatgtaccttgagacccatctaatgtaccatgaaatacattccgtgaaagtacatcatgagataaaatcatatccctatatatataatagtttaataaagaaaaatatttatatatataataatgtgtgaaattattattagagaaattatctcatatactatttttttaactt

SEQ ID NO: 349886 - DNA, 816 bp, Cannabis indica
tctctctcttccctctctcttccgctctctctctctcttccctctcgtgcacctctctctctctagaaaaaactaactgaaaaagcttccctctctctcttccctgtcgaatgtttatttctcggtgggcggtgttggaaaaccggagcacaccccaatcactcaagaatcttacaccattataatggataagttgtgttttaagcattttgttagactttatgtagtttgcgttcgttatatgtgtcgtatttgttgaaactggtattttttggtttgaaatggtagagatcttgcagatctagttttctgtcgaaatctgggttttccagatgttatcgacagtttatcgatagaatatcgatgctatgtcgatatcctgctaagaaaggtcagggatgaccattatcgacatgttgtcgacagtttgtcgatatcatgtcgattaaaaagcaaattaacatacataagttatttgagaatttgtcgacacaaaattgttgacacactatcgacatgatgtcgacattcaatcgatatcacacttagcaatcacagaaagcaattacatcacattgtcgccaacatatcgacatactgtcgacatgctgtcgatattccaagtatgatcacgcctatttagcaaacaaaattgtcgacacaatgtcgacatcatgtcgacatgaggtcgatattatcacacagaaagcaattaaatcacattgtcgacaaaatatcgacataccgtcgacaaattatcgacattttaggtcaaattttttttattctcattgtgtcgacatcctatcgatatac

SEQ ID NO: 349887 - DNA, 534 bp, Cannabis indica
actcatcttgtgttcttttgtagatgaaccctggtaagttttggagaggagaacatcatatcgaccaggatcttctccaacttctgtacgaggaccaacctcgtctttgcgctagtccgtcctcatcaagcgacgaactttctaattcaagtttagaggattattgggaggtgagcagtgaaggtacaccttccccataactcgaggtgcaatatcatttctatcccgaccaaattacaggtgaaggctacggatgcttcatttcggaactcagaaaggggtggagacgatacttgccgtccagctagacatactttttctgggtagacgtagttgatcccatcctcgtgggccgtccaagtaccgatacctttggcattcctattgcaacttctgccataactgttgctacgcataccaaccaaatatcgtccagggataggatgatgactcgcacaaaacaaactatgcggagaattattgcgactgatcctcacgtggcttggcttgccacgatgctgagcgctgaacagg

SEQ ID NO: 349888 - DNA, 853 bp, Cannabis indica
tcgggctaccatcagactatcatcggacctccatcttcaacctttactcattttaacaacaagaaggcttcagatcactatcagaccactatcgagtctgaaaaaaaaaaaaaaaaaaactagttttttgccaaaaaactcagatttgaccattttcgaccgtaaatctaatatctactcacagatagcaaacattaatcatacaatttattcatttgacaatattgtcgatggtgaagctgtggttgatagagaagtcgttgggtctgcgatggtcattgggtccttgggtctgtgttcgtggagagaagggaccaaggttgtgggtggtgggttgtgggttgattgtgtgctcctccgtgtgcgtgtttacatagagagaggggggagggttgttcaaatgagaggggtagaacagagttttaggaaaaaaagacatattctactaatattgaatagtttaggtttaaaaaaaaaataattgtccaataaatgcatagtttgtcaaatttcacaaaataatatatgttttactaatgtattttttatgaatatttacaccaaatactaacttcttttcaaactttactttacatttatactttaacaaataaatttttacatttatatttttcttacctatttttttttctttttttattgttttactgattttaacttattaaagcttcttaattttattcttcttcaaatcttttttttattcaatattggctgatttgttttttttttaagttcagttgatttttgttttgtttttctctttctcttctccctccatttctttttttttttttctaattctcttttttttttcttcaaattatttttt

SEQ ID NO: 349889 - DNA, 2631 bp, Cannabis indica
tttatttcatcgttttagaaggtccatatttagggtgttaatcaacatacttgtgagtagatctaagatccaggtaaaataatttccaacatgtgattgctagaaatgttatatttaatgagttagaatatcctcacttaacctccatgaagggtattgtgtcttcctgtgttacaggaaaaataggaaacaaagacactgcgagtatggaagtggagtacaaaacaaagctctcaaaagaaggttcacaagcggaagacagtgtggaactggaagacaatgcacagccaaaagctattgtggagccggaagaacaagataacgaagaccaaacagagctgccaggagggttcggacatatagttctggaaggttatcagttggctcgtgatagaactcagagagagattcaacctctggcaaggtttgctgaagcagacataatagcttttgcactggtggtagttcaacagactaaaattgaagagcccaaaggctattaagaggccatttcaggtggaaacaagtctaaatggctttaggccatggatgaggagatggattctctatggaagaacaagacttggatagttgtgccaaagtcaaagaacaagaagattatggagtgcaaagggattctcaaggtaaaagagggaattaatgagaatgaaccagtaaggttcgaagccaaggctaagggttttactcaggtggaaggtatagactacatggaaatcttctcactagtgttaaaatacaagacgataaggttgatgctgtccctaacaacatatctagagtttgaagttgaacaacttgatgttatgactacttttctaaatggattcttggatgaagagatctataataagcaaccacctgggttttaggtggaacgggaaagagttgaattagtgtgcaagcttgatagaactttgtatggcttaaaacagtccctaagacaatggaatacaagattcgatacatacaagcatcaaattaggtttaagcaatccacatacgatcaccgcttatatttcaagaatctggagcaatctatagtcgtgttcttattgctctaactagatgatatgctcatcatgagtaaagataaattagtgatcaaaagtatcaaagccaagctcaagttagaatttgagatgaaagagcttggaccaatttaaaagatacttgggatcaaagtctcatggaactagaaggaagggactatcaacttgaagcagtttgggtacatcaagaaaattattcaaaagtttaacatggaagatgcaaagagtacattcgttcctttagggggacaatttcttttgtccaaggaacatatgtcctaacaatacaaaagagaaagaagagatgaatgatgtaccttatgcagtggttctaggatgtttaatgtacgtgatggtgagcacgagattggacatagctcacgctttgagcatcctaagccagttcatgtccaatctgggcatggaacattagaaagcccttaaatggttatcaagacatttgaagagcacatgggattatggtctggcctatgagaaaggaaaaggagaattggagttgaaaggttcatggatgcggactatgcgtcaaatagagataccaaaaaattaaccacttcctacgttttcttgacaaaccaaaactgtataagttggaaggcctaattacagtccatggttgctatttccaccaaaaaagtagaatttatggcgactacggaagcttttaaggaagcattatggcttcagggagttctttatcagttgaaacaaatcaaaggaggagtgactgtgtatttggatagccaatcatccatccatctttgtaagaatttggtttatcttgaaaaagcaagcacatagatataagactctactcgatcagggagaagttagaagaagggttggttgatttagagaaggtcagaacggaagataatcctgctaatattgggacaaaggtcttaaacttaaacaagttcaagcattgtatgaacttgatcaatctcagaagttagtatactgagattcctggaataccaaccaatgatggttgcattctttcttcatcatcgttattcttttaacttgaagtaactaggtggaatttgtggtatagttcctctaaatgaaaaggtctccaatatcattcctagaaagtaaagtttctacctgaccttgttatcgtacaactaacttatccatcctaaaaagagtcttgtggaatgatagtcgtgtctggatgggagttctcagatgactatcatgtccactccgagttcagtcttcaagataactagcccttccctggaaaggagttccagttggctagttgtcactcctagaatggtagatccaaatattcgactccaacagactctatcctttgtggaagcatcttcagcgagagtccgtggtccttgagtccgggtgctcatatataatccaagaggctctattacttaagccgacatggagacttcgctcaaagaggaggtggttaagttagttatttctaactaagttaacaaccttgttcttgcagccaccgactttaggatcttgatcctaagcctataaataccaccttcacttatccttt

SEQ ID NO: 349890 - DNA, 549 bp, Cannabis indica
aacacatccaaatcaacacaataaacaaaattcttcgttttcaatccatattttatgaaagtaaatcatcaccatggctttgaggcaagttgttgggaatattttacaaacatctagatttactaacaagtgggttgattaacatcctaaatatgaatatctctaaaataatgaaattaaacacataagagtttagaaaaccttccattggttgcagcagcatataatgactccttctgttcagatcttaaacccttgttcctttctgttgcagagtattattaagattagagcctggatctctttctctcctttgggtttggttaccaacatcttactcactatgatttgagtacatgacttgctatgtctgggcatgacactctatcactaagagtgaatggtgaagaacaataaaggacgtgcaaataactaagaaaatgtgtctctcatctactaggttagaaactttggcaggttgaaagagttagatgagatgggagcatcatgttcgtaaggttactatttcaactagggcttagggctgaa

SEQ ID NO: 349891 - DNA, 655 bp, Cannabis indica
agttgttaagtttgttaaatactgttcattaaagcatctcatgctaatgtaacagttaaaaaataactgatcacatgatactagtaatagtattattaatggctattattactaccatgagatgtcacatatatatatttatttaataattattatagaattaatatttataaccattcctaaaatattacctcgtagtggtgttaagtaacactaattttaatataaattaaacctaaatgatggatcaatgcgttttttttagataagcattcatagattcaaataaaagttaaacctcttaatctttacagaatatataatagttataagcataaacttatttagccacagagtaacaaaattataaatttacttaaaacttaaaactgatccaagttaatattaccatcagttaaccttaagagagtgagaccttttgtaaaaaggacccaaacccattaattaagtaaacatgctattaccatatattggttgaatttcagattctcattcccattaagtttaaccctcgattgtaccaaatacgtatattactataaaagcacttacttttagtaataattttaatcacaatataaatgtttttttgtgactaaatgtaatttttcgtcacaacaaaaaattatttgtg

SEQ ID NO: 349892 - DNA, 911 bp, Cannabis indica
attttcaatagaggcctctggatggaagaattgaccaagaaaggagcatcaacagctggaagagttgagtcctctaagctctcaccttctgggagggaagttccaggatcgaactccttagctgctctagcgacctttacaacttcctcagcttcagctaactgaagaatttgaggcatcatctgttctttgctgtcctcatctaacaaatctattatggacttattgggcttccaaatggtatacagagaaaacaccaaggtctgcttcaacgccttcgacatcctaacttcatgatcatgtttttcatgggaaagtgcttggtgttggttctccaactaatctgaagcattttttttggattcctcatgatcatcttattctcaaaccaatgcttatttggtagagcctagcttagcttcagtgtcctccaacttcttaagagcatctttttcagcatgctccaccttctcctacaaatctgaatggtgttttatctttttatcaatatatagttgcagcataaacaatcttgtcgttcaataggtgattttagttgtcatactcttgagaaaaaaaattattctttcactccaagtttgtgaggtcctgcttagctttctccaagatctgttctagatcagtgatccgagccaccttgaaacactgccaagggtagggatagaagttgtatgtgaaaattcagacaaatctatttttatttgtcatttgtcaaaatagtaattatttatttagaaatgaatattttaaatttataattttaataaattgggaaaaagataaaagttgtttggacaaaaagacaataccattgtcttgttaagaaataggtggcgccactatcactgtgtcctgacatagtgacaggctccggttgtccccactggatt

SEQ ID NO: 349893 - DNA, 711 bp, Cannabis indica
ttaattataattaaataattctaaaaaaggaatgtctatttaattaattattttaaaaaaatagttaattataattaattaaatctaaaaaaggaaagtctacctattagtaacctgctattacaggttaatgaaaaataaccatatggttacaataaaaatgtaaccattgaatagtcacccatataagtatatatataataagtgtacatttttatatctcattttttccacactctttttctctcttacgaaaaaattaagagcactgctcctatatttttctatcttttacatgattaataaaagtagtatattttttttttgaatgttttgtagtttatttagagttataatctatggatgatttgtatattttaacaagattgatatcttgatatttttcttttaatttataactgttataaatattaatagggtaaattgcggcataaataattaatgtttcagattttatacacttaaatacctaatgtttatttttggagacaaaaatacctaatgttacaattctcttacactgttactaccacttccgttaaatcatggacacgtggagcgttcagatgcattacatttatttttattttatttttaaaacttaatattcttaacatcagaaactaaatgctacttgtttaaaaaaaaacctgttctcataacaatatttacatgatattggcacttcaa

SEQ ID NO: 349894 - DNA, 910 bp, Cannabis indica
aagccaagacactattgaaatactactactacaaaattggactttagaggtaatttttaaggtctttcagcgtcggttttggctaaattcgctaccgacgttgttccaggcgacgttgtaggttaaaaataactgatgctgtagggaccctatagagtcagctattatgaaataaccgataccgtagggtccctatgttagtcaaaacatgaattgagtatgtttgaaaataaggtcttagcttccttgagacatgaattagactaagtgcgagtttttcgagaggtgggtatctatatactgcctccaataaatgattacatacgtaatatactggtaatttggtctttccttcttctcgcactaatactgcgcttattgcactttctaatactgaaaatacacatacaggatctcgccagtcactggctttgaaagtaatgtcggatttgataactgttcttcaatctcttgaaatgccttctcacactattctgtctattcaaatcttttgttgtctcgcaatacgttaaaaaatagtagacacttatttgttgattttaaaatgaatctatttaatgctgccatttttccagtcaatgcatgattggacttcttttgatttttttagtgaaggcatgtcgagtagaacttttatcttttctggatttgtttcaattcctctcgcattcactatgaagctaagaaattttctagaagaaactccaaatgatcactttttttggatttaacttcattttgtattttcttaggactgaaaaacattctacgagatcgactgttatattatttaataatataatatgtagattaaattgtggtgatatatattattatgtgaataatatatattaggtgtttggtaaataaattgtgtaacatataattt

SEQ ID NO: 349895 - DNA, 559 bp, Cannabis indica
ttatcaataaaggaacaaaattattttattattacttgtttaatatattgcttagtgttgatctcaaaaagtaatcaaccgacagtggggtcgtatgtatctgatgcttgccacgtgttacacaaatagaatgaaaaattaaagaacacacatttgttatagaggtttggccccctttgatagtgggtaatgacctactctccttttagctgtattaatactgagggttaatactatttagatcactataggtgggatctcatatagcacccttaaggatacaaagtataaattaggattggcaaatcttaagtgatgagaatgcttgtatgggcgtgtgagagaaaatagagaagaggagagttatcaaacttaggcttagagcttggaggctagtattaggcttaaactgaacttaagttttctaggttagaattaaggcctttatataggaagcctaaaaccctcatttacacttcaaaaccctagatatttgtatattaaattaattaattacaaaagacaaaatacccttgaacatagatattattcaactatt

SEQ ID NO: 349896 - DNA, 950 bp, Cannabis indica
ggaaacccgaacttacacataattgcccgcaagaaactccactccactctatcatacgccttactcatatccagcttcaaagccataaatccccggacaccattattcttcttaaatagggaatgtagcaattcaaaccccaccataacattatcatgaatagctcgacccggcacaaacgcactctgaaatgaagagatcagcggagataaagtacctttcaatcgcaaggccacggccttcgccacaatcttatacataacactgcagagactaataggccgatattccttaacaaaagaaggctttgtaattttaggaatcatcacaacattagacttgttgaactttctcacagattggtgaccatttaaaattgcaagacacacagctgacacccttggaccaataatatcccaatatctctgaaagaagatagcatgaaacccatccggacccggagccttcgtagacccaatggctttgaccgcagcccacacatcatcacccgtaaaaggagcattaagcatgtcgcactcttccggagaaattcttgtttcaatattggtaatcccatccgccacttgctgcatggaaggagaagccgaggaaaaaatggtgccaaagtatcgttcaatttcactaacaatatcctcttccgtactcagtctacggccatcctcagtcataatctctactatagcatttttcttcttcctacccgtcgctttattgtgaaaatatttagtattcaaaattaaaggaatcatcacaattgaaagctttaaaggtttgtgattttagttttcaaaattaaattttaaaaaatgagaataaaaaattgttgaaaaaaatgagaataaaaataattttatcattttaaaaatttaatagtggttgacacaaatttttaataactatttttagtatgtttttttacttaaaaaaaa

SEQ ID NO: 349897 - DNA, 638 bp, Cannabis indica
aacatacatgaatataaaaagaataaaaaaaatttctagatgccgaaacaagtactagagggtgcatcagtacatcctttttaagaaggtgcattgtagaatcacccaaaagtattattggtgtctagcaagtgttatattgttattggtattattaagtatcggttttagagaatattgttaatcaatcgtgtagcgccacctatgaaaggtgctggccacgccacatgatgtccaataataatgctcaataataaaagagcatgtgtctaatactatactcatgtgatatgtttttagtagttttttatattatgtattaaataaaaatatatggaacctaatactaatttgaaaaggcaatatatatatgtcaccggtgcttaacatcaggaaattagacaaacgctgttctctatgggaagcttgaaggcaccgggtccggatggtatgtcagttctcttcttcaaacactattggaactctgtgggacaagacttttgtgatgcagttgttgacttcttccagtcagggagtatgcatagaggctttaatgctacaaatattactctcattcctaaggtcaccaaccctaaaaaagtatctcaattcagacctatctctttgtgcaatgtgat

SEQ ID NO: 349898 - DNA, 892 bp, Cannabis indica
tttgattaattgatgaataaaagatgcatttttcaacttaccccttttatttttctcaaatgtctgaaaaggtagtttgataaacataattctaattagtgggctctacaggtttcaaatttatcattttatttttaacaacttatttttttttcacaaatgtcatattttaattctaatcctataaatgtcaatgtcaaatctatctatttaataattataattaattgcaaaataaaattgtcatttaacttatttattaattataccttacaagtctcttaattaacaaaacaactctaaaacaacttaacaaacaatatgaaaataattataaaacaacaaaaagataactacaaagtaacaagaaaataacaaaataatgacataattgaaatatacaaaagaatatcaactcttcaatatgtttttgtattacaatttttttacttaattttgacaatttgatttttttttttttgtactactacattatttttctcatgaaatttcttgttacaactttatactttcaattttttttttctttttttctttttgtagttggtgatagttaaaatgataatttattttttaaaagttaaataaataattacattaacaataaaaataataaaatcttatgatttcaaaatggagtacataatataataggtaatgtataattaatatatcaatatcttctactataaattgtgtcaattaaaaaaaaaaacttaatcatataaactaaatgatgtatgtatctaaaattctaaaccacaaaataacatatatatacaactaaaaaaattaatcaaaaaaaagttaaaaataatacactataaaaaaataacacataaataaaaaattaaactaaaaaaataataat

SEQ ID NO: 349899 - DNA, 952 bp, Cannabis indica
caactgtcaattagttactttcaatttttactgtttgtttccgtgtaactaattctgttacaatttttgtattctttcttgttgggtccctctgtaaatctcactctttaaataaatgaaatggttcttctctttggcttaacctttacaagccttagagacattgtattcaatagttttctgtttaatgcttagtattgataggttcatacaaagtgatgttagacaatggcgaattttatgtgatttgtgtgcttgactcctatgtgaatcactattttgatttacgctatatttcactttatgcatgattgaattcaccactgcaatattttgaaaaagattcatgcttcttaaaaaaaaaataaagttattgatgtcccgaccactctagaaactattgattagaaggatgattaaggcaattctttggatcgtttaaaatttttgtagcctacctttgtaattgttattccttagttttttatctttgagccataataactgttaattttcttgtgtaaccaaaaatccttaaccccatatctcattaaaaaaattaatcttttttgttgatccattgcactatggctatatgcatatatgatttttaattttgtgggataatttgtaaaaaaaaaatacttatgggttaattgtttagtattactaatttctgagtgatctcttatttcttttcttagaaatatcgacaaaaaaaaaaaaaaaaaaaaaaaaaaaaaacaatctacgattattacaaaaaaaaaatacttatgcgaaagaatttgtaaaaagaagaatgaaaagtaagtatttctcgaattgtatggaaaaatttgaaagacattcaaagaataaaattgatgtatgttgtggtgtaattattttaggtgtaaaactaatattgtgaattcttgttacaatataatatggatcactatattgttga

SEQ ID NO: 349900 - DNA, 574 bp, Cannabis indica
aaataaaaaattgaaaacatcaaataaatgatgaaagagaagaactaatgaagacgatggttgtgcttgaaaatcttctttttttctctctaactttcttgtctcctaagttccctaatgaaaagccccatttctccttcgaaattagggatcaaataccctatttaatatggtttatctaagcagtcatttgagtgccctctaatggtttatcccaagatttgacatgaacctactcaatatgcttaaagcatgagcaatgtcaggtcatgtgctaatcatgacatacatgagacaccccaaagccattgcatatggactttcttccatctcttctttctcttttactatcatagggctttcttccttggttaatacaatccatgaggtactgaagtgctcttagaatattgcatcttaaactttgttaggatcttctcaatgtagttcctttgctttaaaagcatgactccatcactcttggatctatgaacttttaaaccaagtattatctttacttgtcccaattctttcatgtcaaattctgtcttgagtttatctttaattcctttga

SEQ ID NO: 349901 - DNA, 608 bp, Cannabis indica
ataactagttaaaaaaactagttaacatacaatgtatgttacccacatgactctatttttatcctcgttctcttttcttatgttttgaagtttcatatctgataattgtaactagctagtttatgtagctggtttttcaatgtcaaattgtttactagctgataattgtaactggtttcttaatgtaagattttagtatattaaattttaatttgttcactttacgaaactatttttttttattttgatgtaatggggttgctccattctttgtagtattttgtctgtttcttattttaaatttgtcttattatattttatatggtcgaaactggttttacaagttttgagggttttgtaatgggattgcttcattttatatatttttttttattttaagtttctttatattatttttttgtctaaatttgaaactggtttttacatttatattatgttcttaaattattgtcatgtgttgttttttattacgtttgttagtattgtttttttaaattattgttcaaaattagtttatatattttgagagttctgtaatgggttgttctattttatgatgttattacaaattttttattttaagttac

SEQ ID NO: 349902 - DNA, 889 bp, Cannabis indica
catacctttcctgagctttgcccgaatctccagcaatgtgcgggcctccaataattacttgtaagtgtccatctactagtggaggtagcaaatcatgtttttttttaccttggttggtctttacatacttctacaggtgccgattgtttttacttattaggaattcaatttcccggttcaagtggtaacattcgttagtgtcgtggccgtagtctcagtggaactgacaaaactttgtgaggtcccttttgttggtatctttcttcatgggcctaggcttcttgtatgggatcagcgactgagttgccatatatacactttctatatctttagtcagaatactgaatgcagtgtatttgacatgattctcccagggagcctgtccggatttatcagtgaactttcctttcttcccgtttccttgcttgtggttgttgcttgaatgcttgccacttgagcttgaattatttgaatagttgggaagttaggcggatgtcccagtggaaggagcctttgacttgcccgacttttgttcaccttccgctcgttgaatggcttcttcgagcttgatgaagccttcggctcattcatgaaaatcactaattgagttgagcggcccgttcttccttatatctttccaaagttcaccaaggactttaatgccccccagtatcgcgaataactttccatcctcggttacccgcaaaactttggtcgcttccatcatgaatatgctgatgtatgcccggagtggctcgcctggtcgttgcttaacctcgaccaaatctcccaaatgcaatgggagctggcatgagcaggagaattgcgcatggaattccgaagagaaggttttccatgagctaaactttccaggagccaacttgaaata

SEQ ID NO: 349903 - DNA, 834 bp, Cannabis indica
atccaattggatcggatcgaatgttagatttgaaaatctaatacatctaacatccaatcgaactaattaatattttcatgtagattgaatgagtaattaaattttatgttgttatacataaaaagaaatatgtatcaatgaaaattaacattgaaatttactttttttttttatattggatggatctaattcaatccaatagatattgaatataaaatattggatggatccaatccgatccaataaatactaggtcgaaaatattaaataaacccaaatcaaacaaatagatgtacatgaaatacatccaatagatagaactaatcaaattcaacatccattaggcttctgactataaattgaaaccgttgttaggttttttcctgtcggcgatcttgattaggtacgggcggcagtgacatgtgagtgtcaggctatggcacagattgaaactattgttaggtttcttcctgtcggcggcgatccatattaggcataggcggcagtgacatatagttgccaagctatggcacagactgaaaccgttagtttcttcctgtcgacgatccatattaggcacgggcagcagtgacatataggtgtcacgctatggcacatactaaaaacgttgttaggtttcttcctgtcggcgatcatgattaggcacgggcaacagtgacatataggtgccaggctatggcacatactaaaaccgttgttaggtttcttcctatcggtgatcctgattaggcacgggcgacagtgacatataagtgcctggatatggctcgagctcgtgtggttaggcaatgtaatatattggtgccaggttgt

SEQ ID NO: 349904 - DNA, 593 bp, Cannabis indica
aatatattggtgccaggttgtggtaaatgctcgcttggttagacgaagcaatacattagtgccagattgtggcaggagctcatctgattagttgatgcagcgacatcatatatgatgccagattatgatatggaattaattttttaggcaatgcaatatatgattgtttttatttccatgcatagggctgattatattattcacttttgaatgttattacccaatcattccataatagtgaaatgaataattggttattctatgtattatttacttttcttgctgagtccttgtgactcacaagtgctctgtggtgtaggtaaagataaataaaagctagaatagccatgatatgacagtcttctctaataatgtacacattgaccttaccgacctgcatgtcgagttgtcaagagttgtttttgggctgtatctaccatgtattttgactaggggtatgcagaaagttatccaatccaattacaaccgatctaatagaatcggatatccaatcataattggatcaaatcagatgtaaattttgaaaatccaatcagatcggattggttgttggatggaacatccgatccaat

SEQ ID NO: 349905 - DNA, 656 bp, Cannabis indica
tctgctcggtcacttggggggcaactatactcgtacaaagcattggtaaaagcaaataacaagcatgaaaaaacaaaacaaatgcagttgcaaaatgatcataacaaggaacaatattcattaaagataacaaagcatgtaaacataggattaaaggctacccggtcagccagttgtcttaaaagtgaaaaacatattcaaagtttaaaaactgcttggtcggtcattttgtctcaaaagaagccctatgggccgaacagacatatattaaaaaaaaaaagagagagagaaaagaaagacgttcagacagcaggagtcccagactcttgataaggatcgatttggtttgaaggagctggaggatcaacattctggacggcaagaacttcagtgctctagtcggtaggagcagaagaggtattcgcctcggggttttctctggccacctgaatcgcacagaaattaagatacatgttcttggaatcaccaaggtaatcaaagtttcctttgggattggccttctagctagaaatcatataaaacctcaagtgcagctgtctctaggacgtccacctccttcttgagctcctccaccctagacttcttgtctccgacctccttcacaagttcccgctccctggtctgtttgttcttaa

SEQ ID NO: 349906 - DNA, 793 bp, Cannabis indica
tttttttaatgtttttgcactaaaaaagtatggaaaatttgagaggggtatttttgggttttaaataaaatggtcatatattttcaatggtgatatgtattagtttaggaataaaatattaggtatatgtaagtatagaaaatcaaattttccctttcataattgcttaatgattctctataattattattaaagtaaaatatgtgagacccgatattaaattacactaatagcgatattacacattataagcactatgagtgtactttagcatttctcaactttttaagagtttttggcagctaaactctcttaactattaatttacttgcatttaaccctctaagcttaaattttgttagtaaaactttccaaactactgaatgtgtcattttttttttacagttaactatcaccatagactgcttatgtgtacactcttgtacacgtgaacgtttatattgatacacctaatattattattttaaaattaataaaattataaaaataaaattaaatattaaaaaaataaaaatattataaattttaaaatatttttttattatttttaaataataatattaggtgtactaatagaaacgtgtcacgtgtacaaaagtatacacataaacggttcatgttggcaattaactataaacaaaatagatgacaccttaaatttgcaaacagttcagtaatttagagaattttaccattaaaatttgattttaaaaaattaagtgtaagtgaaataatcattgaaaaagtttacggtaaaaaaaaaaaaaaaaaa

SEQ ID NO: 349907 - DNA, 572 bp, Cannabis indica
gttatctctattccattttcgatcattatgtcttctgttaattcagatgcacttaataaatagtaaagaattcagtatccctagttgagtaatgcatatagaaaatgatgttgcatgatattttatgaacacaaaggaagtaatggtggagtaaggagtagcttaccatagatttacagttccagtaatttgggtttagtcaaattcactacacttgatccagatatcaagaccattgattgattgaaatgcacgtagttttatgttagtgcaagtgggagtttgtttggattttatgccctaaataaaactcatttcaattcaatctgatttgttaacaataaaatattagaagtcatttatgtttacatgtagtattcatgttcatagtttaatgtgcacaaaatctgttaagtccacaacatatagttattaacaattacagtaatgtcaacacagtggaatgtaattgttatcatatgcttcaaaagataatgtccctgattcatcagtgcactggatttacactgatgtgcactgatgagataatcagcgataatgtatacttacac

SEQ ID NO: 349908 - DNA, 793 bp, Cannabis indica
ataaataaatatataaataataatttataccttacgtcatcgcggtcgtggtgtcgttcctctcagacgtcgccgtggtggcgaggcgcgagtgggtgttcggcgggttttagggagtggagggttcggagggaggagggagaggtggaggcactggtgggtttgacggaggagggacgtgcgaggttcgtgtggtgggtttagggttggacggaggagggaggcgtgggttcgacggaggagagagggggcggcgaggagagaactgaaatgaagtgggttagtttgcgaatggggaggcgtgggttttgggttggaaccgtggctgaaaatgaaatgaaatggggttagatttttgctgaaatgaaatagggtactttttgcttaaataaaaaaaatttgggggtagtactattcctgacggtttaaaaccgtcgggtatagaggggtacttttaattttttcttcttttttaattacaaaaacctttgcctacttttgttgctacggttccaaaccgtcgggaatactcatttttcccgacaattttaaattgtggctcaatttttttagcaatggtcctaaaaaaaatcgtttttaggatcgtcgcgaattgtcgtttttgtagtagtgaatagagataaatgattgagatctcatttcagtaattatattattttaccgaaatatcatttatatgtagctaagtgttttaaggataaaatacattgaagggtagaacggtaaagttatccctattccgtgtagatcatctatagaggatccttgacta

SEQ ID NO: 349909 - DNA, 644 bp, Cannabis indica
agtaaaaatttgagccaccttcaccctcttattcgaaaccttctctctctcttcctctcttcaaaactgaagccatatagtgaaaagagtgagtgcccacacacatcaagtggtactcaatcatagtgtgtaaggctgtgaagaatccagtttcaagagaaggagattcggactcagatcttggtgatactatgctacagaaaggatacaagggttagagatctgagtggaaggagatattatattccgctgcaaatgtagatgcttgtaaaataattccaacaactggcctccgagccattgtaattgatttactttcaagaaatttggacttaaaatgatatatgtatgatttggacgtgattcatgttgatatatgtgtttttgatgattgatgtttgcagattttttacgaaaataatttgaatttttttctcgaattatttttgttggatagtttggaaaaaattaagcaattcacttttttacagaactcaatttcgatttcatttgaattagttatgattttttgaatttttaaaaaaggataggggttgtgtcaccccatacgcgcgcggattcgagtgatcactcggtcacgcgcgcctcagacatggggttgtccgagttttatcggtctgaag

SEQ ID NO: 349910 - DNA, 597 bp, Cannabis indica
aaaaggatcatttataagctttatcttcctacaagggtcaaagtgtgaccttagagcacccaagttatggatattacatatctgccacggcctaaggctcgggtcgtgacagctcagtacagcggtgttcatgccattattggaaggcatatgaataaaccaagtcattcatctatgtataaggcgagatgcctctagcgagatgctcctatctcacgtgagtgttcactaccttaaagataagaataacaaacggttatgcgtatttttagctctgcacgtgttaaaacggaacgtggtcaaagctcacatttcgtgaaaacagttatgtatttcaaattcaaatgtaaataactgtcaacctatattcctataaattggggagattatacagacaaatgaacaaaaaacctttgagagaaaaaaatcactgattaattagttaatgaaaatattctttaacagatatctataaaaatatctaggttaattatttaatttatcatataagataattttaatataatatttcaaattaaaaggataatgctatcttttaatttaaaatatatccaatcttataattaaataatatat

SEQ ID NO: 349911 - DNA, 571 bp, Cannabis indica
ttactagccgacctaagtggcaaaatccgagattacaaaatactttcactggtagacccaacccgcttggtttagtatggcccgaacatgtacaatccatcgtcaagctctcgaactcatggttgattacagacagatttactctttcctgcacagtagagcacccgtgagccaagcctaacaagacagtataaatatccatatatgcagcaaaacatatcacatataaattaacgccattacacttattgtctatttgacatagacctgtgtgttacgctcacacgcttatttatgtctatgtggcatagacccacgtgttacgctcactcgtctaattacaataaggccttagaatagttcatctcggttctaattaccgagtctaaccaaattatgcctttacttcgatataattaatcacaattataatatcaaacatgaacgccaccgcgcttaactctatgtgctaactactgtcttacctgatgtcttgagtacgtggagattccaaatccctacgtgttcctaatcaagtaccggtaatcctagtcacaattctcgagattca

SEQ ID NO: 349912 - DNA, 720 bp, Cannabis indica
acatattgttgggtcgtcaaacactgatcgaactaggggcagttagctccatcaagcccctatccctgaagttccaaacactagaaggtgtaggagtggtgtgaggagaccagatgctggctcgcgattgctatcgcatagagttgcagcttaggaaaaccagtcatcaattgatggtgatcttggcagaagacagtgaatggaaagatgaagatcttgacccacgagttcaagatgagaaaaacctattaaaaccaattgaagaattagaagaggttattctcgacccaagaaatcccacaaagtgtgtatacattgggaagaacctagacgagtagctcaaatagcttctaataagtatcctaatggcaaaccaagatcaatttgcctggagccatggagatatgatagggattgaccctagcattatctgccatcatttaaattttgatccaaagtacctagcaaaaagataaaaaaggagacccttggattccgagagacaaggggcactaaaacaggaagtggatatgttgttggtcaatgactttatacgcgaggtgttttatccctcatggatagccaatcatgtcttgtcccaaagcctaacgtaacttcgagaacttgtattgatttctctaatttgaataaggcgtgccctaaaagattgttttccactacccaggatcgaccagttagtggatgcaactgctgggaacg

SEQ ID NO: 349913 - DNA, 676 bp, Cannabis indica
ttcatgtgatctatttatttatttatttgatttataaattcatccaaatccttatcacactaatattcttgtttattgtgttgtcaacacagtggaaagtaatcaagattgtgtgcttaaatgtaatcctatgatttatcagtacatagggtttaattgataggataatctactatgtagtttacttgcaccttggataagtgctatgtcctttctagggaattggttaaagtaagcttgggttaaatgtatggagtatgcattggaaggaactgatattgaacttgaatcagatatgataaacttaccataatatctattcaattcaaaatctcctagttgatcttaaatcaaatgatctcaagcctgagatggttaggttctagttcaattgtaatatttgttttcttcaatctgtttgttaatgtcaaccaatgcatcttcttgggacatatagattaagagcatggtagttcaattgggtggtagcgctaatcataaatatggaatctatagcttctgttgacctcgcttttagccaacgacaatgagtcttaattgtaagcggtaggtgatataatatgtaaagataaataaagaacatagagtttttaaagaggttcggccccgagtagttcggtaatagcctactcctcttgatttgtattgacttaag

SEQ ID NO: 349914 - DNA, 1111 bp, Cannabis indica
aaaaaaaattagagtaaaaatttttgaggaaattacacttactatgggattttaaaagttcttatgataaatatggcacatttaagtttgaccaatttatatggtattttttttgttttaggtcttttttatggtatttaatatgtcatatatatgtaattaggttttcaaatctcatatttaatattttatttgtttaggaagttttatttgtcattgatgccggaaaagtcaccggagtttcctgccggtgccggaaaagtagctggagtagcggtcgctgccggaaaagtcgtcagaatagtcgtcagaattagcattgttgccggaaaaatcactgaaaaaatcaccaagaaatcagtttttttggtgattttttcggtgatttttctgacgacaatggaaattctgacgacttttctggcgttggtagcaactctgacgactaatacaccgacagctactccggtgactttttcagtaccgacagtaaactctgggaaattcgtcagaattggcattgtcgccgaaaatattactgaaaaaataccaagaaattggtttttttttcttcatcaagaaacttgacgaagaaaccagtttcttggtaatttttttttgtattttttttcttatttggttgattgatgaaactggtttcaattattttcagtgtatatcatttttgtttcttgatgaaaaaaccactttcttggtgatttttctagtgattttgctggcgacaatgccaattctgaccactttttttgacgccggcgataactccgaccattttttcgacaacgaaaactactccggcgactttttcggcaccgacgtcaaactccagaatagtcgtcggacttggcattgtcaccggtaaaattaccgaaaaaatcactaagaaaccggtttcttcatcaagaaaccaatttcttggtgactttttcagcgacaatgctaattctgatgactttttcagcgccggcagcaactccggcgacttttccggcaccggtggctactttgacaatttttccggtgccgacagtaaactccggtgacttttccggcacgagtgacaatttcgacgatcactatagttttattt

SEQ ID NO: 349915 - DNA, 569 bp, Cannabis indica
tccctctccttgtctcatcttttcaacttgctaattgttggaaaaattactttggatcaagcttgtgttgtggtgattttgggcacttgagtttggaaggaatttaaggtagttcttcctactgtttttatgtgatttgttgctgaaataagattgaaggattaagctttggtcattctttagcttatgtatgcatgtatataggtttgctttgatcttgatgttcttggcttgtgtatattgttgagtgatggagtatgttcttgatgaacttagatgagattttagggtgtttttcttgtttgtaatctgattgtaggttctgattttggttgtgtaaagcaatgttgagttcatggaactcaagcttggagctttaatagcactttttgattcttggtgaaattattgtgtttgagctgtagaatatgtttaatatgttatataatgatgctctggaaagtttggtggtgtttgaggaagatttgagtaggttatgggggcttaaatattgaaatttttcgtgttgttgctgcccagacaactggaattctggttggttcagggct

SEQ ID NO: 349916 - DNA, 552 bp, Cannabis indica
tgtttttaatcttgaaagattgtcttatttttggaaataatgttggttattcttgtttccttttatttatttttttggggaatatttttgcaagagtgggcagtttccttttgtagtcgtgggctggtggttactcaaaattttgaaattggtttcctttttgctcaactctcccatgtttatttaaaaccaattttgtcatttattctcaccacctacccgattctatctctttgtctctcttgtttgttggtttgctctttcatctctttcagatcaccatggttacaacaaagaacctagggcatcccaaaaagatggtggaaaccgttgcaaccccctcaaatgcacttcctgctgcttcaaccatgcctcctgctgctgcaaaaacaggagattcatcgcttcctcagcgtgaatctcagcccgagaagccaaaacgtcttcctaagcaagtggctcgaaaatctgtgcgtcaatataaaacctggacttcatcattttcatcttcaaaggaatctcctccacctgctgcaggttctcctcctgctg

SEQ ID NO: 349917 - DNA, 995 bp, Cannabis indica
ttttgactcacatgaccgaagagcaacgcatgtttgcaaacaagatgtcccaaaagaggacgataaaaatttccaaagctagtgatgcaatggctatagccaaattgacaacagctaagaagtcaaagactgaagggtccaaacaagtttttgagagtaacttcactgatgttccattaactccatcttcccttggtatatgcactacaatcaagaggaatgccgactttcttgacccagaggttgttgatgaaacggttcttcgaatccctcacactgtttcagtctattctagcccttcatcgattgaagagcatgtggatggaattctccatctaactgattgagcacgactgattaagcttggtccgactggggttgccaacaacagagtagctgatgcttacaaggtaaggtcattattgattgtaatataaactatgattgattatttttctttagttattaaaacttggttattatgtttgtagattcttcaagtcatgttgttcattcgggaaaactatcctgtgttggagaagaagaacaaaaaattgattgctgataatgctttcctgaaattggagaatggaaagtatgtagaaaaagagcgcaaacttgaagaaaccattaaatctttgaagggtgagcttgaggaggtgaagaaagagttgactgatgagaagaaaaggacagaggaccttgcctgcgaggcagaacaagttgcattgactgctgtcattaagactcgtggggaactaatgatcgagtaccaggacggaaagaatgaagattgcgatgtggctggtgaattgaaacttactgtgcccacatgggtttggatgttgatggtgagaggattgagcaacttgaatatgcttttattgaggaagaaactgctgagatacttgaccttggtactacaaatgaatgtgaagaaccccaggcaaatggttagtttcgttttacattatgcttagtggttcatgtgtctt

SEQ ID NO: 349918 - DNA, 804 bp, Cannabis indica
tctcaatcctaagatggttaagccttaccttaaatatattgcacaagtttttgacttgtttgttaccagcttactgtagaaccatctcaattacatcttgggaacttagtagtgcaattgagtgggagtgttaatcataaatatgaacatctatagcttccatcattattataagagaaacgatggttcgctagaccttggcttaacgtgataaatgatagggccctcattttaataattatattagcttctcgaaatatcatttacaagtagctaagtattttaaggacaaaatacataaaaaggtaaaacagtaattttaaccctacttaatgtaaatcgtctataaatgatcaatgattgtaatgactaaaataatggataattcatagcgtatctatacttggtgtatagagcgttctatgtaattaagagtgtgatcctgaacctatagtggagtcaggaagaattaataagattggtaatttactcggtaaatttcaagatttgcttattaggagtttagttatataggtccatggtctccacactaactgagataattttgttttgtagtcttaattaattgaatttaattaatcaattaaaattttaagtaagactatgtcttatttatgaattttactaaagaagggcatctttgagaagaaaagataatttaagggttatttataaattaagagaccttgaaggatctaaataataaatatatttaaatggtaattttgttagataattaattataattattaaatataaaaagttagcatttaaataattaga

SEQ ID NO: 349919 - DNA, 1391 bp, Cannabis indica
agaaaaatggaaggaaaagatgccacatcaatgctcttatgctttcctttatttatatatatagatatatagatggtttggcagttcgactaattctacaaaattggagttattttcaaatttcaaatccttaagagaaatgttccttaggagttgagtgtacgattgaatccacttctttccaaagtgatcaatcaacagcggagtcgtatagatctgatgcttactacgtatttgcaaaataaaaataaaaaacaatagatacacagatttgttatagaggtttgatccttttgtgttggcgggtaatgatttatttcttttttaattatattaagtgggatttgctataacacccttaggaatacaaggtatgaattaataatgataaaactcaagtgttgagatgatgctagtgtaggtgtgtgagggagaaagtgaggaagagagaatttgtcagacttagagcttggaggcaagtttcaggcttagatgcaactttgatttttaggctaaggttaaggtatttatataggaggcttaaaaccctagattacaatttaaatccctagatatttgcatagtttgtttgataattacaaaagactaaaatgcccttgaatctagatattattcagccgttctgctgggcttttagggcccaatttgcagcccatgagttgttgtccatgtgtagaagtgcataggaaaccctgtagagcacctcctagccgcccaggcccctgtggaggctaggctggctgatcagctcctgagagggagctggtctgtcacttggtgcccgtttgagtgctggggtctccgtttgctcaagtgctgacttggccttcctattggtgagttgtattgtcacgctgcactgattttgtccatgtaagcatgccacatcaagatgacaaaaattctgataacatttgcccccaagtctctatgcggacgtctgtacgaataaggactttaccagctatattgatgtgtttgggactgttgtagcctttgctgaataaaagttgatacactttgtctagactgcctgatctcattacaatagagaaataactgcttagttgtctttatgatgtgtaggtgaggtaagtgaagaaaaggggctcacatgtattacataagtgacttttgggagaaaaatcttttttcacttctcactttttatttttcactttttgtcactagaaatttgctttagaaaaagctcttccttctttctaagtggttgaacccacaagcatcattcttcctgagatttttgtgccgttttgacgatccaagcttcccgccttcttcttcaacaaaatcttgtagtgggtaagctttttattcccgctattttacttgatttgattgattttgcc

SEQ ID NO: 349920 - DNA, 621 bp, Cannabis indica
gaaatacagtgagattgcttgtctaggaagacttgcagaggggtctttgagccagtgattttcaaaatgaaaccgatttgagcggagattgatgaaattggggtcctgaaacatgatcttcagggccctatgatcagaaccatagaagccgaggtggaaaagagtagcttgagggaacaaattcgtccaaagctgattagaggtgcaccaatcaagacgctcaaggatcgaaccatgcctccacgtgaatttaggcccaacatgaggaagaggaacatgattatatttatcaagaaaagaaaggaaagaatgcatagcatgagagggggggaatgagatgtgttcctgtcattaacagaaagataatcattgaaatcacccataactaaccacggcaaaagaggagcagtatcaaataagcgattaagtaaagtccaagtagcagatttttgattagcataaggagaaccataatagccagaaaagtgccagtctttaccattaaaattatttataatacaatcaacatgattaagggagtaagtaataacattaacatcaatagagtctttccaaaaaagtaaaatcccaccccaagaccttgcctaggcacttctaaaa

SEQ ID NO: 349921 - DNA, 565 bp, Cannabis indica
cctatggcattaagaatttcaaattaagatgtgtaacatctttttacactcttaatattggtgataatggtggatgttactcatagtaacaactccccaaatgttacaaaaagatgacaactaatataatcatatgttacatattatcagtttattacacatatttaatctatatattatataaataatataacatatatatatatcttatacttaattatgttatgaacacaaaatacaaacaaaaaggcaatttagataataaataacaaacgcacacagctagaacaaataaccaaacacaaaagcaacacaacaaatatatatgcaactacataaaatgaaattcaattaagaaattaacacactaattggtacgctgtataagggtcgtattgtattaaataataaataatattatgtttgaataaaacaatgtattgtattaattattacaactaaaattgaattttaatacaatgtatgctgtattatttacactacaacaaatttttgtcgccccggcctaaaactgttgggtcttgtgccctaaataaaactcatt

SEQ ID NO: 349922 - DNA, 832 bp, Cannabis indica
gaatgatattataactataacgattctagcatatgatttcaagcatgaaattaactaagagattgtaactaaacttgttcaaaagtactattaatttgtatatcattggtaagcatcatgtgctccaccctccactcaagcaaacttggctaacaatattcagcaagcacccttgttttagcaaataaagcagataataaataagggtaaattaagtacaaaaaaagatgcagagttaagaaatttttaatgtcttctctgcctttatcatcaacttgtcatatcttatctttttctacaaccatattcattgccccaagttcatttgtcaaaatatcatacgtgctcactagggaatcaattcctttgaaaccattttcttgaagaaaaagtaagcatgctcaactctcccactcttgataagcctagtaatcagtagatcataagccggaatatcaatacttatattggagttatacatatgatttaaaagaaaataaagtaatttcatcctctacttcttgcagcacatcttcaacaaggcaatgtatatcttcagattttgtttgcaacatctatcttccattttcttcagcaacttcaaacctttcgactcaccgttgggtgagttaatacatcgacaggaattacatcaagcaattcagcttctcttatggaggccaagcgggccaaagcgtctgcgtgtgagttatgagcacgcggtactcgagagacaatcacttttttgaatttctgtaacaacttgcatgttatggcgaggtacttagccaaacgcccgcctctggcttgatattctccgtttacctggcac

SEQ ID NO: 349923 - DNA, 645 bp, Cannabis indica
tgggtagtttggatcgacatttatttgatggtagataatattagggtcaatccctatcatatctccattgctccaggcgaactgatcctggttcacccttaaaaaacttattagatgctattccattgttcatccaggttcctcccaatgtaaacacactttgtgggatttcctgggtccaaaacaaccttttccaactcttcaactggtttcaatttctttcatcttgaattcgaggatcaagatcttcatccttcttcttgccttctctagttaagactgccattagctagtgactggcttttttgtgctgcagctctatgcgatagcattcgcgagccagcatttgatcacctcacactactcccatacccactggtgtttgaaactttaggaataagtgcttaatcgaactaactgcccctagtccaattaatgttggacgacccagaagtatattgtaagccgatggtagggggacaaccaaaaagtcttgcattattgtggtggataaaggtgtttcacccaaacttaatgcgagctcgattattccttgtgtcgtgtgtaaatcctcaaagatttaccatgcaaggtcttaatttagctttttcaagcccccatcttcttcagtgtttccctgtaaag

SEQ ID NO: 349924 - DNA, 612 bp, Cannabis indica
ttgttacatgtttatttatttaaaatcttttttaataaatctatgatttattttatttaaattggtataattaacctgttgatagatctaataatctaattttaatcatagtccaattgtcaataaatcaaataaataatgtataacaggtcaattttgtaatattctttcatctgtgtataaatatagtaacatgataggatctatccaaatcattgtgtgtatatgagcctctatgtttacttttgggactagatgcatcccatttaatttttatgattaaaatagactaggttctaaaataaaaaagatcactttgatagtttttatttaggcccgataagaattaagcttattcaattaattacaattgtttaattaaggttaaatttctctcttttgggccttgtgtgagagttagggggccattagtagtgggtacctcaaatgaataatcctaactatgaaggcccatttactttatttaaataattgtattatgcttattatattagtttaatctaattaaaattgattggcaacataattaattttcaaaatatatgaaattattttttcatcaaattattttcatatttgatagcacataat

SEQ ID NO: 349925 - DNA, 587 bp, Cannabis indica
acatcagaacttccctataattagatgaaaatatataatttaagtaaagatcaacaaagtatatgaattacatatataaaaatgttgtttgtgtgttcttagtcatcatgatatatctcttttttcatcgacaaaggcatatagataatagaataataaatcttattacatgtcatcagttgcaattgttgtgagatcgtctatatatttaggtagttcatagttaagctaaacaaacctaattaatttaaatttatatatatatctatagacattagggttaagattacatcaaattatttatatatatatatttagaaatggactatagtataagtatattactttttttcatcctatctgtagagacatttatgtttatgatatttgaagaaattataattcaatttttttttataagacagtacttttataattaggctaattagtaatttttccctccgaactttgacatactaaatcatggcccctaaatttttttggccgttaaaaattctccccgaactattgagattgttaaattaaagattttttttttctaatctcattcaattttactgtttcag

SEQ ID NO: 349926 - DNA, 570 bp, Cannabis indica
tttctaaaaaattttagtaaacaacatattacaaatattgattccgattatttttcatttattccgttacatttctccattaatttattccgattctgattactgtatagtaaacgtgccattaatgtaatcaaatattgagacacttacgcttctactattatgagggttcaacctcttcggatcgaagactcatcatcataatcttcgtcttcttcatcatatatcctgctatctccatcttcgtgtaccgaaacaaatacgcttcaggtacgaatcgtacgggttcgtccgtgcaccagcgaggccttgttaagcctgatgtggattaccaagaaatccttgatgagaaacgctatgctttcggagaaaggtttaaagccaccgccttttcgaaagactggtactaccattgttgatctagtttttcagggacgttctttgttttccggcgtcgatctgggtggtatcgtttattgctttgcgctacctctactcaatctgacgtttactgatcttctgcaaccaaggttcgccattttattttttgagtttatttttggccgtggg

SEQ ID NO: 349927 - DNA, 631 bp, Cannabis indica
cccatttttcttctcttttgcttaatcaggatgtaattcgggtttacattcaatctgtgagtaattatggccggatctatcccaggcatgtccgagtgttcctacgcaaatacttggaaatattcttttaataatcctacgatttgattctttcggtctccggtaagtcccatgtcgatataggttgtttttgttgggtccgtcgggtgtatgggtacttcctgcaactcctctaccgcgggtgactgttctttcgccgggctcgaggagttaactaattgctataacttgtttttactcctcaaggatgaggtgtaacactcgtgggcccctaattggtcccctcgaatctctcttacctcacccttacaggggaacttgattacttgatggtaggatgacgcaaccgccttcattgcatggatccatggtctgccaaggatgacgttgtaggccgacgggcagtccacaattggaaactttactgatttgttgactccgttcgcgtagacgggtagttggacgaaacttcgagcgacaacgctttcccctgagaaccctactagtgtgacgtgagtgtcctggccttttaaatcctcgatttccatttctttcagaactccggcaaata

SEQ ID NO: 349928 - DNA, 1090 bp, Cannabis indica
attgtcaagatgaccgaacgggtggagatagggtccgacccacattgtagccaaaagggacagttgaaaaaaaaaatcgaaaaaaatacatatgtattttaattagttacaacatatatttatattaaaagataatatttataaatataaagtagattataaatatattagagggtaaaggttcaaatcccactaactacactttattttttctttttaaagttatggaatctcaactattccctttatgactatctctaatggttacactaatttagcgtggaatatacactaatttagcgtagaatcttttactttttgatacaacaactttaataatttaaactaaatattatactaaataaatatattttactaaaaagatttcacattttatattatttacattaataacaaaaaaaaaataaaataattaatttatgaaataattattaaaaattatatcatgactactagtaaaaatttaaaatacttaaaattatttaagtaaaataaatatatattaaatcaattaaatattaaacattttttttttaaaaaaaaaatttaattttagtagttctatagttgtattctaacatgcgcgattatttccaaaatgagcaaaaagaattatagcaaaaaaagagctcaccaataacatcaaacatctcaagaatatcaagattctcaaaatactgaaagctcatgtagccaatattttgatattcttcaaagctaagatctacaagtgatcaatttgactattaaattattattttacttaatgttcttatttttagtttcatagggtgtgtttggaagtaactgtgtaattactaggtggggtaattactagagtggtaattacacaatttagtaattacactatattttaaaatgcaatgtgtgtttggatatgaggtggtaattacatatgaattcctaatatcttgtttgacaaaatcgttagtaattatatgagaaaataatattttttaatagctaatgtttaatatggaaagtttttagttattacacagtgtatacatccaattctcatgggggggccatgagaattggagagtgt

SEQ ID NO: 349929 - DNA, 705 bp, Cannabis indica
cagaaagtcaaagacccaagctcaaaagtcgacttacaacctcgcttctcctctgatcatttcttcactgattgctactctaactcctgggtttggtgatcatgataaatctcattcatccgatcactcattgttgaagtcttcttattcgaattgtgctccaaatgtcgagaaagcaatagggcccttgcccactgtgagttctcgaaccaggtccaaggtatccacacctcaaaaacccaaagtggctctacccaaaagtgtctccgaagggaaaaaggtggtgtcttcatcttcaaaggcccaaagtctcaaagaaaatcccccttccatttcttcatcggaatctgaacctgaagaagagaccgaggagggtcacgaattagaaggtttgtctgattcaagtaaagagtttgtgcccaaagaacaaccctctactaataattctaggtctaaaagggaagaggctgaagctgaacctgtcagtgcagaaccagtcgctgttcctgctgcaattccaaagaaagacaaaggaaaacgacccattatttctccaagccctattctttctcagaaaagaaagaggccctctggtattactcttgaaaacttcaagcctcattctcattatttttgttacaatgatagtgctcgagacatgaaattttatgagaatcataattttactgttgagaaaaattttaa

SEQ ID NO: 349930 - DNA, 514 bp, Cannabis indica
tataattttttaagttacgttttgtataaaaattagtattttttttgaataaaaacataataattagtatattgaataataaataatgtgtaatattttaacgttgggtattgattttgagatggtgcatattttagttttagtatgtgatgaggtccagaaagtgaggtgagtgaagagcacttagtagcttttgaatgacataacttttttcttttttaactaatttagcaatgtgatcactcgcttttatatattttttcaagactaataaaatgaaacaataatttaaggaccaaaataaatagaaaaaattagagaaaggaactttgcataaaattttttgaatactttgaacgttaataacttttgaactggttgttcattggaggtaatttttttaacttgggtattttctcttgttctgcacatcccaaacggccactggcgatctggccatgtgacgccccaatattttaccttattttacaaaaatactattttcatgcataat

SEQ ID NO: 349931 - DNA, 987 bp, Cannabis indica
ccaatctattacatcagtaaaagactcgtcgaagctgaaggtcgatatccgttgatagaaaagctcgcctactgcctcattctagcaacaaggaagctgaggccttactttcaagctcatcctgttcgggtgtataccgaccaaccactacgacaaatactgcagaagccagatgcctctggacagttactcaagtgggcggtagaattgggtcagtacgaaatcaacttccaaccccgaacagctatcaaaggccaagccttggccgactttgtggtggaatgcataggcaaaacagaaagcataccagaaagcgatcccgagccaataccacagccaagtaatattgaagacaaaccgacctggaagctacatgtggatgggtcggcaacagatcaactatctggtgcaggaattgcccttgtcacacctaggggcaacacctgcacgctgcggtcaaatttggattaaaagcctctaacaacgaagccgaatacgaggccctaatcgctagatttaaactagcgaaggaaatgaagaccgaacacattgagatctgcagtgattcacatctggtggtaaatcatgtatccggtgaatacgaggctcggggagaaaaaatgatagcatatctgagcaaaatacatgatctgctcgcacaattcaaaagctacggtctcagacaaattccaagagaagaaaatacaactgcagatgcgttagctcgattggcgagcagcaatataagtgacaaggcaaacctggtccctatccagttccttgaagagcctagcatcactggcacggaagaaatcgaaatgatcgacacatctccaaactggatgacgccaataacggcctatctcaactctggggaactcccagataaccgaaatgaagctcagaaaatgagaagaaaggcagcacagtacatcacagtagaaggggtctcgatgccattactcagatgtgtcacaccagatgaag

SEQ ID NO: 349932 - DNA, 507 bp, Cannabis indica
atttttatgatttttgctcggcgctggtagaaaatgcgataaatggccgttagagtcacatgggtaagtctagaacctatttctaaggggggcaaatatttgagatatttagaataccaagtttaagcggggttataatttttgactattttacccctaggcttattattgcttaagttacaagtaagagggcatttttggtatttcacttttgaggtttaggtggctgcttgagagctggacagttggctatttgttttttcagcttgaatttagtggttttaggagttaaataattagaagaaaatcaaaaattcgagaaaattgtggaaactccttttctctctctctctctctccctttgctcggctcccttagaattagaaagaaacttagccaaaactttcattttcttgggaaataagcaaggaaccaaggtgttaccaagtggaggtaaaccctagaacttagttttggtatagtttggatacgaatttggcaagtttc

SEQ ID NO: 349933 - DNA, 830 bp, Cannabis indica
atttgagctattgtgcggattggatttgttccaaaaaacgaatctacacttagtgcggatcgaatgcgctatgaacaaaatagtgcgaattggattggatgaacacccctactatcactcgtaaagatccattgtggatcatcataatccaactaggggctcctacgaacaatctggcacaaccataagttttttttttcttcattaatatggacttttattatgagctttatagcactttgtatggtgacaccctatgattggttagtaatattttttaaaagttattgtcttaagctatatgaaacctgatacttaattactccaataacaatataatactgaggagggtgctagacaacagtaacaccttttagtatttttcttttattatttatataatggttttaatagttacatcaaatatgtaattacggtggttacatttattttaattgttggatcattattaaacggttgtgattaatttagaaattaaataaaaaaaaaattaataaattacttataacgtgatactaacttgattttatttattttcttataaataaaaaattaaaaaatatttacaaacattagttgtgaaaatgtcttattaaatattttaattaaaaaattaaattattttaaatatataattaattataattattttgagtctaaaattaaatttttacctattagtaaactgttacagatcatataaaaatataagggaaatttacatggtatactaacttttgtcattttttacaaaaatactgacaagcggtattttttacttttttactgtgtttttttataagtttcat

SEQ ID NO: 349934 - DNA, 609 bp, Cannabis indica
taatgatgcaatcaaactaatattgcaattgaagaagactacttttttctagaaccactttggacattttatgggaatacatgtggaaacatcaattattaaaaaaaaaaaaattagagagaagattcattcttagatattgtgccacacaccattcaataaaaaagtaaaaatacttcaaaactaccatcaatttctaataaaaaaatacatattttggacagtatatgtgtacaaatgagagtggtattgtatggtccactttaatcagagcaatttcaatagtaaaaattacactaaaaatatcttctttattattatccaattttattaatataataatattatttacttatttatttttgataaactcattatttaattattaaaaagtacaaaagttgagtgttccactctctcacgatccaattttgcttgagtgtctggcgcaacctattaagccatacccagcgcgtcaaatataagaacactcatcccacgatggccttgtagaccactaaatgaaactcaatttttatctatgatattattactcttttcttttttatattattatcactgagagattaatttaaatttaaatattta

SEQ ID NO: 349935 - DNA, 609 bp, Cannabis indica
tctctattgtaagtgaggtattgcataaatcccctatttatatatatgtataaaagcattaggaggtattaccttccattcacagtaatgttaaaattagattaacaataataaagagtaataatatatattaaaagttagattaataataataatttgttaaacgttaagttatttattatgttagaagttaatttagttataataataataattatgttagaagttaacaatatatatattctctatattataataataaatgttatgttagatgtttaaattaatataaaatatatttctagaataattgaaatatatgtataaaagatagagtacctatatgagtatgatgagatagagtgatcgtgctgataacgtgttataaatttagacagatatgaatatgatacttgtattcttttctgctcttttcttacttttatttctcttcatcaaacttatacatatatataggagaatacatgcatgcatatacatataattattcaactttactgctacaagttgaatactattctatagtattgtaggtttatcatgtagatgtagagtatactacatatctatctgtagtcattcataaca

SEQ ID NO: 349936 - DNA, 838 bp, Cannabis indica
aactttaatttatactaaaatattatatatttaggtgtccataaaagttattaccacatatagttttacataaaaatattgcataaaatacaattcaatataatacaatacaatacaacttaatacggcgttccaaacgagcccttaatttaatccacactattttatttagggaaattttattatttgaccctaataaaataccccatatcaaaatttatacattacattaatttgtacaaatttagtccattgattacatgaactttccattttactcttttgttaaaaactgaaattgcctctttctctctcttttccctctctctcgtgcagtgcactactctctctctctagaaaaaactgaaaaaacttctctctttctcgtcccactctctcgtccctctctctcttccctcttgaatggttgtttctcggtgggcgttggtggaaaaccaaagcacaccccaatatcactcaagaatcttacaccattacaatgggtaagtggtgttttttaagcattttgttagactttatgtagtttaaaattgttatatgtgtcgtatttgttggaactggtattttttggtctgtaattgtcgatattctgccaatcaaggtcagtgatgactattatcgacatgttgtcgacgatatgtcgatagaatgtcgatggaggacattcacaagttattttagaagatgtcgacattctatcgatagtatgtcgaccaatagtgtcgactatatatcgatgcaatgtcgatgtattgtcgatttttgaactcgataattgaaaaaaaaaaaaaatcataaataaaacacaaaataacat

SEQ ID NO: 349937 - DNA, 684 bp, Cannabis indica
aattgtttgtgaagagaggctatagtatttcgaaaattgaagagaaataagaaggaagaggtctcatcaaacctagagagaaaactagatttttagctttggaggcattagttggataatgagaccatagccttccttttacattatcttcaatggggttagggttgaattattaagaataaaaaaattgataaaattagagtaaaaatgccacctaatggtcggccacataatgggccctacattagtttggcttttatcatttttctcaactattttatctattttttttttcacaaataccactttttgcactttcatccctataaatgtcagaattatttatttaataattaaaataactatcaaataaaattttcatgtataatatttattaattagactccataaagtttcttaattaacaaataaatcccaaaacactatttcttcacaatcaagccatatcttaatgaaaaaaaattcataaactagacatagtctaattttagaattataattgataactaaaattaattaactgagtcttacaagcaatttgtctcaactagtatggaacgctctatatgttccacgatatagatacgctattgattatccattgttataatcccaataatcaatgatcctctatagatgatctacattgcatagggataaaat

SEQ ID NO: 349938 - DNA, 681 bp, Cannabis indica
aaaacttcaatgctatgggcctgaaaaataaggtcgcagctttcttgacgatattaccagggcgaatgctaatttttccatttgaggatagcgagtctcagcatctaacaatcgtttactgacatagtacaccgggtattgtcgtccttgatcttcgcagattagtaccgaactaatcgcttattctgacaccgctaggtaaatggataagacattgccggatatgggttttgacaggattgggggctgccccaaatccgttttcaatggttgaaaagcttcttcgcatttctcggtccattggaacttcttgttgcctttataaatcttaaaaaactccttgcatttattagaggattgtgatataaaacgatttagagcgccgacttaacctatgagactttggacttcttttggcttggtcggtgattgcatttccagtaatgctttgatcttcgcgagatttgcctctattcctcgctgattgaccatgaacccgaggaatttccataaaccgactccaaagacgtactttaaaggatttagctgcattttatatcatcgcagtatttcgaacatcgcttgtaaatggttgacatggtaagttgcatgttgagattttacgaacatatcgtcaacatacacttccatggtgtccccaatcaaatctgcgaacatcat

SEQ ID NO: 349939 - DNA, 779 bp, Cannabis indica
tgttaagacaagatttgtcaagaataaagttatcaggacaaaggacaccattcttgtcctaaacaacaaggttaggtgcctagcatatcctgtccctatgaagttttcttttggattaattaattatttaattaatttaattaagtcaaaatctaatttgaaaagtggttatagatatttcaagattgttgaaatattttttcaagtagttgagagatttcctcataaatatcagtaaccgaatttggttatagatatttatttttttaaaaaaattaaatatgatttaattaatgggatttaactactataaatagaagtctgattgaagaaatcagaacatcactttacactataatttttgaaattaagagagagaaaaagaaaacagttttctctctcaaagtgttcttgctcatgtgctgagaaatcaataagaacaaagctatacactttatcctaatatcccacactattctttgtgtgtggtgaaacctagattaagggatacaacgtacgagaagtttcgagaataccctgataagcttcaagaggtctatattctaaacttactatttttttattttaatttaatgtgggaagatatggagatcatttggggtgtggtacaatgataataagataatatgaaactcttccgctacgtacctgatttagtgccataaaatcaataattcatatcagagtaattctatgaatgtgtatacattaattgttgtgtggattttatgcatttatatatgtgtgtgtgatatata

SEQ ID NO: 349940 - DNA, 518 bp, Cannabis indica
acaaggatgtcttcgataaatacgataacacaaagatcgaggaaattcttgaataccctattcatcaggcccataaaagctgcgggggcattggtcagtccaaaaggcatatctaaaaattaataatgcccatacctagtgcggaaagccgtctttggaatgtcttcctctcgaattctcaactgatgatagctggatcggagatcaatctttgaaaagaccgtcttcccctaaagttgatcgaaaagatcgtcgatcctaggtaaaggatacttattttagattgttaatttattcaattctcggtagtcaatgcacatccgcaaaaatccatctttcttcttaacaaacaggttaggagctccccagggtgacacactaggacgtgaaaatcctatatcaagcagcccctgaagttgagttttcagttctttaagttctgctggagccattctgtaaggggccttagaaacctgttctgctccaagtgctaagtcaatgataaaatcaatttctct

SEQ ID NO: 349941 - DNA, 970 bp, Cannabis indica
gagggagaatctcgccttcttcttctgcttcctcctcgtcctcatcaattaaaacaacttggtccagagggaggctggaggacgacctcccgggattaaccatcaggtcttgtacctgaggcagagtggggtcaggactgtaggtcagggcaagagcgtccaggagctcatccattggctttgctacttaaagaaataaacacgataagggcgttagagcattatcaaaaagtcatgcatgcaagaataaagcaataaaactaatcctaccctgatgatctaattctgccctagcgaaagcatgcattaaaaggctagtgtcgtcgtccccaagaaagttgtctgaggggaggaaccagcaggaagataaataggtcaaatgatccaaagggataggtgcgggaggaccggaccccatccgggactgccctaaaaggtgacgtacgttggaaaaatcaaaactcttggcatgatcgccccatcgcaaaaggtgactaaaaactttactaaaaaactctaccctaacatgtaagtgaacaacaaaagtaaaaggtaccgagaaaaattacgtaagggtcgtgaactagaagttgatgatgatcgacggtggaatgcggattggcaacgacggacaaataacagcaagaaatctatggtatctgaaattttctcaaaggagtttcttaggacaaaatggcgaaatagtgaaagtaacccaaagaaggaaaaatgttcgcttttatagactagaaggggtgcaaggcagctgtgatcagacaccatcgtacggtaggaatcgtaatcgattcgtattctacaaatccaacaattgagattaatgggtgccaggacggttgaaaacgtttgagtacttttctgtcactcagattaaatgcgtcggtttctcaataaatgggaagcgaatcgttgcctgcaaaaagaaataaatattaatgatggccatcataaa

SEQ ID NO: 349942 - DNA, 1113 bp, Cannabis indica
ttggtaagctcggttaagggtgttgaaattttagaaaacccttctacaaaccgacgataataaccagccagacccaagaagctcctaacttctatcactgttctcggtctcggccaatccctgacagattctatctttcctggatccaccttgatcatgtctttgctaacaatgtgcccaagaaaggacacctgagatagctaaaattcgcacttcttgaattcggcgtataacttatgttctcgaagctgttgcagaaccatccggagatgtagctcatgctcctcttcggattgagagaacacaaggatgtcgtcgataaatacaataacacaaatatcgaggaaatcctttaataccctattcatcagatccatgaaagctgcgagagcattggttagtccaaaagacataaccagaaattcataatgtccatacctagtgcgaaaagctgtctttggaatgtcctcctctcgaattctcaattgatgatagcccgatcggagatcaatctttgaaaagaccgtcttcccctaaagttgatcaaaaagatcatcgatcctaggtgaaggatatttattcttgattgttagcttattcaattccaggtagtcaatgcacattcgtaatgacccatctttcttcttaacaaacaataccggagctccccagggtgacacactaggccgtgaaatccctatgtcaagcaacccctggagttgaattttcagctctttaagttctgctagagccattctgtaaggggccttagaaccggttctgctctaagtgcaaaatcaatttctctctgcgatggtaaacccgaaagttcattaagaaaaacatctagaaattcctgaaccaccttgatgtcttctggccgaacaaagtcaggctgagtggtatccaataccacaaccagaaaccctagacatccatctcgtaacaattctttagctgttagtaccgaaattattgggatctgtgatccctgaaccgatttgacaaaaacaaatgttcttctccttctggttggaagattaccatcttcctcttacaatcaatactggctgagtacttggacaagaaatccattcccagtataatatcaaa

SEQ ID NO: 349943 - DNA, 560 bp, Cannabis indica
tacagagatttatttgaattcaagaatacattttatatgtcatttatggaaattcatatttttgcatgttttgtgccaggcaatattggaatgcggcgtttggctattagaatcccatcttagtatttttagtatagcgtggaaatatagttagactttgggtcgagatttcagatttgaccaatttatccgtaagtggttttatgacttttagtgtaggcaagggcattatggtctttttgcctttttgggatttttgtcatttagtgagagtttgaatttgatggcccatcaacaaaaagtagctcgatatttcaataaacaagtgaaggctcgaaaattcttcttgggagatatgatcctgagaaaggtattcctaaacaccaaagacagtacggcaggtgtacttggacctaactgggaaggaccatatcaagtggtcgaagttctcgaatccgagcatcaaatagtaagtatgacgaaaaaaagcaactcgtctagtaccacggtattggaatggaacgattaagaaatactaccaataaagtaccaggtcggac

SEQ ID NO: 349944 - DNA, 633 bp, Cannabis indica
gttttacaatttatttatagttgatttctagttgtttttctatattttgctgagtaaggtgtatttttataattttaaaattttaagtgtatttttgtaaataaaaaatttagattgtaaataaaatataaaatatagtatttataaaaatttccgagcacatttggaaaaagtttgtcaaatatagcatttattaatttttgtgttaaattaaacacattttttatcacttacattggaaatgttcttatgtcttctccactaatcttaatatcttaggcaaatttaatgagcacgctaattttaaattttattgtttacatagtattgacaagtaatcgattaaaattattacgggctaaatgtgacaagtataatagagtaagaatttcaatttttttaaatttgtcaactgatcattgagattagattctgaaatgtatacttagcttaaatatgaaaagaacaaaaattaagaaatgcgtttttgccatttaaaaaaaaaaaacatgtatatttgaaaatctaaaccccattcgaatagaataaaggtcatttgttttagggttaatttcacaaagcacaaaaacaacaaaaaaataacaaaaataaaagtttcacgaaattttaaac

SEQ ID NO: 349945 - DNA, 599 bp, Cannabis indica
aaattaattatatacttaaaataaattaatttataattaaaatattttataacacatttttcacaactaatatttataaatattttttttatttataaggaaataaataaaactaggttaggataagcttaatagtaatttattaattatttttatttaatttataaattaatcacaatcgtttaataatgattcaacaaccaaaacaaatgtaaacatcgtggttacatatttgatataaccattgaaacttttttcatatgtatataaatatatatttaatttcagactcaaaaaatgtgtagcgtaaaataaaattatcttactaatgattaattgtacgataactgtgcatattatataaggattttttcaaaaatatacttaaaatataaattatttacaaaaataccttaataaatctcaattacaataataccttgccacgtcattaaaaaataccttaattctaaaataatatgcctgaaacgaaattaatctcaaattccgtttttttattattttttcgtgttttcaaaaataaccttttggttacttatgacgctgataaaaaactaattagttacttttacgtaaaa

SEQ ID NO: 349946 - DNA, 675 bp, Cannabis indica
atcacattcaagatggccagtctgaaatatgtaattaaaatgaataagaacaaatcacacgatatagggaagaaaaactaataatcacattaactgaaataaagaaacatcatctaacattcatcatatccctaaattgggaatttagttcaaaaagctcatgttcacatccataaaaattgaaatagaaattaacataaagacataaaaaggggaagaaagaactagttggtgatcttcctccgggctgccacaattgcttcctttgcctcctccttcatctctagggtttaatttctgcctctattgcctctaaaacacgcaacccttatataggaattagggcttctaactctgaatggtgaaagtcaaaatctggccaaaaatcttgtgttttgcccctggtcgtgactaaataaagcctagtcgtgaccataggcaaaatacaaaaattaagctcgctgcctggcctcctagtcgcgaccatggaaaatgttggtcgcgactactgaagcaaattcgacagcttcagtatctttcagtaaaatatgcataactttcacatacgaactctaaatgagttgattcaagatgcgttggaaagaaaaaaaaagaaaatctaaaacttccaatgttttgactttttccaaaatataatcagaacatagtcaaatt

SEQ ID NO: 349947 - DNA, 495 bp, Cannabis indica
atatggagtatttcttaataggtattaccaattaatggataataaataaatttaactataaatactaattttaaaaatatcaaaccattagatcttggtccgatagcgaataataaaagagaaatttaaatttctatgcttaatttagctagttaatcaaaaaaaaaatatatcaaaaaatacttattttttacactatataaaaaatatgtttatatgtaaaatacttaagttgaattcaatttttttatcacttttttgcctaatttttttttattatttttttttcaactgatggaccaatctcaacccatataatgtaaaaataagaaatttttctaattaaatagaaaaattaatcataaaactcaaaattttctaatattacctattcatgggtaatacctattaagagtgcacccatatatctattctatataaagtgtgcctatataaccgaattcttggtttatgagaaattcgtgggtgactttt

SEQ ID NO: 349948 - DNA, 859 bp, Cannabis indica
ctgttcgcagcaagaaaagaggaaaaaaagaaagctttgtcatttcaaagacaagagaagaaggagagaagatgatgggctcggctgccatgtttgaagagtgaagtgttcagctgctagggtttctaagcaaagaaaataggaaaagaagaaatagggccggctgggttttttttgtttgaagagagaaaagtgttgctagggttttctggaaaagaaaagaaagcatttatatgaaaataaatgcaatagagttttgaaattaaatctgaccttgaaaagaggaggcatattcggataatagagagaatattctctttggatccgcacaaagagaaaaagacgaaattgcccttgcttttatgaacgttggggtgttggtgtaggggtagtttaggcatctcgggatgccagctatttcctacagtggtatcagagctcggggaagcaagaagatttaacaacacctggaaacaacatcaagaaacaagcaagatcatcaaaacattgaagaagcaaaatctgaaattatcaagaaaaggaaaactctaacctaaactttgtcttgttacattcttacttttattatcttgttataacaattaaacatgagtaatattagagtagatgttgacaagtttgatggatcgggggactataggatttggaggaagaagattagagctcttcttgctcataacaaattacttagggttcttagtgaacctatagaatggccagaaaatacttctaaatctacacaagaagaacttcttgaaactgctactggtttaatcatttttaacttgtctgatgctattatcaggttagttgataaagaagatacaccagcaaaaat

SEQ ID NO: 349949 - DNA, 756 bp, Cannabis indica
aagccgagcaagacagtataaaacatatcaataatatgctcatcatacaatataaatagtaatgccattcaattcttcctgtgtgacacagacctgcatgttgcgctcacattcttatttatgtttacgtggcgtagacctacgtgttgcgctcacacgtctatttatgtctacgtggcatagacctacgtgttgctctcacacgtctaagtacaataaggccttagaatggttcctcttggttctagttaccgagtccaacctgataatgccctgaacacataatcctaaaatctcagtatatccatacacatagcatggcatagcatatatacaactcatatcactagggtaataacccaaggctattaaccgctcatgttagggtaatagccctaatcccttttaccatttactcacatatatcattttcaacatatgtgccaccgcgcatactttacgtgctaaccgctgtcttacctgttgtcccacaatagcagagattccaaatccctgggtgctcttgaccaggtgccggtaatcctagtcacaattccgggatttacacaaatagggttaatccctaaatccactcccacaacaatataaaattggcattcaaattacaggtaatcacatagatctcggaacgagctttccaacggtataaagaacgttccaaacggagtcccgagtcaaaagttatggcaaaaacaaaaactcataaaaattctattatatgtacataatgtatga

SEQ ID NO: 349950 - DNA, 1200 bp, Cannabis indica
catgcggcaagggtattactggttgacactgctacaagacaccttcaacttcgaaaagaaatgcgacaagtgtcagcgaatagccacgtatgttaaccaacctccgagtcacttgcactctatcacgagcccttggccctttgtggtttggggcatcgacctgataggggagttaccaaaaggaaaaggcggagtcaaatacgccgtagtcgcggttgactactttaccaattgtgccgaagcaaaggcactattaactatcacagcaaccatgcacgactataattccataatctgtcgatttggcattccttacaaggtcatctcacacaacggaaagcaatttgattgtaaggaaatgcgacaattgtgcgatgagtcaggaattaaaaaagcattctcagcagtcgcttacccgcagagcaatgggcaaacagaagctgtcaacaagataatcaaatataccatcaaaggaaaactcgaagatcgtaagggggtatggccagaagaactttcgcaagttttatggtcatacaacccaacccccagatccacgattggtgaaactcctttctcactctcttatggatgcgaggccatgataccagtcaaggttggggtaggttccctacgaagagatgttttcaacattgtgtagaacgaagaaaaacaattgcttcacctcgaccttttagaagaaaagcgcgatcaggctcacctaaaaaatgcggcttatcagcagcgaaccgcgcggtatttcaactctaaggtcaaagagagaattctgcgagtaggagatttggttcttcgaaaagtaatgccaaacacgaaaaacccagcgcatggggttttcggagataattgggaaggaccataccttatcgccgagaaggttggtaatgcaagatatcgacttgaagaactcgatggaactgtaatccgaagagcttggaatggcgaaagcttgaaattttattatcaatagtactcacattgtatcggttgtactcattatgtatttatacttagtcaatttatctacataaaaaatctaagtatagggggtatgtaacccactcactttgtactattgattaatctatttcttataaagagttatggaattttctcaagcttttaaaatttttctactttagtatttattacaccaagctgtaattaaaccacaatcgagatgat

SEQ ID NO: 349951 - DNA, 705 bp, Cannabis indica
atcttgctttatatctctccaccgcgcctttatagcattattcttttccttgtacacccactttactccaattggcttgtatccttgtggaagaatagctggctcccatgtgtcgttttttgtaattgaatcgatttctttatccatcgcatctcttcatttcttgcttcttactacttcttggtagcttagaggttcacaataaccaaatagacacataagagaaatatcattttgattctcagttacctcataaagttcttgcaagcttctaaagcgtggcattttttcatttgagctctcacttgaatcttcttgtatatttccagttggcgagattggtggagtagtaggttcttaaagttcttctttcatccttggttgctccgctacatcttcctctttaaagtaaggaaaaaaatcatactcatcttcttctgtgttccaattccaagaatattcttcatcaaactttacatcgcaactgatgatagttttgccagtaattggattgtacaacttgtagcctttggatcttgagtcatagccgatgaagatgtacttctcacttttgtcatcaagctttgttctcttctgatcgggaacatgaacataagcaatagttccaaagactcagaggtgagaaattccaggttttcttccacttcttgaggtgtcttctcatgtacacttcttgttggagag

SEQ ID NO: 349952 - DNA, 1004 bp, Cannabis indica
agaacggtaaatttgtctctacttcatgtagatcatctagaggatctttgattatttagattgaaataataggtaattcaaagtgaattaatttttggtatatagagtgttctatataatcaggagtccaattatgtatctatagtggagtcgggaagaattaataagttaggaaattgacttggtaaattttagatctacttattgggagcttggtaacatagggccatggtccacacactaactgggataatattattttgtagtcttaattaattggttttaattaatcaattagaattctaaataatactatttcttgtttgtgaatttttactaagcaatggcttatttgagaagaaaagaagatttagggtttatttattaattaagagactttgtaaggtctaattcataaataaattaaatgacaattttttttataattattaaatagatagaattgacatttatagagttagaattaaaatatggcatttgtgaaaagaaagatgagtttaaataaaatggtaaattgaaacccaataggcccactatagggttcgaccaaggagattaataaagtcattatttttatattttttaattctaaacctaaccctaaaaactaccctataaataaaaaagtatatatctcttattttcatatgaggatcagactcctttgtcagacaaaatagaaaatagagaagagccaccatctatttcgaaatcctcttcttcttcctctgttattttcaaagccttggtaaattgagagtatacccacacatgtcaaagcaatacctaacatattgagaaatattgtgttgaagcaaatcgaaggagagaagatccagattcagatcttgataatgctctgctatagacaagaattaagggctagagatctgaatggaatgagtcattatatttcgttgccatcaatgtaaggattcttaatgtcttatgtgtttattttattgttttaggaaattcatatt

SEQ ID NO: 349953 - DNA, 466 bp, Cannabis indica
aaatgatcaagaaaagattagtaacaaataataatcaaatatttgtttatcatcaaaataaatgagtgaatgacttttggtcaacattatcatgttacttctgatttcctaaatgtaatcttacatgattgcaattaataaattgatgatttattttttaaaaaaaaattatataaaactcagtatttaattaaattaaaaaattatactaaacaccaattttaattttagcaattctctttcgataacatctccgatttatcatttctcgagtattaaaataacgatgttatcattaaaataatattttagcatcaatccaattagaaataatgtcagtgcattttgtaacgttaaattaaaatattaaacaaatataacaaaaaaaaaattacgggtgttcatcaaaccgcccaaaccgctcaaaccgctcgcaccgcaaaaaaaaatgcggtttgaaattctt

SEQ ID NO: 349954 - DNA, 1079 bp, Cannabis indica
tctcaatgtgcttagttcgctcgtggaacacaagatttgagacaatatgaagagcaacttggttatcacaccaaaattttgctggaactgaagttttaaacccgatttcagtcaaaaggtgataaatccatactatctcacacacagactgtgccaaggctctatatcctgattttgcaccagatttagacacaacattttgcttcttactcttctaagagatcagattttccccaacaaatacacaataacctgaaatggatcatctatctaccttggagcctgcccaatctgcatcagagaaatactcaatctaggtgtgtccatgatccttataaacaatacctcatcctagtgctcctttcaagtaacacaaattttgctctaatactgcctaatgatgaattgttggagaagacataaactaactaacaacactaattgagaataaaatatcttgacaagtcatagttagataattcaactttttaactaatctctgatatttcttagtatcttcaaatggttccccatcacgtgtaagatgcataactagatttattggagtaatacaaggttttactcccaattttcctgtttcagttaacaaatcaagtacatacttcatttgagacataaaaatgccttatttatttcgagtaacttcaactctcaagaaatacttgagcacccctaaatcattcgtgtgaaattgaatatgaatgaaagacttaaaagatgagatgcctctaatatcatttcaagtaataatgatggcatcgacatacacaacgataccagtagctgatcttttatagaacacataatgatctaacttaccttttcacaaaccatatttctcaacagtttgactaaacttaccaaaccaagcatgagtactttatttcaatccatataaagatttgtgaagatgaaaagctcgtcctcactccccgagcaacaaacccaagaggttgctctatatacacttctttctcaagatctccatgaagaaaataatttttaatattcaagcttgtgcaaaggccaatgatgagtagtttgttgggttttatgcc

SEQ ID NO: 349955 - DNA, 1049 bp, Cannabis indica
ttttggacaaaaatttataattttactgccacatagaaatttttacaaaaacacttttttttataaaataactataaaacactaaacagaataattaaaaacaacagtggaataatagataaaatttaatatagtacactgtataaaaaatatatagttttttagaaaaaaaaaaaaatcgtttcacagtaaaaaagaaaaaaaaagttgaaaatttcaatatgtggtgtaaaaatctctttataattagaaaatcaaggcgggtgaaaaagttgaatttaaatttcaagggttttttttcataaatatggaaaaatgtaatggaatttacttttatatggcataaataatgcaaaaaaaatatatgtgattaaaaaataattaaagtttaaaatatgagaaaaaaacaataaataaatttggtaaaatttgtaataataagtttgccagaaaagtcactagtgctgaaaaagtcgtcgatggtggaaaaattatcgtcgccgaaaaattacagtcgttggaaaagtcactggaaaagtcaccagaagtagatgtcttagatataaataaaaatagaactggctctataacaatcaataaaaacaaataacacaaaataactcaaactgattataattgacatataactggttctataacacaatgaataaaagcaaataaaataaaataacccaaaccagttataattaaaatagaatcgattctataacaatgttataatgaatagaaacaaataacacgaaataactcaaactggttataactaaaatagaatcggttatataacataatgaatacaaacaagtaatacgaaataactcaaatcgattacaattaaaaacacaaatagaaatcagttcatgaaacattgaaacataaattaaaaacaaaactagctccacaacaaaatacctcattacacataatacctcataaaccagttataatttttttttaaaaaaaaaaaaagtaggggatcaattccgaaaaatattgaggcataaatatgaaaagaatcggttccataa

SEQ ID NO: 349956 - DNA, 590 bp, Cannabis indica
atgctccaagtggactccacgtgtcaccattctcgtgatgccacgtcatagtgcaaaatttgggataacatttgcccccaagtctgtacgggacctctgaggttgcgagtagacttcttccgagctggttctgcctttggatggggacacgtgttgagcatgaccgttcgagacttgatgtgaagctgattgggcatcccttcggttttcggctaataaatgctctgacaattaatatttcaaaatctgattttctctctccacggctgacggttgcactcgattacttttgatttcccatattcatttttgaggcgggaagctgaggtatctgaggtttctttgatgcagttacctcttttcgtgacttgcgtacaaatacctatagcattggcacataaactcattttatcacccttctttgctaagtaaactccagagcgaaaagagagttttctggcttcaaagttgccaaagtgccttcatataactgttggttggcttgacgttgctcgaacacagacatttgaatctttgagtaagtttctgatttcctttatgcttttctttgcatgttaacactttgaatg

SEQ ID NO: 349957 - DNA, 712 bp, Cannabis indica
tttggaaacccaaaatttgagccaaaaagcctaaagaattggcctaaaaagggcccaaaatctctccctagtcgtggcgggctgtcatttgtttgtagaaggtgcatcagcgccttgtctcctctgaagccccatgcgcgcgtgaagcacacggacgctcctggtctgtgtgttttgtccactcacccaatcgagagtgggcttcctccatctgtgctctctaaggctaaaatgcctttttttttctttccttcagcatgtgacaaggggcacataaatggccaacttgttctcttttcaaccaaccaacaaccgacacatggcactgactcatcaaaggcaagcaatccaattgtgacacgtggcaggtctgaattaaactattgggtaattgcatttttatccacatgcaatttataataagtttaatgatgcattagttcttttatcttcctataaatagaagcttaggtttctagaaattgatacagttttagatagaaaaatttagagaaaacgttcgaaacgctcagtattagtttaccgctattcttagttaattttcttatgggaatctaagttcccttattattgagatagacgatgaaacctagtatatttaattaagtattttttttattctcagtacaatatatgcttatgatttttgtttcttaaaataatttttttcatctttaatatcacgtatttt

SEQ ID NO: 349958 - DNA, 516 bp, Cannabis indica
agcaccacgtggttgccatgttcccttaagctctaacagctagcccccactccgcctgatgcagttgacgaaaggatcccaccatctcaaccactctccactaaatgtaacttatggtaccactattctcaacaatttgtgccatttttaccactaagtggtacacgaaaacacatgtaatgggatcattttagctctataaatagaccagtttagagagtgaaaaacaatcagattttagtagtgttattataccaaaattttatttttttcctttccttcttctttattttactttattaattttggtgtaaagacaatgccttttctaggctaatttctttggcaagactcaagtgtaagttcatgtaatttttatttctctaatatattgattctctttgttcttcatttccatatttattatattaaatttctcttcttctaaattgcactttaaatttaatagtaccttttatataagttcagtcatgcttttcttatgtaagttaggct

SEQ ID NO: 349959 - DNA, 654 bp, Cannabis indica
tatatataaatatgtacatatacttatgatcggcctatcagagttcgaaaaaaaaaaggattaaatattcacattgagcaatcattgctaaaagaaaaaaaactgggcttatatacaaattatatatattgttgaaattatatatgttggcccatacatgtgcgatcacagtattgacccaggcatatatacgtataaatatatatatgtatacaaataagattaaaattattgtatttgtcttgtcgtatatatatgtatttatgtgatatatgttcattaatgtcattccttacacctacataagatggtaaacaaatactgacatttaatcaaatctcaaggacacaaaggagtgccacgtttcaatagttgcatgagtagaagaaaaattagcattatggctaataaaaggagagtgtatataaatatatatacataaaaaaaacttctagttacctactcaaaattgagtcgtggtagagaatcgaatcttcaaattcaaatgataaaaaaatgagtagacgaatgaaggtcctacactgataaacgagagatgactcaaagtgtggcaacctagcaggagagactcaactttctgaattcgttgaaaaaaacacatgtttcgttgagcattataagatatttatatac

SEQ ID NO: 349960 - DNA, 583 bp, Cannabis indica
aagtccaaatccatccagacttcccagaccacaaagtccaaatcggagcccagctggaccccgacatgagatctaaacttattgaatttttgattgctaaccatgatcaatttgcttggtcccatgcggatatgaccggtattaaccctgagattattgtccacaggttacaggtagatccaaattacccacccaggagacaaaagagaagaaagtttgcccctgagagaaaccaagcaataaatgaagaagtccagaagttaatcgagaacgggtttataagagaagtccagtacccagactggctggcaaacgtagtgattgtgaaaaagaaaaatggcaagtggagggtctgcatcgattttacagacctcaacaaggcgtgcccaaaagactcatttccattaccacatattgacatgctggtagacgccacagcaggacacgaactccttagcttcatggatgctttctcaggatataaccagatccttatgcatccagaagaccaggagaagacagctttcatgaccaacctaggaatcttttgttacaaggtgatgccgttcggactgaagaatgc

SEQ ID NO: 349961 - DNA, 500 bp, Cannabis indica
ggatgctctaagtcgtaaaggaccagggcaagtttgtgaactaaagaaaatttcagcaaagttggctgaggatatgacgagagcgggaattgaatttgtaattggaaaacttgctaatatcaccatacagtctaatctattggaaagaattagagtagcccaacaaggtgaccttgagctacagggacataaggagaagttagaggctggattggcaagagacttttcgtgcttatctgatgggttgttgcgatacaaaaacagaatctgtgtaccggttgataaagaaatcagacaagagattcttgatgaatctcatactacaccgtactccttacacccgggaacaaccaagatgtatcatgatgtgaaagctttatactggtggccgggtatgaagagggatattgttgaatatgtgtcaaaatgcttaacctgtcaacaaattaaagcagaacatcaaaggccggcaggtttgcttcaacctctaaagattcctg

SEQ ID NO: 349962 - DNA, 445 bp, Cannabis indica
tttttgtttcaaacctctatgtttcttttgagatttttctaaattaccaaaataatttattttaaacatattttgcaacgtgaaatatttaggcctgatatgtccttttctaccacaaaaatgacaagtaggaacaaatctttttacctcagatcttactcttttggtaaatccttggaattttgcgtcaacagaaacagcttctgcaacgacaggtttagaatctgttgcagcagacttcacatttgcagcatcaggaagattcgtcggaacactagattttacaaacttcgtgattccagaactttccataccatttgatctgatgcctgcaagtttttcttaaattaatttcaaaatatatgaatggaaaataattccatttattttgaaattaattatggtgctaatcaattttattaggttaaactaatttaattaacct

SEQ ID NO: 349963 - DNA, 602 bp, Cannabis indica
aaaataagttcaagactcaatttatatgggttagcgaaacagccctcaaggttttagtaaacccttttatctttgttttttgtaaaaacccgaaataaagggtttcacttaaaatccttttacccagctataatgtctcatttaggatcaatactctcaacccctactcttctcttctcaaatcctttaccccaatatgctccatctttcaactcaaatcacacccagccgacgattcaggtattttttttcattattattttcaactcatttgcattttaaatatttcatcatttttcaatttaaggtttattcctaccattttctgtgagtttatatttttttctgcttgttttgttttatttttctttttgttaaatatgtcttttagtttagggaatattgattagaaatctatagactgaaaatttggactagatttttaagccacactcgctcgctagtttaacaagaatacaaaagtagttaagtattataagagagacaacaaacttatagtatttcactctctgtatcgtgacaataatggagttacgcctacttcgagtttttatttctcacaagatggtattacagaaaaa

SEQ ID NO: 349964 - DNA, 1485 bp, Cannabis indica
aaaactgattaaaaaagtgctaccaaacgccacataaattgctttataaatttttttttctccaaaattttaggaggggccatggccccctttggagccaaagtagcttcttccctgcgtacgcgatcataaaaaaattagactaaaaatctctcctagataccgttgttagaattcttcatcactcataaaatatgcaatatcaagattaatttcatggacaaacatattacatattattataagtgtataaatatagatataataaatacatttgttgattcaaagagaagaagaatatgaatagcgaaagtgtaccttaatccattgataaagatgatctttgtggtaatttttgataatgatcttccaagaatacaagatttacggttctctagttatctttcttaattggagaagatgagaatatacttgctcttgtttcttggggacattaattttagtatttataatttagtctcttcataaattacaaatatctcttaaggtatctacacatttagcacatgacactttaatacccaatgacccacaattactaaaatgatcattttatttgggtcaaattttatatagcaatacacaaaaatatatatgagcccacattaaagattttaatccaataatcttttactttgggctacatatattttcttatagtgtgtatccttataagcacttaaattttgatatcataattataggtatttcaaaataatcttatctattgattatactaacataggatcaaagcggctttcgccacatttagtgtggccaaacctattactggtcacatatatcaatataaccaaatgacatagatcaatcatatatgtgtagcatgaaaattacatgcaaatatgatcttagcatacctatatccaactggtcatccttaattgagatcaattctttagtctttctttaccgacttcttcttttttgagagctttagtgccgtgttatagcactctcttgaactgattggactcctcgcacgaatcccacacccgcagggtagggaatttcatcgtaagatgatagattgagattactatcttcatatctttcaaaatggggcgacctatcactgcattgtatgtggaatattggtcgactattgtaaaatcggccattgacttggcagtgacaggggcggttcccagagtgattggaagtttgatcattcctttcagtgcgattgtatctccactgaatccatagatactcgaggttacaggtcacaagtccttctcctgcaaccccatttgcttaaaagcttaaaaattgagaagattaactgaactcccattgtccactaaaattcggtgtactttatctcctcttatatttgtgattatcacgagtgcgtcaacgtgtggatgatgaacccacctggcgtcactctccatgaaggttatgtcatcatattccttcttgaaaaacttctcaggtcgctca

SEQ ID NO: 349965 - DNA, 674 bp, Cannabis indica
gtgtgagtgcttacttcctcccgatgacctctctcttgttcaatcaagttgttctaacctaccctaagatagagtaagaacatatatgaaaacactagaacctagatgaacaactaggttctcacaaaaagaactttctctcttcacaaatgagaaaaatgcaaaagatgaaaggtagaagagatgattcgaatggctactctctaggttctatttatagaacatagaaaccctagagttagcgacaaagtttaatcaacaactgtacaaaactttcctaaacataatcctgatttgcagcaacagagacaggttctgctgcagcaaaccagaccagaaaaggaaacttgccaaaaacgtgtctgatcatgtatttggtcttgatacctgccaaacacagtgtgtttgatctgatcttatcaagacacaatcgaactcaataaggaaaataagaatagtaaaagtttccataaaaagcaaactttccataagagaatttcttctcttacaagaagtttccaaactaagaaaaggccagctgaaatagaatctttcctatgatagaaaagagcaataaaaacaacaaataaggtgagaaaatcgattttataaaagccaacaaattacaccataaataaaaaatattttggcatctaaattgccaaaaaagaact

SEQ ID NO: 349966 - DNA, 720 bp, Cannabis indica
ggctaattaagttcgttaaaaatacttcttaaacttttaaaattgttaaaaatgccctttgaactatggagattgttagatttaataacttttgttcaattttagtaaaaaaaatctaacatagatgaaaagttcagaggacatgatttagtacatgtaaaagttccaggggcatgatttggtaggtatcaaagtctaaggagcatgattagtacataaacaatcactgaaatatttaaattgaatgaaattagataaaagtccttacaatattaaaatttcaatagtttagggagaatttttaacagctagaaaaatttagagtgcatgattcgatacatgttaaaatttaggggacaaaaatactaattaaccttaaaaatatgatcatagtcataatttattagtttacatggcctcacaaagaggaggtactaagtctaaatctctcctcttccaattatattaatatatattaactaaaaagttattaatatattatttgaaaaataaacagcatttctttatatattatagaaacactataattttgtttaaaatttaagttaaaatagctcatataatagagctatcttttatagttttttcacctttttcttctctattttgaagaaaataggattatatatagctcagcaagtgtgagttaacttgctacttattatacaattttgattcaaatgtatatatatatttata

SEQ ID NO: 349967 - DNA, 982 bp, Cannabis indica
tctttaatggtgaattttgattttgagcatgttaggttgttctgttgcttggattatgttctatggggtatattaagcatgtctagaaggttcggtatgatttggattcaaattggtttaggtttcgaattttttgtgttacctggtgaaaaccggttacccagttttacaggtcctgtaaaaccggttcactagatcagcagctgggttcccgaatttttcgtattgtcgattcgtgttagtttcagagctttggttggttgattccttgtttatttagggtatttccatgttaactttcaataggaaaacttttggcttgaaacctaagtctccggaatgtgatttagcgtgtcactcacctctgttacaaatgatgtgatttaggggcctgtaatttgccgagtagttgttccactcaagttggccggcacacctgaattcggaaacgaggtaagattagtatagtgttatgcatatgtatttacatgtttaacatacatgttaattatgcatgttagagtacattggctatacatatcagtatacgtagagttgtactggatactgatagatgtatatttggctcaaatactgattgatatcacatcagtatggctagaatatgactagcatattgagtataggctgatattatggtcgataatattgtcgtatgaatgttctagactcagcaccgtgtgggacacgggatagggttatggttgggtgtatgggcgcttgattataatccgggttattgctatgttaatatttatgcttttcttactgagtctgttgactcacagctgctatttccatgtgtaggtaagggcaaggctaaggctgagcagccgtgagagcaagcagatggagattgtacatgtcgggcggttaggcctagagcgtacattctttgggacatcaggactttattttgtatagtcgctaggcgacacacttttgtatatgcacagtgaaa

SEQ ID NO: 349968 - DNA, 647 bp, Cannabis indica
gtgttcattggacaggctgcttggaaccccagttctagagaaccaacaagtgttgctgaagcacttgcccacaaaggttggaacaaagctatgaatgaagaaatcatagctttaaaaactaacaaaacctatgttctagttcctccttcacctgatcagaatttaattggaaacaagtgggtgttcagagaaaaattcaactcagatggaactctccaaaggctcaaggcacggctggtcgcaaaaggatttcaccaaagaccaggaattgactttggagagacttacagcccagtcattaaagcatcgacagttagaattatccttgctatagccgtttctaaaggatgggacataaggcaattagacataaataatgccttcctaaatggaacacttgaagaggatgtgttcatggcacaacctgaaggattcgaagagaaagggaaagaacattttgtctgcaagttgaacaagtctctatacggcctaaagcaggcccctagagcgtggtttgacaagttaaaggcaacattaataagctggaacttcaaaaattcaagagctgatacttcactcttcttctttatacatgattccactattatcatagcattgatttatgtggatgatataatagtaaccgg

SEQ ID NO: 349969 - DNA, 685 bp, Cannabis indica
ccaattggtaactttagtaaacagaggtctaaatggtatttacctttttttttaagaaataaaaataaacaggttacatcaacaatagattatttgtttgagataacaagaatgaaagaatcgtggacggtagacctcaaagaaaaaacatgcacgtgcaataggttccaaattgatgatatatcgtgtggacatgctatggttgtgatgaaggagatgaacatggactcatacaagtactgttcagattactacacaaagaatattagctagcagcttatgcaggaacagtatacccattaggacaccaaagtgagtgagatgtaccgcaagatgtgaaagatattatagtcttgcctccaaatgaaaggattaaatctggaagactaaaaaaatgaggaggcaagctggatggaaaagaataaacataacaagttcagcaaatgtgaagagttggggcataataagagaacatgtagcagaagacatcgaaaatacaagaaaatccaaacaactatagaactattgtggaacagcagaagaaaactgaacatacattagagcataggatactacattgaatttagatatgtacaaaaaacatcgtaaaccacccaaaccgaataacccgcccaaactaaaccgaaaaaatcgataaaaattacaaaccgaaataacccgaaaa

SEQ ID NO: 349970 - DNA, 455 bp, Cannabis indica
ataaagtatgaacttaagttttgagtactctgaatattttctttctattaaggttagaaagaataaataaagaattgatctcaattaaagaggactagttggaaataggtatgttaagatcacatttgcatgtaattttcatgctacgcatctatgattgatctatgttatttgattatattaatatacgtgaccattgatgggtttagctatgttaaatgttgcgaaagctgttttgatcttatgttaatataatcaatagacgagattgttttgaaatacctataattatgatagcaaggtttaagcgcttataaggttacacactataagaaaacatatgtagcctacgtgggagattgttggattaaaatctctaatgtgggctcatatgtatttatgtgtattgctatataaagtttgacccaagtaaagtgatcattttagtaattgtg

SEQ ID NO: 349971 - DNA, 1207 bp, Cannabis indica
aaccttgggcgaggcacccctatctgcaactgttatgcaagacttctaagttgtcgacctgccatcggcttacaacatattgttgggtcgaccaacattgatcggactaggggcagtcagttcgatcaagcacctatccttgaaattccatacacaacaaggcatgggagtggttcatggcgaccagatgctagctcgcaattgctattgcattgagttgcagcataggaaagtgtgtcatcagttgatggagatcttggcagaagaaagtgaaaagaaaggcaaagatcttgacccctgagttcaagatgagagaaacctactaaaaccaattgaggaattagaggacattgttctcgacccaggaaatcccacaaagtgtgtatacattgggaagaacctggacgagcagctcaaatagcagctaataagttttctgaaggcaaaccaggatcaattttcttagagccatggagatatgataaggatcgaccctaatattatctgccatcatttaaatgttgatccaagctacccagcgaagaggcagaacatgagacctttgtattccgagagacaaggggcactaaaataagaagtggataagttgttggttaatgactcatgcgtgaggtattttatccctcgtggatagctaaccctgttctcgtcccgaagcctaacggaagttggagaacttgtattgatttctcttatctgaataaggcatgcccaaaagattgttttccactacccaagatcgaccagttagtggatgcaactgctggccacgagcttatgtcatttatggacgcataatctggatataaccagataaaaatgtatgtcccagatcaggaacacacaagtttcgtaaccaacatgggactctattgttataaagtcatgccgtttggattaaagaatgctagggaaacatatcagcgattggtaaacgagatgttcgcaaaccaaattgggaagaacatcgaggtttacgtcgatgatatgctagtaaaatcaataaaaaagtagggatcataccacagacctcacggtatgcttcgagatattgaagaagtataacatgaaactaaacccgaaaaaatgttccttttgagtttcctcaggaaaatttttaggattcatagttaacgcgaagggtattgaagcaaatcccaaaaaaatcaaggcattaactgacatg

SEQ ID NO: 349972 - DNA, 954 bp, Cannabis indica
atcagattgtaatgggttttatttagggcacaaaacccaacataaccatccgcttcggcaagtcctacagaagccggaggcatccgggagactcatcaaatgggctatggaattaagccagtttcatctacactacataccgcgcacttccataaaaggacaagcactagcggacttcataacagagtgcaatgaagcagaggctagtgcaaacattccaacgccacaaaccccagcatggaaagtatttgtggatggatcctccaacgaaaacggatccggggttggggtcgcaatgatatcaccgaacaaacttcgactccaggcggtgatacgtttcgaattcacagcttccaacaatgaggctgaatatcaaaagtcctgggtgccacaagagtagaagacttcagtgattcacagttggtggtaaaccaagtgtcgggagatatcaaacgcgtggagaaaaaattgatgcgtatgtagcagttgtctgggaactgctccatgagttcacggactacaaagtggaaagaatccccagagaaaagaattcccacgcatactgtttggctaagttagcatcaaacagcgagattgagaaactgggcgtggtacccgttgaacgcctcacgaaaccaagcattaaaaccaaaaatattgtggcagcagttgaacaagagctcaactggatgatccccatcatcgaatacataaccaaaggcgagttgccccaagagaggacattgtccagaaggatacagtatcaagcgcaccgttatgtgatgatggataacattctctaccgaagaggactcagcatgtcgtacctaaggtgtgtatcggaccctgaagctaagcaaattatgttagaggtccatgaggggttctgcggagatcatacaggaggcccgagtctctcaaagaagatattgagacaagggtacttctggccaa

SEQ ID NO: 349973 - DNA, 751 bp, Cannabis indica
agtgaaaattcataaataagacatagtctaattttagaattataactgattaattaaaaccaataaactgagtctgcaagtagtattatttcaactagtgtgggggaccatgagcctacattatcaagcttccgattagtagaactagaatttacgaagtaaattctctaacttattaattcatccttacgccactatagattgtaattgcactcttaattatatagaatactctatacttaccaaaatataggtatgctatgaattatcaatacttatagaagctatagtatctatatctatgattagcgctcccacttaattatactgtcatgttcccaagatgtaagtataagcccgaaccattagttagttcttatgatcaactctaagaacataaataatataattgagatcgaacttaaccatctcaggataaagatctattgacctaagatcaaccagtgatattgacttaaaaagatataattgtaagtttatggtatcttattcatgttcaatatcggtctaattcgatgcatactccatacatctgatattagcatactttgccaataccccggaaaggacataatacttatctaaggtgtaagtatactttattgctgattatcatgtcagtctaaatccagtgtattgataaatcatgggacataatcaatgattatattccactgtgctgacaacactataattatgaataattatatgttatggatttaataaaatt

SEQ ID NO: 349974 - DNA, 1001 bp, Cannabis indica
gtgtcaactgattagacatgctgactgtcctcatcattgccacgtgtaaaacaagaaagagcatacataccaaattgggtggcagtagtagtcccatacgtctttcacgtgtaccccaaccatactccactacctctatctcagattgggccctcatgggcccatgggcctactctttttagcaaaactcaaaacgtggtcgattttgtgggcccgttaggggaactggactcgactgtttcgtacataggaacatgggttattaaggtccacaattaagattggtcaacccatttgataagatctctcagctataacaaaaagtcatgattgccactaattaagcataatttggtggagcgcaatgtaaaataaaatcctgctctatcagagttttttttttttttttgtaaggtgtctttatgaagctttactgatacattgaataattaattatatgatttagaattagaaatgcacaattaacacacctaaaaaacattaggatttgattaggcccatttaagagcatttggtatgaaatcatatcttttgagaaatagtgtaatctatgctttgtaattgtttatatatattactcgcacactcttaaatttgattagccgacaagagagagaaaaaaaaaattaatcaattaattaaactaattgcaaataaaacatcattaagtatattttaaatagacaattaaatacgattttggatcatatgttttgtaaaagttactaattagacttttattttgttaaatgacaaaattaatcctatattttctaaaatagtacaaataggaccttgaattgatttttttttttcaaaataaaacctaatcataattcgatctatgacaaaatttgttatattttctgtatctgttcatattaggaattgtcttcaaattggttatattaaaaaatattgattaagttcaggggtcttatttttataattttaaaaaatacaagatctattttgttatt

SEQ ID NO: 349975 - DNA, 1378 bp, Cannabis indica
tgtcagcaagtgaaggctgaacatcagaggcctgtagggttgctgcatccattgaatattctagagtggaaatgggaagacattgcaatggacttcgtggtgggattacttataaccacaggatagtacgaatttgtgtgggtcatagtggacaagtttacaaagtcagcgcacttcttacctattcgaacgaacttctccattgatcagtatgttgagttatatgttagagaaattgttcatcttcatggtgtcccaaagtccattgttttggatagagatccaaaattcacattaagattctgagagagtctacatcgagttatgggaactcagttaaagtttagcacaacatttcatcctcagacgaatggacaatctgagaggactattcagatcttagaaaatatgctgcgggcatatgtgcttgactttgaaggatcatggataaagtaccttcccctgatcaagttctcatacagcaacagctatcaggcaacaaacgggttggccaccagcgtctcagagtagacagaagagttatgctaatccaaagcgtcgggacattgattttttagatcagggacatggtatttctccgaatattgcctaccaaaggcattaaacgcttttgtaagaaaggaaaacttagcccaatgttcattggaccttttgaaatccttgagaggatagggcaagtagcgtacaggttggctatgcccccagcgctggcagctgtacatgatatgttccacgttttgatgctttgaaagtatgtctcagattcgtcccatatcctgagttatgaagcattgtaactacagccaaatttatcatatgagaaacaaccgatgcaaatacttgacagtttggagaaagtcttgagaaacaagacgattgcactggtaaaagtattatggaggaacagtaaagtagaagaggcaacctgggaactcaagacagatatgcagcagaaatatctggtgttttttaggtaaatttcgggacaaaatttctatagggagagggtaattgtaataccctaggattaaggaaatggattagcaaaactcttactagttgattgagtattattgtgaaattatattattatataatttaatatatgtgaattaatatgagatttgatatgttaagaccccgtttgtgagctaggggtatttcagtaattttgacccaagatgggtaaaatagtgaaattaatttaaaaacgtgcttatggaactatattattatatggtatgcctgtgttgtctttttaaggtgtgttcttattggattttgtgccccaaataaaactcatttcaatataatcagatttacttatttttaaagatcagaaataacattttatgtt

SEQ ID NO: 349976 - DNA, 637 bp, Cannabis indica
atgggttttatttagggcacaaaacccaacaataacatgaaccaattgatacacaaagtgagtgaaaaaatacttctgtttctttattgatatttaaagaataaagattacattgaaattgacttttatttagggcataaaacccagcacaattaacctccaaaacttaaattttggcagtaaaatccccaaaaccatgatactgttagcaatttacaacttccatccaaatttagctgttaagtgccaggttggactatccatgtgtacacattgtacatgtggcacaattttattggcccacgtaaataaattattattttttaaaagaaataaaaataaattaatttaacataaaaattaaatacttttaattgaaaaaagtgctttttttttctcattgaattttcttcatcagttttcttttctttctctctctctaatatgcaagcaaccaccatcaacaaaaaaaagccacccagagagaagccattgttgttccttcgcccataccaccgcttgttctctctctcgctcatgagctcctctctctctcgtgtttggctcgatcctcttaacctggctatgatgggctacctccagtatcgtaggctcaatcggaggccatggatgacct

SEQ ID NO: 349977 - DNA, 782 bp, Cannabis indica
atttttgggggagatgctaacggttgagctgattttggtaatgttgagaacaaccacgatgtggagtctaggcctgcagtaagaggtagtctgtccttagattgagtttgcatggagacatactaggtgtttagaccctttagctctgcttcctttgcaagaaaaatctcttggggaacttgcttagatttgacaatctgtagtagttcctcgtgtacttgggaaattttgtagacaagtctgatcataacggtgtcaacttttgaaaatacttcattgatctgaataactttgtgggtagtcgtagatagtttctcgtctatctattggagggtcttgttttgggccagcatactctccatttgccagttaaggactgctttagttggggttattttctttaaggtaccatcagcttctcgaatgtttgggttaagaacttttggctggtgagtgatttttccagtttcatccataaagctgcatggaagtgggaatttgtcgttgataccttttagcatgaagagatttggtttggacttctttggtttatagcatgggagtaacagcttgtgctcatcatcttcgcattcccatcctgttggctgaatatcctcgtgaattattggtttggaggaatatttgactaggtagtcaaattttcctgagggttcaccgagtgggccaatatccttttggccactttcccaattctcttttagcttctttccagcacttttctttttgggtgcttcttcttgttcattggatgttgtacaatc

SEQ ID NO: 349978 - DNA, 719 bp, Cannabis indica
caacaaaacaacaatcaaagctcataattgaatttcaccattaaagctcaaagtttgagttctaaaactcaaaacttggttgaaccttcaaacaaccactaattcatgcttaattcaatataataaaccataactaaacctctgaaaacaatatcaaacaactacagcaatcgattcatgcaaaaattccatttcttaaaactcaagaactaaagaggaaattgcaagagacttacctagagatcaaaaacactctatccctgctgcaacaagcttgaaatgaaggaaaaaaatgcagcaaccctacttgcttctatggggtttcgaaagagagaggcaaagagagagagagaacccttttcttgatttttttctatttttgaataatgagaaaaagagttggttttatctacttaataatcaaattaacctaaaaatcagattaaaacaattaagaatttcactaaaggacaaaaactcactaggcaaaaagaccataatgcccttgcccacactaaaagtcatgaaatggcactaaggggtattttggaaaattctaaaatcctgactattcccgacattcccaatgtctgaattattgtcccgctatactaaaatactaagatgtgattctaatagccatacactgcattccaatgttgccaggcacaaaataagcaaaattatgaaatttctatatgtgacataaaaatgcattc

SEQ ID NO: 349979 - DNA, 1292 bp, Cannabis indica
taattaaattgaaaattcaatatctaagttgattttcatcatgatacttaaatattgttattttcatgatatttaattaaatagaaaattattttaagtttgaaatcttatttcagaataacttaaatttgaataattttcaaaatatatattttattttattttattaatcttttcccacaatttcgaaattgcatttcttaaatgcagaaatttcgaattttagatgagttgactgctaatgaatgatatctttgactctcgcctaaacgggacactgtattagtttgttggaaactttggaaattatttaggattgtttgtttttgtattttgacttgacattcctacttgctaagtgcttcataatttctgaatgtgtatgattttgtattgaaccttgatttctatttatttatattgtagtacctaatatgactacgaacaaccccatggtgtcactgttgactgaaaacaagctctgtggagctaactttgccaaatggaaagagaacattaatattgctctcataggtgaaaattctctgtttgtgttaactgaagaggctcatgagcagccaggtgagaatgagaccaaggcagtcaaggaaaagtttgagcgttggctgaatgctaacaacaaagctcgatactttatgctatctagcatggtcgataccttgaagacaaggtttgctaatactctcacggcagcagaaatcatgaaacaataaattgaactgtttgggatggcgtcacatcaagctcggtttgaggtgaccaagaattttatcaatgcacggatgaaacttcatcaaaacatgcgtgatcgatcacctactccagatggctagttacttccaggaagctgagaatcatggagctattatagattaggaaagtcaagtgagtttgatcttaaatagtttaactccagcttttctacccttcacatcaaactatgtcatgaacaagttgatttttgacttccacgagttaatcaacaacctttagacatttgagaatttgattggaggaccacagaaaggaggaaacaaagctcttagttctggctctgctaatggtacggccaaggctgaggcaaacattgcctctacttcgaaacccagcaagaagaagaagttgaaaaatagcaagaagccttttaaagctgttaacacaactaataagaataaaaaggttgctgattcaaaggcaaatcaaaaaggaaagtgcttctattgcaacgaaaagggttacgaaacggcttttaatcaattatctgaaaaaac

SEQ ID NO: 349980 - DNA, 629 bp, Cannabis indica
caaggggatgtacctacatctctagccggccaagagaagcctatagcccagctaggatgagcctataggtcggccaagatttgtgcacaagctagccagccaaaaagtgacttctagaccaagggagtttctgtttgaccaagggagtttctgtttgaccaagggaacccggcctctacaagaaaacggtgtacaaaactctccttaacttgcaaaaggctggcctccacatcaaaaggctagcctcctcttggtaaaactatagtgacctgcaggatcctagcagatacatgacttgccaggtcctggcaggagcatggccggccaaacctcaacctgcaagccttggccgaccagatctcaccctataggccttggccggccagacctcccttgtaggtctatgggcagccaggattaaccttgcatgactctatgtatagcctaaaacatggacaacaagctacctgtgaattgggcccttaacaacccaacagaccaatggaaaatatctactttcaaggggcaatttagtcttttgtgttttaagctttctatatacagaccttaactataacctagaaaacctaagtcagtaagcctagttctagcctccaaaccactctaag

SEQ ID NO: 349981 - DNA, 703 bp, Cannabis indica
caatcatcataagtatctcaactcgaagtatcaagaggagaaagaatttcaactctaattatttgatcaaccgttgctttagaaatatgacccaatcttttgtgccataataataaggatgttactttaatataaaatctcttacccacattattcgcaacattaaaagaggaagctaaggaagtcaatgataatttgaaaagaccgttagagtaaaaacaatttgcaataatctagagtcaaacataatgtcaacatgattattgcaaaaaggaaaagattatctctatttaaccaaaagtagaaacaaaactaaattacttttagaagtagcaggaacataaaaagtattgttcaagataatcatcactctaaactgtaattcaagaataaatgtgccaacttagatattgtcaacttcaacataagggcccactttaagctttgactccctctcaattggttttctaagatctcttagtcctcaattgtgattgcttcttttataattttccctttcctttgttggacttgagttaagaaagatagtgacaagatatattcttctctttttatagcttgatttcctcaactacatattaataaggtcactgacactccatgttatattactagtgttgtcggctgtcttgataagattaaaaaaatgcaagaagtgtatgaagagcacgatgaataatgt

SEQ ID NO: 349982 - DNA, 686 bp, Cannabis indica
tttttgatttggttttggtttcattcaattgggttatgtactattgaagatttagacctaattaagctgttgttattgtttaattgtgtggttgagcaagtttgagttcaagaactcaaagcttgctcaacaatggcactttttgattcttggtgcatttattgtgtttgagctgtaaaatatgtttattatcttatatgatgattctctggaaagtttggtggtgattagggaagattttagtaggttatggaggcttgaaagttgagatttttcatgttgtttctgcccagaaaatcgaaattctggttggttcaagctgttccaactgaaattccggttggactgtattgtggaagaccgtattttgttttggccataacttttgactcgagactctattttggacgttctttatatcattggaaagctcgtttgaagctctatatgttaatctgtaaatgtaatgctaattatgtgattattgaaagtgaattttaggattaaccctatttgtgaaatcccaagaatgtgtgacaaggactaccgatgcttgctcgtgaacacccagggatttggaatctccatatttgcgagacattaggtaagacactagtttgcacgtagagtcaagcgcggtggcgctcctgtgttatattattgtaacaccctaactatcttaggcg

SEQ ID NO: 349983 - DNA, 1004 bp, Cannabis indica
gttagatgcagaaaattcaaaacgtaaagcagcgtgtaccttgaaattattaggactgattaacaagatcccactaccggaaccttcgctatttgaggctccatcgacgtacaatgtccacgtctctctatttgctatagcaatgtcgcttctgtcttcaatgagtgctacctcggtgctgggaaattcaagtataaaatctgccaaggcttgccccttgatcgcagttcttggtttatacttgatgtcgaactgactcaactccattgcccatttcaacaatctccccgatgcttctggtttcgccagaacttgtcttaaggggtagttcgtcaaaacttcaatactgtgagcctggaaataaggtcgcaattttcttgatgatattatcaaggcaaatgccaacttctccatttggggataacgcgtctcggcatccagtaatcgcttactgacataatacaccgggtattgacgtccttggtcctcgcgtattagtaccgaactaatcgcatattccgacacggctaaatagatggataggacttcaccggtcaatggctttgacaagatcggaggttgccccaagtgtatttttaaagcttgaaaggcctgctcgcacttttcggtccaatggaactttttgttgcctttcaaaatctgaaaaaactccttgcacttatcagaagatctggatataaagcggtttaaagctgcgactttacctgtgaggctttgaacctcctttggcttagttagtgatggcatttccaccaacgccctgatcttcgcaggattagcctctattcctcgctgattaaccatgaacccaaggaattttccagaatcaactccaaagacacatttcagagggtttaaccgcatcttataccgtcgtaatatatcaaacatggtctgtaggtgggcaatatgatccttcgcatgttgagattttacgagcatatcgtcaacatatacctccatggtttttccaatgagatctg

SEQ ID NO: 349984 - DNA, 620 bp, Cannabis indica
atgagtacttcagggtggatggcacgggcataactcacactcggttccagcaaattccaacatatcaccgccctcccctcactctttctctcagggatagagctcaaaagcttgctcaactaccggggaaagatccaaatattatccagttgacttccgaggataattttgtgaagtacatgctctatcccaaggacttcattcctaagtccgtgacggggaagaagaggaaatgtgatgctggacgaattgaacgagctcattcggagaatgagttgattcaactgaagcatgaggctaagttgaagggaggttcaagggccaagcagtatgctcaggagcccttgaatcctgaagatgaagctgaggaagagcagctgactccgctcaagaggaagaagaaacttttggccccgcccatgcctgttgaacatgcaattcgcataagggagcccatttcacctgctcagccatctcctcccgtgttcggtaaaggaaaagctgttatgtctgaaataagatcgatgtcaagtgatgatggactttcgagtcttgtttgggcagtcaccttgcatactactttgtgttgtttttgagcttcttgacttttatgccttatg

SEQ ID NO: 349985 - DNA, 528 bp, Cannabis indica
aaatttgctgagggttagccttccaaaagttgtaaaaaatcttgagactgactgtctctaaggcatgtactttctcttccagcctcgtcgcctccgatttgtacttctcgatctcagctgtaagctccttatccttagacttcttctcttcttccagctgacggaagacagtccgaagaactcccctttcctcttgaaggctattcacttctgccgacagggtgccgatggtagcttcaagttggtcggaagcctcgaggtccttagtcaactcaactattttcccctcagcaataaaaagcttcttgttgacttcacccagctccattcggacagctccaagttccaccctggcgtcatcagcatccttcctagccaagtccacttccaccctcatggtgttagacatggcagcagtcttaaaggtagcagatttagctcgggaataggtgtaagccaactttagaccaacctacacaaagaaaaaacattagagtttgagccgagtaaataaggattaaaggaaac

SEQ ID NO: 349986 - DNA, 543 bp, Cannabis indica
tgaagcaagtcttggtcgattcgatgttcgctctcccaaaactcacctgggttcatctacaaaagacaacacacaagatgagtgtgtggccggattatcaaacgttaaaacaagcaaatatgttgaccaggagtactcaacagattaaagaataagaatgttcaaagaaaagtcaaaactcgggaagtttgacattttctcgagctagggcaaaaaatttcattaagcttagaagaagcaagatgaaatacatgcattatgcagttcagaaaaaaatattatggactgtgaaatcgcatgaacccatgaaaaggagaatcgcagagtttctaaacttagggtttcctacatatcttctacagcaaagttgaaggcgcattcaaaaaataaacatgcaaaagtaaacataaaggaaatcgagaacttactcaagaatcagatgtctggattcaggtaacgtcaaaccaaacgaccagtttcgatgaaggcacttcagcaaacttgaagctaaaaacctctcttttgctctgaacttacttagca

SEQ ID NO: 349987 - DNA, 749 bp, Cannabis indica
gaaccaaacccgaacccagacctagacctgggaaccaaaattaggacttgaacaagaatcaccaaccaggaccctagatcaagactaggaccgtgactaggacacaaacccagacctagaataaaacactaacctagcctcagactaaaactgagaacggaactcgggcccttacatggtcgtgtacccagactggaactgagacgccgacctggacctaaatctccgacccgatcccaaacacagacttaacataaggatccggatacaaaccatactcggaccaagacaaagactgggatcgaaatgcttgacctagatctggaccgagatcctaacccagacccaaactttaacccacactcgggaacccaacttggacctagacccgaacctagacccagataggggatcagatctagacacaaatcggacacagactcggacccgaactcaaacaaccacacctcgaatcagacccaaagctagacctggactcggacccatagtcgaacctagaccaggatcagaaccaacgaattagacccagaacttaatccagacacagatcaggattagaacttgggacttggacccaacctagacaaagacccaggacgcgaacccacactcggagccttacctggacctagacttaaatctggacccgaaccaaaactcagactaccactcgaactctgacccgaacaaaaacccaaactcgaactcagaatcgcaaatggaactag

SEQ ID NO: 349988 - DNA, 590 bp, Cannabis indica
atcaaataatactaatttttttaccacaattcgtatgactccattagtatggctttcgataaatattagcaactttccttaataggggtcattttattattaaaaaaaaataaaaataatataaaagaaattaattaattattagtataaaataatagtttgacatataatgaaaaaaaaaatgtgtgtatgtacaaatattttttctgactctacttaggcattatcctataacatataaaaatagtaaatatttttcaattttttttttctgaataatttttcaatgaaaatttataattaaaatattttttgctttatccctatgcttgatgaagatgctaaggtttcagttcttagatcaggtgatggttgttggaatgagactctggttcttagcttatttgatccggttgagtctcgctacaaaaaataactatctttagtgataatttttattcacaacataatatttttgtaactaaatgtgatttttagtcataataaaaagttatttgtgatatagtatgtagatacaagttgttactaatttagtgttaatcacaacaagtattgtgactaaaaataca

SEQ ID NO: 349989 - DNA, 834 bp, Cannabis indica
taagttcacattgaacttaggatgggaaccagcataaatctcttgtgttattgtgtctgacagtcatttagattcatcagtgttatatttttctggtttaatgtgtttcctagttttttgttcttgatttgttttttgatttaacttttgtttgtttaagtgtgatcttgaagcttgaattatagaggttaattcctatgtatcagagttaaatttccttcaaatcagagcttaattctttgatcatcaagaaaaattcaaagatcacttgctttcgcaccaagaactcattaagaatttatcaaggaattctacaagaacacagattgaaggaggatgtcgatggcaaggttcgaactgttggaatatcttttatcaggacctatatttactaagaagtatattttaacatcctaaatatgaatttctaaaacgataaaaataaacacataaaaggtatgagaaaccttacattggttgcagcggaattgaatgactccttccactcagatctctaacccttgtatatcctttctgtcgcagagtatcaccaagatctgagcccgaaactccttcagttgtgtggactcttcacagtcctacacactatgattgaggactaagttgctatgggtgggcatgcactcaatcactaaagcttgaattttaatggtgaagaagactctaggatttcgaattagaagaagagaaaagaagaagaagaagtctcaaactctctagttgtctgataagataaaaactaggttaagagtcatttcaagcattagttacataatgagacctttcttttctttttatactaattcacttacg

SEQ ID NO: 349990 - DNA, 1687 bp, Cannabis indica
ctagtctgggtccaggactgggtctgaacccgagttctgcgctaggttcgatctagttctgactccgggtcaaggtccaggtcacggttccggtcctgtttcatggtcctgatcacattctttttcaagtttcggttttgggtcccaggtttgggtttgggtctaggtccttttccagcttcgggtccttgtctgagtccctgatcaagacatcgagtgtgggtcgtgtccgagccccggttctctaatcatttgacaagatctgcatcccaatcacgggtcctagtcttgtttcaattcatgtcctaggtcggggtctaggtttgggtctaggtccaggaccgagactggggtccagttctgggtcccgagtcatgttcaatgttctggtctgaattcaggtctaggttcgtgtcttgagtcccagttcgggtttggatttagattttggacccaatcccatagtcggtctttgaccgagtcttggtccaggtctggttacagttttggctctatgttcatgtccttgtaatggtcttgttcttaggtcctgatctgcttctagtttcgattccagttttaagtcacggggtacgggttttggtcgagtttggatctgagtcttggttcgggtcgtgatttgggtatgaggcaaggtttgggttaaggttttggtctcaggtagggttcgaggctgcgtctgggcccaggtcccggtcccgttcaaagatcttggtccctttctaattcatgtttcgatttttgttcctgagtgttggtcgtagtcttcgtatgtgtccaggtcaaagtttgagtttgagtttgggttcgagttctggtctatatccttgatccagacactgaatactggttgggtccaagcatcgagtcccggatcccaggttccgaggtgggtcctatatccaggtttgggtctggggtcgagtccttgatcccgatccaagttctgagaccaatttctggtcctagtttgggggcccaattcccaggtctgggtccaccatctatgttcaggtcctaggtttcggcctgaatccaagttcgtgttcaggttcgggttcgggttcggtccgagtttaggccgcgatttgggttagggtccgagtatgggtcacagtcccattctaggtctgggcctcgagtcccaagtctcagtctggttcttgggtcctgagtttggcacggatgtccaagtttgggtccgagtaccgtgttccgattttggtctgggttccgtggcttaggtccaggtcccccatccaggttcgagtcctatgatccggtttggggcctagtcccagtttcaatttctattcagtgtctgggttcgagtttgggtctgggtctgggttgaggtctgattcctggtccgagtctaagtctgagtctaggtccaggtccggatcccgatctgggtctgggtttaggtccaggttcaagtttgggtcccgggtgcgggtccaggtctgggtctagctcagggtctcgttccagatctaggttccgagtttcgatcctggtctggatccgtgttttggtccaggtctcagtcttggtctgggtacacgatgtgtcagggcccgacttcaggtcacggtttgggtctggggatatgttcgagttcggttctagggtgggtccacgtcctactcacggtcctagtctt

SEQ ID NO: 349991 - DNA, 725 bp, Cannabis indica
tataaattagaagaaaaaaaatttaataaaaattaatataattaatgatatatatgtttttatctcaaaaaatatatatatatatgattttaaaaaaaaaacatatattttatgtaaaataaaaattattaaaatgagatgtttttataaattttgagggtgcaaataaaattttctttttccccgagtaaattgtcattttaaggttacttaccatagtatagtcaggtagatgtatatggataatcagtatactattttattttttgagttatttaaataaaatttgttttacttttcaatttttaaataaattttttgaatattattattatgaggttttttcaatattatacctaaaaataattttatttacaaaaatacctttaagaaaattatttgcacaaatactgttgtatcacgtcagcatacataccgaattccaaaaaaattaccaaaaacggaaaatctcgttttcagaaattttttgctttttgagagttttgaaaaaagtaaccttttagttacttttgatgtgaatacgatatcaattggttatttctctattaaagaatttattttagaattttattcatatataaataataaaataatcattttaatgtgttagaaatatatgtttttctgtctctaaaaaattacgactaatattaaaagaaacttgtttgtttcttttttatattttcaagctatattatgttatt

SEQ ID NO: 349992 - DNA, 679 bp, Cannabis indica
accaaatcaacgaaaagcacggttagttgcgggatcacttggacaacaagaaacatatgccagcgatttccacaggaacgctgaacgaaggaattttggcagagttggcaatactacgcaaagacatcgctcgggtctcccggaggcaaaaaagggatgacttagacttcgattgtgaggaccgcgagccatgtgctcgacatatattggaagccgaactccccaaaaattttaagatgtcggagatggcagccttcaccagggattcagaccccagcgatcacctgtctcgatttaaccgagtaatgacggttatgagagtcagtaataattccaagtgtttatgctttcaactaacgttgagcggttcgtcagaagaatggttcaaaaatttggaaccaggatctatggattgctggaacaagttgcaagttagtttccgaagacagtttgtcgcagcgagaaagattaatcttgaagtcagcaccttcactaacaccaagcaactacccacagaggcattgaaaaattttataaagaggtttaaggaagaagcctcgaaaaccaagaaagttgatgacagacaacagcttggacttcttaaggccgaaatccgtacagaaaccccattctggaacgaattgcaacaagaaggagctgctaacctccaggatttcca

SEQ ID NO: 349993 - DNA, 497 bp, Cannabis indica
ttccaataagttgatctagaatttaccaagtaaattctctaactatttaattctgccttgcgccactatagatttagaaattgaatacactctcaattatataaaactctatatatgtaccacgatgttatgattatctattattacaatcctaataatcaaagatcctctatagatcatcaacactaaaaagcgacaaatttactgttctaccttcaatgtattttatccttaaaatacttagctacctataaatcatattttattaaactaatataattactaaaatgaggcctcaataatttatttctattcagccaagctcgaaggaaatcatcatttcacttctaaatacttataaaagttatagattccatatctatgattagcgctcccactcaattgaactaccatgttctcaagatgtaaatatctgctagaaactattggttagcatccacgaacaacttaaagaacataaataatacaactaagct

SEQ ID NO: 349994 - DNA, 748 bp, Cannabis indica
gaaacgtaaagtcaatatatctatatgtccgtggatatatataagaaatcatatgaaaaagatgttattatttttgtttagctttaagtaattgatgaattactcctaaagctttagtattgagaaaacttaaggaataattacataaggcactattttttataaaataattacatttttacgttcaaagaatatatatatattttttttacaattttacggttttccaaaaaataacacgaaaacaacataaaattaacaagaaaaatacataaaagtaacataaaaaataacatacagataacaaaaaattaacaacaaattaacaagattacaacataaaaagaccgtattttctgtaaataaaataaaaaaaaatcgtaaaaatatttaaaactccgtgaaaccgtatttttgtaattttttgttatttttatgtttttgttgaataatccaaacttaacaaaacttttcatttttttttgtactggacaaacttttcatataaaacacgaaatattgatttttatttgatttttttttttttatatttttcttacattttttttcttataagttatatattccttagatctttcattccacgctaaaattcaacttccaaattccaatcatagcctaaagaaaatgctcacacttcttattcttcttcttcaacaaaaaaaaaaagaataattatcttttttaccccctatacttatgacactatactattatgccccttaat

SEQ ID NO: 349995 - DNA, 661 bp, Cannabis indica
agaaaataatgtaagccattatagggtatatgaatttttatgtaattattgtttacgtaaaaattatacaatatgatgttcattgcatgtgagctcgatttctaaactttgaaatccgatcatgcacgtcaaaatcacatgcatgcaagctcgagaatttttcccatgccatccatagccacccgagtggcttcgagtaccgtgcccacaaatccatgaatgcaatgcatgcgagtgggacatgagtcccttgaggagcaaggtggttcgaccaccattaccgtgactgtaacattacaaggaccttcggtcctttcttctccaacgttgacagcatgcatgcatgcgggacgtccgacatccgtgaaccattcaagcacgacccgtgagggtccaagtctcagtcaaaccgcctgctgcttgtctcactctgccctgtgtggtgcatgctcctttctgtggcctccatgatcaccgtcgaccatggtggctgttagagccgtcggccgcggtgcatggtggtggccagcatcaacccctaatacgtgaactcgaccgactatattatgtatgtatatttttgggtatatatgtatatattaggggtgtacatcaaaccgctcaaaccgctcagaccgcccgcaccacaccacaccgcaaa

SEQ ID NO: 349996 - DNA, 529 bp, Cannabis indica
ttataactctaatgcccattttttgaaaatggggccctcaatcatatataccaacatgatcaaaaaatacaaataattaatgctaattgcgctactaatccataatctaatcatacggtcattataattatttcccccgttaaaaggatttcttccttaaaatctaacctgaataattctggatatttactcctcatgctagactctagtttccaagtggcttcctccaccttgctattcctccagaatactttgaccaatgctatggtcttgttccaaagaaccttttccttgctatcgaggatttaaactggttgttcctaagaaaatagatttgattgtacttggcttcgtaactcaagacatgagtcgggtctatatttccttaacattaaaatatcaaatacattatgtatagctgataatactggtggtaaggctagccgatacgctgcccaaccttctcgagtatcttgaatggccttataaacctaaggctcaacttttccttctttccaaagcactttat

SEQ ID NO: 349997 - DNA, 545 bp, Cannabis indica
aaattcaatatctctatgcttagcatcaaaataacttttctgctttctttgcgaagcaagcatccgagccttgatcttgcctattacctcattggtcccctgaactaactcaagacccatttatctctttttctagtcttgtcccaattaatcgagaaacgatattttctaccatacaacatctcgtaaggagtcatccctattgtactttgatagttgttgtaaaaaagttttatcaaaagaaaatattactccacaaaccttcaaagtccataacattggctcgtaacgaatcttctgatatttaaatcgtcttctcagactgtccattagtctgagggtgaaaagctttactaaactccagctttgtacccatgactctctgaaaacttacccaaaactttgatatgatcttcaaatctctgtctaaaacattggattttagagttccatgaagacgtaatatctcttttacatacaaatccacatactgatccactgtgtaagttgtttttattggaaaaaactgtgttgactttgtgaaa

SEQ ID NO: 349998 - DNA, 505 bp, Cannabis indica
taattgtcattttgaacgatattgatcttgttaggcccgtcgagattggacatacaatctcagtgtggtcaaaacatgtcgagaatttgacctgtctcaacaaatctcaaaaggactgttgagataggttgggaatatgtaaaaattgagttatatttggcacaaaaagtagttttatgacatttttaaatcaacttttactgctgtgctctaatgcataattgtaaatcttaatgcaaaatttaatatgtcatttaatgttcacttaataatttattaagaatataaaataataataatgcaaaagtaaatataaaatttaataataaaataataataatataagtcattaatgtaaatgagcatgttaataaaaattaaataataaaatattataaatgacataatggtaaatataaaagtacagtactttaaagggttttctatcaaaatttgaggttaaagggttaatcgcaaatgaattgagagttcgagagatttagct

SEQ ID NO: 349999 - DNA, 985 bp, Cannabis indica
aaaaaaaaaataaactaattttattaccaaagaaaaagttaaaatatataacatattaaagaaatttaaataaaattttgtaaaattaattattattttaatttatttgaataaaaaactaaattagacaatattatgccacattaataaaataactgaaaaattacaaaagataacataatactaatttttgataactaaagtttatgagatatattatttaatacccatatatttacaaggcatgattttctagtaataaagttcaggtcaaaataattttttattccttttaatatgtccactactcttaccatgcaattatataaaagttttattaattattaagtctaagtttttccaacccatgtctctattattttgggtagacagaagtgtctacttatatatagaaagagatttttattatagttgattggcatccacatattttttttttctattttttttttacttaattttgtgagttaatttattttcttattaaaactaattatctgagttaagtcttcgttataatgccccaaaagttaataaaacacataaataggaagagaatcgctaaaagatcagtatcatatatctattagtgtaattaaatatcggatcatatataattttaaaaaatattccgaattaattataaaattccacttatacaaaatactaatattcaataataatactcaaattgaaaagtaaattttttagtcttaaggaggttaagaatatgattagggaaatttgattttctatgcttagaaaatcaaaaaatttgatttataaaccaataattaaaacccctaaaaaaattataccttttttttcaaaaccccaaaaatacccccaaactaaaactatctctctttctctctctatctagccggtcccaataatcccacaccccaggtccgatggtcggaccatggggtccgatggggtccgaccaatcggacccatcgga

SEQ ID NO: 350000 - DNA, 812 bp, Cannabis indica
cactacttgtactacttccagagcaagacattagggtttcatagtaacccaaactcacagccatgtaaccaaattgagaatggttttgtaacatgtccattaacctattggctctttcttctgtctccatatccaaacacaagagcccaccaaacccatattctttatgggccatggatttcagaagcccatgttgagggtgttcttctaggcccgggtagatcacttttaggcccattttcttcattcttttagcaaattctaaggcccttttgcagtgttctttcattcttaagctcaagtggggaattctttctgagagttcgaatgctacttttgcattcattgttgggcctaatagcattagacttccttggtgtaagtccatcattgagtttaccaagcttgctggcccacacacagctcctgtttcatgttgggaaattagatttttattcatttgggcccaatacaatatgttgatatttttataattattacaaataaaatggtatttttgtaaagttttaaaaatttgggatctctttaattaggtcttaattacagacctaactacttgtacaggcaaataaaatcatgcatttttcatgagtaaatatttatattttatattattattttataactctagtggttgtaataaagttcacaaaaagtatatttaattatatagttttctcatcatttaaaagagataatgaaagcaacatcattggaaaaagttaaaattattattattattattattattacactacaaaaataaaagtaataattttttaatcacaaca

SEQ ID NO: 350001 - DNA, 710 bp, Cannabis indica
tcgtcttcttcttcaccacgatatacacagcagccacaccagcccagaaatcaccacaaacctcgccaaccaccaccctaaatcctattatctccaccatttttataccattttattctattttttaaatcttttattttcgatgcctaaacttatacacccaaaaagttttggtttttcccctatttcactgtaaactgaacctattggaaaaaagtggtgggtataactccgaccaccgattttagtagagaaaacgttaaatttcaacgtccattaaaatataaatatgatttctattcattttagtaatgtacattgctttatttttgtttttgtaattttttttgggattttttcattttattacattatgttgttgtgtatgtgcatgatggccaaatttttgtcagaataagtataaagtaaaaatttatatagtatatatgtatgtattttgtgttttattaaatatatgtgtatatatatattatgtattgtttagacaatatatattgtgtattgtgtgtgtatatatattttatatattgtgtgtatatatattttgtactgagagttttaattagtttaaaaatgatatttttaaaattttgttagtgtgagatataatttattatatatgtatgtatatgtaattttttaaaaaattcatgtatataatttactaaatagtaactagttactttttt

SEQ ID NO: 350002 - DNA, 938 bp, Cannabis indica
tgcatgaaatattcgtgcaaccaaatcaggtcattgtggctctcctcgtgttgacataattcatttgtgatttccttccagtttgggttgcatgtcatcgctagaaaaatataaggtttaccgtagcgttgttctaacaccattgcctccatgtatctcttcctcatgtctcttggtcctcctatgaaagatgaaaggagtatgattcattttccaacattagaagcgtctcgttctcccagcgtaattgtgtcaactaaccttgatagaattcagttcgaatgtgtatttgctggcctctataataatccaatcttaaggactccatcttgacataaatgtctactgcatattgttgcagtagtcgaccagagagtagaaaaattgatctttcattttctcttatttggaacttgaagcaataatatatacggcacgaaacttttgggactttttttttcttggattgatactccattagtttgaattgaagaaagtataatattgttagatgtgaacaaagagtgatttatacatatatttatatatatttttatacatattcaacgattgattacctttttcttctgttgctagtaattcttctccaattaatgaatgtcgagagtttattgtttgagtttgttcgacggatcttgattggttttctccaatcctttcaatcactttatgacaaccagtatcaccgtacggaaataacaatggatattgcagtgagtcataacatccatagtaataatgaattttaaattgtttaccggaatggttgtatacaaagatatcacgtcttccattttgattttcgtcttcattttcaacctatattgccgctacttgtgaggcagtaggggcattgaatacacgctgatctaggccagcgtcattcctaacatgtattatttgtctttccaaatctg

SEQ ID NO: 350003 - DNA, 901 bp, Cannabis indica
aagttatattttcattctattgtaattaagtttaactttttccgctcttatatttctagtaatccctgtttagcaagattaggttttttttactagttgtcatagcgtgcttaattgttagggcgttacatatatgttcacttatcagaaatcaaaaaatagaaaattttggagatcattaagatttctgattctgatcttataaagattttaattatgagattttttttgtcacatatggctgcaaaattaggaatattattgaaaactattaaagatatattttgtgacaataaatcaatcgggttgcattttagtaataacataagatctacaaggtcaaaggcacattgactttgatttaattgttattaaaatgaagttcagagtaataaggtgtctatagagcataataaggacaaactccatattttgtgtgatctggatcattaaggatataccacataaggtttttcaagagcttgttgctcatatatggatgtggtattatttaagaatatgctagtttactgggagtttgtatttggaatattctatcaagttgacacatatttataatttgattctgcggataaagtatggacttaagttttgaatactctaaatattttcttcctattgaggtttaagtataaggttagaaagaactaataaaagattgatctcaattaagggggaccagttgaaaataggcatgctaagatcacatttgcatgtaatttacatgctacacatccatgattgatttatgtcatttagttatattgatatatgtgaccattgatgggtttagctacgctaaatgttgtaaaagttgctttgatcctatgttagtatatttaatggacgagattgttttgaaatacctataattatgata

SEQ ID NO: 350004 - DNA, 695 bp, Cannabis indica
aaaaaaaaaaacaaaaaaattgcatttggctcagatggtaagcattgcataccatccacgcgcatgcatcagggggactgggcgtgaaatgttgcacaagcatgctgcacgcagcattttcgcgcacggatctgagcttcagacacatcccgtgcgtgctttctcggacaaaagctgtccgaactcgcgtgacacccgtgtgtcacgtggtgtctgtgcgcgcatggggtgtcaccacccctagatattgtttgatttttaaaaaatcataactagttcaaataaaatcgaaattaatttttgaaaaaaaaaagtcattgcttaattttttcgatactatccaagaaaaataattcgacaatgaaattccaactattttacgtaaaaactttgcaaacatcaaacactcatcaataaacacatagatcaacatgaatcacatccaaatcacacatacatcgttttaaatccgtatttcttgaaaataaatcaattaccatggctctgaggccaattgttggaatatcttttaccaggacctagatttactaacaagtatgtttttaacatcctaaatataaatttctaaaacaatgaaaataaacacataaaaggtatgagaaaccttacattggttgcagcggaattaattgactcatttcgctcagatctctatgtaggaaattattttacca

SEQ ID NO: 350005 - DNA, 727 bp, Cannabis indica
cctcattagttttcgtccaactcaatgctttttcgcaataaaaatatctatagaaaatactgagatcagatgtgcatgacattaatctaaaattaataatatacattaaaaaacataatatatacataccatcaagagtaagatgcattccactgcatcttcggtaactacgccaaattattttagctgcctctgcatgcatacatgtagattaaccaataaataataaggtcatattattttatgcataaatatatatattatatgcatacgtaccaccaggcgatgaaccagcaggttgatgttctgataagatttaacaattatagcaaaattaaacaaagttaatatataatcagagtagaaaaaaaaagtcaattaaaaatttaactactactaatatgagaaatgctaaatggcactaatactgcctaacacttttcagtggtccaactaagtatatatcaggtctcacatagtttaatataataaattttaaataatatcgctaaccaataacaacgtgacatatcgagaaggtactagacacgactgatgcctaatacacaataggatgagatgacattgaagcgtttggttgggaggaatgaaaatatagaaataggaatgggaatgagaatgggaataggaatggaataaaatttaaaatgcataaaaataattgataaaaaataattaaatttttttcttcttacattggaatggt

SEQ ID NO: 350006 - DNA, 1218 bp, Cannabis indica
aaaaattcaaactgcgatcgcatcgcaaagaatttcaaactgcatttttttgcggtgcggtgcgatttgagcagtttgatgaacacccgtacattgcactacacagcaaaaaaatacaggttgaaatttcatccatattagactttgatatctaccaaatcacgcccctaaactttgacatgtaccaaatcaagccccttgaactttcatccatattagacttttcttactaaaattagaaaaaaaaagtctataaatctaacaatctcaatagttcaggagagatttttaacggccttaaaagttcagggggcatgattttgtacatgttaaagttcagggggcaaaagttctaattacctttattttaaataatatttaattagtttctattttattatatataatagtggtaaataattttgttgtcatagtatatatatattttaattttgatatataatttagttagtatagtatatatataaataaattagtaacatattttttttataattattattgttagtatatatgttttggtgaatagtatatgtaatttttatacagtatattattttttaaaatgatatttaagttctttttttattgtacttttgttgacgtgacatataattttattagcatgctatatattttttgttattatatatatttattgtaaggtatattattttttgttatatgatatacaaattttattgtatattatatcattttattttaaattatgcattgtttagttttttattttattatatataaatgtggtatttaattttgtaaaaatagtatacttattttttggttgcatataattttgtgaatatggtatatataattttttttttattttttattgtaggtatatatgttttattgtatatagtataacatttatttaagttgatatttagtttctactttattaaatataatgattatatatacattttttggtatgatatacatattttaatagtgttatataaactttttgttagcatgatatatatattttttaagtattaagagataattgcggtataacctccaatactttcactttacttgcacttaacctccaaaactcaaattttagctgtaaaatccccaaaactaagaaacagttagtaatttacaattttcatccattttaggtgttaagtgtcatgttagactattcatgtgtacatc

SEQ ID NO: 350007 - DNA, 848 bp, Cannabis indica
atcttgcaaaattttaaaaaaattggaaagttttaacacgctgaaaactgcattcaaatagtgtattgcacgtatgactattttattttatacgtgtgtaaaatagattatttgaacattattttttttatattgtaaattatttcaaatttttcaaaattttgtaaaatatcttaaatatagttataacgtacttattcgaaataagtattgtattcgaaataagtattgtagaatctctctaatactttaatacgttatccctaatgaagtagttaagattaaaaagagcgtactgcccatgttcatgctctgtggcagtttttcagttattttcatggttaatgtgaatttccaactccccatgttcatctcgatcccccactacccttgaattcctgatctctactgtataattttgtgtctatttcttgtttatatctatcaatgaatcctcttttgaacaaaatgaagtccactatgactttatctgataatgaaagcaccgtttttgccattactgaagatggcactgatattgaaactccagaggaatttattttgattgcccgtgtacttacaacaaggaaagtctggttatctactttccaacgacagatggctgagcattgggatggaaggtttaaggttaatatcaaagaacatcattcagacttgttcttattgtgtttcggctgtgagggagatcgaatcagagctttagaaaaagagccgtggcacttccaaaataaccacattatccttcttgatccatcattatatcttactattactccagacattatgattttctctcctttttgggtccaagcctatcgacttccttt

SEQ ID NO: 350008 - DNA, 614 bp, Cannabis indica
aacaatatattcctacaataaaacaattatcataagtaaaattataggtattgaaacttttaaataatagtaataataataccaaaaataaaaaccttcacttgaatatcactccaattagcctctaataatttttaaatagacatcctcttgagaaacatatcttcttcaagagttgtcttcttaacattataactctcaataacttccacactcttggagttggtggaaattttttggattaatgatgctacataatctatttgaagattaatatagaatttggtagcacttgtagaagataagttaatttcatctatttagaaaaaacaatatataaattaatatacacaaacatatattattgtattctaatattgaatagtgaaatctaatttaataattacctcaaaaaattttaacggtagtagaagttactatcacaataaatggaccaccatctttcttatataaatttggattgaacatctcactcaattttccccataaagttatctttaatgtggtcgaactatacataaaaattaatagaatttaataataagtaaaaaaaaaaagtaaattgtatataaaaaattacaatacttactaat

SEQ ID NO: 350009 - DNA, 826 bp, Cannabis indica
gggggacgagtgaggttgtggtgagaagatcacaaagagcctgtagacctgctattcctgataactatcttgtctatatgcaggaacatgagtttgatgtgggagatgattatgagccgaccagttaccaagaggcaatgaatagtcctaaatctgcattgtgtgggtggatgcaatgaaagaagaattgagttctatgtcacaaaatgaagtttgggagttagttgaacgacccaaaatttatagacccatcgggtgcaaatgggtgtataaggtcaaatgtgactcaaatgggcaagtagagaggtgcaaggctcgacttgtgactaaaggttatagtcaaagagagggcattgatttcaaagaaacttttttgcctatttccaccaaagattcgttgcgaatcattgtgactataattgctcattttggtctagaactcaaacaaatagatgtaaggattgccttcttgaatggtgacctatctgaggatgtgtacatgactcaacctgtaggttttgagaagtctggcgaagaacacatggtttgcaaactcaagaagtcgatatatgggcttaaacaagcatcaaggcagtggtatctcaagtttgatatgattgtcactcaaaatgttttcagggagaatgtggtggatcaatgtatatacatgaaggttagtgggagcagttttattttcttggtactgcatgttgatgacatcttgattgcatctaataattctgatctgttggctgagacaaaacaactcttgtttgaccattttgacatgaaaagaccttggcgatgcatcttatgtacttgggat

SEQ ID NO: 350010 - DNA, 687 bp, Cannabis indica
tcatggtcatgtacgttatatttgccacccttttatattaggagaattacctcatatattattttttttttcaaatttacgatttgaattgttttgattgtttctatgagtttgctatgtgaattttgatcatagcaatttaaattttttcgttggttgctatgtgaattttcataaaaattaaaaaaacaattattttgaaatataaaaataaaaataccactttatattaattgagttctcacgtgatttgttgaaagttagggatgctctattaggggtgttcatcaaaccgcgcgctcaaactgcccgcaccacaccgtactgcaaaaaaatgcagtttaaaattttttgcgatgcagtcgcggtttgaatttttcctaaactgcgtggtgcggtgcagtttgcaattttgaattattaatatgctgttcaaactgtaccgcacattataaaaaataccaatttttatatttatttaggtccaatatgtgaatgtacaacccaaagtccacttattattatattgttaaaatttcatttttttttttcatatttattttcaagtcttatggtatttttgacaagtgttgctcaaattttgttgtatttgtgatagtttaattattgatgatagtccaaaccgcagaaaccgtataaaccgcaccacaccgcatcattttttgc

SEQ ID NO: 350011 - DNA, 526 bp, Cannabis indica
cactctcccgtctaactgatcccgtattctgcttatgtggctgggtagcccaagtggccagtcagcaaaattcatattacgtggcattgtacaatttaaaatctgggtttataactgaaaattaaaattaaattaaaataataactaaataaaatcaaataccccattaaacacaaatccactttactagaataagaaccccaaacccagatatcacacccattttcgttttaaatcaaaggaaatcgagagaaatcaaagaagaagattaagaatataaagttcgaagggttgggggtactcctacctggattcatcctctattatcgaaggggaagaacaaagctactgaacatgtccacggggcctcacctctaccgatgtgatccccctagggttgcagagatgaaaacatcttagacgaataagaatcccaggcgaaggtttgtagatgcccattccatcaggtgagatcctattgctttaattatttgccctaatttttgtgttctttcttctttttttt

SEQ ID NO: 350012 - DNA, 738 bp, Cannabis indica
tggtttattaataatgaattggttgaagaataatattgatgatgatcattacttgctttattatgaggaataattgtgagaataatgaagaagaaacaaataggagttttgatcatcatcatttttttttttctattatgaaaatttcgtattaagagagatgatataaatatatatatatatatatatatgtatgcagggacgacggacttcctcctaacaatatgggggctatagcccactaacaaaaatattgtcttttaaaaattaaaatgttattttttttttaattttgtataattataaattaaaataataaaaagaccaaaaattaaaatgtattttttttaaataaatctagtaaaagtgattataatataagtataaattattttttaatgatataaataagccccaatcttataagtatatataagattggggtggagtaatatttatatatggttggagaaacgtacaagttaagccattgttacaagtttattgtaactttacgtttagacagcatcttaatttgtggccctactaatttaattattattaaatatattaaacaacataaatactagagaataattaattatttatttgcggacccacattgtatatataattttttataattatatagacacatgacatcaggggcggacccacattgtagcgagagggggcagtccgcccccctgaaaaaaaaaatcgagaaaaaaatgtata

SEQ ID NO: 350013 - DNA, 754 bp, Cannabis indica
aacgagagttctgtgaatttattgtttaaagaagccttcatggcaatacgactcacagaccgggatctttcaccaagcggttcccagctcaaagggttcaatggaacaacacacatcccaatggggaaagtgaggctcccagtcaccttgtgcccagacacaccctagagcaccttcaagtactgcacatttgtggtggtggactccccaacagcttacaacgcaatcctcggccgaccggcccttgtagattttggtgcagtcatgtcgattaggcacttgtgtctgaagttccctactcaggaagctgggatcgaaacagtgagaggcaatcaaggacaggccaggcagtgttataacgttggtgcccacctactcgttctaatggtccgtgaaattattgagccaggaatggcggaagaagatgcgttagatccccgtgggggatccaaaaaaattgtaaaacccatggaggacgtcgaggaagtgtgggtgtgcgacttcgaccccgccaaggtcctctggctaggaaaaagtctagagccggaggaaagagaaaaaataaataagacactaaggactgccacggatgtttttgcgtggtgccaagaggacatgaccgacataatgttgggttttatgcgctaaataaaactctatttcgatgtaatccaaattattcaatatcaataaagtaacagaagtatttttcattcatttgtgtatgtttcggttcatcttatcaattgtttgt

SEQ ID NO: 350014 - DNA, 602 bp, Cannabis indica
tgcaaccattaagaatagcagggtgctacaaaactaggctgttgagattttaccaggatctagatttactaacaagtatgtttcattaacatcctaatatgaatttctaaaacaatgaaataaacacatatatagtttaggaaaccttacattgggtgcagcggaatataatgactccttgaaaaataattttagtttcaaaaattgtacatccacttataatgccaagaaaatccaaactcttcaatcattagaatttcaactcaagataaattacttttccaacccaatttttgtgtgtgtgttcaatcaaatcatcatactactaacattcaaattaactcatgcatatcaacaatcaatgtttatctcaaaataaatatgtatttcaacaaaaatctactccataagcttaattatcaaaccattctccactaatgtaattacacacaatctaaagatcaataggactttataggcttataatgtaaggctagggtgaaaggtggatagagaaggttaatttaggctcaaatcacaccatagcacatatacaacattctctcaaataattcctatttgtattccccaatcactctcct

SEQ ID NO: 350015 - DNA, 663 bp, Cannabis indica
tcttcgccctccagctgaaaagttaccatttttcgcttacaatcaatgctagttgaatacttggacaagaaatccatccctagtatgatatcaaaatctgctaattccagctctacaaagtcagcactcaactctctatcttcgaccctaattggcatagacctaattcgcctcttggtgataactaattccccactaggtggtagggtacaaacccttttcaataaggtcacaaggcctacccaactgattaattacccgtgttgccacatatgaatgtgtagccccaaagtcaaataacacaataaaataggagttgttgataagaagctgacttgtcaccacggaaggactggctgcaacatcagcttgagtgacagtaaacactcaagcaggtacgggttttgcctttggcttctgctcttctttctttgcctgagggcaatacttcttgaaatgcttaaccatgccacactgaaagcatgtcttccggttgcactctcctggatgatgtttcttacaacgtgggcactcagggtaagaataatcctggcgtccacctctgccttggttcccacagaactgcttggtctatcctgaaccaccagatgatggggtagcctttctattctgatcagcagtggaatctgttgggttttatgc

SEQ ID NO: 350016 - DNA, 588 bp, Cannabis indica
ttctttgatttgttagtttaacctaagttctggtcagggtgatacgtacattttaggaacatggtagtatgattgagtgggagcgctaaacatagatatggaatctatagcttctataggtacttagaagtgaaacgatgatttccttcgattttggcttaatatatgtaaatggaagagctcttgtttcagtgattatattttagttcactaaaatatcatttataggtagctaagtgtttcaaggataaaatacattgaggtgtgaaacggtaaatttatttctactcggtgtaaatcatctatagaggatctttgattattgatattagaatgatggttaaatgtgatagcatatctatatggtggaacataattttaattaattaattataattctagaattagactatgtctagtttatgaattttcactaagcaaaggcaaaattgtgaagaaaagagattctaggctttatttattaattggaagactttattatgtctaattaataattatattaaatgacaatattatttaataatttattttagttattaaataattagttttggcatttaaatggtt

SEQ ID NO: 350017 - DNA, 510 bp, Cannabis indica
tttactattcccactcttcctatgaatgttattacatacagaaaacttatacttttctacttaatttccttacctcgaatgtggagtcctagccttgattgcaatgaaagtgatccttttgagaaccaataattatcttatgaaaaacttaaatttcatatttattaattagaacatattacaatggtatatatatgtatatgagaccttaaccttgaatctataaactcaaaattatagaatgataccttagattcaaaaacgaaatctggtagagcactaaaagcttgaatgtaaaataatagtggcaatgatgttgatatatatataaataatgttggtgtgtatatatatatataaatacgtaagaggttggtggttgtgatatgtgagtatgaaaagaatgatggagataaatgattagtgttgagaggatattgatagtggtgctattacggtgaaatgaaagaaagaaaatctcaaaaggatgagatgttgtaagcttctaaa

SEQ ID NO: 350018 - DNA, 708 bp, Cannabis indica
gacgacgacgacagtgattctctgcccagccatttgacgacaacgcaaacgacaacaccttctcccctactcgctgacgacgacagtcatctcctctctaagtcgccgatggcatcttcaccaacgacgaagcgacacagctcctccctctccaacgaagccacatcatcttcttcctcgcaaatgacagcaagcaactcaggtcttttaagtttctcttcttttttttttttgaaaaaattcatcatctttaataattgtaatccatagcgattacatgattaaaatctagagtaacatcagtactcttgataacacgatcagcaactaaataggatgcttgagctaagaaatgagcaacactatttgcagaacgtctaataaaattgacataaacatctcgcaattcatttaacaacatcttataatcagaaataatactcccaaagtatgaaaccacaggaatagagctacgtaacgcttgcaccacagtaagactatcagtttcaatgacaaccttccttcaatattttcgtttaacccaactcagtgcctccttaacacccaaagcttccaccatttcgggttgcaacacccctgaccgacagcaggtaaaagcttccaccaatgcgctagtttcatccctaatcacccctgcaaagctataagttacagttcctgaaaaaatggcagcatctacattaatct

SEQ ID NO: 350019 - DNA, 810 bp, Cannabis indica
tgcagaattttaactacaaaaccacgtaaaaaattctttgtgttcatacttttttctttactgtttttattttttctgtgcaagtttatcactgtttaggctcatatctgtttaacaaaaatctgcgttaacagtttggtgctttcattgagagccttcgtgtaaaagctcaggaaaaaaaccctccttacatatacaaaacaatctctttcatggctgacaacacggagaacgttaacgcattacatgaagaaactcatcaccgtcctggaaaagagcgcatgggctccagaaggccttccaactcatagtataaacggaccacacgctctaagaggacccaaccttagggtggccccagcattagaccactcgttctaggaagacccaacctggggttggtcccagtacacgaactacatgttcaaggaggactcaacatgggaatggctgaaatcttgggatgagagatgaaggacccagtcgtggaggtgctcagccgagaggtgagagtactcatgaaatggaaaaccaccatcttagatgccgcttggaggaggcaaactggcagaacggtgaattagagcgggatgcagctgcagctagggcggcacaggagaataacactataaatcaacctgaccctggagcgagaagaccgcgaggcagacctcgtgcctcacgaaccaggagaaaggaaaatgctcaggaagaacaacatggggaaaatgaggttccccctaaaaataccaatgaccagctagaaatgtaacgccctaatgctaaggcacgctacagtgctttttcaat

SEQ ID NO: 350020 - DNA, 432 bp, Cannabis indica
agaatcaaaatacaaaactacacaaaaaatcagaagttaattccatgaaatagcatgaaaaatcgaagaaaacgaaaaaatttgcgagctatacggacagtatgcattgcatactgtccgcgcgcgtgcaagggaggagctgaccgagaaacctcagtgcaggaggctgctagcagcctcttcgcgcgcgcagggaggtttctcaaacacaaaattgtgtccgtgcacatgctatccgagggaattccctcatgcgcgcgcttgtggcaattgcaccatcccgatatttttccgattttcaaaaaatcataactaattcaaataaaatagaaattgagttctttaaaaaagtaaattgcttaatttttcccaaactatccaataaaagtaattctagaaacagattttatttttcacgaaaattcacaaaca

SEQ ID NO: 350021 - DNA, 1055 bp, Cannabis indica
agcttactccgaaagaacactttagaggattgagcttcattcggtattgtcttaggatctcaaagcattcctttaagtcttcaatgtgcccttgggccttctaagacttgaccagcatgtcatcgacgtagacctccatgtttcttcctatttgtactttaaacatccggttaaccaacctttgataggtggctctagcatttttcaagccaaatggcatcactttgtagtaatataagctgacgtctcttcgaaagcttgtatgttcttggtcaggtgggtgcatgattatctgactgtaccctgagtacgcatccatgaaagttagaatttcatggttggttgttgcatccaccaactgatcgattctaggtaggggaaaacaaacctttggggcacgccttgtttaagtctgtaaagtcaatgcataccctccaagtgtcattcgtctttgaaactagtacggggttcgagacccaaattgagtagtaggcttctttgatgaagttgttcttccacagtttttccacctcttcctttagtgccttggctctctctttttttagtaaccttcttttctgtttgaatggcttgaagttttcgacgtcgatgtttaatgcatgacttatcctagtgaggcttattccttccatgtcttcgtgcgaccatgcgaagacatcttggttttcccttaagaactagatcaaagcggatcttatgtccttaggaagctcttttccaattttgactaatttggatagttgtttgggctctaatggtacttcttccaattctttaattggaccaacccctgtatcaacatccctaatacggggatcaatgtcttcaaccccgttttgggcgagtcctcattgctcaaaactacttgttgtagctttgagggatttggctactttctcactgattatgatggataggttgtaacactctcgtgctaccatttgattgcccttcaagtagccaattccacccttggtagggaatttgacgaggaggtgaaagatgtaggtgactgctttcaggtcatacagggt

SEQ ID NO: 350022 - DNA, 511 bp, Cannabis indica
ataaaatagattacattgaaatggagttttatttagggcataaaacccaacagtatattctttttaattttctgaattattctctttaaattgcaaaaagtattgttttaccagatagagtcataagtatagtttgatagtacttaatccaattccttgtggttcgacctcacttgcgtcagatactacttgattgcttatactttcgtagtaatcataaaattcgtaacaataatatccaacagatactactcttgatttttggtgtgacgaaatgaaggatccacgacatcaccatttgattgtagcgaagccagtgatgatggagagaatcttcgatcggaggttgaggtaatgttccttagagaaacaattgtgttttgtgcccttaataaaactcatttcaatataatcagatttacttattaataaagatcagaattaacattttatgttgcatggttcacatgatttattacatgattatagatatatataatgtatgaattct

SEQ ID NO: 350023 - DNA, 703 bp, Cannabis indica
tcaagagctaaaaaaggcaacttgaaaaacaaccccctgtactctcaaaacctctggatggagaagaattagggatatacctggctgtcacagaacatgctgtaagtgccgtactgatcagagaagagaacattatccaccatccggtctattacattagcaaaagactcgttgaagctgaaggatgatatccactgatagaaaagctcacttattgcctaatcttagcaacaagaaagctaaggctttactttcaagctcatcctattcgggtgtacactgaccaaccattacacgaagtactacaaaaacctgatgcccctagacgattactcaaatgggcagtggagttgggccaatacaaaatcatgtttcaatctcgaactgcgattaaagggcaggccttagcaaggtagttcagtgtatgggcaaagaagagagcacttccaaaaacaacccagagccagtacaagaacctcagccgagcagcatcgaagacaaaccaacctggaagttacatgtagatgggttggccatagatcaactgtccggtgcagggatagcccttatcacacctgagggcaacatctacacgaagcagtcaagttcaggtttaaagcaatcaacaatgaagcagaatatgaagcccttattgctggcctaacacttgctcgggaattgcatgccaaacacattgagatct

SEQ ID NO: 350024 - DNA, 688 bp, Cannabis indica
atattaatgttgactgataatataagagttaattaatgcaatttgtttttcttgttgaatatgaatatataagataagagactacttggttatgtgtccaaatggtgtgaaaagtggttttatattatatataataaaaaatttaaaaaaatacgagtctaaaagtttttacggaatttatttatataaaaatatagactgttgttgtataattgctcttagaaaaaatatcattttcatgttttaaaaaataaaatgtaagtacaaaatttaaaaaacaacatcattaaggaaaccaaaaatccataaaataaaagtgtaattttatgtttagtttactgtaattctaatggtaatgaaaaggtccattatatattgtttactttttccttttaacttttgtaattcattacaatgtaatacttattacattgagtactgtaatgatgattatataccaaaaccaatgtaatccccattacaattacattccattacaaagaaaaaaaaaataatattttaataaatatatagtaaaaaaaatcaaagtctatagggaaatttgattttctatacttacatatacataatattttatttctaaactaatacatatcatcattgaaaatatatgaccactttatctaaacccaaaaatacccctctcaaattttccatactttttttt

SEQ ID NO: 350025 - DNA, 1084 bp, Cannabis indica
tttgcatccttctggtcataggtactggtcacacgcgaacacaattgcaagcatttctttttccgtggtggcatagttcagttgagcatcattcagggttctactagcatagtagatggtatgaaacaccctgtcaactcgttatcccaagacagctccgatgacgtagtcacttgcatcacacatcagttcaaatggcaactcccaatttggtgaagtgactataggtaccgatatcaacttctccttaagagcttggaaggtcttcaagcattcctctctaaactcaaaaggtaccccgttaacaagcagagtggacaatggtttggagatcttagagaagtccttgataaatctttggtaaaatcctgcatggcccagaaaactccttactccttttacagaaactggagggggtagattctcaaattgtagacactttggctctatctacctcgatgcgtacctttgaaatcttatgccctagaacaatcccctctgttaccatgcaatggaacttttcccagttgagtaccaagtttgactcctcacatctgattagcactttctccaagctcttcaaacaattgtcaaatgaggaattgaaaactgagaaatcatccataaagatctgtatacaagtcccaatcaagtctgaaaagatcgccatcatacatctctgaaatgttgctggagcattacatagtccaaatggcattctcctgaaagcgaaagtgacatatggacatgtaaaggttgtcttctcttgatcttccgatgctatggctatttgatggtgaccagagtatccatctaggaaacagtagtacttttgtccagccaacttgtctaacatctggtcaatgaatggcaaaggaaaatggtctttcctggttgccttattaagcttcctgtagtcaatgcatattcgccaaccagtaaccgttcttgtaaggatcaattcattttttttttcattttttatcattgtcatccctcatttcattggcactacatgaattgggttaacccacttactgtctgaaactgggtaagccaccccagcatctaaccacttgaccac

SEQ ID NO: 350026 - DNA, 543 bp, Cannabis indica
cttttgtttagaagtgatctagtattagtttaggtgagacgatttatgagtattgtccagaatcctaagtgaattaaagatgacgattaggtgggttaatatatttactacaaaaaaaaaattgaaagggacatgagtcaaactgcgacagtcagagccctgtgatctgtaaggaatagattgggagctatacaatcctacatcgcttgggagaagatcgtatagatgattctgagattatgtaggtatgggattgagacagcctataatagcaagatgtatcttgtttttggtatcctattacgaaagaactttatgactagctgttcttgacctagggtgatttcatttcaggaagtttccccataaaacgtgcgagttagaacaaagcacgttgggattactcagattttcctaaaggatcagttatcaatctaagaagtggtgtaatgaccgctctagtatatggattagtaaaggcaattagcactaattttaattattttattattatttgtgaattaatttaattgtggaccccaa

SEQ ID NO: 350027 - DNA, 846 bp, Cannabis indica
tataaaaaaaaaaaaaaaatagttgtctctaaattggtgtatttttcttgtcccactaattattgtaatttatacctatttaatattttaacaaactttaaactatcttttttaaaaaaaaaaaactaacataatcattaagataaatttactgttacagtagaattcaaaaatcatagacaagtatttttttaaatactatcttttaaactagtaacagaggttgttagtgtgtggacaacaccatttgctgaacgtggaatggcactgcaagaaccaccaccaacaacagctaataaagactagatatctaatgaaatatactaaaaactaaaattaatgtgaagcttattaatccactcaattgccacagtagaatcactattaataatggagacattgaaaacaaatttatgcgcaagagtcaagcccagatgaatagcatgcagctccgccacattagcaaaaaactcacctagcacacctgatgatcacgccagctaaaccacactcgctgcatcccgtatcactcctccaaaccaacaaagcccctcccctaaacaatcgaagcatttgttgctagagcaaaggaatctggaggtggtggcatccaccgagtaggtcggcctgcaactggctttgcaaggcccaatcgcaaatgaagacctatccgaccatactccttaaactccgcaagatggttatgggctaaatctggtataacatccaattttgactgcttgttgtcaaataatactgagtttctatcataccacaaccaccaaagggttgtcatcatcaattcaaaatcctcacgggatagcttgtcaaagagacgtatgtgaa

SEQ ID NO: 350028 - DNA, 749 bp, Cannabis indica
aaacaactagaccaaataatattacccaaaaaacaacatacagaaactattaaaaaactatgaagaaactaacataaaatgagaagagatattaaaacgaaactaaagtgaaaaaatatttaaaaacctagaaaacaaaagcaaaaaaaaaaaagacaacaaaatgaaacaaaaattaagactaaaaaaactaaaatgcaaaactcatcaaaagaacaaataaattaaacaaaacaaattgaagccgtaaaaactaaacaaaaccaaacgaactgctaaaatggaaaacctataatagcacaatccaaaaatacaaaatcgataaatggaaaatacaacaaaatttagaaaagggggaaaaccaaaaagaaacagaaaacaaacctcatatcaaagaccaccatcagcatgatcatttttttttcagaaacatcttgagcaattttttcttgggcagccaccttcaatttcttctttggaggagctcgcccacccttagataatggaggggcaaaatcagagtcatcctccttaataacaggtcgtttacccttgttcttattagctaaggatttcaatcccattttagagcttttcttttgaacaggattaggagttgatgaagaacgggttacaaccatatttatatacggattgagataaaaataaaagaggaaaaacggttatgagattcgattaatgggagttgaaaaaaaaattgaacagcaaaaagaggagggaaaatggag

SEQ ID NO: 350029 - DNA, 830 bp, Cannabis indica
attagatatttacctaattgaattagttaatctaaaaagaaaaatcccatatggataggaacaagctaggcacctactattgactttaggacaaggttggtgtcttttatcctaataacttttgtcctgacaaatcttgtctcgacaaattttgtctttgtaatttgtcttttcccttatttaattaatttgaaaaaaaatatttatttattacaaaaataaataattactattttaccaattcaaaatcgattttcttcgaacatctttgtacaactctttatccctacccttgataatattttaaggtggtaattcagggaccacggacctataattctaagctccaataaactagattatttattaagtctcatcaaccaaataatcccttatttattaattccatgattactccactataaatataaaattgtactcttagtaattatagaattatatttactgagtttaactgcagtgtccattgatataatcaattctagtgattagccctccatgtgttggttcgtaattagttttagtcaaaataccgttttaccttttctaattacttctttatcctttagatccgttaattcactagtggaagtataattcaagatcccatctgaatttgtgcacaacattccagttctagagttaacacttaaagggaaccaacatttgatctgttaggaaagttaggattctataattgtacatcatgttcccagccatccatattattagattccctaaacaaaagttgtaagaatcatcttctctgagaacctttaacaagtgaattaaagaaactaataacatga

SEQ ID NO: 350030 - DNA, 657 bp, Cannabis indica
ctattttttcttaattttttattagacttttaaagaaaaaaatagaggaaattacactttatactatttttatattgtcatcttctatttttaccttcttttttaaaatttatcatttttacttctttttttaaatattgtaccaattttatatgtttcaattaaaaataaaattaaaggtaaatttgattaattggtattttctaacttaccaaaaaaaaaaaaaataagtagactcacatatatattactagatgaaaataataaatttcccactgccatattactatattagagtaccgttctttcttctgcatcttctacgatattgaaatgactaccataatttgtatcgatgtctagtacacccgtgaacttagttttagcccatggtccacttctccactgtggcgttgatctgtaatccaaatgacagcttgtggtggtttcaattttccatcaagtcaagacaaaatcctttccagttttgacattaaaacctaactctgctcatggtaagaatatgtctctgattatgagcctgtgttttcaattttcagttttctaaattgtgtttttaaaagtgaaaatagaatacagttttttgtcattttaaaattttaatagtgtttggtacaagttttttaaaattatttt

SEQ ID NO: 350031 - DNA, 771 bp, Cannabis indica
atatccccaaattctatcaaaacaagataaatttatggatggagatttgataaaagagactatagttctgtagaaaataaaaactattttaattttaccatttatttaacaacttattatcttttgtttcacaaacaccatattttaattttaactctataaatatcaattctatctatttaataattaaaattaattattaaataaattattatttaacttatttattaattagaccttacaaagtctcttaattaataaatagatcctaaaatctattttcttctcaaataaacccttgcttagtggaaaattcacaaagaagacatagtcttatttagaattctaatggattacttaaaactaattattaattaagactacaaaacaatattatcccatttagtgtggggacaatggcctatgtaaccaagctcccaataagtagttaagaaatttacttggtgaatttcctaacttattaattcttcctaactccactgcattgcactcctgattacatagaacgctctatataccaaatatagatgcgctttaaattacctattgtttcaatcaaaataatcaaagatcctctatagatgatctacatcgagtaggaataaatttatcgttccacccttcaatatattttatccttaaaacacttagctacttgtaaataatattttagtaaactaatagaattactgaaatgagcgctcaatcattgatcgcgttaagccaagctcgaaggaaattatcatttca

SEQ ID NO: 350032 - DNA, 642 bp, Cannabis indica
aaaatatgatatggttagcaaactttgaaatttgaacaaggttattttaaaaaatattttaatatcaaagtaagatcattcaaatttgataaaaaaatgtaatatctgatcttataattaaaataaataaaataatctaaaatttcaaaattaaccacaaggctatttttgtgaaaaattaaattttcaaaatttaaagcctactaatatctaaaactaattttaattaattttaaaaaaaattaataaaaattaattttattctgaaaattagatttttaatttaaaattcagattctacacaaaattctaccaaaatttggcttttgtttcaatgaaaaatgatttttgaatgaaaagatatgaagaaaactagtttggtggacaggggtatgcaatgcatgcccctgcgtgcggggaatgccccatctgaccgagcatcaaggctgcatgcagcctacctgaccgagggacatgggtgggacaaggggcaagcttcggacaccctggttgtttgaagcgactttgtttgagcgagcctctcttgtgcccatgcgcgcgcgtgtgcattcaaaacccgatattttcattcaaattcaaaaaatcataactaattataaaaaatccaaattaggttttgta

SEQ ID NO: 350033 - DNA, 1403 bp, Cannabis indica
ccatatgccatggcaaatggagtatgtctcgtcactgttttctcaattgtgcggtaagaccataatacttcagggagttcttccggtcagtttcctttagcatcttcaagtcgtttctttaaagtatctttgagtgtcttgttgactgctttgacttgactgtttgcttggggatgtgccaccgcaaaaaaacattttatgatcccatggtttgcacagaaattagtgaaggattgactgtcaaattgtttgccattatctgaaacaatcttgtacggtaatccaaaccaacaaattatatttttcactatgaagtcttgcactttcttggatgtgatggttgccaacggctcggcttctgtccatttggtgaaataatcaactgcaaccaccgcgtactgaactccacctttgcctttaggttattgtccgattaggtcaattccccaaatggcaaaaggctaagaactctgcatttgagttagtttgttgggcggtgcacgaggtatctttgaaagtctttggcatttgtcacatattttaacataggcctttgaatcttcaatcatagtcggtcagaaataaccttgcctcagaattttcttggatagactttgtccggctgtgtggttgccacaaaatccatcgtgtacttcaaacaagagccgtgcagcttcttcttgtgtaacacacctgagtaatggcattgagaatcctcttctgtaaatgactccatctacgatgatgtactgtacaacctttctcctcatttttcaagcttcgtttttgttacttgggagtttcctagtgttgaggtaggctgctattggtgtcatccagtttggagatgtgtcaatcatttcaatttcctccgtgccagtgacactaggtttttcgagaaattggatggggattagattggccttataatttatattagtgctcgcaagttgagctaatgcatcaatagttgtgttttcttctcttggaattttcttgagggcatagctcttaaattgtgcgagcaggtcatgtattttgcttagataggctatcatcttttctccccaagcttcatactccctagatgcatgatttactactaactgtgagtcgctgcagatattaatgtgttcggcatgcaattcccgagcaagttttaggccggcaataagggcttcatattctgcttcattgttggatgctctaaactcgaatttactgcatcgtgtaaatgttgcccccaggtgtgacaagggcaatccttgcaccagacagttgatctgtggctgacccatctacatgtaacttccaggttggttcgtctttgctattgctcggctgaggttcttatagtagctctgggttatattttttaaagtgctctcttctttacccgtaca

SEQ ID NO: 350034 - DNA, 759 bp, Cannabis indica
acaatctcaatagttcaggggcatttttagcgaccttaaaagttcaggggggcatgatttgatacatattaaaagttcaggagacaaaaatcctaattagccttcatattattgtaaagtagtctttctgttcgattttgtcacatgtgacaaacataatgataatgtggcagtttagacaattgagcaccacttgtataatttaaaattaaaatataaagaatatatacttttaaagatgattaaatttaaaattaattagtgattaaaaattatgtaaaattaaattaaaaacttttaaattattttttttttcaaattaattatacatgcaatgttaatatgacgttgatgtgtgtttaatctttctgtttgccatataataaaatcaataaaaaaaaaaaataaaccaaattacaacagtctaaataattcaggaaggactgttttaacaggttaaaaaattgaagagacactaatacatagattataattttttcaaaaaatcctaaatatttttcttctaataataataacaataataatttttctcaaatgaaaatataataataataataataataataataataataaataccatttaaacctttacaaaaataattaattggactatctattttcttaaatgacaatatgaactattttcaaaaatggtaaaaataagaccctaagcttaatttttgacagcttttttttttaatataaccaacttgaagacaattcctaacatgaaca

SEQ ID NO: 350035 - DNA, 564 bp, Cannabis indica
aatattctttgtaatgaccatgaggtctaacttcagttttatttataaacacaatttttcaaaaaaaaaaaaaacattctattttagggcttgttggactgttgagctttagtcataacattgtgatttttgtgactaatatttttattcatagaccttttaatcacaattttaagaacgataatttgttaatcaaaaaacttttttaattttaatcacaagttttgttgttaccaaaaataatttttttttgtagtgttaattaataatatttttttaaataataatataaattgtgttaagattagataatatacatatatatggaatacttctcaatgggtattacacattgatgggtactaaagaatttacaatatataagtgcactcttaatgggtattatccatgaatggtaatattaaaaaaaatttagtttttatgattaatttttctatttaattagaattttttttaattttaacattatatgggctggaattggtccatcaattaaaaaaaataattaaaaaaagttttttggcaaaaaaagcgataaaaaaa

SEQ ID NO: 350036 - DNA, 874 bp, Cannabis indica
actagaaaaaaaattaaaatgccaaaaatatcagtgtaataataataacaataaacaatcattaatactatatcataatataattttttagagtaaatataatatttataaatgtattataatttcgaataaaattattaattttacataaataaatttacaaaatatatgtatatattttattaagatgtaattattcttatatagagatatactttgttaatatggaacttaaaaaatgtatactttggtactcaaaataattttttaattaacttttttcccatgatcatgtacgttataattgaaaaattgagtttttgcagatgccaataattatactaaatttcagtaaaaacactgcagtaacagtctgtagcagcagaatgttattctgtcactgcagaacacaattttgcagaaacaaaccagaaataaatagtgcagaatttaaaaacttgacacaagagaatcgtacgtggtatcaatgttctttcaaacactactagtccacgaggccacgcccagagaataaaataaattagtaaagtatcaaaatttacaaaagcaattgacttaaacaaatttagactccctctagtgacttgtcgtaaccctttgtaatctaccttgctaatctgatctctgaaatacaccaagtagtgaactcccttcaactattgatgtgtgcttacttcctcccaaagtaaggcttaaacaaatcttctcctaaagatatatgctcacttcctcccgaaaatgagacttggaaaagtcttctctcgaagacccacacttgttcaaagcttctcttcaacctattctatgaatagtatgagatcataataagaaaaccaaaacctagttgaacact

SEQ ID NO: 350037 - DNA, 696 bp, Cannabis indica
tattattaatatatacatattatcctgtactatggttatatttaagaatgaaaaatatctttaggatttgaaaaccctatatcaataaaactaagtatcactaaaagtaacgatcatatagctaaaagttttatatgctacatgtaccacaacaaaatgtaaataatcgcatactcattcttttaatatataagacttcacaaaactgtcccattcatcccatatttcgtttatctcctgattgttgtacgacttgtcatctttgaactgtacaactagagatagataatattaaatgtatttaaaataaaaggtaattatcaaataaaaattatatatatatatgtttaattacctcattgttcaaaaaagttgctggattgtgctgagtcatgaagcttttaataatcttcatgcagtaatatctacactgtacatcgtttgcttgtcctcgacacttgtattgcctgatctttacttcaatcatgttttgtatatttttttgaatcttgtgggtttccaaacacaataaattagggggttgggttttaagggtttttactttttaatataatatttgtttttacgtatgtaattaggcatagatggaggaggaaattacactctataccctttttatattgtcctcttttatttttaccttcttttttaaaatctatcatttttacctctttt

SEQ ID NO: 350038 - DNA, 555 bp, Cannabis indica
gaagaataagtggttgaaataaagtggtaaaattttaaatagagattggtccattacatggccggccctagtgttgatttttgcccaatattttattactttttaatccatataattctatcctaagccctagttgaaacactataaaaggaacatgatgctctcatcttatccacttgagaatttaacttgatgccttcaaccaaatcaaacctagttttctatgtcagacaactagtagatgagagagttccttccttagtgattttgcacctcctttattgttcttcaccgttcgaaaccttgagtgtaagtgttagagatattattacagtggaagaaaatcaagatattacaactctattgcaatatcatacaaggactaacaaagagataaaataaatgttacaacacataatatacaatatatatacactatatatatatcatatatatatgtaaggtagaagaagaatattaacagaatatacaatattatataacatatatataatatgaagaagaaaaagaagatcactcactcacaaccttgag

SEQ ID NO: 350039 - DNA, 721 bp, Cannabis indica
ggcatatacacggaatagtcttttaaatattgtcttgacaacttccctgaagttagtgggaaatggtgcacctacaaaaacatttcaaacaggtaattgatatgctatttaaattgatcacagcagtcgcatttcatattaaaacaaaaaccaaaattcaagggcaagaaatgggtagataaacaaataaaactccacaatatttttctttgtcggaaatacaagaacgaacagaaatgtataccaagtttttgaggaaatattgattcatcatcaagttgagattcaatccagtccattaagtattcaacatattttggagccgaaacctcaataggcttcttgatttgtacgccatctgcccatctatactcatacctagggaaatttaatgtgcaaagaggaggaattcaacaatatgataaatacttagaaaaacatcgaaacacttcggcagaataatagtacatcaagaccaacagcataactaatgagaaactcataaccccccctaccccccccccccccccaacaaaaaaaaaaaccacaactgtataccagtccaatgaatattcgttgtagccgtacaggtacaatgtttcttaaattccagcattatgtattagactgaagttccaagtggtagtttaggactatgttttgtctttagtgttcacattaaggccaaaaaaatataactatgattttgagcaaactaatg

SEQ ID NO: 350040 - DNA, 687 bp, Cannabis indica
aaattctgatgtcgattttgggtcgagtacgttaccggccttacacaatgatattggccgctcgccggtgtcggagaagacgcgctatacagctgatatctttcattggccggcaatggtcaaggaggagtttagcttgctgatcaccaaggaacccgtacctggtgcgagctgtttgatgacggaacactgtagaagacgatctgagaattcaagattatcaaattgtaccttccaaccctataaggttaggcccaatccattgggttactttttaaatctggtccataagaatacccgtaacacaatggccttaatgttttcctcttctactagagcaataatatcatataagagaaaccacaagcccaattcatttaattacattattgatcgggcccacttaagcaaagaatactcaagtaatgggttggtgatatgggacccaggagaaacccatttagctttctcagatcattctgtattctataaaagatcaactgctggcatcatttagatagtaatgtatgttgatgacatcgttattactggaaatgatactgaaggcatctcctcccttaagtctttcattcatacccagtttcagacgaaggatttaggtatttcttaggtattgaagttactcgaagtaaacaatgtatttttctatctcaaaggaagtatgta

SEQ ID NO: 350041 - DNA, 781 bp, Cannabis indica
aatttttaaataattttttattggttagttttagcttttcgttgtacttagtgggggctattgtaaacttttatttctatttttaattgcttcgaattggcttctatgaaaatgaaatatagctaaaacaaaatggttgtcccttttgttgtacggtctttgtagaatcaatgcttgtttttttgcttaattttagatttttttttttgtacgcaccactccttagtagtgatggaaatttggacagtacatgggacaagaattatctaccttaatggataatgggaggagagtagggtgcaattttatatattccaagctggtttaagatagtgttgtgggtgatactattcatcttatattcgatctatatatataatttctaaatttttgtataattttttaattattatatattaaaattattgattatacttgcaaagttgactattaatttgttctaatttgctttgtataaagaccttttagtaagtagaatgtttgtctatgttaaagtcaatatcttgctttttatttttattttgaattacattatgttgcccctgattttgctcaatatacgtggaccaaccggataaggacacgtggatcaaacagcttaacatttgaattatttgctaagtctttatgtaaataaggcagcatccgggacatgtctcccagagaagacgtagggagccccatacgctcccggaagcccaagtaatactaaggcatcttcgcgaggtgtcaggcttcccctgagcaatcaagtcgcatt

SEQ ID NO: 350042 - DNA, 612 bp, Cannabis indica
gatatgtcagaatctgctagaacctagtccgagtaatgcccgtgccatctaccatgaagtactgatcagcaaagcgcccaatcttactgatggccttatcgtccgtgcccgtcaaccacttgaagcctagttgagagtagtagaagtacgccaacctgccttgctcaggggtggacttcaaatcgaagtaccaagcaacctcgtggggagagggcataccccattttcaggaggcatagaggacgaagagggcagaccgatacttaatgcccttgggagtgaactgggtcgcactgaggccgaagaagttcgccacatcctttaagtattgatgcaagggaatcaatgctccttgatgacaatgggcacccgaccaggcgcacatccccctttcatggtttgtggcacgattgttgggggcgggaatgtagaagtccagctcaccaaggtatccgccctgctcaagggttcgaaggcgcgcctccgtaatcttggacggagggcttacccaccttgtgcccaaggaaccctgccttttatgaggaaccgccgcaacaagttcctcactgacgtagtccatgcccttaagcaggacgtctccgtcaacatcga

SEQ ID NO: 350043 - DNA, 633 bp, Cannabis indica
gtgattatacttacttgtagaggccttgtggcaactgtgacaaaaactcttgatctggagatagtattattactgcataataaaaatttaaaaagctttgcacccacttttaaacttgaagacatatcttccttaatttaatccttttaattctttctaatttttaatttaagctagggagtactatagatagaaaatcaaggaaataataaattttatttatattaattaataatataattgtgtaatatatatatataaataatataattgtgtcaaaattggagaacatttctctctttaaaaggctcaaaactgtgtcaaaattacagccacaatatcacctggtcttgctgcttaattttaccttaaaaattggcttagtatttgtaattgttattttgacatttagtaattaacatttatttttttttgagataaaagtaattaacaatttttttttttttgaaaataagtaattaacaatttaaatggttatattctgttttatgtaggagacagaaatattaatgtgaaattggagatggaataattgaagctttttcattttgttatttttaattagttgaaaatggctaggattaatttgaagatatatacagttatatatac

SEQ ID NO: 350044 - DNA, 818 bp, Cannabis indica
atgcatttaatatttcatatatattacttcttatatatatagctaactttaaattttgttgttaatggtgtagatatggccaactcaagttcaggatcagcttcaaacccagaagcagagtgtcctaggccgatacctacatgaggagctactcagatgaatgaaatatccaagctgatagaccaaggaaaaagcgtggcagtcgaggtgaataacgaaggacagtactgtggcaaaaactactccaagctattatcgactttaggagttagatgacgtcaaacgatagggttgtcctataaaaattggaaagaagtcaaccatacactgaaaaataaagtttggaaagatatgcatgtaagcagttatttgtgagaattttgatttgttttttattaatccagatgttaactctaattgtgtttgtttgtcttcaaactagacgggttttatagtgccagaagagttcaaacatgattgtttgatccttgctgggaagttaattaaagacttcaagaatagaatgacaaatgatgttgtaatgcccacaattgaagagaaggatgtgcaacgactggcacaagtccccaagaagcatccggaaatcgaccttactgattggttgaaatttgttgaaagtcgactaactcttgaatttcaggtacactaattatatttgtactaagataaattcttaaatacaagtacatgtatctaatgcatttttctggcattgtaggaattgagtaaggtgcaacgagaacgttcctcgaaaatccaatttagacatcgaagtggtcggagtggaatggtgaacg

SEQ ID NO: 350045 - DNA, 734 bp, Cannabis indica
tcagagccttagtttgttgtttcgtcgataattaggttatggacaagttagttattgatagtgaaactcataattgtgagtttaggttcctggaataggttttggcgtgttatttacctatttacgtaaatgtcacataggcatccatctagcacgtgattttccattcaggtcggccatcacacttgaatttggaaatgaggcaagactagcatagaacatatttaatatgaatatgtgtatgtttgatatatgcatgctatttgtgattcgtacactaccaacgctagtacggtagtggtactgagtgcattggtacagtgtatgatgttcaaagggtacaatacggtgttaccaacactagtatggacagatacggaatgtatgtggtataacacttaggggtattcgaggaacggggcaaaccctaccaacactcatgcagtagcggtatgtagtgcatgtggtacaatggttgtaccttagtaaagaacgttcttacttatttgataagtcttgtggataggtgtataagcgcctagatgcaagtcggtattatattatatgctatgtgcttttcttattgagtttgtcgactcagatattatttccgtgtgtaggtaaaggtaagacaaaagctgaacaggagtgagttccgagcttggaggatgattgtacatgtcgagatggcacgacctagagtgttaggtcttgggacaacttgggttgtattt

SEQ ID NO: 350046 - DNA, 650 bp, Cannabis indica
caccacttcataagcaaacttttgtttcttaattctaacctcccaattcctaggcctccctcatgtcgaggcctacaaacctcatcccaagccactaaatgctccccgcctgttgactcactgccttcccacaaaaaatctctcatcatcttctccaatgctttaattactgacttaggtgctttaaataatgaaaggaaatataaaggaagggaagatagaactgactgaatgagagtcagcctaccccctttagataaaaatgcacatttccatccatcgagtctgttggcgcacttgtccagaactggttcccaaaaactccatttcctaggcgaaccccccaagggcagccccaaatattgcaatggccagcttcctacttcacatccaatcctccttgcaagccttgaaaccatttcctcattcgtacaaattcccaacaattggcttttgctcaagttaatctttaatccagataaagcacaaaatgcttctactaccctcaacaacttgtgtaacgattgttcattctcaacaaagaatagcgtatcatctgcgaactgaaggtgactaacttggactctctcctttcctaccaagaatccagaaatattgcctgagctgacagccttattcgtcattctccc

SEQ ID NO: 350047 - DNA, 627 bp, Cannabis indica
attttttaggaaaagacaaaaagtaatgaatataaatattaatttattattatgttaaaaaaataaataaatattaatttatttttaaaaaaaatatataatttaagaaattttacgaaaaatagaaaaataattgtatagtaggatacattttagttaagtaataataataataataataataataataataataataataaaaccagttacaaattaagggagagtttctcgccaagttgccatcacgcatgaaaagcggacaaccacttcagccacttttcatttacgtaaccgccacttttcattttcaacttttttatttacaaaaatatctctttaataaaagtaataaattattttttttaatttatttatagttgtcgtgatgttacttttctagtttgtttttgattattttataatttatttatagttgatttatagttgtcatgtttgttgttttttaatttattttttgctaaacaaagtgtatttttgtaatcttaaaattttacaagtgaatttttataaataaaaattttagactgtaaaattataaataaacataaaataaagggtatttataaaaatttccctaattaataagtgattagaggtttgtat

SEQ ID NO: 350048 - DNA, 941 bp, Cannabis indica
gagagaaaacaccagatttgtttcagagttcaacccaaaaattagggctacgtctctgtcaagctcgtctcagagattagcttgatatccactatcatcaatggttgtttacaaggttttggagcttcctgtcacagaaatcgatcaggtaagctcgattctctcttttacactttctgatttttgttctttcacttgatttattctcgatctaactctatttttgtttccttgtgcatgtacttctttcttctaattcctcaccatgagaacttgatttctcatctctggatcttggagcagaagccttcaatctagggtttatttcttctaactcttctctctgtatttctgatatgttttctgtgtaaatcactatctttgtttgctttgatctgttgtttatattcatgtaaagagtcggtttgatcacaggtttaggagttagttacaataacagttgtaactaactcctgaatcttgatccagtagaggcgaagccacctaggattgagtccttgttgttttgtttctgttgtaaatgctgatgtggatatttgtgtgtaagtgggctagttgtaagtggaatttactcaacaatttccacatgaattcctcttataaccagttctgctatctgtttgtttatctctgagagtcttagattgataggtcctacttttagtctcctgagtcaattcttaacaagttcatacaatgtgtgaacttgttaagagtcacaattttagttcccatgtctgctgggttatcctcagtaggcaccttctcaatgtcaatttcaccttgagtcactttatctcgtataaagtgatacttgatttctatgtgctttgttttgtcatggaacataggatttttacatagaaatatgcagctctggttgtctgaatacacagtaggcacacctttaagtagattta

SEQ ID NO: 350049 - DNA, 667 bp, Cannabis indica
tgattctttaccatttgacaattacatttgtgttatcatagagtcacactagtaattattctatatttagaattatgtcaaagtctatattgaactttcccaagtctgaaaaattccttaattttatttaaggcaaccttattattcagccttactggtagagttactaattccatataggtttttacacttctctagaaatacttctccacccctagagttatcaacatcccttaagtagactttctagcattaacgcaagtccaaaacactgatttggtgtagcctaagggttttaatacaccatcctcacaaaccaacatataatttctcttttttgtatttcaagatatgtttaattgtatttcaatgttcctttccttgatcgaattaatactcactcataactcccactcaacagtaaatgtttggtctaattccatacaagagtatatataagaccttttgttattgatgcttagggaattcttttcttggcctttatcttttctagaatggttggaaatagctcttagttaaataaattccatgcctgaacgtcaagtgacctctaataggattaggcatttgaaaaatgctctagcctattacgaaagtaatggagctacgtctactaagagcttttattatcacacatagctaattt

SEQ ID NO: 350050 - DNA, 476 bp, Cannabis indica
attgacatatgtagttcatttttttttttttgaactctagactatactcaatacaccacaatatctttatggcacacatattttgattagacatggatataatataatgaagacttagcaaattataagaacttattcttgatcctataattattccaattaacatgttactgtagtaatagaattgatactaataaagttcttggacatagtatgacaataccttatctgagtgggagaattttaaaattctagcccatcattatttggatgacactagtgatagctaactatgttacgatcatgatatgaactttaaataaaactgagaaattatatctaaccatgcatatggatagaaataacttattagaattatagggataagatataaaattttctgttggatatttattttacactaagaattttgaaatcttgaagaagaaaagaagagggaagtggcggctaaagat

SEQ ID NO: 350051 - DNA, 888 bp, Cannabis indica
aagcaacctaaaagcaaccttcaagaagaatgtaagcaagctggataaaccattcttcgctgcagccagagcatacacagagaggaaatttgaatatcataagcgagttggacagcttggacatccgtgtcagaccatatttacaacaagttggataccataaattgtcaagagaccactacaaaaacaacaagtattcaaccatgacttcaaacattgttgaatctctaaatgccgcaaacttagcagctagagagctaccaatcacaaaactgatggaatcattgagagctttgatacaacaatggacaaacacaaacaggaaaaaggcacagaaaacaacaaaattttaacacctacagcagagaagaaattagtccacaactttgtggactcattgacaaaaaatgtaaaatctcttaaaactttaagttgcattacggtttcttaatagtttattttcagtttttggaacataatgacgattttataaattgacttaattcgcaggtaaagccaataaacgagaccatgttcgaagtggtagagaagaaattagtcaacaactttgtggactcattgacagaaaatgtgaaatctcttaaaactttaagttgcattatggtttcttaatattttattttcagtttctggaacataatgacgattttataaattgacttaattcgcaggtaaagccaataggcgagaccatgttcgaagtggtagaactaaccagatcataggtcatcaatctcaaggagaaaacatgcagttgcaatcaattccaacttgacgaattaccgtgtgctcatgggcttgctattataaaagagatgaatttgaatgtttacaactactgttcaggctattacacaacaaaacatg

SEQ ID NO: 350052 - DNA, 626 bp, Cannabis indica
atttcttaaccacgcatcaacaaaaaggtgaaaacgtcatcccattaaagtgaaatcattaatagcgaaagcatattctgctcaaattttaactggtatatttaacaaaatggtgtccctccttattgaacattaattagttagtcttcaaaacaactctataaagtttaaattttatgaaacatactttagctttaagaaatatattagggtttatgctaagatttaggattttaaagactaattaattagtctaaaggagcattactaagtttgaatttatgaaacatattcctaaacctttttcttttttttctttccttttttgctaaaaggtattcctaaggtttgtagtctcaaattttaggaatgaaggattagtatttaattggctttgtagaaattacacattttattagattttatagaatatgcccaaaattatgcctttttttcaaaacaaaaattaaaaatatacaaaaacagtttaaggtaatcaatttaccttatacggttttcatcacacttttaatttttttttcataaaataacttttttaaaagaaaaaaaatatatatttttgtgaattttttagcataaaaatgaaaatttccattaggatttta

SEQ ID NO: 350053 - DNA, 161 bp, Cannabis indica
aattttttaacacttgaccacaaaaagtaaaaatttgacagcaaaacttactgaaccctcattctgttttgctctttacacttctgttaaaaaatcttagttaagtgccacagtggcctgcctacgtgtacacttgtgtgcacgtgtcaaattttattggt

SEQ ID NO: 350054 - DNA, 538 bp, Cannabis indica
aacccttgttcctttctatcgcagagtattatcaagatttgagcctgatactccttcaggtgctggattcttcacaaccttacacactatgattgagtacttacttgctatgtgtgggcatgtactctatcactagaaggacgaaaatcttaagaggaagagagagaaggattcgaaatagagagagaagagagaaggctcaaatttcattgaaggcttaaaatgcatcaactatcagttttggactatcactatctatttataggaatccttctagatttaggtttaaattatttggcattaaaaaattgataaataaatggtaaaaagaccttaagtggccgaccattaggatgtgggcccatcatttataattttgccatttttctcaactatttatcattttctttcacaaatgccacattttctaattcaatcacttacatgtcaaaactagtatttaataattaaatttaattatcaaataaaattgtcatttaatatatttattaaattagacttaataaagtctcttaat

SEQ ID NO: 350055 - DNA, 733 bp, Cannabis indica
aattatgaggtatcgtaattactaggcttgtaattacacagtttagtaattatactatattttaaaatacaatgtgtgtttggatgtgaggtggtaattacatatgaattcctaatatcttgtttggcaaaatagtttagttacatgggaaaataatatttttaagtagttaatgcttaatatagaaagtttttagtaattacatagtgtaattactaggggtgcacacgggtcgggttttcgggtttttggggtttcgggttcgggtattcgggtttcgggtatgggaaatgtacaaccgaacccggtgttcgggtgtacgggtatagtcgggttcgggtcggttatgttcgggttggtgtgatcgggttcgggccctattgggctgagcccgaatttttaatatatgggccgaaatacaatttagtttttaaaaataccatttttttttatttttaacattggttggatctttaaaaatacaaaagtcaaaactgtgaatgaagaaacaatataaattatagtttagtttaacaaaccaatataaactgtgaatgaaatataacaaaccttatatttataattgcaaaataatatagttgctgtaattattttatataatatataataataatatatatatataacaatatcagtaaatttagttccacctcgctcgacgctcgcctcaccagtcgcctcgccacactcgccagtcgcgcgccactcgcca

SEQ ID NO: 350056 - DNA, 614 bp, Cannabis indica
aaattaaaataaaattaatttaaataaaaaaaaaattataaaatgaaaaaataacttttttttttctttctttttctttcttttatcgtcttctcattcgatatgaccatcaagctaaagcacgagcttataatcaacagcttcaagaccatcgacgttcgtggcgccaatgtccacatcgtcgaaaacagttgcataaccctctagtcggtctccaatgtcatcatccacaacatccatatccaccactgcaaaccctcaggacacgcagacattgcctcgagtcccacccacgtcggatggagaggtgtatccgacggcgatggtatctccatctacagcgcacgtaaaatctggatcgaccactgcacgctgtcttactgtatggacagtttgatcgacgcaataatgggttcaacggggattacgaccactgcactgctgttgagtactacagtggatgaaaatcccaccttcgcagacccaaaatcacacaacttcacattcagattatggtccagaaggacattgtaagattttaaggatttaaggatctgtaaccgagtggctgcccaagggttttgaaaaccctaaattagagagagagagagaga

SEQ ID NO: 350057 - DNA, 455 bp, Cannabis indica
tgttatcccaatttttacactttcacgtggcatcacatgaatggtcacccatggagtctacttggaacatctgctcgggaagcacagtccgagcaggatgcctcactggcatgcccagagcaaagtatttagtaattcgcacataatggcaaaacacttagagaattaaactttcgcatcgtgagtcatcagcacaatccctataacttagggatcaatttacgtggatatggcatacacacgatcccactatcagtgtattcagcctcaatcccttgatccttgcattcagcattgatcccacaatctttctgtttatacgcattgtaacgagaggggaaactcttcctccccaagcttattagccctataagtagtgatgtatattcactgcgcgagagattggtcaaaaagcagttgagctaagactacaccctaaatatattatctaagaa

SEQ ID NO: 350058 - DNA, 505 bp, Cannabis indica
atggctccctatgaactgttatacgatagaaagtttagatcccccatccattgggatgagataggggagagaaagtacctaggtccggagtcagtgcagcggaccaatgaggcacttgagaaaattaaagctagaatacttgcctcacaaagtagacagaaaagttatgtagatccgaaatgcatagatttgagttccaagtaggggaccatgtatttttatggatgtctccagtgaaggggaaccaacacttcgggaaaagaggcaagttatgccctaggtttataggacctttcgagattctcgagaaggtaggtcaagaggcataccgattagcgttgcctccagctctttcaacagttcttaacgtattccatgtctctatgttgagaaagtacgtttcagaccctactcatatacttagttatgagagccttgaactgcagctagatatgacatacgaagaacagccagtgcagatcctggatagaaaggataaagtcct

SEQ ID NO: 350059 - DNA, 577 bp, Cannabis indica
ttttcttatgtttttttataggatcggaaatccaagtacacccgatcggaatactaccattctagagttataacctctggttattactctgttattgaagatattaaaaaaattcttactgaaacccaattaaatatgttttcaaaaaatgtattggaagttgtttttgattgcgtagtagctgaggacatacttcagttttgtctttgtatgcttgacttttttcaacttctgggtagtgtttgtctgttattagatttgcgttgttgatgtcaatttctggatctagttttttactgttgttttcaagtttttctactatttcttcagcaaccatattcatatagtcaactatgtcgaatttgacgttctcaaattctcttatttttgactctcctccttattctgattggtgttcgagtgtgtatgattctgttgttgcttgccacattttcttgatatggtgttgttgtggatgtgatatttgggattacagcaggtgttgtgttgttgctctgtccatttccaatgaagaaggaggcgtcgtttgtcccttgttactgttcacaatacaaaa

SEQ ID NO: 350060 - DNA, 680 bp, Cannabis indica
ggtacataaaaaatgtatttttagcatttacaacttcttaaccaaacgttcacatagactgctaaataaatgtgtccatatagtttggttaatcctttttcataatgtgtaaattaaaaataaaatcccacaatatctacaagtcatcattttgttaaattgatttgacctaagactgtaaaaactctgacgtacttcattgaaaattcacttaattaataaattgtatttaataattccaaatttgacaagaaccagttcaattaataatagatacgtgtataaaattattacaactgcttagaaataatttttttttaataaaatcccacagtatctgcaggtcatcgtttagtgaaattgatttgaccaaagactgtaaaaacgctgatgtactttattgaaaattaacttaattaataatttgtatttaataatttcaatttttacaagaaccagctcaattaataatggatacgtgcaagaaaaattagtacaagttgtcataaataaatttttgaaagttttgttggaatactattttcccatcaattcatatcagtaggatgtactagctagtttcaaaacataaaaaatacaaatttaaaaattataacacaaacacgtaaaggaaaatatgacgaaaaataatgttttaatttaaaatcaaatctcataat

SEQ ID NO: 350061 - DNA, 529 bp, Cannabis indica
tatattttttaaaaataatatattaggtgtaccaatataaatttgacacatgcataaaagtatacacataaacagtttatattggaaattaactgtaaaaattggatgacaattcaatagtttggagggttttaccttcaaaatttgagcatagagggttaagtgcaagttaagtgatagttgagagagttttagccgttatttttcctcattaagaataattaagtttagctgtggtcccacgatagtatttgtctacggcttcaacaaccggaaggaatattggcagttaaaccacttaaattttaaattttttaacacttaacaataaaaattaaaattttgacggtaaaaatctactgaacccaagtttcgttttgcttttcatactttcatctaaaaatctcagttaaatactacattagattgtctacgtacaaacaagtctacacgtgacatatttttagtaatccatataacattaattacttaaatattataaaaataaattataaattataaaaaatta

SEQ ID NO: 350062 - DNA, 719 bp, Cannabis indica
gtttaattaggtgatgctaagtgtaatatatatcgtattttaattttttaattaaataatatattttttaaaaaaatttaaaataagatttgagattttgatttttaagatttttttaactatattacgacaataatagtgtatatatgcctcctatcaataattagtacttcatataatcatgatatatcaagtttgacttaccttacaaatataatttgacttaaaatattttcgattttgatattaaaaaataatttatataaattatatttcaagatcatgtacctttaaaaatcatgtaaaatatatcgatctataaaatcataaaaattattaagtttcactccacttatatattaatcgaaaaagaaaaaaaaaaataaataaataatataatcacactaaatatgaccagaaaactaatataaaatatttactattaaaattttcttagaatatttataatattttaaatattttaaatttaaattaattttttttttgttataaaatatctatatattttttatttttaaaagttatataataacattattaagtggttagacaagaaccaaagtcctaaagtcaagtaattctaagaaaagaaagtcatacaaccgagatgatctaaaagcatacaaaattagaatgaccgaatattcatgaacatagaacttgcgttcgttttttttttttttacttttttagtttaa

SEQ ID NO: 350063 - DNA, 1028 bp, Cannabis indica
gagagcgagcaggtgaagattgttcgcttcgcgacaaatcttttgtatttgagtagtaaacttttgtaaatgtattttgtaaacgagatcctgaaattttatatatgtaatactttaagtttctaaataaataagtaaatttttattaatcacgtttttcgttaatctagttgactagcaacgagctgcacagtacatttaaaatcacgctaacatgcctaagttagttaaggtgttacaggaagggtcctaggcaagtatctagcatgactatgatttcacccatgctagcaactgacatggtcagataaggcattgagtttgtagtatgaaaacataataatttgacattacgatctgatctgtcaaaaaaaaaattaaagctgctcaattaattgatccataattagtaaagatccaagaagaggttttagcttgtcaagctaaggactttacagtgttaggtaatgggatgctattgtatagaactagagtttgtgttccaagcaatgtagaacttagaaataatatttttgaagaagctcaatccactccttatttgttgcatccttgcactaccaaaatgtatcaagatttaaaacacttctattggtggtgcagaatgaagaaagatgtggtagaatttgtatctcgatgtgtgacttgtcactagattaaggctgaacactagagacctgcagggttgttgcagcttttgactcttcctgagtggaaatgggaagatgtcaccatggatttcacggttgggttacctagaaccacagggatgttcgattttatttgggttgtggtggatcgatttactacaagtgaaaataacctttatagtggatcagtacataaaattatatgttaaagaaatagtgaggttacatggggctccgaattccattatatcggatagagatctgaagtttacctcaaaatttcggcaaagtctccaatgagccatgggtattaagctgaagtttagtaaaactttccatcctcaaactgatggacagtcc

SEQ ID NO: 350064 - DNA, 627 bp, Cannabis indica
tagtaggagaaactaactcatgagtcacaaaatccttaccttcatgattttcaaggttgacagggctttgatgagtgtttgaacatctcttatcttgcatgttggcctctatattcccaactttcctcctgctataaacacaaagttctttgttacctatatcaaattgtgcttgagtttgaaagagtgtttggattttttgaggaggaaggtgatgttggcttgagtgtagagtatgacggatttgatgtgttttctggagacaggttggatgtattttctggattgatatccggttggacaaggaaaaaaggcaaggaaggaaaaggtttagcacttcaatgttcgtgcaccataacattagattgaggaaaaacaacttcatgattcagaagagtttcccaaaactaatattcatgtgaatgctcctcctgaataccagatttgggaaagaaagattaatgtgcaaaaaatgtgacatccatagtgttataaaccctttttgaaattagggagtaacatttgtaccctttttgagtgtgggaatacccgatgaagatacacttgtgagattttggatcaagttttattctgttgtgatcataaacatgaacaaaggttgtacat

SEQ ID NO: 350065 - DNA, 1545 bp, Cannabis indica
atccccttctcttgtagtttaatcccacttctgtagatcccaataggtatcttaacaaccacttcatagcctcccagtgttgtttacctgggtttgccatgtacttacttagtacactaatggcataggctaaatctggtctagtactgaccattaggtacatcactgatcccactgcacttgaatagggcacttcactcatagcttccttctcagctgtagttttagggcattgatctttgcttagatagtactgattagtcataggttgcttagtttgctttgcattagtcatagagaaattttctatgactttctttatgtagtttttctgatgtagccttagtgttccatgttccctgtccctagagatattaatgcctaggatcttagcagccttgcctaagtccttcatctcaaattcttcccttagccaacccttcattaggtcaattctggtcctttccttgctcacaatgagcatgtcatctacatacagaagtaagtagatgacttcatcaattttagtgcctttgtagtatagacaggtatcatagtagcttctagagaaccctttcttgatcataaactcatcaaaccttttgttccattgccttggtgactgtttaagtccatacagggacttaatcagtttgcaaaccaagtcttccttgcctttttcctcatatcctttaggttgttgcatgtagatctcttcctcaagttccccatgtagaaatgcagtagttacatccatttgatcaacttctaggtcaaattgagtagctatggtaagtataattctgatggttttatacttagccacaggtgagaatatctcattaaaatcaatcccctctttctgtgtaaaccctttagccactagtcttgccttaaacttcttaggatctgtctcagtaagtccttccttgtgtttgaaaagccacttgcatgaaactatgctctttcccttaggtttcttcactagtatccaggttctgttctttctcagagattccatctctgtgtccattgccttggaccatttcttggcatctttatcagtcatagcttcctcataggtcttaggttctgtcatttccactcccatagcacaaaagaatgcataggctagcacttcttcccaagcagtgaaactgaatctctgtgtaggtctaggaacccttctagttctgtctctggttagttggtaatcttgtattgcctcagtttcttgtccatcttcaggaataggttccacctgaatgttgtcatcctgaacttggtcatttccttccaagttttcatctccctgagtgttttccacctgttctggttccacctgaacagtattaggttgagtgttccttgtttgcatgtccacagatgtgcctgcagggttagtgtctaaagtaggactagatatagcattattattagtaatacaaggaaataagtcttccttaaaaacaacatccctactgtttatagctttaaaaccttgtttctctcttacccataatctgtagcctttagtaccttcag

SEQ ID NO: 350066 - DNA, 597 bp, Cannabis indica
actcttatgtgtttatttcattgttttagaattcatatgaggttgttaatgatacatacttggtagtaaatctagatcctgttaaaatatttccaacagtgtccacacaccgtattgcttcctcaagcttaatgaatccatctgctcgatctagaaattcaaccatttgtcccacaattaatctttttatgtccttcaataattctgccagaggctcaatgccccccagtattgctattaaaattccctctttagttatcctttaaccttcattgctttggtcataaacctgctaatgtaggccctgaggggttctcttagcatttgcttcacttctactaggtcttccaggtgtgagggaagctgacaggaggaggaaaactgtgcatggaactctgaggagaaagcaatctatgaatttaactttcctaaaggcaatttgaaataccattgctaggaagcctctacgagtgtggcaagaaagattctccactgtacatcgccccttaccccttgcagatccatctgcatttcaaagtactttaggtgtgataagggatcttctttttcagtgtatattttgttggaattatttta

SEQ ID NO: 350067 - DNA, 963 bp, Cannabis indica
aggaacatatcatcctcttacactaacaaagaaattaatgaaatacgtgaagaatgggaaaagttgtcatgcagatgatagcagcaggcaaatgactaataacatagagtatgatgaccaatatgatcgctcatggacgatccccatgtgatctaagaaaatgattgataggtttgacatcgatctcagttactattgtcttgtttttttagtttataggaagtgatctccagctatttgattaaagtcccaagtgactacctggagacttattttgttcttagtatacatatttttagatgtatagaagatattctacaaaagattgcaaaatgttaaaacttaattggatttccttcttttgtattgcattactaaactttaatggcatattatggtttccataaagctttaatttgtttgaagagtgttaaatgtatgaatttttttataaaaatattattattgttatatgttttttcatcatcgtgtattggaaatctaaataataaaattacaagaggacaatcgaattaatatttctattttatactttacttcatattgtccatcggtttataactaccattttaagtagtgtattttgttaattatagtctgactaaaatcttttccaacatttcttaactgtcatttaaagtaactttttgccacagttataaaccgtcatttaaagagatgttttccatcagttactacccgatggaagtctttcccaacagttataaactgtcatttaaagtgactttttctgacatttcttaaccgtcatttaaagtaactttttgccacagttataaactgtcatttaaagtttcgaatttttatgacactcacatagccaacggttttaggaaccgttgggaaataatataaaagacagttataaaccgttgggaataacccttttgtagtagtgttcatccacttcaacatttttca

SEQ ID NO: 350068 - DNA, 969 bp, Cannabis indica
atatatatacatatcaacacaaatgaaacttgtggttgtatttttaataataatttattcataaactatattaattttaaattttaatatttttttataaaatattttttttgaggaaaagtacttgttattattaaacaaatagagaatcgtttacaataatagagtagataggcggaggaataatctccaaccaagaacaagcctcatccaatcctaatgcaaatttagcaaaaccatgtgccgcttcatttgcaatacgtttaatatgtgaaaccattacattaggaaaaaaggataagagactattaacatccactaataaatctgaaaaagatgaatttggattgaagggagcttttaaagcatttgccaccataagcgcatcggtctcaatttgcataattgggagttgatgttgaatagcccaattgagactatggaaaagtgctttggcctccatttcgtgtgatttaaaattgccaacaatcgccattgacagggcagccacaaccaaaccattttcatctcggaaaacatctcccacaccagtaatatttgttgaggagtcaacaaccgcatcaacgttgagtttgtgggcaccagatgctggtggagaccacggaattggagtcagtgttgcagcagaattaacctgctggtgcgaagttcttggtgcagtcacagtagcagcagtgggtttccgttgggcagcttggaagttctgtatgaacacagaggcaaaaatggataagtcctgagctgttcttgctttgccgccatgaaccaccttgtttcgttcagtcaagatagcccaaagtgtacaaaagatatgttccatctctaacttggtgtaaatagtttagagatgtgttgaaaatattttaccaggatctagatttactaccatgtatgtttcattaacatcctaatatgaattctaaaacaatgaaataaacacataagagt

SEQ ID NO: 350069 - DNA, 733 bp, Cannabis indica
tttttccactagaggtctgagcaacattgctactgcctacctgtgtgcctagtgggtcaagaggctattgggtgcctcatgactgcctgctattgacatgccccacttgggcctgtcgtatggcttcttctaatttgataaagtcgtatgctctatcgagaaactccttcatgttattggtggatatccccttgatatctttctagaagttgattagtgggagtatgccccccagtatggtcgtatattggccttcttcagtaaggcctttgacattggtagcctcggccataaatctctgaatatagtctttcaaaggttccccttgtcgctgtttgactttgacaaggccttccaactacgatagtacaagtcttaaggatgagagttgtgtgtagaattcttgtgagaactcaacccaggagatgaacctccctgaggtaagcttaaagtaccactattgggccatctccgatagtgtggctaggaatatgcaacagagcacatcaccagtgaccttctggaggtcaagttgcctctcgaagtatttaatgtaagctagcgggtcctctcgtctagtatacatcttccataggcatcttgaacttcggtagaggtagggcatttatatatgccgagaatggtgatcccctcgaccgatcaagttcgagctctgaaggcttcgggccaactatgccctggatcatgtacctgagttggtccaactatgctt

SEQ ID NO: 350070 - DNA, 1061 bp, Cannabis indica
agaagtatattaggttagtatgaaatgaaaactgaaaaagtaagtgtggagggggaagcaactatcaaattgtaatgattacatgcaaaacccaaaaaaaaaatggttatgtaaagaaaaactgatacaaaaattcgaaaacataaaatgactaaaataacctacagaaactacaaacaataaaatatgggctctttaaacatacattccaaatgtatgggctttaaaaacccataaaacatgcccaaagtttaaaaaagccataaaaagtgtccaaactaaactatgccatatttatcataaaacatttaaaaaagccatactgcacgtaatttccacaagatataaaggatacaaattacacaatcagttctacattaatctactcttattaaaccaattttcaattctgttagtctattcttatgtatttaatttacttaatttgttagctagtcttatactatttcttgggcattagttaacaagagttttacttctccaaaatagttgatttcatatttggtcaactgagagtgaaattttatttatgatcaaaattactacgtgtaaataattaaagcaagttgttgataaatgaaaggatataataagaagagttattgtctttaataaaaacgcttagggtgaagcagttaattacgaatgagatacaaccttatcgatcaacaaattgattaaaggataaggttagtgcaagaaggttgtatgtagagtaggttttatgtagggtaggttatgtactcaactcctataaaaggaaggtcgagaggacacataacgaacatcaaaaaaaaaagaagagtctctctctaaaaatctcaattttcatcattgctccctattctcttcccttacacacaactatcccatctcatcaattctcttcctacacacagccatcccatctcataaaaaactcttttatacacatccatcccgttcttaataattctccctaatcaatcatacctctgtcaaaaactaggccgcctatttatcaagctcttataaaaatcaggctgcctatttagcaagct

SEQ ID NO: 350071 - DNA, 568 bp, Cannabis indica
ctaaagtttttctttgtgtaggcaggtctgaagttggcttaacccttttcctgagctaaatctgctacctccaaaaatgttgctatgtccaacaccatgagggcggaggtggacttggataggaaggatgccgatgacactagggtggaactcggagctgttcggatggagctgggtgaggtcaacaagaagctttttacagctaagaagaaaatagtcgagttgactaaggaccttgaggcttctgactagctcgaagttaccatcggcaccctatcggcagaagtgaatagcgttcaagaggaaatgggagttcttgggatcatctttcgtcagctagaagaagagaagaagactaaggaggaggagcttagtgctgaggtcgagaagcataaatcgaaggtggcgaagctggaagagaaagtacatgccttagagatagcgggtctcaagattttttatgactttcggaaagctaacgcttaggcaaatttcaattaccttggcgaggccaaagacatgtatctcgagtactatgcttctcgagtggcttatggtgaacctgagg

SEQ ID NO: 350072 - DNA, 719 bp, Cannabis indica
acatgaatttctaaaacaatggaatttaaacacatataaagttcaagaaaccttacattggttgcagcaaaattaaatgactccttctacttagatctctaaccgttgtacctttctgtcgcagagtattatcaagatctgagcccgacactccttcagttgattgtattcttcacactcttacacactatgattaagtaccaacttgctatgtgtgggcatgtactctatcactataagggataaaaatattgaagagaaagagagagagaatgattcgaaatagaaagaagaagagaaggctcaaattttactgaaaggcttaagtgcatcaactgtctatcatcagtcaatttgagtctatctatttataggaatccttctaggtttaggtttcaattatttggaattaaaaaattgataaataaatggtaaaaatgagcattagtggccagccataggatgtgggcccaccacttgtaattttgcaatttttttaactattatcctattctttaacaaatgccatattttccaaattcaactacttaaatgccaaaattatttatttaataattaaaataattatcaaataaaattgccaatctttatatttattaatcagacttaataaattctcttaattaacaaataaatcctagaatctcttttcttcacaattaaaccctaacttagtgaaaattcataaataagacata

SEQ ID NO: 350073 - DNA, 550 bp, Cannabis indica
catgtatgttttcatttaacatcctaaatatgaattctctaatatgatgaaattgaacataagagtttagaaaatcttacattgatgcagcgaaataataatgactccttccgctcaaatctctaatccttgttccttcctgtcgcagagtaataacaagatctgagcctggatctctttctctccttcggattggttaccaccgtctttcgcactatgattgagtacttgagttgctatttgtgggcctgatactctatcactatggctcgaattggtgaagagcaatgaataaggtgcgaaatcagtatgaaaggagtctctcatctactagttgtgtgacagagttagaaaactagatttggtaggctaaagggttggatgagttgagagcatcatgttccttttatagtatttcaactagggtttaggatttaattatatggataaaaaaaaataaaataatgggcaaaaatcacactaagtggccgaccacttatgggtctcactatttacaattttgtcactttatttcaaccacttattcttc

SEQ ID NO: 350074 - DNA, 504 bp, Cannabis indica
atatatatttactgtaacacgcactttggggcaccatagctgttagtgttgttacccacatcacatgttactgagagaaagagagaagaaggcagcagtggatgacgtaacaatgatggtggtggatgggtgggggggggaggctgtctttcaaaacgaggaagaaagggaggcacacgtggctatgtgctagggtttggaaaagggctttcatctgctagggtttcaaatgggggatcgaagagacaaaataaaatcatatgtgtgaaaattggattttacaaaacttaaatctttttgcttcagtggataaccgtggcaaatttattaaccttaattttctaccgaagtagaaccaattggaatcacttttctgccaaagcaaaatatataagacaatttttaaaatttctactttttttctcagttcttcttttagcatcggagtatcaagtgacgctaattggtatttttcagcttcagttatactctgaagcataaaat

SEQ ID NO: 350075 - DNA, 626 bp, Cannabis indica
cattttatattatatatttttatattttatcaacggatctaatactataaaataattatacaaaaaaaactaaattatgaattatgctagaaaaaaaaaataaacattctcactaattgttaaatttaaaagggaaattttactatttgcccttaataatataccccatatcaaaatttataccctaaactaatttgtacaaattaatgcctataattttaaaagatacccaaattaccctttaattaaaatttccctctaacagtttgtctctcttccccttcgtccttccctctctcttcccaattcgtcttccccaaccccccacctacctctgagaaacccaaccagcgaggcacctccattgaaggcgttcctgacctccattccctctctctttttccacttcgtcttccccaacctccattccctctctctctttccacttcgtctttccccaacctccattccctctctctcgccacaacgaaactccgagaacccaccggagttcgtgtgcatccaatcgacgaaacccacgaaagaaacaaacaacccagtcgacgaaacccacgaaacaaccaccacgaaatccagtcgacacccaccaccgtcctcaatcgaca

SEQ ID NO: 350076 - DNA, 602 bp, Cannabis indica
cgctaaaccacttcccggggacttaaactaggaactaaaagtttcctatcgataaaaagcatggcaataccccaaataacataaaaacgaggaaatctagggttcctgaaaatcacccaaccggcaaaccggttgcccaaccggaattccggttctgggaattttcagaaccccatccggaattccggatgcacaaccggaattcgggatgcacaaccggaattctggatgcacaaccggaattccggttcctcgcagaaaacattcaaaaattcacactttgctcaaatcaattccaaaccacaccaaaacttccagacctattctaaataccccaaagaacatttctacagcatctacacaatccataacacacagatatcaaaagtgccattaaagctccaagctttgagttcaaaactcaacctttgttaaacaaccctatcatgcatcaaaccttgatttaaatttcatattcatgcatataaaatctgcagaaactgaactcatacacaatcaaactttacagcagctattttcacattttcactttgaaaaaccatagttttgagtataaaaattctaagcttgaatcaaggcaa

SEQ ID NO: 350077 - DNA, 1051 bp, Cannabis indica
gaattttccacttaatattttcattattttaatgcctaataattcctaacctaaacctagtggttgcctataaatagatagtgatggcttacacttaaaagaggatgaaatttcttgccttcaggaaaaattgagccacctattctatacccatagccaaaccaccttttctcttcttctcttcaaattttttcatacccttgagtgatagagtgagtgcccacacacatctcaatcataatgtgaaagactgtgaagaatccagattcaagagaaggacattcgggctcagatcttggtgatactgtgcgacagacaggatacaagggttagagatctgagcggaaggagacattaatattccgctgcacccaatgtaaggttttttgaaactttatatgtgtttaatttcattgttttagaaattcatatttaggatgttaaacaacatacacggtagtaaatctagatcctgctaaaacatattccaacatatcttccctgctaattttttaatacttgacatggaggaagatgagaatatttccatcattttgggaagaccattcttagcagcagggagagcgttaattgatgtgcaaaagagggagttaaagttgtgtgttcaaaaggaagaagaaactttcaatgtctttgctgcaactgaaatttctacctattgtcgagtggaagttgtaaaggatagtcaagaagtaacgaccaacaggaagaaagggaagtccaaagaacgatttttaactttttgacgacgtatgaaaaaactgatgtgcgggaattgggaaggtgactctcactctaggcatagctttgaaatttgcaacattggatgacatttttcgtcatttggtacaaggcccttatagatgcaagaggtggactgtatcctagttgaatttttcaaccacaaccaccaccgtcgccatactgatgtggcactcaggtaagttcccttttctctctctttaatgtcacattggggacaatgtgtcactttagtttgaggggtgaacttaaaatttttatatttttt

SEQ ID NO: 350078 - DNA, 683 bp, Cannabis indica
ctcagatcgggattggaacttgggattcgaacccaacctagaccaagaaccaggacgcgaacccacatatggagcctaatatggacctagactgaaatccggacccgaccccaaactcagaccaggactcgaactacgacccgaactcaaacccaaactcaaactcagtatcgcaaatggaactagaaccgaactaggactacgacaaggaaaaggaccgaaacccaaaatcgaatccagatcaaaacctagacagacacctaaacaagaactgagactaggacttgaacctgaacttagagcgggacccacacccatacaataaccgggacttggacccagaattagtatagggacctttgaaacagaactaggacttggacctagtacccgaccaagaccttaacatgaacttaggaccagctcgtgactcggcacaagaaatcaaaccagactgggacccgagattgggatccagatctggacgcagggcttggacaaaactcgtagtcggtttctgggtttgggactagccctggactcgtaccctgacaaggacccgaacccacacccggaccttaacccagtcccaaacccaagaatggacccgaacccgtaccctatgacccaaaattggaacaaaaactggaagttgaacgacactggaactaggacttggactt

SEQ ID NO: 350079 - DNA, 416 bp, Cannabis indica
tttaccattttgtcatttttccatctcttttctcacaaacgccaattttccaatttaaccacttaaataccgattctaattatttaataactaaaaattaattattaaataatattgtcatttaatagatttattaattagactaatcaaagtctttaattacaaatgaaccctagaatctctttcttcacaatttagccattgcttagtgaaaaatcacaaactatgcattatctaattttagaattataattgagtaatcaaaatcaattaactgacagtcatataaaacgctctatatgttccacgatatagatacgctatcaattatccattgttataatcccaataatcaatgatcctctatagatgatctacattgtatagggattaaattaccgttacacccttcaatg

SEQ ID NO: 350080 - DNA, 563 bp, Cannabis indica
tttagtatatttttaattgagttttaatcatatttggagcatttttacgcttgttatcttttatttttttaaatttaaaataaaagaagattaaaaaaatatcataggaaaaagatgatatttaaaatagagaaaattgtgctagaaaataaagctaaaatttcaagcctgaattcgactatgttttgattagattttggaaaaagtcaaaacctaaaagttctagatctcttttttatctttcctaaacatcttgagtagtccaattccaagaaatatcgagaaagttatggccaaaatactatcagacgacgcaatagaaaactcacctcctcttctaatcctaagcagaataggttttctaattctaaggagaataggttttttttttccttcagtgatttttatcttattttatcatatttggtttataaaagaagtggagttcaatagttttggggaggcaatttagaggaaaaaaggagtacaaattttagagacagaagtcaatactagaggcattctgcggagggttttaaacattattttattctctatcttct

SEQ ID NO: 350081 - DNA, 829 bp, Cannabis indica
acttcatcggcaaccagggaatgtttggaatgatgtatactctttcttaatctaattaacctaatatatcaaattctagtgaaattattataaaacactaatacttaacaattctatgtaggcacatatgggagagcataaataatttgagaaaaattttcaagttttacgacccagagcttctcgcagtgaatggtatcgacgatgaagagaagagtcagtcttttgacaatgtggcaagatgattggctgcttggttatcattgatgaataacaaccaccaaatgttctttatttcctagaatatcgagtaaacactattttaattttttagtgctaattatttatttatatattataacttggaattatttttatactatcttacccataacacaatataattttctagtatgcactggatgctagaggtcgttgcgccaagaaaagttatccatttagattctatacgtggccaccaagttctcgaacaaattactgcaatattgaaaaggtaataatttaatgactatttatgtagcaaattattttattaactaatgaattgaaatgctaatataatttttgaaacagagcctacgaatatataaggacgtcaaatgcgtatcttgggccgtggccaggaatttcactagcaacttgtccaagacaacctaaaaatcaagaatgtagtttttatgttttgaaatacatgactgacatcgtcgcacgtgcaaacccaaccgttatatacaagatcaaaaatgagtaagttttaattattgattatagtatttattataataacaaatacaaatatatatatata

SEQ ID NO: 350082 - DNA, 894 bp, Cannabis indica
aagtttcaaactcgatttctaactcaaaatcacctcaaattcaacaagtaaacatataaactagtcccatagttaccaaagaacaattctacaaagtcagaatctccataacctttttaaatcataaagcccctatctaaaaccaatcatttttagcttaaaacgtaattaaaccatacctcaagctttccctcttcaaggatttgctatcatgctactaccagagcttaaatcgctaagttttgggttgaaaatcaaagaaaatgaatataaaaagagaactagaatttcgttcatttctgtttgctgtaacttatataatatatatatttttacgataagtttatatatataaaataatattattataataataataataatataatattaataaaaactttattattaatagttatcttattatttcttaggcgctaagaaatttatacttttaggatatttggtcaactccaagtactcaaaatacttcgatatttttaaaatcaacttattttaataatcctatcaatatttttaactaaaaccgttgtaatatttttgatctccaatcgagtcttcacagtcgccaaacctgaaaatatttttgtttcacatatagctcatattacattcacacatattatataaatctccgtaatttataaattacgcttatttactcacttataataaaatttaacttttatgctaaaataaattaatagtatcataatcccacctattacctgattaacctaaaatataaatataaatcctaatcattcactgttagacttaccgagatataatacatattatatttttaagaaacaacacatcattacacattattatgtacaaagtttgtgtaattttgttttcttttacaat

SEQ ID NO: 350083 - DNA, 591 bp, Cannabis indica
accttcaagacttccagaaaagattccaaaagtatatcaccttagaagaggcccaaatagtggcttacgggggatactatccgaccggaatagtagggtttgtacccgaagcctagctcccggggagcctaccagcagctactccaccaatgagcgatatacaattttctgctaccccaggatataatcagaatcaggaattgacccctgcatcttctcattacggcaatcctgttgggataagtggacaagtcccgtctcactctgcgcctattgcaagcctgacgagcccttctcaaggctctcggagcaagaggtcctcgaaaggtagcaaccgaatggaggacaagcggcagaaaaggggtacactccccaatacacccagtatacggaactgacgaattccaaggagcctgtgtatttcgctaccaggcaaaattagggatggcaaatcgggtttcaacacggcacacgaacacgacacgaattttacgggttagggttgggaaaattagatgcgggtcgaaaacgggtcgacacgacttgacacgaaataaaaacgggtcaaacacgacacgacccgcttaacac

SEQ ID NO: 350084 - DNA, 590 bp, Cannabis indica
atcccctatccgggattactaataaaattaccgcagaaattaaactttaaacacaaatagaatgaaaataaacttgtaataattttaactttacaaaccaaaagttacatgtatcgagatcccaaaaatattttacaaaatatcattacaagcgtgattccactagccggcctaagcggcaaaacagagttacaaaattcatcactggtagaccccaacccgcttggtctagtgtggcctgaacatgtacatacatcgcccaactcctgcactcatggttgatcaaagacagatttaccctttcctacacagtagagcacctgtgagccaagccgagcaagacagtataaaatctcaataacatatttatcacattatataaacagtaatgctattctcatatgcctgcatgacacagacctgcatgttacgctcacatgtcgatttatgtctatgaaacatagacctacgtgttgcgctcacacgtctaactacaataaggccttagaacggtacatctcaattatagttacccagtctcaccctgattatgacttgaacgcataacccttaatcttaatatatatata

SEQ ID NO: 350085 - DNA, 725 bp, Cannabis indica
aacttactgttagtcgcaatgactgtacatagttccctatgagttttttctcagatgatggtgtcagccttattgtgcatttttgtgcctcctttctattattgtatgtccactcttgcatttgtgccatcaagcactccattaatgttgtcactggtgtttcccttgctgctaaatttgctgagtttagtgcttcagctatgttagatgtcatggtagagtacctatcatttaaacagtttctatcatcattccatttttataaaacaactcaaatgcaatgcaaaaacaacgcaaatacaacgttttaaatatcagagtatgtaaaaacatgttatactttttatttcttttacctgttgttttttgaatgataccttgaccatttttcatggccaatttgttccagatacggtcttatgcgcttatccaagttgtctagctccctcatatgaaactcaaactctatttctgtgtaagcttttgcggctgcaaagaatggacctctaaaatgctttgcatttttttgaattttgtttttcaggttggacaagaggtggaagatgcagtagccatgtgttatttcaaggaacacttccctagttgctttgatgatgctttcatgtctgtctgatattaggcattgatcttctcgaaccccgaatgcttcttttattttttttgaagaaccactcccatgatttatcgttctcagaatcaactat

SEQ ID NO: 350086 - DNA, 827 bp, Cannabis indica
tagcaactacagaggcaataaaggaagctatttggattaaagggcttatgaatgatctaaacctactggacagaaatcctatagtctattcagacagtcaaagctgcatacacctttgcaaaaatcctatgtttcatgacagaacgaaacatatagagatcaagtaccacttcatcagagacaaagtgatacaagaagagatcaaaatcaagaaagtaccaacagaggaaaacccagctggcattggcactaaaatcctaaacctgagcaaattcaagcattgcatgaatttgctaggtatgggcaatggtgattaaccattgccacatgagttaggaccctcagaaaagacacaaaatacatttacttatagttagaaaagtcctagttggattgaggtggaatttgttggaattaaatccaactaacactttcctaattataagtctgttacaaaagaagacaacttgcacaattacaacaaccacaatacagttacaaatcaagatcctaactataattaacaaatcaacagaaaactacctgacaactcatcaatccgagaccactttccctactcttttcccagcagtataaatgactgctcttggttcattttttgcccagagctgaagagtagagaaagagagtgaaccttgtaattgctctgagttcaaagataagaactcagagttgagaaaaagagataaaagtgagaatctgtgagaagagagagattgttcttgagaagaaaagaagtagaaacaggagataaacaaaatcaatagagaatcgagtcttaccagttgatctgtagctggaagctc

SEQ ID NO: 350087 - DNA, 680 bp, Cannabis indica
aactcttatgtgtttattttattgttttagaattcatattaggatgttaattaaacatacttggtagtaaatctagatcctggtaaaatatttccaacagtattctgctcgtctgtcccccttcttctgtttagatcgtcccttaggtcatggttcatttcgagcctatcgaacagagaagagcctggctgcctcagcgattggttcacttggttaacaggcggaatggttcctttattctgagtggatccgtcgggtatggctcctcctgatgaattcccggacaaggtcagcccgcctacctcttagcccatgagtggaactcgtgaccggggattggacgcctgaccactagttgtctgggaggcattcatcatcgggtcatcctccgtttctcccaggggaatgacgctcagcgtttgctggcctacagtttggtaggctcttcgtatcagcacagtagactacgatcttcgatctctacatggtgagcccttaatgcctccatctctttgtctctccattcagcgaacatacgctctgttcttcaaatgcgagatttactgcgacacgcagttcctcctgatcatgatgcagagtattgctatgacccctacatgagtcccgagcgcaacacggagattttgcaattcggttgcgtctccgatggtcgtttgggc

SEQ ID NO: 350088 - DNA, 567 bp, Cannabis indica
atcaataaaatatgaaattatttgaacaaaatagaaattaaataaaaaaaatattatgtttacttaaacaaatttagatttttagagaaaaaaatagactcaaactcgttcccgtaaaatttaatttttacaaaaattaaatttttaaaatatattgttatatctaaatggatttttttaataaaaataaataattttttaaatcacttaatttaaaattttaatttcaaaattattattttaagatctaaattaattttttaagaaaaaaaaaggttgtatttttctcacttttattttgaggggtacgatttgatagtcatcaaaatttagcaagcaaaattgctaatttataaagacatatcagtatttaaaaagaataataagacagaacctaatgggaagaccaaatttctatgtaaaagtttacggagaatttttagcaaattgtgtattttaggggatagaatcagtattgtcaaaatttcattcgcaaaattgttaattattcaattaaaatttatgagatttgatattgaatgtgttgctccagaattcgcccaaaat

SEQ ID NO: 350089 - DNA, 573 bp, Cannabis indica
aaaaaaaaaaaataaaggctaacaaaatcctttaagtggtcggccatgtattgggccctactaattttaattttgccatttatttaacatcatatctttttcttttacaaattaataccatattttaatttcaatcctttaattgtaaaatctatttatttaataattataattaattatcaaataaaattatcatttatttaatttattaattagaccttacaaattctcttaattaacaaataaaccctaaaacctcttttcttctcacttaagcccttgcttagagaaaattcataaataagacatagtctaaattaaaattataattagttaattaaaaccaattaactgagtctacaagccaatatttatctcaactagtgcggggaccatgggcctatataattaagcttccaataggtagttctagaatttactcagtaaattccataacttataaattcttttggactccactatagatttgaaatggcactcgtaattatatagaacgctctatatgttccaaatatagatacgctatcaattatccattgttataaaccaaat

SEQ ID NO: 350090 - DNA, 636 bp, Cannabis indica
aaagattatgagcagcgctatccaacacaagatttaaagcttgctgctgtggtatttgctctaaaaatacggcgacactatctttatggtgaaaaatgcgagatttacactgatcataaaagtcttaagtactttttcacccaaaaagatttaaatatgaggcagagacggtgtctggaattggttaaagaatatgactgtgagattctgtatcaccccagaaaagctaatgttgtggatgatgcactaagtagaagaggtcctgagcaggttttcaccactattataatatcttctcaattggcttcagagatagttaatgcagggattgagtttgtagttggaaaattgcagaacttaacactccaatctgacttattaaagagaatcagaaaggcgcagttagaagatcctgagctagtcaagattcaagatgaggtaatggctggccgacctaaagacttttcaatctcaaataatgaaatgttactgtataaagctcgggtttgtgttcctagtgttgatgagttaaagaaagaaatccttgatgaagcgcacaccgcaccttattcactgcattcaggaaccaacaaaatgtctcaggatctaaaaccctacttctggtggtatgtgatg

SEQ ID NO: 350091 - DNA, 1631 bp, Cannabis indica
aaaaaaaatgaggaaaaataatggtgtatggagaaaatggggcttcaagagagatggtggcagcattttttgttgagaggaaagatggagaagaaaaagaaaatgagagttttaaatttgaaattaagattttatagacatatatatcttcggttatttcaaaataaccgaaacataggcctccacgtgtatttgatatgaggctaaggttgttgaaacctatgaagacataggcacacctatgtataactaatgataaaggtctccatgacctatgtcttcgtttatttcgaaatgacagaagttataggttcgcaaattttttctttctttctcttcctacttttctcttcggtttttatatttaatattgttaaaaatcgaaaatatacaccatatttatcgtagtgtagggtcaagctacatgctaggcacctaccttgtccgtttaggacaaggatagtgtcatgtcttgaccacttttttccttaacaaatattgtcttgataatttttgtctttttcctatttaattatttgagaaattatttattttttacaaagaataaataattactattttttcaattcaaaataaatttttccaaacaacattatactactctttatcccttaccttgacagtgtttcaaggtgggaattcgaggaccatgaatctataattttaagctccaataaactagattatttattgattctcatcaaccaaacattccttgtttattaattcaatgattacttcactacaaatatagaattgaactcttagtaattatagaattatatttactgatttttactacagggtccattgatataatcaattctagtgattagccctccatgtgttagttcgtaattagttttggtcaaattattgttttaccattctaattacttttggtcaaattattattttacccttctaattacttctttatcctttagtactatcaattcactagtgaaagtataatttagatctcatctaaatttgtgcacaacttttcagttttagaattaacacttaaagggaaatagtattcgattcgttaggaaagtcaggattcataattgtagatcatgttcccagccatccacattattagattcccaaaatagaagttgtaagaatcatattctctgagaaactttaacgaatgaatcaaagaaactaataacatgaacatgagttcacgattactcaggatttaagccaatctactatattgatcgtcgttatgatatgaattaagtccttatagtaaacgacatgttagataaaaataacttcattcatatcggtcattatcatatataatctctattatatacaacaccttcactttgatgtcatactacatctgtaaccaaatcgaaattacttgcaccgaagaatgggcatcaagtgaactgtactagcaaccattaataaaagattctcaaaatttaatatgttgttgagtgttttatttatagctaagtggtcttagttctctgtacaactacaagccacaacctcatatagcaataaaaaaatttctgatatttaatataatttatccaataataaatattaaataatttaatattcaagcatatatcaaaata

SEQ ID NO: 350092 - DNA, 779 bp, Cannabis indica
tattgatattgattcttttgtgcttcatccccattctgatttattaaattgttctcatttttcttccaaagttactagtatcttttatataagttcagtcatgcttttcttatgtaagttaggttattaattattttggtgtattttttatattgtatgtcgtttactgaattctgtcaatagtggtgttttgtcgatttatgatatataatatgataagctcttaaatttgaagtgatgttcaatttatgcaagatttcaattaatttgtgcttttaatatataaatcttccgattgtaattaatggtgttgcaactgcgttctgaattaatatcggtattagaataggatttgcataattacatttctaccttaccaagctctttatctgatcactctctttctctcatcattttatttataatttattccaatttctaccattttctatttatactaatctttaatggtaatttgcctccctgtggatacgacaaagtccgtttattaccgcgaccgcagtataactaattgggcgacatcagctgtgtattttgattttgtgtttaaatggctgtcgtatatattttcttagcaaaacttattataatagggatcccccgaacacactttttatgttgttattatgttcattttttaatatttttgttttggttcaagtttttaaatattatcacggtttttaataattaatattcaatagtatttctagtttataaaatcacacacgtgacgtctctatagattagggcgttac

SEQ ID NO: 350093 - DNA, 1737 bp, Cannabis indica
aacgtaccatgtcaagaagtgtgcgattccttctttcagcaattccattttgctggggtgtccctggcattgtatatcttgcatcaataccacattcttgcaagtatttggcaaaaggcccgaggttccttccaatttcatcataacgccgataatactctccacctctatcagaattgacagctttaatcttctttcccttttgaagctcaacgtcttgaaaatcttgaaagcatctaaagattcagatttttcacgaatgagctcaacatgaccatattggaaaaaacattaatgaaggtgatctgtttgacttactctttctaaccttggcagtcaaaaggcccgcaaatatcagtatgaataagctctaacacatctgcagatctgtctgacttactctttctaaccttggcagtcaactttccttttatacaatcaacacaggcagtaaaatcagaaaaatcaagatcctgaagcacaccatctttcaccaatctctccattctatctctagaaatatggcctaaacgtttgtgccaaagcatggaagatttcaaatctgatcttgcacgtttagaaccaacaacagcattaagagaagaagaagaaggacaagagggagaagtaacaggaacaacatcaagcaaatcaagcttatataagtttccacacaaagttccatttccaatcaacatagagtcacgatacaaagtcagttttccagttccaaaatgaagactataacctagtctatccaaaatagatacagagatcaaattcctcctaatagagggtaaataagcaacatcatgcaactccaaaaaatgcccagtattcagctgcagattaacagtcccaaaaaattcaactctgactttagtatcgtctcccatgtacacatactcctccaacctactcggccttcttcgacttgtcactgcctgcaaagaattcgtaacatgaattgtagcaccagtatctaaccaccaagtgtttgagggcacatcaataatattggattccaaacaaaccatcacaagacaattacctttcttctctaagtgagctttgagctttcggcaatcagctttcttatgcccgaagcattgacaaaagttgcacttccctttgaaaaactcattcttatgaccagttgaagaagagcttgcttgtccatttcccttaggattggtggctttcttcttatgaaacctttggtcactagagttgttgggagtgaactttctcttgtgagaattgtttggattggtcaccatggagatacttcttgctctcccttttcatgtcctcttcttctttggcaagaatagcagtcatctcctcaatggtccactgctccttttgagcattgtagcttgatctgatcgaatcaaattgagaaggaatggtttccatcacaaaccacaccatgtaatcctcaccaagatccaatcccatgcccttgagcttttggtaacaacccatgagcttgtcaatgtgagctctaatgtcacccgtatcagcataattagtgcgatggaacaaagttaagcactcatttttctcattctttgagaacttcttgtacttttccttaatggcagcaagaaaatcctttgcattttcaatctgaggaatactatcacgaatggactcatccatgtgatacctcataagcatcaaacaacagcgattggaatgctcccaatcctcataggacttcttgtccttttc

SEQ ID NO: 350094 - DNA, 788 bp, Cannabis indica
gatacctcataagcatcaaacaacaacgattggaatgctcccaatcctcataggacttcttgtccttttcagtggcatcatcagcgggtttaggcggtgcatccactctcaaggccaagtccactctcatgagagtcaaatttagcatgagggattcaacccactgcttgtggttggttccatttagcgtcaacatggcagagtttcttggaacgcttaaagctgaatgagaaacaagagcaataactattaaatgcatgttataacaaaaatcatgtcatttgtactcttttctcataaatgaatgatcgcaaaataacaaatgatcatcatgtatgctagagttctttagacaaaacaataaaatagaactcatacacatgtaagaacaatctattaaatattataatcaaatacattaattttctatcgaaaggatagataaattgtgattcataatatttaataaattttcttcacaatattaagcatccttagcaagcaattattatcgataggataattaaatacttataaggatcttaatgaaattttggaggaaattacaaaatttaaataagttaatatttaaatgttcctcatgaccaaacaattccatgcttaatcttacgataggtaagaaaataagcactaattgttagaaaaataaataaagtttatgccacaatacaaaaattaatgaccaaatatgaataaaattcatgaattagtattgtgcatgcaagtaaatgatagagaaattaaaaatggaacaaaatggtgaaaaa

SEQ ID NO: 350095 - DNA, 723 bp, Cannabis indica
agttttatcttagttgctttacagaacaagttttttgtcataaattttaagtagttgataaatataaccggtttctttatattatatttgtgttattttgtgttattatttgtgtttatttattttgttatagaaccggttcttttcatgtttatgcctcaatatttttcagaattgatctctatttttttaaaaaaaaaaatataatcgattttttgaggtattatttattatgaggtattttgttgtgaaactaatttatttttaatttatgttttagtattttaggaactaatttcctctttatttttttaattgtaatcagtttgagttattgtgtgttacttatttgtattcattatgttatataaccaattctattttagttataactggtttgagttattttgtcttatttatttgtattcattatgttacagaaccagttatatttcaattataaccggtttgagttatttgtttatattcattatgttgcagaactagttctatttttagttatatctgagacatctacttttggtaacttttcttgtgactttttctggcaacagtgacttttccggcgactgtgacttttttcggaaacaatgacttttctagtgactttctcgacgacttttttggtgacttttccaacaccggcgactttcttggtgaaacttattattgttttacaaatatggaatttctatctttttt

SEQ ID NO: 350096 - DNA, 919 bp, Cannabis indica
gctgaaataaattagtaggatcataatcccacttattacctgattaacaaataatataaatataaaccctaattatttactattagacttatcgggatattacaaccatcccctccttatagaaattttgttctcgaaatttatttaaactaatcgagaaattaccctcgtattttttattctaactctcaaattgttgtttctattctgctatatttttttttgtacaacactttcttaactagtggaattgtctcatttcatagtacctcctctttctagtctaaaaacctggacaagatgttttccccatataataaatttgtctgaacattaacatcatcacagctcagaatataggtcgagtttgatacatattttctcagcatggagacatgaaacacattatatactccagaaaacgcaagagttaaggctatttaattcagtgaacatgtatataatctttctctcataccgcacctattaagatacctaaccagtggtacatttaattatgacttttaaataaacacctcatcagggaagatattattctaagataatctaacctttatcaaatatgctcatagtatgtttctaatattccattgatcttcttaggttacccacctttcaagaataaaatattatactattttcgctttaacctccatggttctcaataactttctttaattcttaacatcatagccaaagatatcaatcttggaatctcacaagattagatgattcattcgtatgaattccatatccttatttattgaatagattatctatactgatagacaacatattaacttggtatctccaacaattactattcagtcgaaatcaaaagatcccacaatacctaattcataattatgtctttccattccttctatgggacctccta

SEQ ID NO: 350097 - DNA, 784 bp, Cannabis indica
aaagaaaaagaaaagaaaataatgtaatgaaagattgatagaagacatcaatcaataacgtgtcagccgcatgtattgtgtgtgcatgtggtaaaaatataataaagtaaagatgaaaagtataaatgttgctttaacagtgtagtggtattttagtaataaaatgtgcattttgtactttttgtgtaaaaacttctaatatcaggttacaggtcattttttatttatttttatttaatttttaaattaatcacaaccatttaatagttatccaatggctaaaaaaatgtaagatggttacaataaaatctaaccattgaaacttccttcatatatatatatatatatatatatatgtaaaaaccctttattttctatttatacatatgggttttgagattttaatatgggcttcagccctccctcagctccatgttggtctgacagtgactgtgggcgtttgaatttatgaagaccccaacaaaagagggagcaagaaagcagagattgaaggagtgaaaacttgagtagtcttaggggtgttcatccaatccaatccgcattattttgcttttagtacatccgatccgcactaagtgcagattttatttttggatccaatccaatccgcactataactcaaatccaatccaatccgtaaaagtgcgaattggatcggttatgttggattgattatattttaatattatattatttaatatttatgaaaaaaaaaatatttttttccacataactagcaacaaaataaaacaaattatagtta

SEQ ID NO: 350098 - DNA, 471 bp, Cannabis indica
gcatgagtaatttagtcccttatcatgaaaaggctaaatatttgcttggccaatttcaagatataactctaaatcacatccccatatcaaaaaatggtaaagctgatgcaattagctaattcagctgcatcactaacacttacctgaagaaagggatatccctaaattaccataggggaacgccatgtattatcccaatctacggaaagagttgaagaagaaaatacagtcaacttgataactttcctggatagtgcaaatgaaaatgactggcgtcagccaatcaaagactacatccaaaaaggagtcttgccagaagacttgaagaaaagagtggatgtaagaagaagagcgcctcgatttgtggtctttaatgacacattgtacaagcgttcattcgatgggatattattgagatgcctctcgatagaagaagcagcacatgcacttcaagagactcatgccggtaca

SEQ ID NO: 350099 - DNA, 685 bp, Cannabis indica
gttctgtgtccctagtctggttccatatttgggtctgagttcaggttcaggttcgggtcgcgagtagaggttttggtttggatccgggtccgactcccacttttggtataggtctgatttggagtcccggtcttggtccgattacggtttttgatctatgtccaattttcagttatgattccaagtccaagtcctagttccattcccggtcaacttcccgttttgggtcaagggtacgggttcaggtcaacttttgggtttgggacagggttcaggtccgggtgcgggttcgggtccttgtcattattcgggtccagggccgggtcccaaatccagacacagactacgggttttgtccaagccctgggtctagatctggatcccaatctcgggtcgaagtctggttctacttctggtgctgggtcttgagctgggtcctaggttcaagttcgggtatgggtctggtactaggtcccagtcctagttctatttccctagtccctatcttgattctgggtccaagttcctgttattgtgtgggtttgggtcccgatcttggttcgggttcaagtcctagtctcgattcgggtttaggtctctgtctggattttgatctgggttcgggtttgggtttaggtcctggtcttggtcctagtcctagttctgttctgttccatttgcgatt

SEQ ID NO: 350100 - DNA, 892 bp, Cannabis indica
tccaaaaggtggattaggtctatgccgatcaaaattgagggtagggagttaagtgctgacctaatagaaatgagcttagtagattttgatattattctagcatttcgatcacagtctgggtcttgtcccaagtccaggttcgtatccggatccctatctaggtacaagtctatgtttgggatcgggtcccagatttagctccaagtccgggtctcaattccggtctgggtacacaaccctgtccgggcccgattttcagtctcagtttgggtctgggttcgggtttggttcttcgtctgcttctggtcctagtttgagtcccagatctagacaccgactactcgtctcttctaggccccgctacccgaatcccgagtcaagatcttgatcactttcacggctctcggtcttgttctggttcaggtgctaggtcccatttctgagtttgggttcgggatcgagactagggtgcggttctaggtctcgacccttgttctgtgtccctagtctggttccaagtttgggtttgagttaaggttcgggttcgggtctcgagtccaggtttgggttgggattcgggtccttctcccgattcgggtctaggtctgatttggagtccaggtcctggtccggttacagttctggatctatgtccaatttcagttatgattccaagtccaagtccttcttccagtcccggtcaacttccagttttggttccaattttgggtcacaaggtactagttcgggtccactttttggtttgggactaggtttaggtcagggtgtgggttcgggttaagggctgggtccaaaatctagacaccgactacgggttttgtcaaagcccttggtccagatccggatcccaatctcgggtcccagtctgatg

SEQ ID NO: 350101 - DNA, 1193 bp, Cannabis indica
atgaaaaaaaggaaaattctggttttgatatccctctcactcgacccctctctctctcacaaaccctctccttatgctagctttgattttgatggaaattgcatgatttggagcttggagtttgtggattattgagcttgaaagtgaaggaagttttagctatattggaggtagctttttcagattttaattttgaccttcttgctgaattttcttgttaatggaacatgaaattggttgttgagaatgttatgttgcatgtggtgatgttctcttgttagtttgagtatattttgttaaattcttgttttgatggttgtttgagctctagatgggattctagggtgttctctaagttgaaatcaatgttttatttgttatatatgctgctggaaaaaaaaatatttgagattgaaggtttaaagctcaagtctttgaacttgaagaattgtgagtttaagcatgattttgtgttgaattgtgggatttgtttttggtaaattcagaggtatttttagggtttcattgagtttaaagtttgattgtaaaatctgattttggttgtgtaaagcaagcttgagttcatgagctcaagcttggagctttaatgacactttttgatttctagtgaaattattgtgtttgagctgtgaaatatgtttaatatgtcatatgttgatgctctggaaagtttggtggtgtttggggaagatttgagtaggttatggggcttaaagattgaaatttttcgtgctgttgctgcccacacaagcggaattctggttggttcaaggctgttccaaccggaattccggttggctgtatcggggaaaatgctgaattttgttttggcgataacgtttgactctggactccgttttgggagttctttatatcgttggaaagctcgttccgagatctatgtgattatctgtattttaaatgctatgattatattttatgaatgtggaattggggtttaaccttttttgagtaaatctcggtattgtgactaggattatcggcacctagtcaagagcacacggggatttggaatctcttcttttgcgggacaacactaagacagtagttgcacgtagagatatgaacagtggtcctgatattgaatattatattggtgataaattagaagccaagattagggttatcaccctgaagtgagcggtttaatg

SEQ ID NO: 350102 - DNA, 768 bp, Cannabis indica
tttatttagggcacaaaaccaaacactgtcatgtaataagtgatcaaaaatctcaattatttatcacttggcgcgtagcatatattatattgttatcaatatttttacccctatcacacaaaatagctaaattaaattataagtaaaagagtagggagtattgcctaaaactagaacctcaaaaaactggaagtaagccactatcttattatatttgaagttaatctagcatttaaccaagtataagagtagggagtgtcacccaaaactggaaccccagggagccagaagtaagccaataccttattatacttggaatcaattctaacatattaacagttaatccaagtgttaaccccaaaaattgatagacttcattttcgagattagtcaacaattagtcccgacagtcgagagacatcaactgtaagtgttagtcaaggaatgacagaatcaacacgtatggcctagggctcattaatcttaataatccatggttgcaagtctggagatatatctgtgcaactcagaggtcaatcctgtaacaactcgcgagtagagttggtaagattaacttacgaagttacaattgttggaggattgtcataatgatacatttaaaaatagatcttttcataaacataagatctatctatctctttctcatctttctaacgcatcttgaattttctaattctgatatatatcgagagatatatggctaaaatagtaagactgctaaattgtgacaactgggtgtgcgagccc

SEQ ID NO: 350103 - DNA, 352 bp, Cannabis indica
aatacgatgtaaacactaaaattagaaaataaataaacacaaaattgctcatgctcattaaactaaattacactccttcaacttaaattttgaatgccgccggtaaccaaaataaaaaaagagagagatgaatggatagaagaaaaaaaaaaaaatttaacaaatacataaaaataacaaaaatacggttttatggaattttaaattttttacgattttatttacaaaaaatacgggcattttatgttgtactcatattaatttgttgttgattttttgttatctgtttgttattttttgttgttatttaaatattatttttatgtatttttttattattttcgtgttattt

SEQ ID NO: 350104 - DNA, 820 bp, Cannabis indica
gtaaaagaaatactcttattaataacagagactcatggactaagactcattaatgcccgaaccacgtaaaaatcatctaccctaattatcccaaagctcttatcattatctcatttaattggttgtcgaaaacctcagtcaacaataatgattaataatattactaaaaatgattaatgatatatatgcttttaataatatgtacactctattataaccacactcttctaactacaaattataagaagatatatatatcactattattattttttaaaaatatatatttgaacataatatataaaatgtattttaaaagtaattaattctctaatcaagtttaaattttatcaaaataatttctaatataatccttatatatagagatcaatataaaatatgtataacaatatataaaatttattcttttattgtgcatctaaaatacgtatatatatataatcacttctaaagagcatactaatgtagccgctatatctaaaaaaaattctcaaaaattgaaatctcaaaccctattttaaaaattaaaaaataaaaatacattacctaaataaaaaaaaaattgaacatatatatattacacttaacattatttaattaaaactaattaaaaaaaaactaataatgcatgtaacattaacctagtaaaatatatatttatattatatcgatttgattaaaaattaaaagtgatttactcagggttagttcaaggtggtacaaccgggacctagacccccaaaaaccataattttgggggtctaaaattaaaaaataacacatattatacatataataa

SEQ ID NO: 350105 - DNA, 1040 bp, Cannabis indica
taaaatcacttgattcaaacttccacacacttcaaaacagacctaaaaaacaccatctcaacccaactaaacctactgccacgaaatcccgaaaccgtcatccaaaaccaacttaaaatagtgaaatttttaatcctcaaggataagaacttacctccaaagcttctaggatgaacttgggtatccaatctgctcaaaagatgaaggaaattaagatgaatccccgggttttgggtagctctaggtcacgtgagagagagagaggaagaagaagtttggttttcttggaagttttcttcttaaatagggttttattcatttcatctcatttcattttcatttcattttcttttttttaataataataatgggcagcgtaaaaaaaatcaaaggcacaatttgaaaaagactaatctaccccttccataattttttttaaaaaaaaccctaggggcattttggtaatttcactaattccattaaaccgacattctaaaatttctaacctagtccggaatattcccaaaataattcttccataaatgtcgtgacatttttaaccaaaatcgtctggcccaaaaaaattattttatttcattaaataaattcttaatagttaccctaagtaagatcataatctcacttcattaccatcataattacatatttaataaatatgcctatttaaatattatttattttctgggatattacaactatcgccccttataggaattttgtcctcgaaatttacatgaaaagctcggggtacaactcccgcatctgcgactctaactcccaagtcgcttcttcaaccttgctgttccgccacagcactttcactagcggaataatcttgttctgcaacaccttttctttcctgtcgaaaatctgtactagttgttcttcatatgacaagtcggtttgacgctcaatgtcttcataacttaagacatgagttgtatctgatacatatttccgaagcattgagacatgaaacacgttatgaacccccagataaagcaggaggtagagccaac

SEQ ID NO: 350106 - DNA, 524 bp, Cannabis indica
gaaggtatatactcttacaatagaactgcttgtatacaatgaaaactttatacatattataataatatttaattatatatttattttaaaaaataaataatattaataattaaaaaatttattaatttttaatttgaattattattttttttaagttaactctaatgtaaatcttgacagtttctgcactaatattattgttgttctaattttttttctcactcgatatattaaactagcgtgatctccttttttttcctttttttttggttgggaaatttttttcttttatttattaataaattttaagggtttttttatcaagttattttttttatcaattttggttattatattacgttgtattattattattattattattattattattattattattattattattattattattattattattattattattattattatgacaagtgatttggatcaacttaaaatttacaataaaacatacaacagttggagtgagaacctctattttctttcta

SEQ ID NO: 350107 - DNA, 530 bp, Cannabis indica
atttgattatattgaaatgggttgtatttagggcacaaaacccaacaggctcgagtttgacgggtagcatagcttcataaccgtacgccattgagagtggtgtctgactggttgctgttttttctgttgtacggtatgaccatagaatttcggggagttcttccggtcaatttcctttggcatcttcaagtttcttctttagttatccttcatggtctcgttgactgcttcaacttgagcgtttgcttggggatgtgccactgcggataagcttttgatgatgccatggttcgcacagaaatcagtgaaagattgactgtcgaactgcttgccgttgtccgaaactattttgtacagtattccgaaccggcatatgatgttcatcactataaagtcttgaaccttctttgatgtgatagttgcgagtggttctgcttcagtcaacttggtaaagtagtcggctgctaccactgcgtactgcactccgcctttacctttaggtaactgtccgattaggtcaattccccaga

SEQ ID NO: 350108 - DNA, 788 bp, Cannabis indica
ccatctgaacaattaaaacctaaaatatctttgctgacgtggactaacactaacagtacgaaccccagacaaaacactacgagtcccagacgcaactggaatgctactggacataatttgtcactacagaaaataatagttctaacaatctcccccttgacaaattatggtcaatgacaacaataccagtgcgaaacaaagcaaccatcaaaatataacagagtctaaacaaacagaaaagcaaacactttaaacaaccaaacaacaaatgcaccactaccactttacacacaaaggataagtatttctcccccttcattgagcataatccatgtcaaattgtccccctaagaaaataagaagtttatcaaagagctccccctgaatggcgacagaaaatgcaacatagactcctcattgcaaagaaattccaaagtatctattacaacattaaagaagaaagacaaaccatctcacaacatgacctaaaacatatggatattagatataaaaaaaatgagagattgactaagcaaaacaatcagatcaccacaatattacgaatgatgctacaaatgagatttatttttatttcaatcaaaaacatgccaaatgatatatctcaagaattaacatgttcaacttgtaaagaggaaacacaatgagtggcctaatcaattaacaagtgagcaatgatcatttgagcaaagaacaaattcattcaacttcacaatgagccatacttaataaaaagatgagacaacttctaccaatccacatattcacac

SEQ ID NO: 350109 - DNA, 904 bp, Cannabis indica
aggctttattaaagggagattcataggacataacattatgatttgtcaggatttgttgagacattagggaggaagaataataaaccttcatgtattatcaagttagatctgcagaaggcatatgacactatagaatgggattttattgaagaaatgttgcagggactcttatttccacctaagttcattaaactagttatgaactgtgtgagaacacctcgattttcattgatgtttaatggcacgttacatggatattttgagtcaaaaagaggtcttcgacagggggatccaatgtctcctcttctattcgtgttgggaatggaatacctcacccgaataatggggagaataggtgacaaagaagacttctattatcatgaccaatgtgcagccacttctctaaaccacctagctttcactgatgatgtattactgatttgcaatggggatctcaagagtgtttattatttgctacaaggtgtcaagttattttctgaaacatctggattgaatccaaatgctacaaaatcggctatgtacacttgtaatatgcctgaagatcaagttaggagaattaaggaattatctggtttctagcaccaatccttaccctttacttatttgggagtccccattggtgcaaagagaatatttgggaaggattgcgagatcctagctgagaaaatgacagcaagaatcaaagtgtggagttctagaaatctctcctttgtggggagagtggttctcatcaattctgtcttaatggccattcactcttattggtgtcaggtaatgattttacctaagaaagtggtgtccaatattgaagctatatgcaggaactttctatggaatgccaaagctgagtaccatgggccagatgcaattgcttgggatttta

SEQ ID NO: 350110 - DNA, 1048 bp, Cannabis indica
taaataaatataaaaatttgtatttttataatatgcggtgcggtgcagtttgaactgcatattaacaattcaaaaccgcaaaccgcaccgcaccgcgcggtttagggaaaatttaaaccgcgaccgcatcgcaaagaattttaaactacagttttttttgcggtgtggtgcggtgcggtgcgggaagtttgagcggtttgggcggtttgataaacacccctagttggtagtgaatcatgtgtcaggagagtacgaggcccgaggggagaaaattatagcctatttaagcaaaatacaggatatgcttgcataattcaagagttacgctctgaggaaaattccaagagaagaaaacacaattgttgataccttagcccgacttgcgagtagcaatataacagataaggctaatttagtcccaattcaattccttgaagaacccagcatcacctgttcgaacaaaattgagatgattgatacagctccaaactggatgacaccaatagcagcctacctcaatactagagatttttcaaatgacagaaacgaagctcggaagatgagaaggaaagctgtacggtatatcatccttgatggagtcatgtatagaaggggattctccattccacttcttagatgtgttacacaagaagaaggtgcacaacttttgtctgatgtacatgatggattctgtggcaaccacgcagccaggcaaagcctatcaaagaaaatactaaggcaaggataattcttggctaccatgatggaagattcataggcctatgttaagaaatgtgataaatgccaaagattttccaagattccccgtgcaccgtccgatgagctaactcagatgcaaagtccttgtcctattgctatttggggaattgatctaattggacaattagctaaaggtaaagggggagtacaatatgcggtggtcgcagtggattattttacaaagttgatacaagccgagccattggcaacaattacatctaagaaagtattagactttgtaatgaaaaacataatatgtcagttcgga

SEQ ID NO: 350111 - DNA, 505 bp, Cannabis indica
tttgttttattgctttggaaataatctttggggtctaatcagcaggtctggaaagtttggtgtgatttgaggttgaattggttgagatatggaatttttatggtttcctgcactgaaccggaattccggttcagagaggcctttaggaaccggaattccggttggcttccaagatttcctcccagaaccggaattccggttgaggaaccggtctatcagttcggggaaaatttgggaaccctagtttttctcatttttgtgttatttagggtattgccatgtcgtttatcgatagggaaacttctagttttgaatttaagttccagggaagtgagttagcgtgtcacttaacagtgttgtgattattatgatttaggagcctgtaattcgccgagcagattgttccactcaggttgaccggcacacctgaatttggaatcgaggtaagattagtataatgtcatgcatatgcttgttgggttttatgccctaaataaaactcttt

SEQ ID NO: 350112 - DNA, 503 bp, Cannabis indica
aaacttcttccttattcttaagtcaatacaaataacgaggattaggctattatcaaactgctcgtgcctgaacctctataaaatttttgtgtcttgttattgctttattatatattctcattacgacatatcgtttattgcttatcaaaaaagactcattgtagttggctaaaagacgaagtacaacaatgtgtaatatcaaaaactacagtgtatgtatatgttatgtgtacatgcatgcttaaaatgttagttgcactaccaacacgtatacggttaaggtatagagtgtattggtatagtgattgttatctaaagtaccgtgacaccagcataagtacggagaggtactgagtgtgtgtggtacatcactcagaggtacccagggtatgaaacaaaccctaccaacacttgtacaaagaggtacgcagtgtatgtggtatagtggctataccctggtatggaacgttcttacttatctgttaagccttgtaaataggtgt

SEQ ID NO: 350113 - DNA, 977 bp, Cannabis indica
aatatcaccatttatttaagtttaatactctataaacatgcaattgttacaattgtaatgcaactaaaaatttaaaataatcaaagaacaatattgctaagtaataaaataaaataaaatatcatgaaaataaatacacaaaacaaccaagtgttacaaattcaacacaaataaatctaataaaaatataattaatatatattatattttttaatattttatgatataaattattttttaacatatataaatgtaattggattaaataagtttttaattaaattttgagattgatattcaatatccgatttaatccaactagaatccttaatctaattgttattgaatatctaattttttgtaattagattggattaaatggattcgattcaattgaattagattgaatgttgcccatccattactaataaatccactcatgacttagaaaaatatattttaaagttagatgaagtgtctatttcgttgaaggatgttacctccctcatattatttgttgttatatgtggaaattgatcctctaaaccaacttattatccaactcatttaaaccaactaacttaactaacttttggttatgttagttagttagttggtgctattcttgtttgagttggggcctatatataagtctagtcttttcgttttaaaagatagaatagaaggtagaagagagagaataagagagaggattagagagagttgcttagggttctaagctgagagttctgttcttgaagagggtcaagaacaaggggtgtactcgggttgatcgagagaaaactgtgactgttttctctagtgtgtgtcgagtgtcatctgagctgtgattgctctggttattgtaatgtattgctgctctcttattcacatattaatgaagaattggtgatgtttctcagctggagtatggccagggatcatgttgatctctaggaccggaaccaagataaaat

SEQ ID NO: 350114 - DNA, 912 bp, Cannabis indica
tatcaattgttataatcctaataatcaatgatcctctattgatgatttacattgggtagggacaaattactgttacacccttcaatgtattttatccttaaaacacttagcaaactataaatgacatttcagtgaactaatgtaatcactaaaataagcgctctatcatttatctctatttagccaagctcgaaggaaatcatcgttgcacttctacgtttggatagaagctatagattctatatctatgattagcgctcccactcaattgaactaccatgtccttaatctatatgtcaccaaaagatccattggtcgactttaacgaatagattcaagaacacaaataataaaatttaactagaacctaaccatctcacgattgagatcatttgatcaaagataacctaggtgatattgaattgaatagatgttgcggtaagtctatcatatctaatccaagttaaatatcggtcccttccgatacatactccatgcatccattccaagcttactttaaccaataccctggaaaggaaataccacttatccaaggtgcaattaaactacgtcgcagattatcaaatcaattaaaccgtgtaaattgataaatcataggaatacatttaatcacacaaccgtgattactttccactatgttgacaacacaataaataagaatatcaacgtgataaggatttggatgaatttataaatcaaataaataaatgaatgatcacatgaactaaataacacattaaacaagtaatgaaattaaatttgtttctttattgataattgaatagaaaataatacattgaaaaatgttgacatcgcttttagccaacgacaaaaagtccaattttgtaagcgacaagtagtttaatatgaataaaatataataaagcaaat

SEQ ID NO: 350115 - DNA, 545 bp, Cannabis indica
ttctctaagtccacagtgaagcaccctcctggattcatctgaatctgaaacatagttgcatttgctcttgacactccacaccgtttagcaacttctgtttcctttgcaataatcttgatgatattggtgtgtatagtatggttccatttaggcaaactcttcctttttttggtaaaacgacacattaaccaatgcctgcaaaaatagcatgactaagtgagaatgcaacaatttaaacaattaagtaataactgccagtacatagaaatcaatgaaaatgttacctgataaactctagcagagtaattattggtttgtcccttgcatcaatgattgcattgttgaagctttcacaaatattgctcacatatcacatttgacctcctctttgaagtgtgcttttgtccattctgatgggttctttgctgccagccaattgtatgcacttgtgttgactttctttatcacatccatcctcctatcaaactctgtaggaatagtggctcttgcagcattccacataagttgttttagcagtagaccag

SEQ ID NO: 350116 - DNA, 606 bp, Cannabis indica
aactactaacgctaaaaatatttgttcaaaaaaaaaagaaagaaaattataacaactaccttaactaaataataaaataactatcacttgtcattcaaaaactagtgataatggggtaagttttggacaaaaccaaatacgaaccacatcaaaattaatgtaaatgttgcactatttatcaaaagatcttgtatggcttcggtatagtagtgagagataatttgggtaagcttattgaagtcaagacatgtcactctcgtacttactctgctgagattgtggaaagtttttgggggatcaaaagaagctctaagttagattaaagagcaagtactaacataatagtagagcttgaaactgactgtgtgctgtctgtccaagtaatccaaagtaatcaaaggatgtcttctacttttggcttgattattcaggattgtcgttctttattgtcttctctacatgatgtaaagttgtattttattaggggatcagtaaattgagttgctcacactgttactagacacgctcgaattatctctgattgtagtatttttgagcaggatgtttaggttgatttgaaagcttttatgtattcagaatgctttt

SEQ ID NO: 350117 - DNA, 738 bp, Cannabis indica
aattgataactgttgaaaaataacaaataatcaatcatcaaaaaatagttgagtcaagaaatcgtcgataacatgggacaagaaagtttgaaaagacaactatacacacaccattcaaaaactatcaaaaacgcgtagataacatgtcaagaatggttgcaaatacaaaatcattcatcattttgatatataatcgagaacctatcaaaaaactgtcgagaaatgtcttccctaactttgagagatttgcgtcgagatcctgtcgagaacgtatcaaaaatgcatcgagaaaaatacgaacacatagaatactccaaaaaattagatctcacgatttcaacgaaaaatatgtcaaaaccaaacaaatacaaacaacaattacatagatctaccaaaaatagactatacttttacaatcaattaacaaaatattttaaaaataaatttacttattaacgagctctgactttcaattaaaatgtggtgtggcagacgtttgggcttctatgaaggacaagagatggtggacgggagatggtggacgagagacggaggatgggcttccacgacggacgtttgggcttcaatagaggaccggacgagattaagggcgacgattcctttaggcagatgagatggatctagagagggaaatagagggaggaggagggcgatggctctttgaacgggttgatgcatgagagagatgtagagagagaaataaattttttaggtttt

SEQ ID NO: 350118 - DNA, 539 bp, Cannabis indica
cgctttccgagaatggtgaactgggaaagtaagccgaacactacagtcgggaaggatgaagtaatcagattatttgctagaaatgtaagtttgttacgctttatgtttaattcatgttaatttccatatatgatataaatatatttgttttatttttttagttgcagtttactccatgttatgtccctgaccgaatgagattgagtttgtgagttacatcactgggggtcagccgcctttatttgttgacttggaggaacttatgttgggtgaggatgggcaaccaacacaggatgctttacgaagccaggccgaaaagcttgcctccacattggaagaacaagcggactcaacccgaatatttagagactctacaccatctccaccgtttccaccatgtgcatcgtttgcagtcccagatgtgtctggtgttgaccaatctgcagcttcagttccagatgagtctggtgttgacccatctgcagcttcagtgccagatgagtctggtgttgacccatctgcagcatcacaggatcctc

SEQ ID NO: 350119 - DNA, 644 bp, Cannabis indica
tatacattaaacataatcatgaaataaatcatgtgaaccatgcaacataaaatataatttttgatcttttattaattagtaaatctgattatattgaaatgggttttatttagggcgcaaaccaaacaatctgttgagtcctcactaagtgtttcaactcttacacttacaccctagaatctttttcatatatagaagattcttcttacaaaacccaaacccaatctctttcttttctctgtacctctcaatcttttatctttcatcctctcaatctcatctctatgagttcttaaactcgtgtatccagtacctctaaaaggataagtgaaggtggtatttaaggacttagaatcaagatcctaaagtcggtggctgcaaggttgttaagttagttagcaatgactaacttaaccaacttctcttttgagcgaagtttccacgtcagctatagtatcagagcctcctggagcatataaaagcttccgaactcacataccaaggacacttgctgaagatgcttccagataggatatagtctactagagtcgattatccgaaactacctttccaggagggacaactagccaactagagctccatcctaatgtgaggctagtgttaacgcagattttcattaacta

SEQ ID NO: 350120 - DNA, 913 bp, Cannabis indica
aatttgttgcctagattagtctacctccgtagattttaaattttatgtaagttaaatacattgcatgcttcatggatttactgcttaggtaaatgagttaattattgaggacttcgtcttgattacatgtaatagggagattgagataatttaactgcttcagctttacctgcgagaataatagtttaattaaaaaattgaaattacattctttaatagaagttaagaatgattattgaaggttccctcaaaaaaaaaaaaaaaaagaatgattattgaaggtggagaataacctttaactatttatctcatatcatagtatcacttttaattcgttttttattttttatttatgttattttattctaattatcaaaatcctcttttctaattcttgtcactaatttttgaataattgaataaatatagtcgttgtgggatcgacccttatttacatttatactaaaataattggaagtattggaatcaaaataatagtaaatttgatacgacatacgacacgaatcaatcctcgtcagttgtcatatgtttagaacaactacagtcaaaataacacatttgagaagcaacacttttatcaaaaaaaccagctagatatttttctttttcaatccatttttgtttcaaagcactatgtttcttttgaattttttttaaattaccaaaataatttgttttgtactatatttttcacggtgaaaacatttaggcctatatatgcccattaacaccacaaaaatgaacaaattagaacaaactttcttatctgagatcttaccctttttgtaaacttactggagaatttgcttatgcagacatctttgcaatagcagatcttgaatttgcagtagcaggtaaattgccggaacactggattttacaatttttttac

SEQ ID NO: 350121 - DNA, 1022 bp, Cannabis indica
gtccaaaagcgtcgggtttttgtcatacttggcatagtgcttggtcagtgtatacccgaacatgatgagcttggaagtagggccttaacttccttgttgctaagattaggcagtaagtaagcttttctatcaatgggtactgtccttgagtttcaacgagtcttttgctgatataatagattggatgttggacattttttttctctgatcagcacgacactcacaacatattctataacacctaagtataatcctaattcttctccgtctagaggtttttgagagtacaagaggttttgcaagttgtctttttagttcttgaaaggccttctcgtattcctttggccattcaaatttcttattacctcgtaggatgttgaagaaaggaacacacttgtttgttgactttgaaacaaatctactgagtgcggctatccgaccagttaagctttggacttctttagttattgttggcggtttcatatccaggagggcttgaattttctttgaattggcttcgatacctcgggcattaccaataaaactaagaaagttacccgagctgactctaaaggagcactttaagggattaagtttcatgttgcattttctgaggattttgaagcattcatccaggtcatctatatgccccaagccttcttggatttgacgagcacatcatccacatatacctccgtattttgtctgatctggtctttaaacattcgattcaccaacctttggtaggtagctctagcattctgtagaccaaacgacatgactttgtaacagtacagacctaaatctgttcggaaacttgtatgttcttggtctggtagatgcattctgatttgattataccccgaataggcgtcaataaagcttaggatctcgtgcccggctattgcatccacaagttaatctcttcttagaagtgaaaaacagtctttggggcacaccttgttaagatcggtaaaatcaatacatactcaccattttttgttgggcttgggtaccagtac

SEQ ID NO: 350122 - DNA, 517 bp, Cannabis indica
gtaaaattcatgcaaacataaatcacttcaaattacttatattgattactaatcagattgtaaaggttttatttagggcacaaaacccaacatatgatgcattcaagactagtcgagtgtaagatatctgcatccttgaaaagtcgcttttatggacatcttataatgagctgatagaactgagacacgcgagtctatgtcaatttatcgaggctgtcaagtcattgggactagctcgtaatatggagaatcgatctttatgttttgcagaaggatcgcgaggatactcgcatatatccttatatatgcgggctaaagtcgttccttggtcctacataatgcgagtcatacgaatgcgattagacttggtcatattcgcatcatctcgctgagtctagtttaggcgaggttcatactcgatgagtctctcatttaaattctcagctttccttggggaaattgagtacacgtgtcctttaaataggagtcgggtctcgagtttctaggtgagaaaaat

SEQ ID NO: 350123 - DNA, 610 bp, Cannabis indica
cgttaaacaaagcaaccttacagttgtttttcttacccttttctttttattttgcattgattttatttgattgagccttgaggacaatgcttatattaagtgtggggggagattaactgtcgtatctatctaatcttgactcttgctcgtcctcgagtaagttaatgaatgatacttaaacaaatcgttctttatgaaatataattttagtttcaaaaattgtacatccacttataattccaagaaaatccaaactcttcaatcattagaatttcaactcaagataaattacttttcaaacccaatttttgtgtgtgtgtgcaatcaaatcatcatactactaacattcaaattaattcatgcatgtcaacaatcaatgtttgtctcaaaataaatgtgtatttcaacgaaaaaccactccataagcttaattatcaaaccattctccactaaagtaattacacacaatctaaagatcaataggactttataggcttataatgtaaggctagggtgaaaggtagataaagaaggttaatttgggctcaaatcacaccacagtatatacaacattctctcaaataattcctatttgtattccgcaatcact

SEQ ID NO: 350124 - DNA, 1078 bp, Cannabis indica
tttttaattatataattatttttatgttaattatttaataaataacattattttttgtttttttttaatttacgtgttacttataaaagaaaacagactgacaaaacctattaattataattttattttacttgtaatacttttaattttataatacttttaattttcttagaaattaatatcaaacattttttccactttttttttaaaaaacataattatataaatatattttttggtaactacaccatagataacagggtcacaatagtaattctttaaaaaatataaacactttttttttttatttttttatttttttattttattgcttaaaatgaaaacaataatagaaaaatattttattagatatgtgaattgagttaaaaaaaatgataataaaaagggtttaaatttaaattgtaatgtttaaaaaattatgttatagccacatttaatataagataaaaatatcaaaaagatatgtgtagtgagtttaaatttgaattgtaatattttaaaaaaataacactttttattatatagtctcatttaatataacataaaaactgcacaatagtattaaataggaatacatatttttcccatggggatggggtctcgtggaccgaccctaacggggacctgtttaatttattaattattttttattaatattttataatttataatatgtgtttgtattttttagtataatagtgtcatttttataattttttaagtcgtgtttttgtatagtaattagtatattgaataataattaatgtgtaatattttaaattttaggtaatttaataattttttatatttaaattttaaaataaattttaattttacattaaggaattctccacctcacatctacgccattatggaattccccaccccgtctccatagaaaataacggggatagggattaaaatccttaacaagtatggggacgggggaagtactctttgcaaattccctgtccccatgtgtatccctgtcaataggtaatatagtcacaataatgattctttaagaaacataaatactttttttttttttaatttt

SEQ ID NO: 350125 - DNA, 1073 bp, Cannabis indica
ttttgaaattcgggatcccgacccatataattataaagttataatattataaaattaacttttgagtttagtaaatttcaaagtatgggcattacagtttggtatcagagccaccaggttgttcactgaagaccgtcaagatatgtacaatcaaggtcagtgtcgagctcaactcacggttctgtaagctttactttttgcaaactattttaagatatatttcatatatgattaaatggatgatttaaaccctaaatgtggtcttgaaaatattttgaccactgtctaaccaacatgccttgtgggttcgcaagctaagtcctaagtaatggacgcccagtgaaacgtcagcagtccctgtggttgcggtagaggccgcggttgtgctccgagaggtggccaggaggacccacctcaggctccggttgattgggagcaaaggtttgctgagatgcaagccagaattgagcaacaagaagatgagattcagagactcaggcaacgggatgcccctgttaagcttccctcgcacccgcctactgcggttcctgcagctcctgcggtgccagcagaacagtacgttgctggtaaccgtatggagcctttatatgagaggttcaggaagcaagcacctccagtgtttctgggaggtcctgatgtattgaaggcagaatagtggttgattgttatcgaaagaatattgaatttcatgggagtagttggaaatgacagagtggcatgtgccacgttccaattttaggaagatgccttggtgtggtgggagatggtatccctcaccaaggatgttactagaatgacctaggaggaattccaggacttgtttaatgccaagtattacaatgaggcggtctgcaatgtaatcggaaagagtttgtggaattggtacaaggagagaatatgttagtgaccgaatacagaacgaagtttgatcgcttggctaagttagctttcgggattgtaccaacagacttcagtaaaaaggagaagtacttggcagggttgaatgccaagattaagcacaatctggtgatcacaacaaatgataccacaac

SEQ ID NO: 350126 - DNA, 739 bp, Cannabis indica
cacacggagatacactacctttcatggatgtcaagtgaggatattcaacctcgtcgaacatgcaaattctatacccatttgcacctaaggcataacctaaggaagtttccttaactaatttaggttctaacttatcaatagattgttgtacttaagctatacacctaaaggttcttagatgcattaggttcgagcttttgtcataccacatttcataaggggtttttaagcctgtaacacggttggagcttctatttgtaagttaggttgcagtagctaaagtttccctcaatagggttcggttgatcctttcagcaacaccatttttctctgggttcttcattacagttctatgtctagtgatcccatactcttggcacaacatgtcaagttcaaagttaataaactttaacccattgttcgtcctaataagattcttaacttttagaccaatttggttttccacctgagttttctaaattttaaactgtttcaggcactcattcttagttgctagcaaataggtccaaacacacctactataatcatcaactatatagaaaaaaaaatatttcttatcgaagtgagtaggcactttgtatggcccccaaagattagcatgcacatattcaagtatcttaatagttgttcctttcgaagtgaattttagcttatgttgtttccataaaacacaagcttcacaaaatagaaaggcacaagaatttaaattttcaattat

SEQ ID NO: 350127 - DNA, 1099 bp, Cannabis indica
atccactgctccaccttgagtggattagcaccaccctcaaacaatggcgggttttgctatttgaaccgctcgtacaacgactctaggcaattccctgcattcggtggcactactagaggtgccggaggatcaggattaaggtttggagcagactgagctcgctgctccctaagctctcgaatttgttcaccgaattgcgcgatggtctcttgcatcgcggcatataactcctcccagttttgtggtggtggagggtgctcaccctcaccgccaaccccgagcccagtaagctcgcggttacctctaccagttcaccttgggtgcataatctatacacatgcgatcacattccaaatattgacaatagtcataagtatttccatacatctcaaactttacactctttaccagcagttagcataattcaaacaaacatacaggtaggcaatcaactgataatctaataattaaaacttactgaaccatgagtcaaacgaatcttcacagccaatgtacatatcaaaccagtcttcaggatttaaaaaccttggcactctgataccatattgtaatgcactgtccaacagggacgccacgtgtgtgcttttataaaatttacatttactaataagtttaattatatcaaaatgtgaggttaattaaaacttttcaatttgaataaacacaaaactttcattaaagataattactaatctttatggagatcccctattatcaaaatatttacaatcagtttaacaatgcttttacaacgtaagtttatatttcaaaatacaatcaaaattgggcaccatgtacattgggtcgtaacacgccactgatatgtacattgttgctacgatcttcaaactcatggctgcccaaccttggccttccctttacctgcaccatatagcacccgtgagtcacagagactcagcaagaaaagtgaataaatagtaacaatatagcatttatctattcattctcacattatcaaacttaaacagttacataatatcataattacacaatcctggtacttcataaagtacccttaccactcttcaaccacgagctgaatatgtaacgccctaaa

SEQ ID NO: 350128 - DNA, 970 bp, Cannabis indica
tacggtctagggttattaccatagaatattatgaatccactgaacgcatgagttagggttaacactcttagtaaatgttatctgagtatatataaatgtattataggagtgattacatagtatgcaagttagggttattaccctaagactatatatgttgtattaactattgaatacatgcatgtatgttaaaagttatgtgtataagacataactgggttagacctcgtttatatcaccaagataaaccaccaaaagaacgtaatacatggattacgtatatacatgaatagggttatgcgagcaaggcctaaccaggttaggctcggtaaccagaacagaggtaaaccctactcaggccttactgtatatagacgtgtgagagcaacacgtaggtctatgccacgtagacataaataggcatgtgagtgtaacatgcaggtctatagcaaatagacaaatagtgcagtggcaccaataagtatgtgttacatattgagattaagggttatgcgtcaagacataatcaagttggactcagtaaccagaaccgagatgaactattctaaggccttattgtaattagacgtgtgagagcaacacgtaggtctatgccacgtagatataaatagatgtgtgagcgcaacacataggcctacgccacgtagacataaataggcatgtgagtgtgacatgcaggtctgtgacacacagacatatatgaatggcattactgtttatattatatgataagcatattatatgtgttatgatttatactgtcttgctgggcttggctcacgggtgctctactgtgcaggaaagggtaagactgttgttgatcagccatgagtgcaggagctggacgaagaatgtacatgtccgagccatatcagaccaagcgggttggggtctaccagtgttgtgtttttgagactctgttttgccgcttaggccggccgaaagaaaa

SEQ ID NO: 350129 - DNA, 632 bp, Cannabis indica
aaacgatgtttgtgtcgatttggatggtttcatgatggtttatgtgcttatttgttgattgtttgaaaatcccaaattgtaaaaatattttttatttcattctagacttttttttttactggaaagtagacgaaaaattaatgaatttaggattttagagaactcaatttggattttttatgaattagttacgatttttttgaatttggatgaaaatatctgaaaccgagcacacacgtgcgcatggggatggtgatgctcgctcggacaagaggccttcagacaaggcaatgtccgaacttttcccctcctgaccgaggccttcatacaggctgcttgcagcctctccctcgcccatgtgcagcctcatgtgcgcacgggggagtatgcattgcaatcttgtttttgtgatatcttttgattcaaaaattatttttcattaaaacaaaattcaaattttggtagaattttgtgtagaatctgaattttcaattagaaatctaattatcagaataaaattaattttttattaattttttaattaattaaaattagtttaagatattagtagcctttgaatttgaaaatttgatttttccacaaaaatagccttatggttaattttgaaattt

SEQ ID NO: 350130 - DNA, 634 bp, Cannabis indica
caggcaccaaatccacctttgccagtgcaactagaggccaaaaagggcaaggagatgctggcccactatatgaaccggttggttcctgaggtcagtaagcaactggctggtgctgacaacgactcgtctttggatgtggtggtgggcagagtcttgaaggagttcaccagggtaagtcttttgtgatacttccctttaactttccacacttagctcaatatgctaaagttttttctttgtgtaggccggtctgaagttagcctacacttactcgtgggctaagtctgttgcttccaagaacgtggctctgcccgacaccttgagggcggaggcagacttggccaagaaggaagctgagaaagccagggcgaaagctggagctgttcaattggagttggaagaggccaacaagaagttgttcgctgctgagaagaagatctccgtgctgacaaaggatctcgaggctgctgaccgttttgaggagaccattgagatcttatctgctgaggtaaacagtcttcaggatgagagaacttctctatgagcaattcttctccggatgaaggaggagaaggatgcaaatgagggggagcttttagccgaggtggacaggttgaaggagaaggtcaatgcc

SEQ ID NO: 350131 - DNA, 572 bp, Cannabis indica
ttcatcatctttctttgtcctctccccatttattgcagatctcccaaatcctctccctgcaaaactcccttgaagatcgtaagaaggaggcgggcgactggacttccgaagctcctcagcttcttttcatcattgctccttcaatggatgggactagggaagtgactagggcggcaatgaggaaaattctcaaaggattatggtttttcctatatataaccaagccaaggtatcattttcatcatatttctcagtttattttcctttttttagcctgtattttagaattctatctgtctgttagtatggatgagtttttaagttcggtttctcatgctttagcactccctcctgatgaatccactatttttacctatgaggttggctcttcaagctcctcctctgtccctataagcctcattctaaagcttcataccattaggccctacaatcgtccctctctaatgaaaaccttatctggtatgtggtcatcgttgtgtcgattccctgttgttgtttctgaacatgccgagggtatgttccttgtcacctttggttgtgaaggtgataaa

SEQ ID NO: 350132 - DNA, 558 bp, Cannabis indica
aaagaatttttacctctagtaaggggatagaaacgcgagaatcgccatgttttttcttgtcattttcgcaatctttacgaactgcgcgatttttctgaaattttttgaagttagttatgttagttagaagactagtgtatcttaaataatacaaagaaaattatagtcaaccttgtcaaaagttagggcaaaaggactttttgggctttcttttgaatgtgatggtgatctctcaagaagcctcatattattcacagcactccaatcttggtttggtacttgtgaccaactgaaaagaaaaatattactaagtattaagattagatacaaatcgaaaagaaaaaaaaagttggtattattgaaaactaacgctacgaagaaatttgtcacaaaaacaaaaatttgaggattaacttgccaaactatgtatgttagggacctgcgacacaaataagtatcgaaaaacacaaataaacaaggaataattacataaggcaccattttttataaaatatttacatttttacgttcaaaaaatgtttttttacatttttacgg

SEQ ID NO: 350133 - DNA, 459 bp, Cannabis indica
gcatccaccataggagaatatgtctcctcataatcaatacctggcctttgagaaaaccttgagctacaagtcttgctttgtatctcacaacttcatttttctcatttcttttacgtaaacatacccatttgtatccaaagggtttcacaccttcaggtgtttggactataggtccaaatactttgcgtttagcaagtgaattcaattttgcttgaattgcttctttccattttggccaatcttttctattttgacattctttgatagatttaggtttaagatccttattttcatttataatttctagcgctacattataagcaaaaatattttcgataattacttcgactcggttcaattcttttcctatattgacataatttattgagatctcattatttctaatattttaaggtacccgaatctcttcaagtagatttgttcatgtcaacatcttcc

SEQ ID NO: 350134 - DNA, 816 bp, Cannabis indica
tataacaatcaacacacaaaattacaagcttcatctgcactggaaattcattccaaccgactagtgcttgggttccccgaactagaaaaataaccttcactatatcaaagaatgtttgtatagtaactaatccaaagtacaccagaataacaaaccaatatttatagtagtgactttttaccctaaataacagaatcccttggttatgaatacaagatccctttgcttcttgtttgttgaaattcgttcaacaaagctctagatctgtaacgccaaatcttagcttaaatcctttcagctctcactactttacttcagaacttactctgcaacttcaacccacaataatggagtttcttgctagtacctgcaatgaaacacacaggcgaaaataagaaagaaaaaaaaacaaatcactaatctttgaaaaaaaaaaaaaaaaaggttaatacaacacaataacaagaagttgtatttatacacaactaaacaatgaatcccgaaatggacaactgttaccggcaaatcgaataagcacccaaaaaatctttatgatgacgcggattatcacaatattataaactccaaatgcaactagacctaatttgttactacaaaaaatactaattcttataatgtaaaatttaaataattaataaatatatgtacaatcaaaaaattattaaaattataatactacgtattcataaatcaataataaaatatattaaaaatacaaaaatataaaaatgtgagggggctagaattctctctagcctttatatgagtccactagtattgatatttttttattaa

SEQ ID NO: 350135 - DNA, 740 bp, Cannabis indica
tattgatatttttttattaataatatatattaataaagtatattttaaatattttcttaagaaaattaaatattataaattacctcatatactattttttttaactttttttcaaatttacgatttgggtttctaaagtggttgcagcgctagttgcaataggggtttctatatgatttttcgtcgcaatttagattgcagcggtagtggcaataggagtttctatgtagaatcccgtaaaaatgcaaaaaaaaaattattttgaagtgtaaaaataaaaagttcctaattatatgaatacttaaaaaataaagatatatatattaatataattatttttttattaaagtattaaaactaaaacaatattaaattatttcaatttgataaaaaaaataaattaaagtatgtaaaataaataaaaatcaataacagtgttaatatctaaaagtggggacttaatgttactaaaaaataaaagtttagggaccaacttattaaaaaataaagtttgaaaactaaattaccaaaacttatatactttggagactaatttacaaaaataaaataaaatttagagaccaacctatcaaaatttatataatttaacgacacaaaaatatatatatatatatatatatatatatatgggtgactattcaatggttacatttttattgtaaccatatggttacatttttctttgacctgtaatagcaggttactaataggtagacatt

SEQ ID NO: 350136 - DNA, 1369 bp, Cannabis indica
aatttcatatttcaatttactacatattttctctctttttctcgtatattctctcttcttctctcatgaagaagtgttattttcttaccgacttaaatagtgatacagataattgaagcataaagattagagtttgtacaatgtgagagtctcttaatagtttgtagaatgtgagagtctcttaatactaaaaagaatagagaattgataagccttgatatgatttttattgatgagaaggtgattattattttattcatattttccttctattacttttttttaattatttatcaattattaaatactcaatgtgtctaccatttatcctataggaaaatttaatacatgcaataatacgaaaaaaaatttagtttttaagtttaagaagctattgagagaatgttttttgtattgtatgcaaaatttaaaaattgtggcaacttcaggtgagtacagaccactttcaaatgactataaaattttatttttggttacaacttcagtaaagagactagaaggagaaatagttaatatattcggatcaatgggtttcaattcattactccaaatttgactcatttacgtgttaacggtaacacaatattctcatgtattcgtattaacaatatactgtgattttaaaaaaaaaataataacaacaaataaatgatattttatatatgatatattaatatgttattatattagaaggaaactcagtttaatcatattataaattcaaagagctatatgtaaaaaaatatatatatgtatttatatacgtatttatatgttatatgaatgaaattaatagagttatagatttagatgtaattatatatgttcatataatttaagatatttgtagagagataatatattatgtgatgattataagtgagatgatgagaaagattttaaatatagtgacgactacatttgatagttaaaattattttaggtaattaatttatgatagaatatcatttacttatgtataaaaataattacttaccaattattgtttgatttattataggtatataacaaactaattagaaaagatgttaacgaagactacaagtgagatacagtgattgttggaatttattttaccaggatcttagatctactcacaagtatgttgtttaacaccctaaatatgaactttctaaaacgataaataaacacatataaagttaagaaaaccttacattgatgcagcggaattaatgtctccttccactcagatctctaacccttgtatcctttctgtcgcagagtattatcaagatctgagcccgaatgtccttctctttgtgtgtgatccttcacagtcttccaatctatgattgagttactactt

SEQ ID NO: 350137 - DNA, 748 bp, Cannabis indica
caacaatcatgccttgaacatatatgctgaagatcatgtggaattgggtatagaagacatcctaggaagttaactgctacggtactttaatagaatgctgtaaaaaagttaaaaatttattttttgtaacataaaagtgtaaaaaatttacaggaaaaaagtagtttgtgtattttttttttgtgaagatatatcttaaatcatattcctatgttctttcttttcgaaattcaaattttactctttcaccgacaaagtcattgtgttattaatagggttgttttctgatctgattagggaaattgacattgtttttaattgcattttaatcttatttcaattttccttttgcgaaagtataaataaaacaaaactaacaagttacagaatctattttttaggcatattggtccattgtatttaacagtttccatatagtacatttaacaaatagactatagtacatataatgaaatgatgttatataggaagagatgcttacctgttattgtacacatataggaaattaagtgtagggatgtcatgaatacactgaaatgttagacgattgcaatgaattattcaaagtatttgtcttccaacattttagtgttttgaatgtttgttaatttaagttattttgtcttgtgtaataggtttttacaatggtgtataaacggaagaggggtgctgctgcagagaaaaaggatgcaactgagataaaaaagaaggattcgaaggaagcttg

SEQ ID NO: 350138 - DNA, 1060 bp, Cannabis indica
agcctcttgtagctttctcttaaattcttgaattgtatgaaaatggatttttgcatgaaatggtgatttagctactgttgttgctgtagttgttagatggttgttttcagaagttaaattatgctagagtatgttgatttaagcttgagttgtttgctgttagtagatttaaccaagttttgagtttagaactcgaacttaaagctttaatggtagattttgtttttgagcttgtagaagtgttttatttctttgatattgctctatgaggtctaaatagcaggtctggaagttattgtggtgtttggagttgatttgaggttgtggtgaatttttgaagttttcctgcactgaaccgaaattatagttcagtgggacctgtaggaactgaaattccagttggtccccaagaaaccccgtagaaccggaattccggttgggaaccagtctaccggttggggaaattttcagaaccctagtttttcccatttttgtgatgtttagggtattgccacgttgtttatcaatagggaaacttttagtttcaagtttaagtcctcggaaagtgatttagcgtgtcacttacctatgttatgattgatgtgatttaggagcctgtaatttactgagtagttgttttactcaggttaaccggcacacctgaattcaaaaacgaggtaagattagtgtaacggtatgcatatgtatatacatgtttagtgtgcatgttaattatgcctgttagattacattagatatgtatgttggtttttgtactatccgacagtatcacatcggtacgtctagagtatgactagcgtaccgagtataggctgatattatggtcgatagtaccgtattacttgacagtatcgcatcagtacggctagagtatgactagcgtactgagtataggcaggtattatggtcaatagtactgtcgtacgaacgttcttgacttagtaccgtgcgggtcacggagataggattatgattgggggtatgggcatccgatcataatccaggttattactatgctattgtttatgcttttcttact

SEQ ID NO: 350139 - DNA, 727 bp, Cannabis indica
tcattagggccatcttgattatttactccctttctttttcgaggatttttatctttggaaccgactggtctaccacgtttcaaacgtgctttagaatcattaattaattgtccttctgggacttcaattcgaattggagcattttcagctggaatatgtgattttgtaattttctttgggtcagtgaatgcatttggtaattgatttgcaatattttgcaaatgaattattctttgaacttcaagttcacattgatttgtacgaggatcaaattgagataatgattgtgcattccatataatttctttttccagctgtttcttttcccctccccctaaagctgggaaacttgtctcatcaaaatgacaatcagcaaaacgtgctgtaaatacatctccagttgtgggttcgagatatttaatgatagatggagattcatacccaacatatattcccagcctcctttgaggacccatctttgttcgttgtggtggagcaatcggaacatatactgtacaaccaaagattcttagatgggaaatatttggctcctgaccaaaagccaattgtagtgggagaatttgtgatatgatgttggccttaatgcgtacaagtgccgcagcatgtaaaatagcatgtccccaagctataatttgggaattttattctcataagtaatgatcttgcgattaattggaggcgcttaataaatgattccgctagacca

SEQ ID NO: 350140 - DNA, 520 bp, Cannabis indica
actttcgaacatataattaagatcatattccattctgttgacaacactataatcattaacaaattcatatgttctggacttaaatagaattcatacattataaatatataatcatgaaataaatcatgtgaaccatgcaacattaaatattatttatgatctttattattaagtaaatctgattatattgaaatgagttttatttagggcataaaacccaacaagaactagttagctatattttaatttctctttatttacttgcatgctcaacatgcatcgcatttgtttttatatatgcttaaagagaagttgcaagaacatgcatctatcctatttgcaataccgggattcgagtttgggaccatgggtcaaatttatatggaatctcaattctagggggatccgagtggaagcagttttcatgtatgctttgattgttgttgaaactatctggagagtgcgaaatgattttatacataacaactctcatccgaatgttatgaaatgtattgaccag

SEQ ID NO: 350141 - DNA, 818 bp, Cannabis indica
ggggaaagtagggtgtgttcgattgttgagaagaagtggagttgattattagaaatttgattaaggtttttattgagttttggttcttgtgacataggaccgggaattgcctagcttattttccactcaagtcgacccgtatgcttgagttcagaactaaggcaacaaaagtattaaatactttataaggttaatattatgattgttacaatatcgattaagattgaaatctcgatataagttgttgtgatttaatcttaatggagggtaacgttatgtgttggttgtgactcgattatgatcgagggaaataataggaaacaattatcatcgttgtgactcgattataatcgagggtaatgatgtgaaccgattattatcgttgtgactcgattataatcgagggcaatgatgtgaatggattattatcgttgtgactcgattatgatcgagtaaaagatacggtcattaccgttatgagtaattactcctaaaaccgcgcataggtttcttacttatcgtttctgtatcgagcaacgatagtgaaataagtagctcgtggttaatgagtggtaaaggtactttataaagtaccagaattgtctgattaagaagttttgaaatgacttaagcatgttattatgtgatgacttgtaactggatatatctttgttataatatgaatgaatagatttttatattgcttaagaaattagtttcttttcttgcagaatcttagtgactcacgaattgtaagagttcgtatttatagagatgtaagattagagtgctttatgaagcactgagattatggcgtt

SEQ ID NO: 350142 - DNA, 505 bp, Cannabis indica
ccctaccataaacagaagtaggaaaagtgggggttccaccaacatttggagtcacacggggctcctgaaggaatttcacagcaccctcagcccgcagggctttctcaaccatttcagcataagtggttgcttcattagtagtgatcaccagatcatgcctgatcttcacattcagaccggccaagttcttttctttcttactgaaatcagttggcacgatacccacggtgagtttagccagacggtcaaactttgtagtatactctgtgactcacattccctcagtctgaactagctccgtgaactctttccgcttagcactgcggaaggcttcattataatatttggagttaaataactcccaaaaatctttctaggtcataactgtgacgtcccgagtgtgggttatcaactcccaccacacgagagcgtcctcctggaactggaaagtggggcaagtcacccgatcattaccaaccactcccataaagtttagaatatgctc

SEQ ID NO: 350143 - DNA, 803 bp, Cannabis indica
aattatatattcagagatactgttgtaagagctataagaaaggaatcttcttccttgatcttaagtcaatacaaataacgaagattaggctattaccgaactgctcggggctgaacctctataaaattcctgtgtctattattgttttatcatatatctgttactaaatatcgtttatcgcttataaaatagactcattatcattggctaaaagagaagtcaacattttggtacttttattgagagagggatcataaatcgctctttattctacactcaaccgctaacacgatggtgcaaactcgtagaggcctggctgacccagcgaattcacagacgctggatccgacactacaggacccagggaattcaagggttccgcgtgctgttaatccttgacagacgggaagcgtggtgaatggtggaacaactcctattacttgaatcgcgcctggtgtgcaagagactgggaataacagttccgcacccaaccagggcatccataatacgactgttctgcctggaaccaacgcccagacgaccatcagagacgcaaccgaattgcaaaatctccgtaacgcgctcggactgcagggtcataacaaccctctgcatcatgatcaggacgaactgcatgctgcaataaatctcgcatttgacgaacaaaggcgtatgttcgctaaatggagagaaaatgagatggaggcatcaagggctcaccatgcggagatcgaagatcgtagtcggcaagccatcgtgctaatatgaagagcctaccaaattgtaggtcagcaatcgccgaa

SEQ ID NO: 350144 - DNA, 1034 bp, Cannabis indica
gggggtgccccgcaaggattcttctttcagttgaaggtgcctatagagggtcctcccttggaggtaggggccgattgctcaggttcatcaggatgtttatgccatcctggccaactgtagttgtcagatttgtggtgcctgctatggtggcaggattgaccacatctgttgtgttcatgggaattccatttgtgactgggacatggacatcaagatctgcagtctgtgggtcttgaggaggagccaaaaatgcagatggtgaaacattagttcttgtcgtttaaaccatggtgtttgatcagattaatttacaactcgctctcaatgaaagcaccaaactattaatctcaaaaagtgatcaatcgacagcagggtcgtatgaatttgatgtttgccacgtgttatacaacaagaacaataatgtaaataagacaaggatttttataaaggttcagcttgtttggcccccttagttagcgggtaatgacctactcccctttcagttgtattgatacttagagataatactactcaaatcattataggtgggatctgatgtagctctctataaggttacaaagaatggatcaagtaggcaaatcattaatgagagagaggtataaccttagaggtgtgtgagtgagaggaggagagagccctcttgggcgtgtacaagagagagaagaaacattagggtttcaaacttagagtgatttggaggctagaattagacttagcttttttaggttagggttaaggccttcatatttacaatagaaatccttagatatttacatgataaattgattaaatacaaaagactaaattgccccttgaaagtaaataatttccatcagtttgttgggttgttaagggcccaattcacaggtagcttgcagtccatgtatcaggctgtacagagaatcctgccaggccaatcttggtcagccatacactatacgatatggtttggccaaccatgcaagtcctacatgttgaagttgttgggttttatgccctaaataaaactcttt

SEQ ID NO: 350145 - DNA, 730 bp, Cannabis indica
ttcgagtttggagatgaatgtttaaaggcgttccaagttcttaaagagaaactgatttcagcaccaatagttacttcaccgaattgggagttgcctttcgaattgatgtgtgatgcaagtgactatgcaattggagcggtcttgggtcaaagggttgacagggtgtttcacacaatctactatgctagtagaaccctgaatgatgctcaactgaattatgccacaacggagaaagagatgttggcaattgtgtttgcatgtgataagttccgcccctatcttattggaaataaggttgtagtctatacagatcattctgcaattaaataccttatgaccaaaaaggatgcaaagccaagattgattcgttgggtgcttctactccaagaattcgacatagagatcaaggataagaagggcactgaaaatctggtagcagatcatctgtcaaggctagagatggaagagagccagaatgcaaaagaggtacagataaatgagcaatttcctgatgaacaactctttagtgtgagggaaagtctaatggtaccgtggtatgctgattatgttaacttcttggctgccaacataactcctcctgagttctctcgtcaacaattgaagaagttcttttatgaggtgaaacattactactgggaagagccaatcctctacaagcactgtgcagatcagataataagaagatgtgtgcctgaagaggagatgtact

SEQ ID NO: 350146 - DNA, 1252 bp, Cannabis indica
acaagaatataaatgtgatatgggtttggatgaatttaaaaatcaaataaacaagtaaatgataacatgaaccaaatgacacacaaataagtgatgaaaatacttctgtttctttattgatatttaaaagaaaaagattacattgaaatggagttttatttagggcataaaacccaacgttcgcttggacatatgaagatatgcttgggttagatcctaggttggttactcacaaattaagcgtaatgtttgaggcaaaacctataaagcaaacttcgaggaattataggctagaagtacaacttcagattaaggcagaaattaaaaaattattaagaataggatttattcttacgtgcaagcatccgatatggctagctaacattattccagtgaagaagaataatggaaaaataagaatttgcgttgattatcgggatcttaataaagcctgtccaaaagatgactttcctttgccaaatcttgatactttagtcgatgcaacagcaaattgtgaaatgttttcttttatggatgggtttagcgggtacaaccaaatccagatggccaaggaagatgcagagaaaacggcatttcgaaccccgttcggaaacttctactacactgtcatgccgtttggcctgaaaaatgctggtgccacatatcaaagagcaatgacggcaatattccatgacatgatacatgaaagcatagaggtgtatgttgatgatattgttgtcaagtccaaaaacaaatttgatcacatttgcaacctcgagaaagcattccaaagaagtagaaggtataagcttaaaatgaatcctcttaaatgtacctttggtgtaagcgctgggaaatttttgggatttgttgtacacaaaaatggtataagcatagacgaagataagactaaagctatactagccatgaaggtaccgcaatcagccaaagaattgaaaagctttctcggaaaagtttcatatctacgacgttttataccagctttggcagaactcacaggcccgctccaatcattaatgagaaaaggtatgtcttttaattggggagaaaaacagcaaaaatcgtttgacaagattaaaatgtattgtcttcctcccaagttatgatatcaccagtaccaggagtgccactactgttatatttggctgttactgaaacatccatcgggatattgttagcgcaagaggttgaaggaaaagaaaaacccatgtactatctcagtagacaaatg

SEQ ID NO: 350147 - DNA, 871 bp, Cannabis indica
tggtggaagctcataaaataagaataaccttgactctcgtctacctggacaatattagattcttattttgatcaaataaaaggttgctattatggtgtccattttagatgagttgactattctattcaatgaataattactatgactctcatctactgggacactataacagtttgttggaaatcttggaaattatttcagatgtgcttattttgtattttcacatgtctttgttacttgctgaatgcatgataatttctgaattgtatatcaatttatactgaaccgtgttgttttttgttattaactgtagtataattttgaatctttattgttggtctaacttagtttgttgttttaaagggacaaatcgcaaaggattgtcatccattagacaaatataatagtgttaaatctcaatagataaatatttgtaaatgcaacatctagttttacatccaaagatgacaacttagactagtgtttacaatatgaaacaatgaagaatttataaaataagaataactttgactctcctattaggacatcgttggattcttattttattcgaaattatcctttaatttttctcttagctttttcttttagaattttcttaaataatatatcattggatgaatggtttacaaatcatctacttatgatgtcattctattttcttctatgaaattgaacggcgtagatgactgtattcccaacattctatcacgaaatgatatatatatcctcgatcttagaaatctactacttatatatgtttactttaagaaaattagacttagagttagattagtagtggtggtacaaagaaaaaataataactcatatatatttgctataaatttaagtc

SEQ ID NO: 350148 - DNA, 590 bp, Cannabis indica
tgaatttttaaattaaggataaactgcaattattattataacaaggaaaaatttatctttgaagtctttatattaatagagctaagtcttccaaggtacgtagaactatactagccaatataacctacatcatacataagatttaagagattaatcaaaataaataaatcaaatcccatataaaattaactattttaaaaaatgtaacaaaaactcaattgcctcacaaataaatgataagaaaacaatgttataaaatgatagaaagaaattcctccaaaattaataaaatataattataagcaagatttaaaacttatctgtaaaaatctacaataacactctttgaagttgaatccatgcacaaacgagctaacaacaaactgcagactaaccaaataatatagtacaaaaataccaaataaaatggcctaaactagccaaaaaatggcacaaattaaaaaaacataaactataaactattttcacataaaatgaatctagataataaataaaatataagaatatttttaaaaaatacgataatttataaaaaaaatttattaacctaattaaaactaaatgacagt

SEQ ID NO: 350149 - DNA, 716 bp, Cannabis indica
tagggcccacctatcctaggggcccaaaaaaatatttcccttttaaaattatacaatttttttactgattttcaaaaataccatagtttttttctaaataggggcccaaaataagtttttttttctatgggcccactaaaagttagggccggccctagccccttggctgacaaataatcgtacctccgccccctgaatgtaggcacagcctacgagctcgattatttttcgtccaatgcttagattcatgtcatgttttactcgggctaatctattttcttatacagactcgaattcatgttctactttttagtattttgtttttataattaacgaaataattactaaactacatgaatttttgtagcttcaattatttttatatagttttttaacaatattttaatgataatcaatgtaaaaaaaaaaggctaaataggatttttgtctcttgaactttgacatatatcaaatcatacccgtgaacttttaaggttgttaaaaataccccctgaactattgatattgttggatttaaggactgttgtctaattttattcaattttactatttcagtaattgtttatgtactaaatcatgctccccagattttgatatctactaaatcatgcccctcaaactttgacatgtactaaattatgtcccctgaactttcatccatgttagacttttttactaaaattggaaaaaagtcc

SEQ ID NO: 350150 - DNA, 1065 bp, Cannabis indica
gggctcctggagtaagtacctaccgttgatagagttctcgtacaataacagttatcaaagtacaatagggatggctccctatgaactgttatatggaaaaaagtgtagatctcccattcattgggatgaaacctgggaaaagaaatacttaggtccggaatcagtgcaacggactaatgaagcaattgaaaagattaaagccagaatgcttgcctctcagaccaagaaaaagagttatgtagatccaaaacgcagaaatgtagagtttcaagtaggggatcatgtgttcttacgagtgtctccattgaaagggatcaagcattttgggaaacgaggcaagttatgccctaaatttacaggaccttttgagattttcgagaaggttggacaagtggcatatcgattagctttgcctccagctctttcaacagttcacaacgtattccatgtctctatgctaaggaagtacgtttcacatcctgctcatgtactgagttatgaaaatatagagctataaccagacttgacatatatatgaagaaacaaaaccagtttaaatccttgacagaaaggataaggttcttcggaacaagaccatagctttggtcaaagtactctggagaaatggcaaggtggaggaagccacctgggagttagaatccgacatgagagctcaatagctagagttgttcaggttagattttgaggatgaaatccttttaagggggataattgtaaagaccgcttagccttaatttagaaattagcagataattaggatttaattattaaaattgtttattaactttaaattattaacttatgatgatttatttgaattcaaaatgtattttatgtcatatatagcacttcataattttgcatgttttgtgcccggtaacattggaacgcggtgtttggctattagaatcacatcctagtatttttagtatagcggggtagtatagttagacattgggaatgtcaagaatagttgagattttagagttgacaaaaatactcctaggtgaccttccatgatttttagtgtggaatgggcaaaat

SEQ ID NO: 350151 - DNA, 891 bp, Cannabis indica
aattgcttaattttttccacactacatatctaaataaaataattccaaatcgtgaatccaattatttttcgtgaaaatttcgtaaacatcaatcaaccattaaataaatacatagtcaatatgaatgacatccaaatcacacatttatcgttttaaatccatatttcttaaaagtaaatcattatcatggctctaatacaagttgttggaatagattttatcaagatctagacttactaacatgtatgttgattatattttataatctaacaccctaaatgtgaattcctaaaaacaataaaaataaatacatataaagtttagaaaatcttacattggtggtagtagaatgtaatagctccttccactcagatctctaacccttgttccattctgtcacagagtaataacaagatctgagtttggatatccttcaggtgttggattctttacagtcttccacactttgattgcgtacttgacttgatatgagtggacatgtactctatcactaaatgctcgaaaattgatgaagaagaagagaggggatttcgaaatagcaaggaaagaggctctcaaatttctagttgtctgacaaggaatgaaaactaggctatcttagattgattaggttatcagagtgagagcatactattccttttatagtatttcatctagggttaggatttaaattatatggaataaataaaaataaaataatagcaaaatattttttaagtggtcggtcataggatgtggaccccatagttacaattttactattttattcaactatttatccttttttttttcatttatgctatatttttcaattttaatcctattgttgcccctgattttgcccaatatacgtggaccaaccggacaggg

SEQ ID NO: 350152 - DNA, 617 bp, Cannabis indica
aaatattaaagaaattaacaaatttttaaatttggccataatttaaaaaataaaataattaatttttgaatttaaatatcgaaatatcaaagaattaataataatctattaaaaattaaatattattaatttaaaactgatatttaagtttaaatataataaaaataatattttattttgaaattagggtttgaaaattgtaaaaattaaaaattgggaaaaaatcccacaaaaattagatttttggggttggctgccaagcaggaggccgcatgcagcctccttacgtgcgcggagaggggtgatgcagggtgagccgccgaggaaattcgacatttgcagccttaggagacgggcgcacgtagcatctcgtgtctgaagacacgggcgtgacacgccttcagacacaagttgtgtccaaaatgcgcgcgcgtgatggtgtcttgtccaaacacctggtgtgtgcgagcaccatgctcgacaccattcaaccccgaaatttcaaaactccatactttctcatttttcatcagaatagagttccttaaaaatcaaaattgcttaatttttcacaggaatccaaataattattttcatggaaaaatttcgtaaatcac

SEQ ID NO: 350153 - DNA, 586 bp, Cannabis indica
taacacaataataaaatactaagaacttgttggactcaagttcttcacacatcaaagaaaacactttctaactttgaacagtaatatagaactgatacaccaagagagctaaccaatactaacgacttaatgatgtatttatacactttagaaaccctctatgttgtggtcaagcaaccaagagacgatcaagttataaaataaaaaattttccaaaaaaggaaagtcaaaatctatttaaacagacaatcaatttgttcaaacaaatacagaaaacttggacaatttttcaataaaatttctataaataaataaggcaattttgataacattaaatcccataaagggtttcttggtaagaaatcaaatccaagaaatataaataagattaataagtttcttaaaaaggaaagaacaaaatcaaatattatataaaaggaaaactaatatttaatttaccaaagtcaaataagtataaagtctgatttttaaaagccttttcacacaagaaaaaggaaaccatatttttgaaaaataatgaataaccaaataagaacaattttgaatattttcaaaaataccacaa

SEQ ID NO: 350154 - DNA, 660 bp, Cannabis indica
aaaacttggttaaatctaactaacacccactaaaacctacttgaatccatatatctaaacataattaatcttcagaaaacaaaatcaaacaccaacagcagctacagcaacataaaccacaaagcatgcataatttcataacttaaaacctgagaaatcaaagaggaggttaataatgactataccttagcttggatttactgaaaacttgctgaaaatcaccttgaattgttgaagaaaaattttcttatattaattaattagctccacataaagacaaaatacaaaatgggcaaaaagaccaaaatgcccttgcccacactaaactatcttaaaaccacatcggggtattttgggaaattctaaaatcccgaccagccctgacattctcaatgtctagctatatcgccccgctatactaaaaatactaggatgtgattatattagccaaacaccgcgttccaatgctgccagacactgaatatgcaaaattatgaaattactatatatgacatataaaatgcattctgaattcaaataaatcactataaattaatagtttagaattaataaataattttcataattaaccctaattatctgctaatttccaaattaaagctaagcagtctttacacatattctcctgtggtggatgca

SEQ ID NO: 350155 - DNA, 455 bp, Cannabis indica
ataggagtgtgagatttactccacaccatgccgataggtcttgatctataatgatcgagtaagtttgaaagtatatcgtcatagagaattatagttattttagcgatccaccgagtagctagtttctgctacctgatcggaccgtacgatcgttccaaaataccccataacgatcgtttaagtttttttaaactttatatataaaaaaaatataaagtaaaaataaaatgaaattataaaattttcaaagatttttaaatcgttattaatctttaggagtaaatatgtaaatttgataagaatacctttttttctcttcatctaatcatactaggaaacaaaccgcgcttcgagtgcggttatattttatttagtaataattaagttataaaattatatccaattttaaattttaataatattttataatttttttaataatatgagtaactatt

SEQ ID NO: 350156 - DNA, 534 bp, Cannabis indica
ttttattttatattttaaataattttgtttttttatagaaattcacatagcaatctacctagcaaccaacgaaacaacttaaatcgcaactcaaatctacatagtaacccacatagcaaccaccagagcaacacaaaccgttaaaattaaaataaaataaaaaatattacatgagatgattcccttaattaatatggtagatcttatcttttttaattattttaattaattatatatatattattatacagttagcttttataatatatgtatttcttttaaatcaattaaattgaaatacaaaaaaaaaaattataattattgatgactctataaaacttatcatatgattttaaaaccgttgtcatcacaacatcttatttatatcatcactatattcaaagttattgttattaagtactgtattttccaatagatttgctctatacataaaacaaagggcttttttcaattttaaccaaaaaaagtaacaatattacaaaaatacttctagctggccaaataaacaaatat

SEQ ID NO: 350157 - DNA, 1014 bp, Cannabis indica
aaaaaattaaaaaaattgacataactttcaaataaaatatattttgacaaaactaatatagttatatcataatctttaagtaatttgcttctaatttaaaaaaaaatatgaaagaaaattattaatttttttatttgacaaaaaaatataaataataaataatctagttaaaagggtcatgttgctacaagttttgaaatgagaatatttactaacacaatcctataattttgggtcatttactataatttcccagtaatatataacttaaaaagggttattttgctacaaattatgaaatgagaatatttactaacatagttctatgattttgagccatttactataatttccttataaaactatcatttttctccaattttgtcgatgcggattctattagtgtcttaaaatatttttaaccagacttagttttaaaatttgttaatagaaaatttaatagtaactaatatactacacagttcaagccctataggatataggtcatacatgtgttgcgtttttttgttttttttttttgttggggtaaccgataaaggttaagataacaacggtaacaaaagttacacagaaggaggggggatttcttccatccaagaaagttcattgtctatcctaagggcatgcttagccaatctatgagcctcaacattaaagttgcggctaacatgagaaagagatgccccaggaaaactagacaataggactttaatatcagaaaagataacccccagttcatttaaatacacagtctggccctccaaagctgagaccaaagaaagtgaatcagaaaaaactttctccacgggaagtcccacatcttgagcccaacgcaatcctactagtaaagcaactgcttctgcctggaaaactgaaaaggaacctgcaaatgagatagttaaaccaataagttcatttaaatttaaaactcaaattttagagtataattgttatagagtcaaaaccaaagggaaacccctttggtttgactct

SEQ ID NO: 350158 - DNA, 697 bp, Cannabis indica
tccattgaatagacttattaacgaaatttcctttcatgtccttgtaaaagaaaacttttggttgttccatatgaatggttttaaccatagttctcttgactttatttcttagtttcttattctgacaatcattacttgtttaaactaacaatagattttaatcacaagtgtcttccaagtcataacagggtgagttccttgaaaccctcccactacgacaaagcaccatgacttttgtctacttacattgggtgcagcggaatataatgactccttatgttcagatctctagcccttgattcctttttgtagcagagaatcaccaagatctgaacctggatctctttctctccttcctttagtccgattctccttcttgttgattggattattcaaagtcttacacacaatgaataagataccacttgatgtgtgtgggcactcactctatcactcaaggctgaataatatgaagaagaaaagagaagggaagtggcggctagggtataggaaagaaagcttagagttgtctctgaaggaatgacatgcatcatctttttcctaaagccatcactacctatttataggtaaccacctaggtttaggttagatttatttggaattaaaataatagaaaaataaatggtaaaatcacactaagtggccggccataggatgtggattgggccccactttg

SEQ ID NO: 350159 - DNA, 501 bp, Cannabis indica
agagttcattttattctcaacaaattatcacctgagtttaaccaatttgttttaaacaattagaactcacccgacataaacaagctgggcgctgaattgcatgcttatgaatggacattgtcacttgcatggagatccttctccagcaatgcagataagggcaaaaggaaagcttaagatattgagaataattcctccaacaatcctactacttcaaactctgttgagaagaatagagaaagtgattccacttcctcagattatctttcacaacagattgaaccagcaataagaacaatccaaaaacagttaagcaatgatgctttagtttttgaatcatgtgttctagagaatgataaatccatctggattcttgattctggatctacaaaccatgtctgtttgcttgaaaactggaattatttaaaatctggagagttgaaacttaaagttggtaatggcgaaatggtatcggttagagctagaggaaaagccaaactc

SEQ ID NO: 350160 - DNA, 944 bp, Cannabis indica
tagacatcacgggaaccacattagaaataatgattaattttgaatttgactttatctcttagacagatgcaagtgggcttagaagaaccgattaaacaaccggaagaagaacgctgttgaaaatgctgtcacatgcgcctccacgcatcggtgcgtgggaaactgcgtagaaccttcaggtggtgagtgagccccacgcgcgaggatttcggtgaccggacttcagggtttggtagatcggcggttgggcaaccctccggagtgggcagtgagaatagattcgcactccaaatagggttttcaaaaaagaaccctaaactcaaaccctaatcttttttttatgaacccttatttcaaatttcgaatcacaattctaagtatggctctgataccatgtagaaaataatgaatcgaattgtgtatgtatttcatagaatagtacatatttatatacaaagctagaagactaaatgagaaactattaaatacaaataggaaactaataaaatataattttctctaatttctttacaactaatattctaacaatttgcttaagtacattgttatataatgaatatatcataatacaaggaggataatactcgactcacaatgaggacctattgctatgattcatatgtttattacgtaatgagtaacgtcgggttttaagtggtaaattagttaaatactgaccaagtgagagaatgttagaatatttaaatatggtaacaaatcaaatattttatttgatttgatttataacttataattaattatttaccaattaactaaaatattctaattatggtcagatttaattacaagtatttcagttacccgatttaatttttagaattaattgtcaaaatattctgatattaattatggtagagattttgatggaaggtctcacctatataaatatagagtctcggtcc

SEQ ID NO: 350161 - DNA, 702 bp, Cannabis indica
tactaaatacaaatagaaaactattaaaagataattttccctaatttctttacaattaatattctaacactccccctcaagttggagcatagatgttaattatgcctagtttgttacaaaaataatcaatccgcaccccattcaaagcttttgtaaaaatatctcttagttgttctccggtcttcacatatcttgtggagatcagaccttgttgaattttttcacgaacaaaatgacactcaatctcaatgtgcttagttccctcgtggaacacgggatttgaggcaatatgaagagcagcttgattatcacaccacaattttgttggaatagaagtcttaaacccgaatttagtcaaaagctgataaattcatattacttcacacacactgtgccatagctctatattctgattcagcactggatctagatacaatattttgtttcttactattccaagagactagattaccctcaataaatacacaatatcttgaagtggatcgtcaaactaccttggagcctgcccaatctgtattagagaaacactcaatctgggtatgtccatgatccttgttaattatacctcgtcctggtgcttctttcaagtaacataaaattttctttagtgctgcccaatgctgaattgttggagaagacaggaactgactaatgacactaactgggaatgcaatatctgga

SEQ ID NO: 350162 - DNA, 631 bp, Cannabis indica
ccgaaagcagacttctgagttttatggcccacagatttgagatcatgaatttagacagtaatatataaaaccatagtatatgaaattaatctcttcatctgaagaattaagctagtggctgagcaaatcaaaaaaaataaaataaagaacatatatcaatgcatatataaagatatatgtaattaaaggaaaaaaaaagttaaaaataaacaaagcttaaaggctcttggttaggctttggccacgtcccatagaatcacagtgcaattacttgtgcatgcattggttagggaagacataagctgtcgtaatagtttattatattacatatctttgattttctcattctttttaaattaataaaaataatagttaatatcattttagactttgtattaggttctctattttataaaataataaatttaatcttatatttttcaaaatagtataaaaaaattatgtgaacttacttttaattttttttaatataatcacattgaagattatttttaacataaatagatgtaaaaaaaatatacttaattttattataataactttagattgagttattatcaatttttattttgacacatattgtggacaatgtcccacatggaataaatgg

SEQ ID NO: 350163 - DNA, 1069 bp, Cannabis indica
agcaacacaacataatgaataaacaaaaatcaaaaggccattacataaaatgaacaattggaaatgtagggtaatttttcttttctttttttgaaaaaacgcaattactgaagactgatttatagggcacaaaaaaagaagaacaacaatatcaattaataatagtccactaaacaaaattaagagaacagagtaaaacccatatcaaaattatccacttcacaaaataagcccctttaaataattggtaatttcttcttttaatctaaaattttctacgctaatcagatatgttatacacgactctaattagaaaatatgtacacatataaatttttgaaaagtcatctaacatatcatttatgggggcttaccttccatgcgactgagaaaccgaggtgttgagcaagaagactggctccgacccaacaaagaaaacagagcaatatgaaataaataaaaatagaattctgacctgctagattcgaaccagttcctccactatgaaatacacaccatgtatgacatcaaaatacttgattttttcatctagattccctccaaactctacaattttgagactaaaaaactaaaacaattatgatgtaggcaaaccacgttcagaacatttgacttacatgcaattgcctctgaacgttccttggtcgctccttgggtcagcgaggaggtttgtgacctaatagagagatgaaatcttcttcgatctctttcttcgcaagcttctccggtggcgataccctctgagatgtagcaaaggagtttaagaaccctacaaagaactaataagaacacgaaaaatgataataaaagcactaaaataccttggtgatgatcttcaaacaataaaagaaaactgaaaaagtgatttttggcctgtttggagcttcttttttaattttttttagctgaaagtgaagttctttgtttgtgaaagtgaagttctttagagctgaaaaagtttccttcaactttactaaaatgagcgcaaaaaaccaaaatgtttgcaaccggttacaaccggttgtacttcctattttcaagtcaaata

SEQ ID NO: 350164 - DNA, 514 bp, Cannabis indica
caattcagtattgatcatcatgtaaagataccttatcctcagagactccgtaagaccaatctagacaagcagttcacaaaaattctagaggtcttcaaaagattacacatcaacattccttttgctgaagctttagagcagatgccgagttatgtgaagttcatgaaggagattccgtataagaagagaaaaatggaggactatgaaacgttggctctaactgaatagtgcagcgccattctgcaaaagaaactccctcccaaactcaaagatccagggagtttcactattccttataccattgggagaattcaaggaataaatgcactctgtgacttgggagccagcattaatttgatgcctctgtctgtttttagaagattgcagttgggagaagcaaagccaaccacggtaactctacaattggcggatcgatcactagctcatcctagaggactcattgaggatgtgttagtcaaagttgacaaattcatctttccagttgactttattg

SEQ ID NO: 350165 - DNA, 529 bp, Cannabis indica
atttatggtttaatttttattcttatgtgtgtgttaattctagattcgaattttattgtgtgtgtttttaatatttgagttttagtgttttagtggagttctaatgtttgagtttgtgtttatgagatctgtttgttttttctatagatcttgagaacttgaaatttgatgttgtttctattgattattgggattgagagtttgatttttcatacgggaattaaagtttaccttttcgtttcattaattgaaaaatattagtaaaaagtttatggaatgagaagttttttttttattattattttttttatttaagcgtttatatattacatcagcataacctgggactcgaacccaagacctccaatacacacgcaatccctatggccacttgagctagcctcaagtggttttatggaatgagaagtttgaatatatgaaaatagaattgaaaaatagcacttgaatggagaatcaaagtttattgttaatctccttagaaaaaaaaagtttattgttaatctcctta

SEQ ID NO: 350166 - DNA, 479 bp, Cannabis indica
ttctcataaaccaagaattcagttatataggcacactttatatagaatagatatatatatttttttttatatatattttgcattttattcaaaattaatctatgaataatttgtatattgcaatagagttgatgtatttctttaattgttcaaaagttttttagttgttctttggttgatttttttttagacacactatttttataattttaaaactttaaaaaaatatttttaaaaaattaaatttgtaaaatatatgaaaaatgtgatggtaacattaaaaaaatatatatatatttatgtaaaaaccctataaagaattaacactaataagtcattaacatcaaagtaattaaaaacaatattatgaatccaaaaactcattaattatcttaaggaattggagggtttggttgagaggaatgaaaatatagaaataggaatgagaatgggaataagaataggaatggaataaaatt

SEQ ID NO: 350167 - DNA, 959 bp, Cannabis indica
ataaaattaaacaattcatcatgattaaaaattacaagccagcaaagcataacaatccatgaggatttgggtataaaacagcttgttctcgtgtaatataaaccaaacatataagcatttgccgacatttacatatttacataattaattatatacactttttttttttattgtaaataatatcacattattcacacaacatgctataaaatatataaaaaataaaataagtttaggagagttatatttgtaccctataaaattatgggtactcctaatatatattttttttttttaaaaaaaaagaacttaaattaatttttaaaatcactcttaatatttttaatttttttttcacattattttgtatcaaattcaataattattttaatattatttacatattttttaaagttattaagttaaagttacatgcaagtagtcttagttttgtatgtttaattattaataaattatggttattaattactgtaaaagtttaagtcataagtaatttaattaaataaaaaataattttaaaaaataacaagatattcaatataaataaataaacactacaaaaaattagtatttttagtgataattttttagtcacaacataattttttttgagactaaatgtgacttttagtcacaccaaaatgttacttgtgactaaaacatagtatttaggtggcgtttggttgggaggaatgaaaatataggaataggaattgaaataaaatttaaaatgcataaaaaaattgataaaaaaatcattaaattttttctctgttatattggaatgatctttccttcctttttaaaatggaataatcattccaccaaaatggtaaaaagagcattccattagaatgtcattccaatactttaaaatgcaaccaaataaaggaatggaatgaaaattgtttcctttctattctattccatttcattac

SEQ ID NO: 350168 - DNA, 523 bp, Cannabis indica
gtttgtgttgacttagatggtttcatgatggtttatgtgcctatttgatgattgtatagaaatcgcaatttatgttgtaaaatattttttgtttcattctgaaaatatttttactggaaagtagacaaaaaaattaataaatttaggcttttacagaactcaatttgaatttttttatgaattagttatgattttttgaatttggataaaaatgtttgaaatcgggttgcacacacgcgcgcacacgtggtgattcactcggcatccacgcgttttcagacaagcctgatcgaggaaactcggacaccggctgtctgaaaccgtgtcaagctgagttcccttaaccattgaggctgcgtgcagcccgctgtctcagtcaggcccctacatctgcacgcgcaggggtatgcaatgcataccgctctgcaccaaaactgttttcatcatatcttttgattcaaaaatcgtttttaattgaaacaaaattcaaattttagtagaattttgtgtagaatcttaattt

SEQ ID NO: 350169 - DNA, 534 bp, Cannabis indica
ttgatgattgattgatgtttgcaaactttttacgtaaaataattgaattttcgttctgaaattatttttattagatagtgtggaaaaaattaagcaattcactttttttatagaacttaatttcgattttatttgaattagtcactaatttttgaaaattggaaaaatcataagggtggtgacaccccatacacgcccgcggaagccctattctcgggtgcacgcgtgtttggacatgtgcatgtgtgagatttcttggtcaagagggcttttcatgtttgaattggggccgtgcacgcgcggagaggctgcatgcagcctccctgtgcgtgtttcctcacctgatcaccccctggggcgcacatgcaatgcataccatccgcacctaatacattttttcattttttcatgctttttcatagaattaatttcaaattttttgtgtaattttgtatttagatttttatttttcatatttcaaatctaattatcagatttaaattaattaatttttttaattcatttaagatatta

SEQ ID NO: 350170 - DNA, 573 bp, Cannabis indica
aaatgttaatggcacttgtactatctacaatataggaccaatgagttttgtggaaacccataatcagtaaccatcttattaagccagatcagttgagtacaacagtttctagctgctatatactcagcttctgcagtggaaagggaaattgaattttgttttttgcttaaccatgacacaagattatttcccaagtaaaaacaccctcccgaggtacttttcctatcatctaaactcccagcccaatcagaagtcactatatccaacaatggacatgttggtatctctggaatatcacaagccaaactctgaagttccagataggtatttaaaaatacgcttaacagcagacagatgagactgtttgggattagcttgatatcgagcacataggcctacactaaagcaaatattaggtctactggttgtcaagtaaagaagactacctaccatccctctatatagggtaggatcaacagctaaaaaaacaccagactcgtctctgctaagtttggtagtagtactttaaggggtatgggcatgtttagtgtgatctaagccaaacttctcaag

SEQ ID NO: 350171 - DNA, 955 bp, Cannabis indica
ttaaatcaacacaaaaataatagaattctaacactaaatcgaattctattccaatcacaatactaaaaattacactaaaactatattatttattattatattattttattaaattataaataaacacaaataatgatacatacacaaaaagtttaattataaatatgttatttaaatattaaaaattaataaaaaagatttggtgtagtcaggctcggccctagacataggcgggctaggcccggccctaggcataggcgggctaggcccgtgcctagggcccactctttctaggggcccatttaaaattttaagatctcatcttttaattactatatttatataaaattaacatctaatataactaaaataggctcagcatagtggaagcgtgaaggatgataagatttatagtttgttggttgagggacctgagttcgattccaccgaacttcactttttaatgttaatttttaaaaaataaaattatctaaaaaaactacaagcccatataacttaataactaaactaaaaaaaaaatacataaatattattttaaaaaaacattttataagcttatttatttttttattttctttctttcttatctatttccctacttctcttatcatgtttttcttttcctatttatcttacttcaatcaaaattacattttaatattatgtacaaaaattattaatcaagatataatatttaatttctatataaataataaataatatttttcttgaatattatttgaagtgattttaatttattttttttaaatatcttattataattatggattataatctaatgtaggtattaaatattattttagctataggtaaatatagactagatagtttttctttttatgaatttgatttattgtatgttgaaattgggcaagataaaaatattactatggatgatagagtaaattaaaaa

SEQ ID NO: 350172 - DNA, 744 bp, Cannabis indica
tgttagtaaatgagatcatggtaaaatattcccaatacccatcctattaggtgcgggtacccgtgagtataattgccatccctaatcatgaatacataatcttttgaatatatatataatttatatagatttttctatcatatcataagcacaaatatattgtaaatattaaaaataataagaacataatatatatatatatatatgaaatcaataataaatatataagaataacaacatatacatacatatataatacataaatatataaattaaaaagaaaaagaaaaaagaattttttcaattgtttcagtcaaatgagtagatatataaatatatatttagtgtatcgtaattttgaaataattcaagaactttaacaaaatatttaccttagggcttgggcagaaacttatgctgataacgtgttataaaataatatagaataatataatatagataagaattggaaaagaagaagaagatgaatagaaaaagagaaactgaatgagaatttttcagttgtttattccaaaagagtgaacttatatttatacaaaaatatgactaaaagaatgagaaactaaatcaatgcaataaagaaaagaggagtacttccgtcaacctcctgttacaacctcttagtcaacctctacgcccgaaaatatatgtcggaatatttttttttcaattttttttttcacggggtgttcgttatgcttacaacatcattcctgtaaattt

SEQ ID NO: 350173 - DNA, 500 bp, Cannabis indica
actcatctccaaagtctgaaacttgacgggagtatgtctctcatgtatgttaagataatggctaagcagatttcctataagaagttagtaagaaccaaaactaatgtgagacggcgcataggatgtcaacttatgcgcctaacattaatgctagaccaggttgagccctaacatgtccacatgacatcctcaacttcatggttcatcattttagggtaactaggacctgttcactgaactttttcgaaggatggctcctagaaacgtctttgctggatctcagtgcctacatgggcactcacaaccgtcaactagggtactgacatagtttccaatgcccaagtcatccaccttagtcccaatggctgggccatgctgactttctaacacgaactatgcccgtttcatgtgaaactactaccttggcatcacatgtttgcatgtaaccctcattttttacctcctactgatattttttatgatctgggagactttgaaaa

SEQ ID NO: 350174 - DNA, 742 bp, Cannabis indica
ccaatactctcaacctttctaaacccacactctctctcatatttagttttctttttcctttcaagaacagattcacactaagaagggaaagaagaagatgagtgatcaccattaacacctacacaaaattgctctaaaaaagaaactctagaatattcacgctaatacccacaaaaaccctagaaaataaaatgaccaaccaaacaccagagggaatatcttgacttaaatcactaaacttaaaaatgaaaatgaaaaattaaatagatttcaaaaaatatatagcaatgagtgactactgtgagtctactacgtatagtagggtcgatgtgattcaaaccacacatgcgtctacatctcacgcacacacaaatcacacaaagcgcaccataagcaatgtcgtggcatataatatcaagccttaaaaaatagtattaattaaagtaaaatagtatacataaacgataaaaatttatactaattcaaacaaaaataaatgagtaataaagatgaaattaaatgtttgaaatttaaaatttctaaaaaaaaactgagcataaaaatattcaaaaaaaaaaaaattttacatgaaaaatacaaattgacactttatttacaaaaatacccccataatagtgtggacaacaattatgtctttaataagttttatttactaaaataacacttacacatctccattcatgtcagcccaaaccaccttctagccgtttcccttttgaaa

SEQ ID NO: 350175 - DNA, 513 bp, Cannabis indica
ttcacgaagcgtggtccacctttccttttggcaaggactcatctttggaggagacttagccaacttcaggcttcattgtctccgtgggctgcgtcttctcggacttcgacctctggaatttttccctcagggactgcgagatcgcgatcgcggcactggtgacttacacttgtccttgcctttttccaactctgctagagaattctcaattctcttatggtgtttagccatagcgaacaactcgactagtgattctggtcttcgagcttgtaattccttccaaaaatcggttcttggcaggacacctattattaacatacaaacaagcgaagactcgggagccttctcgacttttgttacttccgcattaaatcgtttaaaatagtcttgtaaagactcaccgggttcttgtttgatgttggccagagtagtatagggaggcctataagtcatcgtggcctgaaaatgcgtgaggaataagtcgacaaaggtttcccatgtcgatattgaggc

SEQ ID NO: 350176 - DNA, 1307 bp, Cannabis indica
aaattatgttcttcacaataaagtcttgaactttctttgatgtaatagttgcgagtggttcggcttccgtccacttattgaagtaatcaaccgctacaactgctgtaaagaccgcttagtttaaatttggaaattaacagataattagtgtttaattatgaaaattatttatggatatttaaataattatttatattgttttatttgaattcaaaatgcatttttatgtcatatagtgaaattttataattttgcattttcggtgcccggcaacatggaacgcggtgtatggctcagtagaatcacaatttagtattttagtatagcggggcagtttatttagacattggaaatgtcgggattggtcgggaatttataatttcccaaaatacccttggtatttcttttatgccattttagtgtgtgatggcaaaatggtcattttgcccatttgtgttttgtcttttgtggaatatgttaagctgaatgtttttggattatttggtgaattatgttggtaaatcaagtcatttttatcatttattcaaaaattagaaaatttggaaaataaggaagttcattctctcaagctctctctctctctctctttcggttttgcttgggctgctagggttgggaatttttctttgccattcaagtatttttagcaattctaagtgtaattcaagctaaggtataagttctagtaaccttcttgatgtgttcttgaattttaaggaaaaatatttgcatgcttggtgattttgatgatggtagctgctgtgtatgtttgttgttattttttgaagtttagatatgtttatttaaggtgatctaagctggttttcttgttagttggtgggatttaaccatgtgtaaagctttagactcaaaacttttgtttttatagttaaatgatgaattagttgttgtgcttgttgtagttgattgttgttgttttcagaggcttaattatgcttatttgagtagattaaaacaggttttgatgcatgttagtgggatttaaccaagcttgagttttgaactcaaagcttggagctttaatggtagtttttgtaattttgcatgaaacttggttttattgcttgggatatgttccttggggtctaaatagcaggtctggagggcttggtatgatttggggttgaattgcatgagttatgaatttttgaccctttcctgcactgaaccggaattccggttcagagatgcctgtaggaactggaattctgattggcttccaggaattttacccagaaccgaaatttcggttgaggaaccggtct

SEQ ID NO: 350177 - DNA, 700 bp, Cannabis indica
acacattctgagggaaccatctttctttttcacgaacacaatcggagctccccagggtgatacactaggtcgggtaaacccaatatcaagcattccctgaagctgtaacttaagctccttgagttctgccttagccattctatatggagctttagaaacaggtttagctccaggtgctaaatcaatcacaatgtcaatttcttgttgaggcgacaatctggcaactcctcaggaaatatgtcaagaaaatccttaacaactctgactacctcatgcccaaatatttcgggtttgctggagtctaccaccactgctaaaagtcctacagatccactgtgtagtagatccctagcccttagcacagatataaatgggatccgagactccgagacccctgcactaatccaacataaacaaatggatcctcacctgctggctgcaaagtcaccattttccgcttacagtctatactggccaaatacttggacaggaaatccatcccatgtatgatgtcaaactcagttaattctagttctataaggtcaacactcaattccttatcctcgatcttaactggcatagacctaatgcgcctatttgagataaccaactccctactaagcattagggttccaaactctctttcaagaatatcacaaggcctacccaaaagatcaattactctcgtagccacatatga

SEQ ID NO: 350178 - DNA, 426 bp, Cannabis indica
ctctctattcctagccaccacttcttctctctcttcttccttgaaatttcgaaatctcttagtgattagagtagtgcccacacacagcaagtgatacttcaatcatagtgtaaaataatttccaacagctgcctgtgacaagtatgtcatcgacatacactaacactaaggtagtgtgagtggatgtgtgtcgtatgaagagagaatgatctgattttgatggaacaaagccaagttggagtagacaatggtgaagcttgtcaaaccaagcacgtggtgcttgttttaaaccatataaagctttatgcaacttgcatacaaggttgggatgagaggtaatctcaaaactcagggattgtagcatgtagacttcttcattcaatgtgccatttaaaaaggcattattgacgtcaagttgtttgattt

SEQ ID NO: 350179 - DNA, 1071 bp, Cannabis indica
aaaaatatctatttaattaacagaatatacgttaaaaataaaagaatattttgttaaatttaacaggtgttgttagtactgtttattttataaatatctaaatattaatattattttatttaacttttctcgtctttacaatataaattatataaaattaatattttaattcgatttcagtttggggttgttaccttactctttaataaatttattatttaatttaaattaattcaaataatattgtttttcaaatttagttaaaataaatttttctttaagttgatattattaaaataatttagtcaacagttgaagattttctaccattaaaaggtggattagtttatgatccaaataataataataagtacaaaatgatattagtattttatcatacatagtagccttaatatactttgacatgtaaattgtgctgcgacctttcattttaacttatatatttgtaacatttaaaaagaaaaatatataacctgcaaactaaatattcgtgtcttgcacgaaacattatctagtatcaatattaatatattaatatatcaatcaatatacatacaatttttaaattgtttgaaaattatttttcttcattttccttaattctctaaattttttaattgataaattaatcaattaaaaataatcatatataatctaaaatatttatatctaaactacttcacgttaaatttttttattctctccttaattatctcacttcaacatctatatatatagtcgcatcctaactaaaatttaaaaaaaaaactataaaaatctcaacttagctacataatcctctaaataatttaaaataaatacaaaaaaattctatcgatcctaacctttatatataaaacctttataatgatacatgattctataatatatatatttttgacctcaaaaagtggccagttgacagcgaggtcgtatgaatctgatgtttgccacatgttatgcaattagaacttgaaagtaaagaacataaagacttttataaaggtgaaattccgtattttaatattcccagtttgattatttaattaa

SEQ ID NO: 350180 - DNA, 639 bp, Cannabis indica
attatttaatcaattaataatttgttaattttcatatctatgtagtcgttacaacaatgttctaaaataaaaaaagtatatatatatatagaataattctatggtacatacccttattttgttctcatagtataggaacatttttttaatcattgatgtgtatgacttttgagtgtgcacattaactaatatagacttacatatacccaataaaaatattaaatttttaaaatagtattgagcctaggaaaaaattcttacacctataacctataacattttatagatatcaaataatatattttaaaataatactaaatcaattaatattaaacatattgtatctttctttatatttgttatattttattttttttaattatataaacactaattaatattataattaattaactataacttaactaacagattttttttctttttaaaataaaaaaaaaatttataacatcatactactaataaattttatatttaataatataaataaaaaatgagatttttttttaaaaaaaaaaaataacaactaataagattaatcaaaaaatacaactattttaaataacagctaacaattaagagattagcattattatttcaaaataagataactatttt

SEQ ID NO: 350181 - DNA, 544 bp, Cannabis indica
attaaagtgaaaatagtataatattctattcttgaaagataggtaatctgggaagattaataaaatattagaaatttgctatgagcatatttgataaaggtaagattatcttagaataattttttttcctgacgaagtgtttgtctaaaagtaatgattgtatgtaccatcggttaggtactttaataagagtggtatgaaaaagatgttgagcacctgttcactagagtaacacaagtgataaaataacacgatggacctaaagagttccaaggaacttataaaataatagcaagagtttgagttgtatactcgcttactaaaaagttacgttgatttaaagcatatggatattaaatttctagtgggagacttagtatttctttgagtatcacctataagacgggtgcatagatttggaaagaatagaagattaagacttagatacatcgatcttttttagatattagagcggataggccaggtggcctatcgattagttttaccacctgctttatgttgagaaagtatgtgtctgctccga

SEQ ID NO: 350182 - DNA, 627 bp, Cannabis indica
tcgttttagaaagttcatatatagggtgttaataaacatacttgtgagtagatctaagatcctggtaaaataattccaacaacgagttataccctaccaatactagtacaacgagtgtatgtagtgcatgtggtacagcggtcgtaccctagttaagaacattcttaagtattcgataagctctgtaaatcgacgtatgaaagtctaattacaggttgtcaatatattgtatattttatgcatatcttactaagtgttgactcaccagtgtgctatatgtgtaggtaaaggaaaaactaaagtggaggagcagtgagtttggagccccgtattgattgtacatatcgcggcagtacagcttggagggttccggcctggaaatattttaagttaacttttgtagtctctatgtaacgtgtaaaaaaatatatttgtgatattatattacaataaaatattttgaaattgggatcctgacttttatcaatatacagacatatatataaataataaatatttaatttttatggagtaaatttatattcaaatatttttcatttttggagctttatatctaatatcatagcaaaattatttttctcttctctcctttattctctcattttt

SEQ ID NO: 350183 - DNA, 607 bp, Cannabis indica
tgacaaaagttgcactttcctttaaaaaactcattcttgtgaccatttgaagatgagcttgcttgtccatttccattaggattggtggctttcttcttatgaaatctttggtcactagtgttgttgagagtgaactttctcttgtgagaattgtttagatttgtcaccatggagatagttcttgctcttccttttttcatgtcctcttcttctttggcaagaatatgagccatctccttaatggtccactgctcctgttgagcattgtagattgatctgatcaaatccaattgagaaggaatgatttccattacaaaccacaccgtgtaaacctcaccaagatctaatcccatgcccttaagctttttgtaacaacccatgagcttgtcgatgtgggctctaatatcacccgtatcaacataattagtgcaatggaacaaagttaagcactcatttttctcattctttgagaacttcttgtacttttccttgatggtagcaagaaattctttacattttcaatctgaggaatactatcacgaatggattcatccatgtgatacctcataagcatcaaacaagaaagattggaatgctcccaatcctc

SEQ ID NO: 350184 - DNA, 1023 bp, Cannabis indica
gtcaatcttattcagatttctgagtatattttttagagcctcttgcataagagttttttctgtccccccattttaatcttatttggcattatttataattgcatagtggtagataattacaaagctggccaaaatatgtttacagccattatccctaaaattgtgggattttattataaatcaagccaaataaatgaggtttttacgcagctgtgaatatcctgcttttattgggcctagatgaacgcgtaattaaagatatacagtaagtcttatctcatagggatgtctcgccgagaatggagccaagatcattttgatagcgagcaattgttcgtcattttaacttctcgagactaatattgtgttaactttgatagctatactctcggaagttgagaggatcttcctcgcatgtataccaccttctagcgagataaacgcctacatgtctgttatcttggctcgtcatactatctatacttagtttgtacatcgtacaatatacgctaagtttttttaatattgtcgctttctctttcacgcagagaggttaaggcctcgtcatgaacgtgtgcgcccacatggtttctcgtcaatatataagttagcagttcgtacgtttctgtctcgcagaaggctattcagccgagttattatttccaacgagttgttccataccaagcatacttgtcgtttgcatgtttggattcttcccagctcgacacgtgtcctcctctgatgtgcttgctgaacttcgacaagatccgaccacaatcatggcaagagtgatcttcgagaacatctgaacttgaaaaagcttgacttccgtcaatgactcggttcaagagaaaaggattcgttccatttgcaaatgagcgagttggagaataagcccagagtgcatcaaatcatgaaacccaggagatgagtggggcacaatgttgttggaaaacttgattcggaggcctcgggatcaaagaaaaagatgattccaaaaggctgcctaatgacaagaaaccc

SEQ ID NO: 350185 - DNA, 1007 bp, Cannabis indica
tttcataaataatcatgattaactgctaatttctaaattaactaagcagactttacaacatcagtatcgtattgagcaccttaaggtgccacatatcaataatagtaccaaaaattagagtacaaaaatcattcataaaaaataataataaaaaaacacaatcgaagctaataaagatatgtacatattaatgacaaaaatgttaaggggcacagtaaggtattaagtaccacaaaatgtagcatatcgttattggtatatttcaatatcagttctttcaaattttaatttaataaaagatttagaaaactggtggtgaaatagtgtatcacatcgatatggtattgatgagtaccttaatgtactacataacaataatcgtacaaaaaattaattataaaaaaaaatatgtagtacaaagatctttcataaaaaattaaaaaaaaaaattactagtcaattattaagtaccacataattatattattgataaccttaagatgctaataataagtacaacaaataatttgtaaaaaataataataaaataaatataaaagataaaaacaaaaaaaaaagtgaaaaacgacaaaaacaaggagttttccattcttaatatatagtatatatatacattaagtgcgaaagacgtgcacaagcatgtaactctcgttaaaatttgtaggtaataagcatatatgttatttttcttaaagtttaaatgattgctaaaaaaattatttttaaacaagaatatagtgtgatatagatttatttactaaaataaagataattaattgtcttgtctaaatgtaagatgatataatttattccactattatatactaataaataataaattaataataattaacaaaaaaattaatgaaaaaaaagaaagtataaaaattaaaaaataaataatattatatgtatgctcgtataatcttgttatacttgaaattcggctggtactttagaaggtaacacgtgtcaatctcagggaa

SEQ ID NO: 350186 - DNA, 1289 bp, Cannabis indica
aaataatcaaattttaaaaataagataaccaattaagcaaaaaaaatgtagatattatcctttctcaggttcaaaatcaactaatatctaaaattaattaattccaaaatgataattagatttgaaatttgaaaaataaaaagttacattcaaaattacacaaaaaattcgaaattaattccatgaaaaatcatgaaaagataaaacaataaaacttttttgcattgggtgcagatggtatgcaatgcataccatccgcgcatgtgggtgtgggcaactggccgagaaacctcgacgcactatgttgcatgcatgatttccatgcgtagaggagtggctttagacaggaagcttgttcaagaaatcttggacactcccttgttcgaatgcgcgtgacatcgagtgtcactcaggtgtgcgcgcgtgcaggggagtgatccccttcctgatatttttccaattttcaaaaatttattactaattcaaagaaaatcgaaattaagttctataaaaaaaaagtgaattgcttaattttttctatactatccaaataaaataattccagatcataaatcaaattattttacgtaaatattttgtaaacatcaagcaatcctcaaataaatacatagataaacatgaatcacatctaaatcacacatacatcattttaaatccatatttcttaaaagtaaatcattaacctggctctgataccagttgttagaaaatattttaccaggatctagaattactaacacggatgtttattaacaccctaaatatgaattttcaaacaatgaaccttaaacacatataaaattgagaaatcttacattgattggagagtattatcaagatctgagcccgatactccttcaggttgttggattcttcacagttttacacactatgattgagtactagacttactataggtgggcatccattcactcactataggatcaaaatttgatgaagaataatgaaagagattcgaaaaagaggaaggaagaagaaggtctcaatgactctacttgtctgagagaatgtaaactaggttattagagatattagataatgagatcatcctattccttgtatactatttcacttagggttaggattaaattatatggaataaaaaatgataaaataatagaaaaaataggacttagtggccggccatatagatgggtcgcactagttataattttgctattttttcaaccatttatcttttatttcacaagtgccatttttctaattttaatcctataaatgttaaa

SEQ ID NO: 350187 - DNA, 1286 bp, Cannabis indica
cttaatatatagtatatatatacattaagtgcgaaagacgtgcacaagcatgtaactctcgttaaaatttgtaggtaataagcatatatgttatttttcttaaagtttaaatgattgctaaaaaaattatttttaaacaagaatatagtgtgatatagatttatttactaaaataaagataattaattgtcttgtctaaatgtaagatgatataatttattccactattatatactaataaataataaattaataataattaacaaaaaattatgaaaaaaaagaagtataaaaattaaaaaaataataatattatatgtatgctcgtataatcttgttatacttgaaattcggctggtactttagaaggtaacacgtgtcaatctcagggaatatgaatcaacgaatatattgataattatatcaataaatattaaatcgaataactcattaaatgtaaaatcaatatagtatatttataactcgcagactgcacagtctttagcgagacaagcatgtacgaactattgattcacgtattgacgagaaaccatttcgcgccagaaggcataatctcaaggaagagataaataacgcatagtgaggcatctacctcgcaatatttaaagaggcgctgacgagacgaattgactatcagaacacttagcgtgtaatatacattataacaactaagtgaagtaacttaaaggacatgattgtccagtctggaaggccttatggtcaaagagcagttcttaagtttgagcaatacacttgtgctcatgccattgctggaaagcttataaataaaccaagttgttcatgtactaagcgagatacctcagcgacatacctttggcagcgtgtcctaatccacgtcagtgttgacttccttgaaaacggtttaaatcacaactgtgtgattttcaaataataactgcatttatttacgtggagcataattaaagtccgcaatttcgggaaatattattatgggatttgaacttaaatgtaattaactgccgacctatatcactataaataggggaagattatacaaaaaaggggacgaacattcttagagtgaaaaagaaatacactgattgtgaagaacctaaaactgtatcagaaaaatctgaataagattgactcgtggactatgcagagttaactgcaaaaccacgtaaaaacctggtgttatttttgcttctattatttttcttagatttctataatttctgtgccaaatctattacgaaaataggctcataattattaacgaaaat

SEQ ID NO: 350188 - DNA, 557 bp, Cannabis indica
ttgttcaaattctggtgtaaggctttaaagttctgagttttttcttgaagctttgaacttcaagcttgagcatatgtgtgtaaccttggtagttgatgtttgttttatttttgtttgttgttttgatttttgagcttggtgtgatgctcaaatgaataacaatgttagattggtttggttttagttgaaaaattggaatttgtatggttttgtttgagttttgggtatgttttggttgaaattcgaatatatgaaaaagttggcatttttagaccttaaaactgggatttttgggttttcagaacccagtggccgcggccgaatttatggttgccgcggccaaaacctagcagagagccatcccattttctcgattttattttggccataacttttgactcgggactccgttgtagacgttctttatatcattagaaagcacgtttcgagctctatatgttaatttgtaaatagaattctaattatgtgataactaaaagttaatttttggattaaccctatttgtgaaatctcgggaatgtttgactaggactacc

SEQ ID NO: 350189 - DNA, 777 bp, Cannabis indica
atctccacatacttcggataccaggtaagacaatagttagcacgtagagttaagcgcggtggtgctcatgtttaatattataattgtgattaattgagaaccgagattagggttattaccttaaagtgagcagttgtttggcctagggttattaccctagttatttaaatgatttgaaatgctataccatgatatatatgtcgaagtaaataattatgcatttaaggcataatttggttggactcagtaattagaagcgagaagaactgttctaggacaatattgtaattagacgtgtgagcgtaacacgtgggtctatgtcacatagacataaataggcgtgtgagcgtaacatgcaggtctatgtcaaatagacaataagtgtaatgacattaatatatatgtgatagttactattgtgtatgttgatatttatactgttttactgggcttgactcacgggtgctctactgtgcaggaaaggataaatctgcctataatcagtcatgagttcgagagcttaacgagagattgtacatgtgcgggccatctagaccaagcggggtgggtctagtagcgagtgtattttaaaatcttttattttaccgcttaggtcagcatgtaaaactaactgtaatattttgcgaaaagttttgcgggatcccgaaacatgttgtcttttagattgtaaactttaaattattacaaattatattttttattccgttgtaaccaaagcttaaaactttcccgctcttactgttggaaatattttac

SEQ ID NO: 350190 - DNA, 586 bp, Cannabis indica
aaaaaatttgcctgatagtattttgtaaaaaaggacaaaaattagtataacatgtaaatttcccaattttttatgcctaaagaagttgcttgtgaaattgtcacatgggatgggctgagtttgtatctataaactactttgttgaaattgctgggagaatggtgggtaatactatttcatcaagagatataatgatagagaagatacttaattggagaaacaacatagtatgttttgtcgatatggaaaatttataaagcttgttacatagttctaaagtcaaatgtaatttcaataagagatatattatgtcaatatttgaatttcactttgtccggctacaatataatcatgctatttctctaatttcaaagtttatgcatacatgttctgaataaatattattttagactatgtgttttgcaaaagttattaattgcactgttttgtttataataaaattgatcatatatttttcaagatagtacaaataggatcttgaactaattttttatcaaaataaaatttaataataatctgatttaaaagtgttatgacaaaactttttacattttctgtatctgtt

SEQ ID NO: 350191 - DNA, 609 bp, Cannabis indica
tttttttttttttgtagtaatgaataattttattgaaatttgaaaataatcaaaatttcatacaaaaatacattttattaggaattattatatggaaaatataaattaacactttatttataaaaatatttttatgaggtgaggacaatacttatactttttatgtgcttttaatcactaaaatacttcttacactattacttacacaatcagacgatggttgcttggtggttggttgaaggttgcatcagacgaaggtttcaatttgttagcaaaatgcttatgcaactattatgaaacatgaaaaatcataatagtgtttccacgtacgtaattctatctacatattacttcatgatttaatatgaacaaatttaccttaaaaattcggaaaacaacgaaaatatactaggataaacatttcactatagtattaacgtaatttttttttagattatacttgagttagctggtttgggaactttagttcaactttttgaaatctgcatttcatggatctgaaaaattgatgtcaaaacattatttttatgcaaattaaattagattttcagttaaattttagtttcgtagtagtttttctacattttt

SEQ ID NO: 350192 - DNA, 705 bp, Cannabis indica
tccttttatagtgtttcaactagggcttagagttgaattatatggattaaaagaaataaaatatttggcaaaaatcactctaaggctgaccatattatgagccaatctctagttacaattttgccacttttttcaaccacttattcttctttcaataataccatatttctaatttcaatcctataaatgccaaaactatttatttaataattataattaattataaaataaaatttccatttatattatttattaatttgaccatacaaagtctcttaattaataaattgaccccaaaatctcttttcttcacaattaagccattgcttagtgaaaattcataaacaagacatagtctaattttagaattataattgtttaattaacatcaaataaccgagtctacaagcagtattatctcaactagttaggggaccatgggcctatataaccaagctttcaataagtagatttagaatttacaaagtaaattccctaacttattaattctgccttgcgccactatagacactactacaaaaattggtttcaatgacccatgttgaataactctaaaaccatttagtgacacttcaccgtgcgttactaacgtgggtgactggaaaagcagtatttagtgacacttcaggtgtgtcactaaatccttttagattcattccgcgcgcgtcactataaaacttttag

SEQ ID NO: 350193 - DNA, 703 bp, Cannabis indica
tttatggagataatcttgttgcttggcaatgcaaaaagtaacacaccatatcaaggtcaagcactgaagccgagtttagaagtcttgctagtaaagttgatgaacttacttggattcattctttgttcactgaactgcgaatcaagactatgcaaccccctgtgatatggtatgataatctcagcaccgttcttctcacagcaaatccaattcttcatgcaagaactaagcacattgaacttgatctatattttgtgtgtgaggagatacttcagagactggttcaagttaaacatgtaccagctcaagaccaacttgttgatggtcttacaaaggcaatctccactaatcggctctctctatttcgatccaagcttaccattgaagacatcaaagattctcaaaatgattccaattgtaactttcatgggttgtgttaggagtattagttagttaattcggttaccatgtgttagctgattctgttagtggttcagtagtggttgtaactaatttttgttactactaactaattctcccttgtgtaatcattggctatataatgccaatattcattgattcaataataagatttctctttgttctacaatcttctctttcaatgcctttccttctctttctttttctttctcttcatctctgtttttctctatttttgattgttcttgtttgcttgattgtt

SEQ ID NO: 350194 - DNA, 874 bp, Cannabis indica
caatgtacaaggcccgatatatcatttgcggtgagtaaacttagtaggtttactagtaatccaagtgtggatcattggaaggcaatagggagagttttgggttatctaaagaaaaccaaaaacctatgccttcactactccaaatttccttcaattttagaaggatatactgatgcaagttggatagccaaccttggggataatttgtccacaactggttgggtatttaccctaggtggaggggcggtttcttgggggtccaagaaacaaacttgcatttctcattccacaatggaagcggagtttatagctctagctgccactgggaaagaggccgaatggttaagagatctcttaattgagattccaattattaaagaggatgtatctacaatatcgatacattgtgatagccaagcaacattggctagagcatatagtggagtatataatgggaagtctagacatattagtctaagacatggatatgtaagtgagttgattcaaagaggagtcatctcaatatcctatgtgagatcaagtgaaaacttggcggatccgtttacgaagccactaactagagatttagtggaaaagacttctaaagggatgggactaaaactccctaaaccggttcacaattgagggtaacctatcttaatactagtaactttactagtgttaggttcaataggtaagaacaaatcaatgtgtgaacaaatgtgataagtactatatgtcccatcctacaaagttgtgaagtacttagtgagttaccaatttgagggttagacttttaaagtctttaatagaattcagtttggaaaacaagtattttggtaacaaatactgtaagaattctacctatattgac

SEQ ID NO: 350195 - DNA, 615 bp, Cannabis indica
agttcgacaaaggtaccattgaaattccggttgattctgaggcggctcattagtatcctatttctacttgttgtatgtccattttatttgagcgatgtcgtgtcttatttatgatgggaaccttgtcgttttttggacttttcttttatgtgtaatgctctatgtcgaactcttttggtgtgggtttatgctctttggactgaactttcttgatgtaggactttgctctatgtattgagctttcttgatgtgtattagatctctttgatgcacaactttattctatatgttgagcttgtgtattgttgtttcttgatgtaggattatgagtatcattcactaaattttcattggatgagatgttttattaaaatggagaatttgatttgatttgatttgatttgatttttttacttttgtatctataaggcagtcatgtggcatcctgtactagctacgattcttatatctgtcctagaattgtcacgtagcaaagagtgtcactctaggactttcaatctgtgttggggttcaaacatccttcataggatttaaggatccgtccttgaaatgtcacgtagaaagagtgtcactctaggattttccatctgtaaa

SEQ ID NO: 350196 - DNA, 648 bp, Cannabis indica
tgcatactgcctaaaacggaaagtggtaaatagatgatcacacaatcagtagagtatttactctcaatacttactacaccatgagtcgagcttgtctctgacgatgaatgtacatgtttggccggtctacatgaagtttaaaaaccttggcgctctgataccaaattataacgccctaaataattaggcacgctacccatgatatttacgaaatcctaatcgcctaattgggattactaataagattggtgcgcaaattaaactttaattataaacggaattaaaataaaactggtaataatttaaactttacaatctaaaagttacagaagttgggatcccaaaaacatttacaaaatattattacaagtccttttctttcagctggcctaagcggcaaaacagagtctaaaaaaatacaacactggtagaccccaacccgcttggtctgatatggctcggacatgtacattcttcgtccagctcctgcactcatggctgatcagcaatagtcttaccctttcctgcacagtagagcacccgtgagccaagcctagcaagacagtatagaacatatcaacaatatgctcatcatataatacaaacaacaaatgcaattcaaatctgtatgtgtgacacagacctgca

SEQ ID NO: 350197 - DNA, 1002 bp, Cannabis indica
cttttcttatagctcttacaacaatatctctgaatatgaattcttagataatatttcttaggtagaatcttttgaccctttgcccagtgaatattcatcactatttatagggctatgaacttggagaggaaatatttcccttctcgttacagtagatataagcacaaaagattgcatgataaatacagaatacactgatcgtgggatttggacagcttgtcatatctctgcaatctgatccccaagttatagggatttctttgatgactcacgatgctaaaattgaattcactaagtgttggttgctctgcgcggattgttgatcgctttgcttcaggcatgcctatgaggcatcctgttcggactgtactctcagagcggatactcgaagttgattccacgtgtcaccatcatgtgatgccacgtcagagtgcaaaaattgggataacactaatttaatatttaagaaaaataatctaatttaagttggtccaaaattaattgaaaaattaattttcaacttaaatatattttctaattaattaaatttcatgaaatagaaacaaacaattaagtatcttgaataaaatcaacttaatttttaattctatttaagttctaagaaaaatattctaatttaagttggtctaaaattaataaataaattaattttcaacttcaatatattttgctacttaattaaatattagaaaatataaattagttactagaaatttctatctagaatattttattaaactaagtatatttattctaaattaaatttaaaataatctaatgaaaaactaattccatttatttcaaaattaataatgttgttaattcaattttaattaggttgaactagtataattagcctaatacaattatttaaataaggaaaatgggccttcgcaattgggattgttcatgtgagggagggctgggttcagtatgtcgtactgttaggctatttttagcctatgttttggatccaattta

SEQ ID NO: 350198 - DNA, 642 bp, Cannabis indica
tattcaaatctgattttttttttaattatagaaagggttataacccaacccaacccaaaccaaaccaacccaacccgcaaaaagaaaaatgggttgggttataaaaaaatttaagatgtgaatgggttaaaaatctctaggccgatgtcattgggtttggtcattaaaattagggctgagcatcggtcggtttggtcgatttttttctatataaaaatccaaaattcggttttcgatttggattggtgcaatccgaaaaccgaccgaccaatccagaacatatcttaaaactgaccgttttgaacctcggtttggtcggtttaaaccgcccaaaccgaacttttttaaaaaaaaaataaatccaatttattctataaatacattattttacattttacaactacaaacatataaattaattgttaaaaactaattatcttattcttttaactttaatattaataaagaaaaataatatattattttatattattagtaactataatacatgaaaaaaaaacgtaataaattaatatatatatatatgtataacggtcggtttattaacaaaaaaaaaaatgaccgttcaatggcggtttaaaccgttagcagtttttttggttttcggtttcgtcggtttcg

SEQ ID NO: 350199 - DNA, 519 bp, Cannabis indica
agacaaaaaaatgcaactcgttctagtaccacgttattggaatggagaacatttaagaaaatactaccaataaagtaccaggtcggatgaccaaattaagtactgaatgaacatttacttttaagtgaatggcctgctgggcggactacgctcaaaggtttcgataaaagaaaaaaagtactcaggtcaggtgaccaccatttaacgtacattttcttatttttgcaatttgttttgtttcatgttaagctaaaagatgagattggatcatatagctgtgatgtaagttactacggtaacaaatacactaaaatcaataaagatagttattttaaaattcaaattgagccgaaattatcagcatgtctctaatttaccatccagtgtgtacaaaaggttttgtcaaaccaaaaacaccgaacagataaacaatatacttgtaaaagacaagtgaccaatagtcatatgtctgctcgatcacatggggggaacctatacttgtacaaaacatttggtaaa

SEQ ID NO: 350200 - DNA, 614 bp, Cannabis indica
caagtttaaagaccgcttcgtcggtcatgatgtcttaggaaaggccttatggccgaaaaaaacatataaaaaataaaatgataaaagaagaagtatttaaacagctagagtcccaggctcttggttcgggtcttctgggtcggtaggagctgggggatctgttgtttgaacaagaggaatatcagcattttggccggaggtagaagcagccgccttagtttcactataagccacttgggaagcgcagaactcgaggtacatgtctttggcttcacccaagtagtcaaagtttgcctgaggattagccctcgaaaagtcatagaagagctcgagaccagctgtctacaaggcatgaactttctctcccggccttgtcacctcagatgtaagctcctcctccttagacttcttctcctcttccagccgacgaaggaccgctcgaagggatgttctttcatcttgaaggctgtttacttcggcagataaggtctcgatgatctcttcaattcggtcagaagcctcaagatccgtagtcaactcagttattttcttgtgggccgtaaaaagcttcttgttgacttcacccaacttcatccgaacagctccaagttcca

SEQ ID NO: 350201 - DNA, 506 bp, Cannabis indica
aaaatttcgaatagtttgccgtaccgaaaacaaaatttttgatattccaatttactacgtgcgttcaaaaaacttcaaacgtattatgttgtaagcataacgaacactttcgtgaaaaaaaaaatgaaaaaaaatattccgacatatgtttccgggtgacaatctccctcgcccactcttggacttgatcaaagaacatgtgccactattgcacttgaatacctcctctaacatgaactcgttcgagtccatcacaatgtccctccagtaagctaagtagtccttgcaacccttactctgaatctaacacatcctctgatggtagttcaatcgccaactatccaatgcataatccttttaacaaggactaagtatggtgcacccctcggcaggcccggccctgggcataggcgggctaggcctgtgcctagggcccacctatctcaggggcccaaaaaaaatatttaccttttaaaattataccatttttttactgattttgaaaa

SEQ ID NO: 350202 - DNA, 556 bp, Cannabis indica
aaataataatttacaattcaatcggggatatcaccctcttggaaacatgatcaaaattaaaattagaaaaatgaccagaattaaaattagacaagactaaaacaattaaaaacatgtcacagtgacaagtagggatgttcattgggccacattcaatggttttaggcctatccagatccgatccaattatatattggatgttaaattttaccatctgatccgatataattaatttcattcatccaatcgatccaacatccattagatgttagattggatcggttgttctatccatcgaatatattttatatatatttattggtttaatttgagtttatccaatattttagatctagtatttttttttatcagatcgaattcatccaatattataggtccagtatgtattggattgaactggatccatccaatccaagaaaaaaagagtaaaaatttaatgctatttttttatatacacatatagattttacatataacaatataaaatctaattattcatccaaaataaataaaatactaattaattcgattgaat

SEQ ID NO: 350203 - DNA, 548 bp, Cannabis indica
acgatataaagaactcccaaatcggagttctgaatcaaaagttacgaattttcgaaaatcactcaacaagattaagcattcttttcaccccacatgcaagacccaaaaatcaaaataatctaagcatgtttctgccacaatattcagcaaaggaaacataaattaaaaccaagaaaactacctcaaacacttgcacaattaagcctcaagcctcccaacacctttccttcaaccaacaaatttcaaatcaactaattcttcacaaatttaagctttgaaaatggaaaggggtgaaagagagggagagggttcggtgagagagagagaatatcagaaaaatgcaattcattttctcttaaaatccaataaattcaatttaactcaataatggtcaaatgaccattttgcccttagggctataaaacatacatattcaatttcaagggcataaatgctatttcacactcaaatattgccaaataaattttagattatcacatgtcaaataaaatgccaaataatcaattcaatttacatttcgggcccga

SEQ ID NO: 350204 - DNA, 599 bp, Cannabis indica
tattaaataaataattttggcatttaagtggttaaattggaaaaatgacatttttgagaaaataaggaaaattgttgaaaaaaggaaaaattccaaagtggggcccacatcctatggccggcaacttataagggaatttcaattcaattttttcaatattttaatgcctaataaattctaacctaaacataggtggttgcctataaatagatagtgatggctcacacttaaagatgatgaaattcaagccttcagtcaaatattcctgagccatctttccttctgtttcgaaccactcttattctctttctgtcttcatatttttatgccctttagtgatagagtaagttcccacacacatcaagtggtactgaatcatagtgtgtaaggctgtgaggaatccagtttcaagaaaaggagattcagactcagatcttggtgataccctgctttagacaggatacaagggttagagatctgagtggaaggagccattattattttgttgcacccactgtaaggtttctaaaactttatatgtgtttatttacattgttttagagattcatatttaggatgttaaataacatacatcgtag

SEQ ID NO: 350205 - DNA, 690 bp, Cannabis indica
atagagagagatacattgggggtgagaatttcattccatttcattgctgaaagtaaacttaattaatacagtagaacctctatttaagaatactctattaaagaataatttctaatttgttataaaaaaaaatcaagtcctaatttaggccaattataaataagaataacctctaaattgtaattaattatatattttttaagttccgtattaacaaagtatacatctatataagaataattacatcttaataaaatatatacatgtattttgtaaatttatttatgtaaaattaataattttatttttaaattataatacatgtatgaaattatatttactctaaaatatttctattatgatatagtattaatgattatttattgttattattgttacattgattttttttggtttttttttttttagtgtaaccttctaattataatataatttatttagtgtcaagtgtattcttagatagaagttatactgtaataatatatttcaattccattttattaatacactccctaataatatattttatctttggtagttgctttcttaagtcttttaatcgaaagtagcttttgcagcatgcatgcactacacgtggaaaaatctaaagcaatggaaagaaacatatgattcagagttattatactaatatatatatatatagagaga

SEQ ID NO: 350206 - DNA, 701 bp, Cannabis indica
agatcctggtaaaataaattccaacacctaattggggaattacacacagggcgaggaggagccaagtacgtagtggtagccgttgacttcttcactaaatggactgaggatgagcctcttgtttccataacctgctagaaaatcctcgactttgttgtcaagaacattgtctgtaggtttagaatttccatgaagatagtatctgataacagaatcaagtttgatggcgacatgctcactgagttttgcgaaaggaacaaaataattaagagcttctcgttagtatctagacctgaggcgaatggacaagtggaagttgttaataaaaccttcaaggatactatcaagaagaagttagatgctgccaaaggcaggtgggtcgatgagctacacaaagtactttgggctcacataactaccgagaagatagcaacgggacacactcacttctcactagcatttggcttggaagcaatggtacctattgaagtgaacatatcgactcacagacaagagttttataatcaagaagaaaactcagaactcctaaagttatctttggatctgcttgatggaaaacaaactgagtcgcaagtcactaatgcagcgtatcaacaccgagttacaagatactgttgggttttgtgcactaaataaaatacatttcaatataatcagatttacttattaataaagatgag

SEQ ID NO: 350207 - DNA, 629 bp, Cannabis indica
aatattcgagctcaaaaaaatattgacttcttcttccatggcccctgaggttcatttgtaacgtcacttttctcacgccgaccttttcttttctttgaagtcatttttcgctttccaaggtggaattgaactttattcaacttctcaaatacttgttccccttgcagaggtgaaggtggcaattcaaattcttgcttaccgttgaatgcttttttccaagtccgaaacacatgttcctttggtaaaaactttcgatgtcccatataacacattttcttagagtgtttcaaatacatagagcatgttttctcctcacaaataggacatgccttgtcccctttcacactgtatccagaaagatttccgaaagctggaaaatcattaatggtccacagtaatatggccttaagattgaattcttctttcctaaaggcatcgtatgcaggaacaccctcataccacaattgactcaaatcatcaactagaggggctaaatacacatcaatgtcattaccaggttgtgaagggcctgatatcaacagtgtaagcatagtgaattttcgcttcattaccaaccaaggcggcaagttatacatcacaagcaaaactggccagcaactatacttact

SEQ ID NO: 350208 - DNA, 1011 bp, Cannabis indica
aaaaaaaaaaaaattgtagtatttatttatttatttttgtggctcctagaataaatgtaaaagattgtctattttctttcaaaaatcccgaaaagctagtttgtggtactcttttggtggtttgtccaaataatttacaacctatcttcgtttcaatatttattcaaatgtttgtcctaaattgatctatccatttcgagtgctcactttttaatttccaactccatgagtaaaattcttagccgtgaataaatattttcaaatatctctgaggctagtggtgttgagactgctacttggtacattttttaaaagcatttatgtgctatggtttgtggtaagaaggtttaagtttggagaacacactcacaactttagatttattaaaagtaatattgtatagttcttattggcttgttagtaacgtttatttgaatatttgtgtcatttttaaaaatattgacgtgaaaatatcatcttcacattcttttcgtttgcttgaattgctagagactagcaataagctagttgggggttaaatgctctaattaatacattttaagcctttatttgtgcacataaaattaatataaattaaatattccttatttttaatggtgaatttattttaattggaaatatttaatttaatttaattttgtgttattttttcagatttgagtaaagtgttacaaataaaaattgggtttcaaagccaattgaaagttgaatggccagcgtattacatatatatatatatgatatgtgtattgtaataccctaaagttattaatggattagcaaaaccctaactagttaattatgtagtattgtggaattatattattatataatttaatatatgagaatttatatgatttatgacatgttaagaccgcgttggtgagctaggggtgttttagtagttttgacacgagaagggtaatatcgtgaaattaaattatttacgtgcttatagaactatattattatatagtatgcctgtgttgt

SEQ ID NO: 350209 - DNA, 500 bp, Cannabis indica
taataatttctgaataagattttgtgttaaaccttgcttgatttctatttattgttatttgtagtatccaacatgataatgaccaatcccatgttgtcactattgactgataatattcttaatggatctaacttttcaaaatggaaagagaacattaacattgcgctcattggtgaaaataccctgtttattcgtagacaaaaatcacggtaccttgtcgtagtgggagtttttcaaagaactcaccatgttatgacttggaagacacttgtgataaaaatccattgttagtttaaacaagtaatggcttgtcagaataagaaactaggaagaaatgccaagaaaactatggtatagaccattcatatggaacaaccaaaagttttctattacaaggacaagaaaggaaattttgaaaataagtatattcagtggacttaacaaaacttcctgttcctagtattataggtttggattatctaaacctatggcttgtggta

SEQ ID NO: 350210 - DNA, 745 bp, Cannabis indica
aatatttcagaatatgcttaatccaatgttcctctcctgggtttttctaatacctgctcacaattcctactgcatagcaaatgtaaggtctaatgcataacattgcatatattagactcccaactgctgaagcgcaaggaacccttctcacgtcctctacctcttggggatcattaagagactattccttagacagacggataccaaatctaggcatcactacccttttggtatttgtcattgagaatctctctaaaaccttatcaatgtaagctgtttgagagagagcacgggatctgttcttccagtttctgataatctgaataccaagaacataaatagcttcacccaaatctttcatttcaaattgagtgtcaagccactccttgatgtcagtcattttcttgatattgctaccaataatcaaaatgccatcaacataaaggaccaagaatactaccacttgattatccttgagttggtaaacacaaggttcatcattgttttggtgaaagccgtaggtcttgattatttcatcaaaccttttattccaagagcgagaagcttgcttaagtccataaatcgacctattgagtttgcaaactttctcttcctaccctggaagaacatagccttttggttgctccatatagatggtttcttcaagaattccgttaaggaaagctatcttgacatccatttgccaaatttcataatcaaaagcggcagctatggagagaagaat

SEQ ID NO: 350211 - DNA, 1003 bp, Cannabis indica
ccccaaataacataaaaacgagaaaatctagggttcctaaaaatttcccaaccggtagaccggttctgcaatcggaattccggttctgggaatgcctgaaccccatccggaattccggatgcacaaccggaattccggttccttggaggaaacaatcaaaaattcataactctttcaaatcaaatccaattcacacaaaaccttccagacctgttctatataccccaaagaacaataccaaagcaacaaaacagcccagaacacacagatgctaacaatgccatgtgagctccaagctttgagttcaaaactcaaacttggctaaagctcacttacaagcatcaaaactagaatcaaactacataatcatgcatagtaaagctgcagaaaacattctctaactcatgcaacaaccacagcaaccaatttcgaaatttctctttgaaaactataattttgagctaaaaatcccacaactttaaacaacacaacaatcatgcatcacaagcagcttaattctactcaaataaacaagattaaacctctctaaacatcatcaaaactaacagcaacaagacaaccaaatcaagcatgcaaaacatcattttcttcccaaaatttccaagaaacttaaaagaaagttaaagaaatcataccaacaacttaggaacactaaatcttgcaaaaagaagcttgaatcaccaaaaaaaacctccacttccttgctggtcaaggtgggccgaaaggagagagagagagcttgagattttctaattttctaagttttgaaatttttaaataaatgagagtgaaatgcaaaatataactctttatttcagccaacaattaacatagtaaatcacataatttcaccatataaagtccactaaaggataaaataacaatggggcaaaatgaccattttgtctctccacactaaaataacatacaagggtactaaagtgtatttttgggaaattcaaaattcccgaccactctcgac

SEQ ID NO: 350212 - DNA, 603 bp, Cannabis indica
tgcacaagagttattgatttttactaacaacttcaaattacacacacaaacataaaacactgaaactttcacaaattaagagacaaacataacttagatgacacacaattacataaaaaaaatgcttaaagtgatatcaaataactctttactcaagagttatcatacttttctcattgtggtatcaaatatagtgaatattgttggagcatcatctaagcgtcgcaatattcttcgagaaaaataagctaccaaagtcattgaagcattaaaaagtgaacaactttcaagtagaaaaggcctatcaagaaaatgggattatacgtccatgtgacacacgttggggatcacattttcatactttggtaagccttactatcatgttctcatctattattgatgtggttgaggagattgcagatgatagtttgaatagtgaccaaaagtatggagcatctattatgttacaagtggtgcaaacatatgattttgtgtttagcttgcatttggtgaagaatatacttggaattacaaataagttgtcacaagtcttacaaagaggtgatcaagatattgttgttaggtccttttttggcaatttag

SEQ ID NO: 350213 - DNA, 1458 bp, Cannabis indica
aaatttaaattttatgttgaaataaattagtaggatcataatcccacttattacctgattaactcataatgtaaatataaaccctaattatttaccattagacttattgagatattacattaaaaattgtactttagatggtggtcatccgacctgagtactttgtaattttatccgaaccattgggcgtggtccgcccagaagggcattcacttaaaagtaaatgttcttttgtttagtacttgatatggtcatccgacctggtacttttatttgtagtattttcttaaatgttccccattccaatatcttggtaccagaacaagttgcatttatttatcatacttacccaatttgtatgctcctgattcgagaactttgaccacctgatatggtccttcccagttaggttcgaggaaacgtgccgtactgtctttggtgtttagaaatactcttcttaggaccatatctcctaccaagaatttctaagccttcacttgtttgttgaaatacaaagctacttttggctgaggggccatcaactttaagtttgttgtggttcgcctctctttgtttcatcaagtgattcggcaaggagtacgtgatttgcttcttagctatatgtcaatcttttatggaatggtggctcgagttctatgggaagcattgattctatccatatgccatggcaaatggagtctgtccggttgccattttctcagttattcggtatgaccataggacttcaagaacttcctccagccagtttcctttaacatcctcaagccttttcattagtgtatctttcaacgtcttgttgactgcttcaacttgaccattttcttggggatgttccactgcggagaaacttttgattataccatggttcgcacagaaataagtaaaggactggctgtcaaactgtttgccattgtctgaaactattttgtacggaaataatccaaaccggtagattatgttcttcacaacgcagtcttgaacttttttggacgtgatggttgctaggggcttgacttctgtccacttggtgaagtaataaaccgcaaccattgcgtattttacgcctcctttgcccttgggcaattgtctgatcaagtcaattccccaaatggcaaaagtccatggactttgcatctgagttaacttgttgggcggtgctagaggtatctttgaaaatctatggcatttatcacattttttaacgtaggcctttgaatcctcggtcattgtcagctagaaataaccttgccttagaattttcttagataaactccgcccagcggcgtggtttccacaaaatccatcgtgcacttcagacaaaagtcatacagcttcttcttgggtaacacatctgagcaatggcatggagaatactcgtatgtacataattccctctactatgatgtaccgtacaaccttcctcctcatctttcaagc

SEQ ID NO: 350214 - DNA, 646 bp, Cannabis indica
ggaatttcgggcttcttttcttccacggccaggataacttcctcttgttcgtgctgtgcttttcgggcatacctctcccgagctttgcccgaatctccagcaatatgcggacctccaacgataacttgcagatgtccatctaccagtggaggtagtaagtcttggttattgtagtttccctaaccctgatcggtcttgacatacttttgcaggtgtgtgttgtttttccatatcaagaattcaatttcccgcttcaagttgttgcattcattagtgtcgtggccgtagtctctgtggaatcgacaaaactttgtcatgtctctcttgctgacatctttcttcatgggcccgggcttcttatatggggcgagcgactgagttgccatgtaaacactttctatgtcttccatcaagatagtgtatgcagtgtactttgcttgattctcctggggagcttgttcagattttccggcaaactttcccttcttcacattccctttcctgtggttgttgttggaacgtttgccacttgaacttgaattatttgggtaatgggcgagttgggcggatgctccagtagaaggagccttcgacttgccaggcttttgctcaccttctgctcgttgaatggcttctttgagcttga

SEQ ID NO: 350215 - DNA, 611 bp, Cannabis indica
aagacccaggacgcgaacccacacccgaagcctgatctggacctagactgaaatccggacccaaacaaaaactcagaccaggactcgaactccgacccgaactaaaaccgaaactcgaactcagaatcgcaaatggaactagaactgaactaggactaggacaaggacaaggacctaaaccgaaacctaaacccagatcaaaacccacactgagacctaaacccaaacctagacaaggactcgaacccgaacctagacagggacccaaacacactcaatcaccgggaactggacccagaatcaggatagggacctagggaaaagaactaggaccgggacctagtacacgacccagactcgaacttgaacctaggaccccgctcgtgactcggcaccagaaatggaactaaactgagacccgagattgggatccggatctggactgagggctgtgacaaaacccgttgtcggtgtcttgatttggggcccagaccttgacctgaaccctgacaaggaccctaacccacacacagacttgaactgttgggttttatgccctaaataaaactcatttcaatataatcagatttgtttattaatatagatcagaa

SEQ ID NO: 350216 - DNA, 789 bp, Cannabis indica
tataggaagtattatatatatatatatataaatatttatagtttttttttaaggaagaagatcaaagactaaagacaaaagagctaagactaagatcttcaatgaaaggaacttaaatggttccaaattaactcttcgttcgttccaagggctgctcgggcgaggccgtgggctgttgtgtttgaagaccgtgggatgtagtggaccgaagcacctggaaaagaagacaaagaggagactatcatagaaacaagacccgagagggctgaacgatctggagagagcttgtgaaggggatgcaccgaattctgccagtcggaggcaataacagcaataggaaaacagactgcttgacaccaaagtaacgtccagttgagagcttcagcttcagtaaaaatcggaggaaggcctgaatttgcaggagccataagggtggcaatgactttaccatgacaatcggagacagcagctccgtacccatgcttattggaagaaggagaaagggctgcatccacaataagctgaaacattgtacttgggacttgtagtcttgcatgaggctgatggaaactggaagacgatgtagaaatgcggttctgagcatccctgtattcctgtaaataacaactgacagaattctccaatctaaaatcagtgatactgttagaatggaatatggctctgtttctgttattccaagtggcccaaatcaaacccaaaaaagtagtaaattgatctttatcaaaacaatcaaaacctctgagcaaaaattccttaatatcacaattt

SEQ ID NO: 350217 - DNA, 510 bp, Cannabis indica
ttaaaatttaacaataaatagtaatttataatttccaatttaatttatttaaattaaaaattacaaactttttcaatattaaaaatatcacttgcttaccttttaaaatttaacaataaataataatttataatttccaattttatttatttaaatcaaaaattacaaactttttcaatattaaaaatatcacttgcttactttttaaaatttaacaataaatagtaatttataatttccagtttaatttatttaaattaaagttgggttttatgccctaaaaaactccatttgaatgtaatctttatcttttaaatatcaataaacaaacagaagtatttttatcactttgtgtgtcatttggttcatgttatcatttatatatttatttgatttataaattcatccaaatccttatcacatttatgttcttgtttattgtgtcatcagcacagtggaaaataatcaagattatgtgattaaatatatattcctagatttatctgtaca

SEQ ID NO: 350218 - DNA, 706 bp, Cannabis indica
gtaagggcaagattggtacatttgtgttgtgaaaaaaaataaataattataatgtaagaaaaagtaattgtagttgagttgtgaaaagaaaaatagattgagtattcactaaattatagagtggtaaacagttcaaattctaattagggataattgcggcaaaagtccccaaaaacttagagttgatgcagattaatccccaacctcaaaaattggcggtaatagtccccaaggtcgtaatttctgtaagtccgttggtcccttttctaacagatccgttaaactcaaataaaatgccacatgtcgacaaattattggtccaaattatatttttcatttaaaattttaaaaaataaaataaattatttaaaaattaaaataatttaaacaatttaatattttttatagaaaatattaaaagaataaatagaaactttaatattttattttattttctttacttttattttttctctctttatgttcaactctttctctctcattgatcttcttcttcaacagcaacaagcatggccatggaagccatactcaaccgaccaccacgaggaactcctaccccaaaaacccaccaccaggaactcccactccaaagccaacaccattcccaccccgaccctttttcttctctcccccttcgtctcttccttctagttacctccataaccaccatggtcagaaactgatc

SEQ ID NO: 350219 - DNA, 493 bp, Cannabis indica
ataaaaaaaaaaaaaaaataccaaacatgcgccaaaactttctgcaaaaaaaatgattaaatatgtatatattaatcccagaagaggggctaataatttatactgtcatggcatgaagaaaaaaattattaatatgtgaccggtttaagactaatggtatatatttttgttgttttcttagtaataaaaaataataaacatgcatcagaatataatcgaagttcactgtgtgtatatatataggagggtttggtgcttacaaagaaaacgaaaagaagaaaagtgaaatcattcaaatatatgtatttatatatattatatacatatatatgggttaaagtaaaattttttctaaaatctattcatagactagtcactagcttcttgctttgaaagtttacatatatatatatagggatacgattttgtcccgttattgtactttcacggattataatccgtaatgtattgtaaccgtcagatgagggagtta

SEQ ID NO: 350220 - DNA, 674 bp, Cannabis indica
tccgacccgaactcaaacccaaactcgaactcagaatctcgaatggaacaagaaccgaactaggactaggaccaggacaaggacctaaacccaaacccgaacccaaatcaaaacccagacatggacccaaacccgaactgagactaggactcaaactcgaacctagaccatgacccaaacaacacaataaccgagacctggaccctgaatcagtatagggacctgggaaacacaattaggaccgggaccaagtacccgacccagacccgaaattgaaactgggacccagctcgtgacccagtaccagaaacggaaccagactgggacccgagattgggatccagatctggacccagggctttaacaaaactcgtattcggtgtttggatttgggacccagcccttgacccgaacccttacaaggacccgaacacacacccggacctgaacccagtcccaaaccaaaaagtggacccgaaaccgtaccctttgacccaaaattggaaccaaaaccagaagttgaccgggactgaaataggacttggacttggaatcataactgaaattggacctagatccagaaccgtaatcggacctggacccagactccaaatcaggcctagacccgaattgggagtcggacttggatctcaacccaaacttggactcgggac

SEQ ID NO: 350221 - DNA, 643 bp, Cannabis indica
cccttgcgcttgcgcacaagggcggcctcttgctcttcttcacctacttcagcttcctcaagaagttcctcctcctcgtccaccaagacaatagtgcccgaaggggcactggaggaagacctcctgggagtcaccaactgagcagaagcaggaggaggggaagcatcaggactatgggccccagcaagagtggccaagatttcgtccatgggtccggctgctgcaacaagaaagtaggttaagtgttagaacatctgtgaaagtagcatacacttaacaaaaagcaatcaagcttagtcctaccctgactctctaattcggccctagcaaagtcccggatcatagcactggcttcatcatccccgagaaagctgtctgagggacggaaccaactagaagataaatgggctgaattgtctaagggaatgggcgccggaggaccagaactcatccgggaccgacctaaataattgcctaagtgggagaaataatactccttggcatgattcccccaccgagtggaaggcatcctaaacctatggagacgttcatcgaaccctataggcctaaggctagcatactcatgggcagaaggaacataatgaatcgttaaaggggacttaccagaacccgaagtgctggc

SEQ ID NO: 350222 - DNA, 622 bp, Cannabis indica
tgcaaactcacccagaactttgaggtaaatttagggcctctatctgaaacgatagacttcggtaccccatgaagacgaacaatctctttcacatacaagtcagcatactgatccactgtataggttaccttaacgggcaagaaatgtgctgactttgtaaagcgatcgaccacgacccaaattgagtcgtacattcttgtggttctaggaaaaccaaccacaaaatccatcgcaatgtcttcccacttccattttggaagtgttagtggctgaagtaatcctgcaggtcgttgatgttctgctttaatttgttgacaagttaagcacttagtgacgtagtctaccacatccctttttatcccataccactagaaatagggtttcaaatcttgatacatcttggtggttctaggatgcaatgaatagggggtggtgtgagcttcatccaaaatttctttcttaagctcatgactgatatcagggacacacacttgcgctttaaataatagtattctgctgtcggagattaaaaagtccttagctttgcctgctaacacatcttctcgaatgctaaccaattcaggatcttctaattgtaccattttgattctttccaacaagt

SEQ ID NO: 350223 - DNA, 534 bp, Cannabis indica
tgcatcggaccctcccatcgggccctatcggacccgtcggaccccccatcggaccggtcggacccccgtcggacccctagcttgcaagcatcggacccgtcgacccccccatcggacccatcggacccgtgtttttttttttttttggttttcggttgaggctcacgggttgagagagaggaagagagagtggggctgggtccttcgtcggaggttgttggtggtcctcggtggtcctcggagttggtggaggtgagccgtgcgtttgggtggtcctcacgggttgagagagaggaagagagaggggggctgggtggtcctcggtggtcgtcggaggtcgtggaggtgctctttagttgagccgtggaggttgtgggtgtcgtttgggcgagagagaaagagagaagctttggaattgtttggttcaaatgtgaggggtattatggggataaaagaaatgtagtcatatatggcctatgatataacatgggaaatttgattttctatacttagaaaatcaaaaatttttttccc

SEQ ID NO: 350224 - DNA, 734 bp, Cannabis indica
atatttggttttatactctagatatgcttttaaactttttggatatttgaaattaatcattataatatgttattttcgtaagtttgtatcagcatcagttttatatttttccaatttttaaagtttttatatacagtcgtacaactatatagaaactattatacaactatatacaaacaatgtgcacttttcagcatacttgtaattttaatggtttatcaatgtattattcactgttttgcaacttttttattatccttgttaattatgttttataaattcctatttgactttttaaaaactttaataatgaaattattttcgtagttaacctttaacaagtgtcaaaactatcataaaacgattttgcaactattagcatacttttaaaatttatgaaataatattacaagtgtatcgaatataacatatcatcctgtgtgaattctcacagaaaattaaacaattcaaataattcctctgtaactattttattgcttgattgttgcatgtctttcggttgtgtccttgttgaccacatttgctgcacctgttatgtttttttgtatcccaatcagctaaaaatcttcttttccttggtcttccagatcttactttctgtttggtggcagaacaatgatatcttttatgttctatggtacatcccatgttgtgtgattgtgtaccagatatgttgagccgttatatgtttcaagccatgttcttgtcgtgta

SEQ ID NO: 350225 - DNA, 715 bp, Cannabis indica
atgcttaagaagatgaagacaaataaggaaatattgaagaactttggggtgatagacaatgatatttgtcttctttgtaacagtagcaacagtgaaaccattgaacacttattttttgagtgttcctactctaaggactgtcttgacccaatcaaaagttggctgtattagggaaccacctcggtttcgttgatatctatcagcaagtggattaaaaaagcaaagttgccaaggttcaaaaagcaggtattagtagctgctgtggcagcgatggtttatctgatttggggtgcccgaaacaacatgttttggaactaagttttggaaaatagtgataccattgtatatagaattaaaagtgtaatcaaaaatagaattatttgtatttggccaaagaatgtaactagtagtgaagagtattggtttaatactttgtaaagattatagttgaggtaggtcctctaaatttgaggatgctattagcttgtaaaaattgtttcttggtttataatacacttgctgatttactaaaaaatatataaatatatatatatatttatttttaccattttttcaagaggaaattacacttagtatgggattttaaaagttcttatgataaatatggcacatttaagtttggccaatttatatggtattttttatttttaggtttttgtatggtatttgatatgccatatatatgtaattaggt

SEQ ID NO: 350226 - DNA, 735 bp, Cannabis indica
tgaaaatatttttattccacatatagctcatattatattcatacatgctatataaatctccgtaatttacaaattacgcttatttactcacttatagcaaaatttaaattttatgcggaaataaattagtaggatcataatcccacttattatctaattaactcataatataaatataaaccctaattatttactattagacttatcaggatattacaatcattccctccttatagaaatttcgtcctcgaaatttatttaaactctcaaattattatttctatcttgctgtttttctatagtactttctcaactagtggaattgtctcatttcatagtacttcctttttctagtccaaaacccggacaagatatttctcctatataataaatttttctgacgtttagcatcgtcacagctcagaatatgggtcgagtttgatacatattttgtcagcatggagacatgaaacacattatacactccggacaacgcagaagttaaggctagctgatacgctacctagcctaattacctcaataagaaggtatctaatatttctcttgtaccacacttattaaggtacctaacaagtggtacatttaattatcacttttaaataaagacctcatcagggaagagattactctaagataatctaacctttatcaaatatacccctgaaatgtttcgaatattccattgatcttctcaggttacccacctttcaagaa

SEQ ID NO: 350227 - DNA, 1028 bp, Cannabis indica
aactaaaagtttccctatcgatcaataacatggaaataacctaaatatcacaaaaatgggaaaaactagggttcccaaaaactgccccaaccggtagaccggttccccaattggaatttcagttctgcaaggtttcctggggaccaaccggaattccaattcctacaggtcccactgaatcggaattctagttcagtacaggaaaacttcaaaaaattcatatctcactcaaatcaaccccaaatcaaaccaaactttccagacctgtataataaacctaaatagacatattccaagcaataaaataactacccaagctcagaatacaaaaaatgccattaaagagccaagcttgagttctaaaactcaaagcttgctcaatcaacaaactagccatcaaaacaagcctaaatcaacatatctaaacataatttatcctctgaaagcaataacaaacaccaacaacaactacagcaaccaaaatctcaaatcatgcaaaattgcactttattacaattcaagaaactaaaaagaaagttacaagagaattaccttggcttggaaaatacttagagctgctggaaaacacaacaatttgatgaaaaatcaaagaaccctagctggttctatagggttcgaaggagagagaggcttgagagaaaagatgagctttttatttaacttttaatttttaaactaaaatgaattaaaagcttggttttatcaaaataatcagcttaatattattaataaaaatcaaactaaataacataattaaactcacaaaaggacaaaatacaaataggcaaaaggaccaaaatacccttgcccacacaaaacccacataaaatcacttaggggtattttcgtcaactctaaacactcgacttatcctgatattcccaatgtctatctataatgccccgctatactaaaaatattgggatgtgattctaatagtcaaataccgcgttccaatgttgtcgggcacaaaacatgtaaaattatgaaaattctatatatgacat

SEQ ID NO: 350228 - DNA, 489 bp, Cannabis indica
ctaatttccaaattaaagctaagccgtctttacatcattgtgtgtgtaggctttataaatttaggtatttatttttaaatatctgtgtatatatataaatctgtgtatatataaatatacataaattagtatatatatctgtgtttatttaaatatatagatttgactacaaatctatatatatatctgcgtataaatctatgtatatagataattttagggtttataaatttaagtttttttttttcgatttgtgtatataatattttaatctgtctatatatatatattttatttctatatatatatgtgtattataaatgtatagatgttttaaatatatatataatatgtatatttttttatttatatatatgtatatataaagtatatagtatatattaatgtgtataatatatattgtgtacagtttattaaatgatatatatattgtattgtattattttgtagtatttttaattaattttt

SEQ ID NO: 350229 - DNA, 580 bp, Cannabis indica
ggagaagaacccacaaatatactaactctaaaaatcgctaaccctatcgatctgcattccagtatggtggtcctctttggcttgtcgattctcattcccaacacgaaactcgctaactttttcaaccccacatgcttctgacttcgatcctgtggtcactcgctggtggatctcgagtgatgagagatttgggggttcttttaattattttacaatttggatacagagagaaaaaggaagaaaaagaggatgagatgtggtgaaataaggctgttgatggtgaggaggaagaagacgatgacgatgggggtgttcgcaggttgacgtcgatgagggtgaagaacgatgaccccctggttcgcaccccttgttcccagaagacgatgagggagaagaaattgacccctgaatcgcaaaagagaaggaggagaagaatgggattttagtgttctcacttctcagattttctaggtttgtatttaatttaattttaagtgtttatgtttaattatattgtattctcacggttatataggatttttattattaatcaattttgtaggaattagattttaagttt

SEQ ID NO: 350230 - DNA, 516 bp, Cannabis indica
ggtgagaagtaataatgagagaaaatatataaaagcttgttataggaattatgtatatatagataagaaagcttaatagttaaggaaatcaatcatatatatgaattttcttcctaagttcttatatgatgtgatgcatgcatttagataagattcagactaataacacattgtcaaataatcatatagtgtcactcgatcatttgcataccgtcgattcatctctcgttcaaacaccaacggtggagatgacgcaacaagtatcccatattaaactttgaatattcaaagtccaacaaggcaacttgtgtggacgtgtgagatcaagatggacctaagccaaaaatagagatagttttaatattatggcatatttcagtaaacaaatttaaattgttgtcttttcttttttgtttatgtaaaagtactttagtttttgggataagttgaaaaatgcctcttttattaatcaattaaccaaatttgcctctaattttatatttatttgaaacatac

SEQ ID NO: 350231 - DNA, 517 bp, Cannabis indica
aaaaatgaaaaaaaaattaaggtactagtggtgcttagtaccttcttcggtgttatatcgctattggtgcaattaagtatcaaatttcatataatttagagtatctccaatgattaaatgttggaggatgctttcttatgtggattgcttatttggcaaaacacaagaatgttgtatcgtttgaagtaaatatgtgctatcataaaaaaattggttgatgtcactacatcgcattgatgttatctctttttaaaaaaaataaaaaattaaaggtaaataaatagtgtgccaatatctataattaaaacaaataatatattaaataataatgtgtgggatcaaaattatagtatttttgaacggtaacaatatataatgtttttataagtaagagtgtaaaaaataatgtggaagaaagataaaataaaatattatatttttggataatatggagatttttagcactttttttaaaaaaaaaaaacaattgttattgggcaccagtggtgcctagtac

SEQ ID NO: 350232 - DNA, 949 bp, Cannabis indica
tatggcaaggttataacattctcgagcaacttactggtttcctcttagacaccctatcccattctttgttggaaacttcaggcatgaatgaaatatcgacgtaatgacctttaaatcatacaaagtttgtcagcctagcatgaaattaaaggttaatggaacgtctaataccaaaaattgtgcccttgtagttatgcttgtcggagcttgcccaactctgagggctaggcgaatttgtcctagaggtgcgactccttgaccagagaaactatacacgggttgaagacagggggttaaatctttgagttggagccctatcttttcatatgtggtcttgaataaaatgttggaaaaggctccattatctatcatggttctagccaccatcttgttggctatctggacttccacgaccaacaggttgttgtgcagaaatatgatcttgacaacgtcttcatcattaaatgtgatggtgggttccactgctcgtgggatctttgacttcctttcttctagggccaggactacttcttcttacacatgttgtattgttcgggcatacctctcccgggcttttcctgaatctctagctatgtgtggacccccaataatgacttgccgatgttcgtctactggtggtggtagcaagtctttgttgttatcgcccctctggttctgatcggccttgacatacttctgcacgtgcggattatttttccttattaggaattcgatttcctgcttcaaattgttgcaatgattggtatcatgattgtaatctccatgaaaatgaaaaaactttgtcatatctctctttctgacatctttcttcatgggtgcgggcttcttgtacggggctaatgactaagtagcaatataaacactttctttgtcatccgtcaggacggtaaatgcagtatacttagcaggattctcccagggagcttgt

SEQ ID NO: 350233 - DNA, 724 bp, Cannabis indica
aaaaaaaaacaagcattcagataaaccagtgaaacatagaaacagagaaagaatttctgaatcttttctgcctaaactctttaagttgttattactgaatctgtgactggttatttcctttccataaatcttcaataattgataaatgcaggagaccttttcatcaatgatagcagatgcaggatttcagaaggttgagtatgaaaatcttattggaggagtggttgccatccattcaggtttaaaagtttaatttattggacttttatgaatttccagcaaacgtatcttatctcaactcaacagcaagtacttcacctatcattaccataatttacagtaggtggaaatttgtttcttttggaggtataagtatgtttttccaacagttttcacggattgtcattatcttctttgatattttgtaataaattcatgaatttattcagcttaaacaagcttgaaaaataagttctaagaaaatagttgtactataatatcaataaatttaaaggttactactgtctaaggggttttcctttttttatatttttggggcccgtttggtacgcaggattagactgaattggacttaaaaagattggactggactggacaagattagattatgctgaaagtaatcctgtgtttggtttaagaatgaattggactattttatttatatccttttaaaaaaaaaaacttaaattaaaataaaaatata

SEQ ID NO: 350234 - DNA, 1336 bp, Cannabis indica
caatcatagctggactaaagcttgctctggaggtacacgctgaatacagtaaagtctacagtgattcacagctggtggtaaatcaagtctcaggggagtacatggctcgtggagaaaagatgatggcttatcttagcaagagccaggacctactcgcacaatttaagggttacaccctcaagcaaattccaagggaagaaaaaacaactacagatgccttggcacaggttatgagcatcacaatgacagatacggccaactcagtcccaatctaattcttggaggtatccagcatcacctgtgcggaagaagtcaaaatcatagacacgacactgacctacccatagcagcttatcttaacactggagaacatccaaacaatagaaatgaggcttagaagatgacgagaaaagctacacggtacatcatagtagaaggtgtaatgtatagaagaggcttctccatgccactactaaggtgtgtaaaaaaagaagaagttgcacgactcttgtctaaagtacacaaaggattctgtggtaatcatgttgtggggcaaagtttatcgaagaaaattctaaggtaaggatatttctggccaactatgatggaagattcaaaagcccatgtaaagaagtgtgataagtgctaaaaattttcaaagatcccccgcgcaccccctaatgagctaatacaaatgcaaagtccatggccctttgccatatgaagaatagacctgatcggaaagtttcccaaagacaaaggtagagtacaatatgcagtggtcgcagtggattacttcaccgagtgggtagaggccgagcccctggcaaccataacatctaagaaagtactggattttttagtaaaaaacatcatatgtcggtacagacttttgcacaagattgtcttgaacaacggtaagcagttcgatagccagatgtttatagacttctcgacacatggaaccatcaaaagtttctttgcagtagcacaccctcaaacaaatgggcaagccgcagtcaacaagacactcaaagacaccatgaaaaaagagcttgaagaagctaaagagaactggccggaggaactgccataagtattatggtcatacaaaacaacaaaaaggatagcaactgggaaaaacctattggatatattttaccaggatctagatttactaacaagtatgttccattaacatcctaatatgaattctaaaacaatgaaataaacaaatataaagtttaggaaaccttacattgggtgcagcggaatataatgactccttctgttcatatctctagcccttgattcctttctgtagtagagcatcacc

SEQ ID NO: 350235 - DNA, 804 bp, Cannabis indica
cttcacccaactccatccgaacagcttcgagttccatcctggcatcttcaacatccttcctggccaagtccacctccgccctcatgctgttggacaaagctgtgttcttggaagaagcagacttagcccgggagtaggtgtaggccaacttcagaccggcctccacagaggaaaactttagtatttgagccaagtaaagaggattaaaggaaatcatcaagaaggacttacccttgtgaattccttcaagactccacccatcagcagctccagaaaagagtcattgccagcatcggccagctgctcacgaacctcaggaactaaccggttcatatagtgggcgagcatctccttccctttcttggcctctagaagcactcggaaaagtggagtagaggtccgtaccagctcagacccacctctcagttggtcagacctgtccgaactccctcctcgagactccttagacttgacaacttttagagtagaggagtttgcaaccgttagctcctccaaaagatcgatgaactccccggcaggtgtcttttccttagaagaggtcccctcaccgcctttagaattcttggctggaggagatgcactagagcttccgccaatcctcttcctcagagcatcaagcatcttctgagacatgtctgcacggaacaaaaacaacatggtcagagaaaacagacatcagaaacataaagcataatagtcaagaagcttaaaaataagacggggtagtatgcaagatgattgcccgggcaggcctcgaaattccatcatcacctgacatgcctc

SEQ ID NO: 350236 - DNA, 745 bp, Cannabis indica
caaactttcacctagcataaacaaagtattagagaggaattacacctaattcactctccaataacactaaaaacaagcaactaaaaatcaacattcaacaatgaatttcagcccctaaactcatccatttcagctcatttcacaaccaaaacttaaatccatcaaatatattttccaataattaaatcaagagcttaaaatacaattcatgcattaaaaatctaatggtaaaaaccctcaaaattcagattaaacaacataaaattcaaagctccaacttgagcaaaatcaccaagaacttccagctcaagaacttgaacttcaacaatgaatttcaaagttgaataaaagataaaaacacaataaaattccttttatattatgtctaaacctaacccaacataaattcaagtacaaacatgctcatatcaacaagaaaacaccaacatgcatctcaagaccatcccaacctatttcttccatttcaaccataaaaaaacacagcagcaaattcattaaattccagcaatagaaaactacctcaagctttaatgcaatgatcaagccacaactcctcaaaatcaagcataacccaacacaattctcaagcaattcttcaatttcaagcttgaacgccaagcaaatcaccaatttttcaacaaaatacaaagagggacagagagtgagggaagggggctgttttagggttaaggtaaatacagaaaatgaatttcatttttttaca

SEQ ID NO: 350237 - DNA, 1024 bp, Cannabis indica
accattagatcatcatcaacaatcaaaatatcttatttgaattttctccttatttttttgggcctccttcacctattaaaagagagctcccttagctcacttttcacattcagaaaattacccacatggttagagcttctctctctagaatttggagcttctaacacttagtttattgttgtaattaccatctcgtgagaaataaaaacttgaagtagatttagccccattactatcgcgatataagggatgaacgactataaatttattgggtctctcttataaatacttaactacttattcattctcgccaatctagcgagcgggtgtgacttaaaagtttagtctagattttgagtcaacattttagtgctcttgttgagagccacaactcagaaagttactaaacaagatggttgtaacacgttctacaagtgttgataaacaaactccagcaactggccgaacaactaggggcaggccagctgacagagttggaactgggaccacttctgtgccccaggcgccaggagcaggccttggaactggctccataactcttcctctaaggtcaccaccaactgctctcgagactggcaccaacgactaaatcccaccttaagagccacacgtggagatagaaaaccctgaggagatcgatcctcatgtagctcagctcagctaaactgtggttgacttgcaacaatagctgcgagactctctcgataagaaacgtgaatagtttcaacactggctcgtcgaaaacaacaagaacattgaaagccaatgctttgagtaggaacaacggagaactaacctatctcaacggattagagaagcttatcgctctaatcacgtaactacttcccataggggtttttctgagttggtgagagagacaccctgtcgaccaactggctgttgggttttgttccctaaataaaactctatttcaatgtaatcttctacattcatttatcaataaagaaacaaatttattccattacttgtttaatgtattact

SEQ ID NO: 350238 - DNA, 647 bp, Cannabis indica
ggtagaattcgtatcgaaatgcctaagttgtaagcagattaaggctcaacatcacagaccggcagggttgtttcagcctttaaccctacctgagtggaagtgggaagatattgcaatggactttgtggttggattacctagaaccacggatttatttgactcaatctgggtagtggtggaccgatttgcgaaatctgctcactttctaccacttagaacaacctttttagtggatcagtatgcaggtttgtatattaaagaggttgtaagattacatggtgtgccaaaatccaaagtttcagatagagattcgaagttcactacgaagttttggcaaagtttacagttaccagagtacgatagggatggctccctatgaactgttgtatggccgaaagtgtagatctcccatccattgggatgagacagaggagaggaaatacttaggtccggattcagtgcaacggaccaatgaagtaatagagaagattaaagccagaatgcttgcgtctcaaagcaggcaaaaaagttatgcagatccaaaatgtagagatgtagaatttcaagtaggggatcatgtgttcctacgggtgtctcctatgaagggaatcgtaacaccctaactagcataggcgtattacgtgatt

SEQ ID NO: 350239 - DNA, 636 bp, Cannabis indica
tttatggtgtgctttcactgctactgttaacgtagattttcgttaatcaaatttgagcctcagggtaataattccacacacacaaaaaaaaaacaaatagaaaaataaaaaatgaacacaggattttttacatggttttacagttaaaattccgcatagtccacgagtcaatcttatttagatttttgagtattttttttttaaacatctttcatatgagttttttcgtccctttttgagattgtttgccactatttataattacatagtgggcaattaattacaaaaatggccgaaataattttacagcaatcattcctaaaatcgtgagatttgattacatattttgtatcataaacgcggtttatgattttaaaaatcatatagctgtgattttcccgcttttactgggttagaaatatcgtgtattaaacacgacttcaattggtgaatcttgagatgtctcgacagaaacttgattataatgatcccaatagcgagctgggaccattcttcttttggaggtcgacaatgcatgtcttatgtcgatcgcgggtataaagaaatcttctgacttgccagggttatgagcctctctcctgttagttgaatgaagatataggaagtcttctcaca

SEQ ID NO: 350240 - DNA, 1218 bp, Cannabis indica
cataggtttagataatctcaaacctactatagtaggatcaggaagttttgttaagtccattgaatagacttattatcaaaattttccttcttatctttgtaatagaaaacttttggttactccatatgaatggtttcaaccatagttctcttggctttgcttcttagttccttattctgactatccattacttgtttaaactagcaatgtatttttatcacaagtatcttccaagtcataacagggtgagttccttgaaaccctcccactacaacgaggtaccatgactttctgtctaggaacattagtggtattgtcctaatcagttgtgttaatacaacagaggcagtgggaccatcttatgtggaataagatgattaaacactttggaattaaatcaagaaaaatatctcctctacttttctttttgttttcagattttagtcatatacttagaaaagtagtattcgttgaaacaaatctttcttatcttaatgatcataggatggtcacattaatcactttagaatagttagttagcagttctagctttttctaagtccatgatgaggatatccatgaatgtagacttagcattttgctagagggactcaggcagctgccagtaactaatcatagacctttggttttcatcaatatgcaatccaaatttttggggaagtaagtttggatacaatttgaagtataacttaatgatctttgaactgcataaccaaatatttctccatccctatcagttcgcaagatctttaaccacttaccttaatggttttcaccattgctaaaaattcatgaaatttctcaaacacttcaaatttctttattcaagatataatctagagtgattgtctaagaatttaatgataactcatatccacccctgaatgtacatccatatgtttgaatatagatgatcctacttctaagtagatattggcatattttctctttgtagagactgatcttgtcaaaaccactatgaataagatacaaatgccatagatatattactgcggtaatggtttttagctaatttctaagtctagttacaataaacagttcttagaatagtctaagtagattctggtcacagaatacaaaactcataatccatacattaacatatagttggatccattattagagaatggatattaacaacttgtgaaagtttgactatattgtccaatgtattct

SEQ ID NO: 350241 - DNA, 539 bp, Cannabis indica
ctcctacattttggtcatactttttttgactgcattatggcttttgaagatggaccaccttttcacttttcagctttttatggtgcacctgctgcacaagatcggtttgcttcatggacacttttgaatagattggctgactccgctcctctccaaccgtggctagtaattggcgattttaacgagattttatcaaatgctgacaagaatgggggtcctctgcgtaatgaacgcttaatggcagactttagaacctctcttgatcgctgccatttgtctgatattccttttgaaggtgatgctttcacctggatcaagaaccgaactgctgcatcctctttgaaggaacgtcttgactggtgtttcaccaacaatctttgggacaatgtttttctggtgccgagactaactcacttggattatttccactctgaccatcgtgctatcgctgctgtactcacttctcataatacaccagttcaacaattcaaacgtaaaagccgttttcgttttgaaaaactttggttggctgatgctga

SEQ ID NO: 350242 - DNA, 933 bp, Cannabis indica
ttctctttctctcttttcatcttcttcttctttattctcatctactttatataattttatattattttataacagtattaacaaaaatgactctatataaactcgtttttaatacctctactgaagcattgtcctatagcttaaaatggcatttcaaactttaatatttttgatactcaacatatctgatcttatcatttataataaaagataaaaaatcaaatttaaccaaatttaaaatatagtacattaattttcaagttcaacaaaatctaaatatttaaatttaacttttattaattaaaaaataaaaaaaaataacaaattattagatgttgccacataaagggtcagcatcctacatttagaattagttaaattttaaatattattttaaattaaatttgaatgttttgatagtttaactagatgggcatttttattaattccgaagataaatttaggacgaaaaataatttttttttaattattattacaaagtataatagtaatttttatttttatttaaatcactattatgctttcaaatttaaatgattattacttcattgaatactattaattttaaaattatgatattaaaaaaaattaaaaactaaaataaaattaacatacgtgacttggcacgtaacatctatctagtacaataaaatatgtaaatcttattttaggtatcgtaaactgcttgaatttttttaaaaaattaacatgtaattttaaataaatataacatacataaaaaaaatatataaaaagtttttagggtgtaaacttaaatttattatagacttatcctatattttattgtagtaaaatttaacaactaaactaattgagtagtaaaatttgttacatttacaaattacaaaacaatgatgaccattacaataaagttaagcagtcaaaaataat

SEQ ID NO: 350243 - DNA, 567 bp, Cannabis indica
tctctgatcccatatgtttcccttagttttgtgaaaaatcattgccatgagttgttgttttctgaatccacaacagaaaagctaggggaaaaatttgtccattcccatcttgtgtacaagcagagagcaatgtacctccatatgttgatttaaggaaagttccatcaacaactattataggttttcacttcttcaatcctttttattgaagcatctagtgccacaaacaagtacttgaagctgttgtcttctgtttggatgcgtacaatagtttcgggattagtttctgcagcatgtataaaaaacttggcagcagcttgtatgattcgtttgcttttcctcgtaattcttcttgcacgtgctctttgcttctccatgctttcatgtagttcattctcaccccatacttatgtttcatttctcctctgatgtcttgtggcgtttgagttgtttttatactggtaaaccgtggcttgatgtagtgtctttctaaattgcaactaaaaatcgtatagaaactcctattgcaactagtgctgcaaccactttagaaacccaaattgtaaa

SEQ ID NO: 350244 - DNA, 757 bp, Cannabis indica
tgtattgggtcttgatacctgccataaacagtgtgtaggatatgatcttatcaagacaaaatcaaacttaataaggaaaataataatagccaaagtttcctttaaaaaccaactttccataagagaatttcttctcttacaaaaagtttccatacaagaaaagtccagctgaaaatcattctttcctaagatagaaaagagtaataaagaccggataataaaggtgagaaaatcagttatgaatgcaaagaaatcttaccataaaataaaaaatattttggcatctaaattgctaaaaaaggactttacagtgtcaattaaggaggaccaattggaaataggcattctaagatcacatttgtatgtaatttctgctacgcatccatgattgatctatgtcatttagttatattgatatatgtgactattgatggatttagctgcgctaaatattgcgaaagccgctttgatcctatgttagtataatcaatagacgagattatttcgaaacacctatgattatgataacaataaagtacttataaggttacacactatcaaaaaaacatatgtagcccaagtgagagattgttggattaaaatcctcaatatgagcttagatgtattggtgtattactatttaaaatttgacccaaataaagtgatcattttagtaatttgggtcatggatataaaatatcatgggctaaatgtgtagataccataatcgatatttctaatttattgagaggctaaa

SEQ ID NO: 350245 - DNA, 521 bp, Cannabis indica
ttttttttaaaaaaattctgagcatagcaataacggcagggcaatataggcccgtcgttattgctattttttaaaacttaaaatttgagcaatctcggtgggctcgcgtgtgtgtgtcaagatagacttgatttttttaaaaaaaaaaattatgagcatagcagttacggcgggcccatattgactcgccgttattgctattttttaaaactttaattttgaccaatctcgactggccaatataggcccgccgttattggtccagcctatttttgtcatagttaccaataacagcgggcctatattggccccgtcgagattggtcaaaaaatgcccagcccgccccttagcctccctttcatcttctttcaattaatctatttttaaccagctatagtttcttccccaattcgaaaatggcagccatttttgcctaatgcaaaaattgatttttacttcttctatttcatcacaatcactccaaaaagaaaaggtgatgctattgattttttttttttttt

SEQ ID NO: 350246 - DNA, 572 bp, Cannabis indica
taaataattattttttaaaatatatcttaattacttaaattagaattagacgttaatttaattaattaattactcatactttataataaacttattaatcatattgttgaaaatatctaaacttattttattgtttaataaaattagttagatatattttttatataaataaattaaaaactaaattaaaatttatatatttaaaaaatattttattattattattaaaattaataattaaataataacaattctaatttaacttttagcaaacatgcattgtatgttactaatacctagtcgtgatttttatacattggctacataacgacaattgttagtttaataatttttttaacgttttattttcttaaaagaaaataaaacagaaggtaatgccagtggttaaccttcaaagataaaattagaataattagcagaaggtatgttattaaaaaaaatattgaatatttctcatttttattctgaggtggtacgatttgatagttatcgaagtttaggagacaaagttattaatttacaaggacacttcagcattgaaataaaataat

SEQ ID NO: 350247 - DNA, 542 bp, Cannabis indica
taggggtggactattttatattcgcaaggatgataaaatgttcgtttccacaaatgccactttccttgaagatggctatattaagaatttcaagccgcaaagcaaagtagtattggaggaaatgctttcagatataactccttctaatgctccatcgtcttccactcaagtagaagaaaatcccactcccttaggttagccaacgcaagttgttacaactaagaaatctaccacaaatgttcctgttcagaaggtcacgactcctcgtcatagtgggatattttccacaaaaatatctcgctatggcttggatggtgaaatcaatatgatcgttggtgacggtattgatgacaatgcattaacctataaacaggcaatggcaagttcgaaatggaaacaatggtcagccggcatggattcaaaaatggattctatggaaaagaacaaagtttgggaatatgtagatgcacctgatgattatcatccaattagatgtaagtgggtctacaagaagaaaagaggtgctggaggcgaagtcgaaa

SEQ ID NO: 350248 - DNA, 611 bp, Cannabis indica
atataaattcacacacaatttagaaattatttagcatttagcaagtaacaaagacatgtgaaaatacaaaactatcacatcttaaataatttcaaaggtttccaacaaactgatacagtgtcccggtaggcgagaatcaaagtatcattcattgaatagagttgtcagctcatacaaaaaggaaaacaatccaacaaacctttattcgatcaaaataaaaatccaacgttgtcccggtaggtgagagtccatcaatattggactagattgatttttcgagtccattttgtgttagacataatagcctgggacataaaaggggtatgtttctagtccaacattattggactagaaaaacatttatagttcaataatgttggactagaaaaatatttctagtccaagaaaatatttctagtccaacattattagactttaaaggcgatcccacaacataaaacttaattgttggactaaaaaattatttctagtccaacagtgctggacttgaaaagcgatctcatgccgagaacccctttctagtccagctaagttggacttgaaacttgattttttttattttttttctaaattaaatgctgtaaaattaa

SEQ ID NO: 350249 - DNA, 1100 bp, Cannabis indica
tgatttgcgggatcacttggacaaaaagaaacacacaccggcggtctccacaggaacgatgaacgagggaatcatggcagagcttgccatactacacaaagatattgctcgagtctcccagagacaaaaaggggatgacttagactctgactgtgaggacttggaaccgtgcgccagacacattttggagggagaactccccaaaaactttaagatgcccgagatggcagcttataccggggattcggaccccagcgatcacttatctcggttcaaccgagtaatgacagtcatgagagttagcaatgacgccaaatgtttatgcttcccactaacattaagtgggtccgcggaggaatggttcaagaagttggaacaaggatcagtggactgctggaacagttgcaagtaagtttccagagatagtttgtcgccgcgagaaagattaatctcgaagtcagtgccctgactaacatcaagcaactacccacggagacattgaaaaaattcataaagaggtttaaggaagaagcctcgaagactaagaaagttgatgacgagcaacagcttgcacttcttcaagcagggatccgtacagggactccattctggaacgaatcacaacaagaaggagctgtgaacctccaagatttccagaacagagtccaaaagtacatcaacttagaagaggcccaaatagtggcttatgaaggatactatctgaccgaagtagcgggatacgtgtccggactccaattcccgggaaccctacctttggctactccacaaatgagcggtatacgattctccgctaccccaggatataattagagcgaggctttggctcccgcatcttcgcattatgggaatccttcagggatgagcggacaagtcccgtctcactccactcctgctgcaagcctagccggaccttctcaaggctcccggagcaagaggtcctcgaaaggtagcaaccggatggaggacaagcgatagaaaatggggtatactccccaatacacccagtacacagaactgacggactcccaagaatatgtgtatttcgccacaacgcaaaatatgttagcccaagatatgtt

SEQ ID NO: 350250 - DNA, 619 bp, Cannabis indica
taccaggatctagatttactaattttgtatgtttaattaacatactaaatattaattctctaatacgatgaaattatcacataagcgtttagaaaatcttgcattgatggaacaagaataatatgacgcattccgtttagatctcttacccattgttcctttctgtcacagagtaataacaagatctgagcttggatctccttctctccttcagtttggttaaccaccgtctttcgccctatgattgagtactttacttgttatgtgtgggcatgctactctatcaatatggctcaaattgatgaagaacaatgaatgaagtgtgaaataactatagaaaggagtatctcatctactagttcccagagaataaaaactagatttagttttgttgaatgtgagttggatgagaataagagcatcatcttccttttatagtattttaactagggtttaaaatttaattatatggattaaaaaagaataaaataatgcgcaaaaaatacttaagtggttggccacactaatgggactcactagttacaattttaccactttattttaaccacttatccatctttcaataatacaatatttttccgatttcaatcctataaat

SEQ ID NO: 350251 - DNA, 718 bp, Cannabis indica
attagttttggcatttaaatggttagaattggaaaattggcatttttgagaaaatgcaaataaaatttgttaaaactgcaaaatcaagtggggcccattaaatacaccttggccggccacttgtttaagtttttcaaattgaaattttcattattttaatgccaaataaatagaaagtgatggctcagtcaaaatcataagcttttcataacatcttccgacagaaaattctctcttcagaaaactgagccttcccctttctacaccttggccgaaacccctctctctcttttctcttcctaaatttcgaaccctagtgaaagagtgagtgcccacacacagcaagtaggaactcaatcatagactggaagactgtgaaggatcaaactcaatgagaaggacattcgggctcagaatctaagatcatggtaaaataatatccaacagcatccgcgtgtgtgacacgcccgtgtcacccctgctatctgcccacatccgcccgccagaaatcctgcagcccgtcgaggtttcttggcagaaagggctgcaaacaccttcgatccgcgcgcgtatgggcattttgcagcctctggaggctgcacgtgcagcctcctgagctgccaacccaaaaattgtgatttttggggggttttttccccaaaaatctaatttttcatgggattgtttcccaaaattcatttttccaattttaaatatt

SEQ ID NO: 350252 - DNA, 1088 bp, Cannabis indica
tcggcatatttgattgtttatcgtttgatactccgtccaacactcatcttgtgtgttgtcttttgtagatgaactcgggtgagtcttgggaactcggacatcatatcgaccaggatttgcttcaacttctgcatgaggatcgcccttgtcttcgttctagtcctccttctagtgaaggatattcttctgaccttgtaccaagccgaaggatgatggctcgtacaaagaaaaccacgcgtctggctgactctattgatcctcaagtggctcggcttgccactctgcctagcgcctaacaggatttggccgtcccgatggaggaggatcatgagggggacgctgaggtccaagaggttgaggagctagacgatgtgcgtccaggcagtcccttcgaggcagagcgagaggaagaggttgaacccctaaattacggggagtaaaacgaggctgggtagccagtcgatgctgacggagacgtcctggttgagggcgttgactacgtcagtgaggagcttgcttcggcggttcctcatagaaggcagggtgccctgggcactaggtgggtaagtcctccgtctaagcttacggaggcgtgccttcgaactcttgacgaggacgggtacctaggcgagctggactgctacattcccacccacactaatcgcgccacaaaccctgacaaggggatgtgcggttggtcgggggcccatggccagcaaggagcactgatgcccttacacaagtacttcaaggatgtggcggacttttttggtctttgccggcgccaaatcactcctaagggcattaagtatttgtccgccctcttcctcctctacgcttcccaaggatcgggtactccttctccccacgaggttgcctggttcttttatttgaagtccacccccaaacagggcaggtcggggtacttctatttctctcagccaggcttcaagtggctgaccgccacagatgccaaggccatcagcaacatagggtgttttctgatgagtacttcatggtgaaggatctgagcattactcggactcagtttcaatagattttgacatatcacctgttgggttttatgc

SEQ ID NO: 350253 - DNA, 660 bp, Cannabis indica
tcgttgtccgaaactattttgtactgcaatccgacctggcagattatgttcttcagaagaaagtcttgaactttcttagatgtaatggttgcgattggttcggcttctgtccacttagttaagtaatcaaccgctaccactgcatactgcactcctcccttgcctttgggtaattgtccgatcaggtcaattccccaaatggcaaaaggccacggactttgcatctgagttaactcgttgggcggagctcgagatatctttgaaaatctttgacatttgtcacatttcttaacataggcctttgaatcttcattcattatcggccagaaataaccttgcctcagaattttcttagataagctctgcctagcggtgtgatttccacaaaatccttcttgcaccttatatagaagtcgtgcagcttcttcttgagtaacacatctgagcaatggcatagagaatcctcttatgtacataattccctctactatgatataccgtgctaccttcctcctcatctttcgagcttcatttcgattatcagggagttccccagtgtcgaggtaggccgctatcagtgtcatccagtttggggaagtatcaatcatttcgatctcttccatgccagtaatgctaagctctttgaggaactggatagga

SEQ ID NO: 350254 - DNA, 877 bp, Cannabis indica
tgcaagtaaacccatacaagcagccaaaaacatatcctgcagtgctatgctcacacgagcagcataaaatatatcctataagtgctattctcacacaaacaggcaaaaatcttatcactatcacacactaataactttagcataacacaatccaccattgaataacaaacatgtaaatacaaatcccataatacagttgtatgttttaacatacaccctgtgcacagatgtccactcttcttacctcagttgttgagaacacctttttgctacttcaagcacctaaatgaatttacttgttgagaacaagatccaccagaagcccctgaacggagtgccgccgaagttctcgttggttccggtgtcggcaaatgcaaaactcttcttcgggtgctttcgacatgtattttttattggaagaaccttccaatgaatccaggatcccaaaacaactaagaacagccaagaaaaagagccaaaatggcctaaacccgattatcttcttccttggcagttaaccgttaacaatcgagtccaaaaatggtgaattccgtttcacaccttaaagcttcgattctttacgttaaaactgatctttggggtcccattaacttaaacacaacctcctttgatctccgaaacaacttaaacacgttcaaattcggatccgtttcaagaacggtattttgaacgtaataatggtgtctgtcgaatggtgcgattacagaccttctaatcgcatctaaaactcctcttggatgaaataaaactcaatgaaataatctaaggcagcccaaaaactctcaaaccgaacaaacccaaaatctcactttctcaccactcggtttggttcgacccacagcctctctctctctct

SEQ ID NO: 350255 - DNA, 749 bp, Cannabis indica
gataactaatcagattgtaaagagttttatttagggcataaaacccaacactaaatacatatttcaacagatttaacttcattcgatacttgcagagagtggcgaacatttcgtccaaatctttgatcaaatctcccgctttcttagtttttaccaacatgtcgttgatgtagacctccatgttgtgaccgatttggttgaaaaacatcttgttgacaagtttttggtacgtcgcccacgcatttttgagatcgaaaggcatgacctgatagcaatacaagaattgatccgtaatgaacgaggtgtgctcctcatctgcgggattcatgggtatttggttgtaccccaagtacgcttccataaagtagagaaattcttgccccactatgttgggctttgtgcccttaataaaattctatttcaatgtaatattttctattcattatcaataaagaaacatatataatttcattacttgtttaatgtgttatttggttcatgtgatcatttatttttttatttgatttataaattcatccaaatccttatcacactgatattcttgtttattgttttgtcaacacagtggaaagtaatcaagattgtatgattacatgtattcctatgattacctgataggataatctacaatgtagtttacttgcaccttggataagtgttatgtcctttccagggcattgattaaagcaagtttaggttagatgtatggagtatgcatcgaaatggac

SEQ ID NO: 350256 - DNA, 400 bp, Cannabis indica
aaaagaatccgagtatcctttaaattcaatcactgatccaatacagagggaaccatcctccagggttaaaaagaatcatccttcagatctcatccttggaaacttggatgagagcatggttacaagaagaaaatatgctaatataattcaattcttatgttttatttcttcgttagaaccaaaatctgtaaaaaaatagcactattgatttctggatttggttttccaaagacactaactttaatcttgtttgttttagtgatgttgattggacaggtaatgcaaatgatagaaaaagcactagtggtgaatgtttctatcttggaaacaatcttgtctcatggcacaacaagaagcaaaactcaatctctctgtccacagcagaggctgagtacattgc

SEQ ID NO: 350257 - DNA, 775 bp, Cannabis indica
ggtgtaaggactcaatggaggcttgaagcggggatgttacagtcttgattagttcaatgtgtttgtgaaggaattcaagatcgaattccagaataaagtaattttgcatttttcttttctttcattttttatagtttatataaaagagttaagtgtttggtgtcataaatgatttctaatgtatataattaatattaaagaaaatataatttgaaaaatcaacatacattcattcaaacctcatattttattttgtgatgattaaatattcttctttatttggcaaatataggcactttggatgagtattattaagaaaattaggtttttatatttaatttgtctatttaattaaaaaattctcgtttttacattatgagtttaagttgttttattagctaaaagaaatatgaaaaaaagtttttggcattaaataaaattaaaaataattaaatttgacttaaatatttttataaaatatatttttgatatagtgtaatttttttttgattatattttttttaaattaagtcactaaattacacataaaaattcactaaatttctcgttgattattcactgtttaaataatttaatatttttatgcttaatttgaattttctaaggcgagtggcgtgctcttctaataggggtgttcacaaagtatctgatccaatccaatccgcacgatccaatccaatccaatccgcaaaatgcggatatccgcacttgtgcggattggattggattgaaaaatctaaaatccgcacttgtg

SEQ ID NO: 350258 - DNA, 663 bp, Cannabis indica
tgtacctacagaatcgtgggcagtaactacaactttccttttatagaaaaggaaagtttagctccggttttctcttcaagaaacctgatcttagaaaatgggaaactcaacacaagatcagaataacagctggttagcaaagaatcaatgtgtaatcaaaacttaccatttttacctcaatttccataaataggaaagctagtcaactttccttccaagtttagatttacacaaatagggaaaccatatcaatatatgccagccgaaatatacaaagaataataaaatatttttgtcaattaaatatgccaaaaatggaattaacaaaaccctttataaatttctcattaggttgaatatcccatttttaattgttagaaagtccaaataaggtttaactaaaacttattccaatccatacatgcaaattttatgtgggtttttcattatttatcttcttttgtcgtttctatgtttttgttgtcgttttaaaggtattggcttttctttttactcttatctaattttcttttattataacacttcaacttgtacggaatctgtggctatgttattgacagttttttttgtggtgccattgatttttgttgtagctggaaaagtgggtaaagaaacccatttggagaactgggttacttctct

SEQ ID NO: 350259 - DNA, 1236 bp, Cannabis indica
acactctaggtttttacaaatgaaaataagaaaatagaagagataaaataagagaatagaagagataaaatcatttgactgctctctaggtcctatttatagaacataaaaacctcgagacaaccacaaaaatgatttctcagctgtacaaaacttccttaaaaaattcctgacttgcagcatcagagacagattctgtcgcagcaaattagaccagaaaaggaaacttttcaaattaaaccaagatcacgaattcggacttcaaacctgccaaataaagtttatttgatttgttcaaataaaggcaaaactgaaatcatccattagaaaaagggaaagtcaagtttcccaaaattacacaaccttccatgagagaattcattctcttacaagaagtttcctaaaccaaaaagagaccagctgagaaggaaactttccttagaagaaaagagttattaaatgcacaaaatcaatgtaataaaataatttaaattctcaataaaaatgcacattaattaaaaaatatttttacacctaaattgccaaaaaaaggacctaacaatctccccctttgacactttagataattaaaatatttttaattaacaaacacctacaaaacaaagttagcgaaagaaacataaaaactccccctgagaagcgcaacattaaacaaaaataaaaagctaactttgaccaaagacaaacacaaacacaaatctcaactcctcctagacagttgagtatacaattaaaatcccaaatactcccccttttttttatctataaggccaaagacaaaaagaaaccaagattttccaaaaatcaagaagtgaaaaacaatcatgatcaacaataaaaacattatatagagaagggtaaatagcggcataaacagtaatgtttctctaattttgtcagtacagactctataatagtcttaaacagggcacatataaggcctaaattcttgatcattgggtctagatagaaatatgtagtatcagttacttccaaatgttcttttaataaattcaaaacagagtccgtactgacaaaattggaagaaaattacagttttacaaacattgggtacttatgccgctaaaaataaagattgggtttatgctgcttataattatgtcgctatttaccctataaagaataagaaattaaattttaagaggaaactcataaaaaatttaccaaataaagcacatgttgatacttaccaaa

SEQ ID NO: 350260 - DNA, 683 bp, Cannabis indica
cgaagccaatgaactttagatctctgcttccagtaaagctcttgtttatacaacaggctatcaagttgggattgcagattggaagtttcagctagttgctcaggagaagcaggaaggagggaggagatactattaagtttcttatctatatccctaatcctgaacgacaaactattaaaggacctattccaggtttgaatatcctgaatacaagtatcttgcttatgaagaaagctggtcaagggagacaagttagccccagaattaggagaggaccaagaactatttacagtggtgaaaaaggagggttcagtcagccagtgattctcaaaaaggaaccttttattcctagtcctacactcactactatcagttaagactaattttaaaactctatggtcagaaccataaaatccaaggtggtgaagaattgcatgaggatactggtggaaccatttctcattggcaattccccaatcaagacgctcaaaagtatcaccatgtttccaggtaaacttattgccaacaaaatgaataggagttaaagaatacttattaacaaaagcttgaaagttagtcatagcataatgaggcaaggaggccctactacttctatcagcaaccgaaagataatcattaaaatcccctagaataagccaaggaagttgaggggcattatcaaa

SEQ ID NO: 350261 - DNA, 716 bp, Cannabis indica
ctgggcattctgcctctttagtagttcaacttccttggaaccagtggcaaaggccttcaagagcatggtcatggactgcgaagccaactccacagagcgaggtataagctcctcagaaagagtctttctctaccttggacatgaactcctcgcccacaaacctttcctgtagaactaggaaatcgcgagctcgaatagctggatcgatcacgactttcttccccttgtcctgcgtaggcttagctagcttcttggaggaatccgcgacgcgacaggggtagccatgacgtcgcttttctattctgaggaacgacaggagatgtcgtcgttgttccagtctttggcttgcggttgagaaccggtgcggacttcaggaaagtcatctctacaaggacaagaaaagataagtacaaataacaataagttttagtgcactagtttatacatgcgatatgttacctgatgttggccgagaagtactgcttggaaaggcgtttgtctatccgctctttctgcttctcagacggctccttgtacactagctccctttgaaggctcgcgttctctggaattagctagtgttctcacagctttaaggtcgtgcacagaagtctccagtcacgatctataatagggaggctcccgaggctttcagcgatttgtctacggggttgcgtctagtgcaggtcgagccggtctatctgcgagataagaaa

SEQ ID NO: 350262 - DNA, 598 bp, Cannabis indica
aatttttaccatatagtaaataccttctcaaaaaaagcactacgattgcaatatgatcaaaattggttgtaaaattctcgtgaagtccaaacctgaaaagtgatatataattttgattaaacttatatatatacatatatatatatatttcttctatatattatagtccaaaatttgtaagggtttcaaaccaatcggactgagaatggaaccaataatataagtatgcctatataataatcgttcatgtatgtatatatttatatatattgtgtatacatcatcatattgtatgatgaagagactataaggctcaaggtcattcattatatatatgtagcataactgtataggtaataggtatatgtagtgggtattgaagtgagagaaaattttgttgtcaaatagacccatacatagacccatacgtgcatgtcaaatataatatgtgtgttgattgttgattgattaaatttaaaaggatgtgaatgagaaggacttacagtgtaaaggaaagcggaatgatgttttcttctattttactgatataaaacacttgcttttgtataaaagtatgtatatctgtgttgtacgttgt

SEQ ID NO: 350263 - DNA, 1397 bp, Cannabis indica
agtgttagatagtgggatgttgttatttaggaccagggtttgtgttcaaagtagtacagagcttagagacgatattcttgaagaggctcataccacttcatactccttgcatcctggcaccaccaagatgtaccaagatcttaaaccctacttctggtggagcgggatgaagaagaatatggtagaatttgtatctcgatgcctaacttgtcaatagatcaaggctgaacaccagagatcggcaggtttattgcagcctttgacacttcttgagtggaagtggaaagatatcaccatggactttgtggttggattacctagaaccacgtttatttgattcaatttgggttgtggtagatcgattcacgaagtctgcacattttctaccagtaaaaacaaccttttcagtggatcagtattccgatttgtacgtcaaggagatagtgagattacatggtgttccaaagtctatacttttggataaagattcgaagtttacttctaaattctagctaagtctacagcgggctaggggtaccaaactaaattcagcacaactttccatccttaatttgatggacagtccgaaaggacaattcagatacagaaggatatgttacgagcctgtgtaatggatttcagaggctcctggagtaagtatctaccaatgatatagttctcatacaataacagttatcagagtacaatagggatggctccttgtgaaatgttatatgatagatagtgtagatctcccaatcactgagatgaaacatgagaaaagaaatacttaggtccagaatcagtgtagcggactaatgaagcaatggaaaagattaaggccagaatgcttgcctctcaatgtaagcaaaagagttatgcacattcgaaaagcagaaatatagagtttcaggtaagagatcatgtgttcctacgggtgtctccaatgaaagggatcaaacgtttcagtaaaagaggcaaattatgtcgtaggtttacaggaccttacgagattcttgagaaggttggacaagtggcatatcgtttagctttgcctccagctctttctgtagtacacaacatatttcatgtttccatgctacgaaagtacgtttcagactctgatcatgtactaagttatgaaaatcttgagctgcaatcaaacttgtcatatgaagaacagccagttcagatcctagatagaaaggataaggtccttcggaacaagaccatagctttggtccaggtactctagaaaaacagtaaggtggaggaagccatatgagggctcggtgttcagagttgttcaggttggatttcgaagacgaaatccttttaaggggggggggggtagtaagttgtaaatatcgcttaactttaatttggaattagctgat

SEQ ID NO: 350264 - DNA, 807 bp, Cannabis indica
tttctttttgttgaagaccgtcagtagtcttcttcttctcttgcgttggtgtcggttctccctcttcctcctcctttggcttatcttggtttggcccagcataagtcttaccacttcttaaggtaattgcattacaattctcttttggatttacttcagtagtactaggcaagttaccttgagccctgttagtgttttgagcagccaactgccccacctgagtttccaagaccttaatggaagacttaatcttcgtcatgaattgtagcaacgtgtctaattgaggattagaccctccactagagtcttgttgttgttgttgatactgttggctttgttgaggataaaacccttgttgttgctgattaggaaatttcttttggaagttcttctgacgaccataattattctgatagtttccaatggcatgagcttgttccattggaaaattgtcgacatctattgggcagcaacctttttagttgggcctctctctgtttgccattgttgattagtaatggccatctcttcaagtaattcaaatgcctcattagcacttttcctcataaaagttccaccagctgcagcatctatcagtgttcgggcgttgttcaataatccagtatagaagttatgcacttgtaaccacttttcaatcccatggtttaggcacttcctcaataagtccttgaatctctcccaggcttcataaagagattcgttgtcatgctgagtgaagttgttgatttcagctctcagcttagcaatctttgcaggaggaaagaacttggaaaggaatttcagggc

SEQ ID NO: 350265 - DNA, 1095 bp, Cannabis indica
ttttaattttcatgatagttcttaattataataatatttaagtatgtagattgtgatttatgcattccttttttttttttttttttttaattatttcgatttttttcaaaaactagttataaaagagattcaaagataaagaaatgaataataaagactaagaaaatatattgttaacatggttctggtttaatataaatattaatctacgagtcaatagtatattgagtttttgcaatagtagtcaattggacaacggttttgttggtaattaaaaggtctgtaactaaatgtattattagtcacaaaaattacaatttattttgattaaatgtgttttaagtcacaaataacttatatctaaatactatgttttagttacaagtaactttttctgtgacttaaagtcacatttaaccacaaaaaaattattgggttgagatgcaaaatgaccctaaatttagaaactaagttagtaaatgtcaactttttaaaaaaaataaagaaaatggtcaaatctaataaattagctaataaaaattataaaaatacatttatcacatatttttattaaaaaaaatatatatgtaataataaaattaagttacataatttttttagtattgcatattattatattgtaacaaaaataaataaatatattagatcatttaaacatatacatcagtattatatatattgttgtaatgaaaattaatataccgtagtaataaaattatataccgcaaagaaattataacaatactaaattaacactcaaaaaaatatatatatcatgctaacaaaattatatataccaccattaaaatatgaatacataccaaaaaatttatatataataaaatagaaactaaaatatcatattaaataaatgatatatatggacaacaaaaactatataccatacaaaattacgtatatacctacaataaaaaataaaacaaaaataatataatattattaaaaaagttatatatatcatattaacaaaattatatattacctttattttactaaataaaactaaacatgcattatctaaaataaaatgaatatactatacaataaaactta

SEQ ID NO: 350266 - DNA, 1049 bp, Cannabis indica
ttttaatttcttcaatagtgtctctgtatacttctttttgagatgaagatccatcttctttttgagttattttaatcctaagaaaagtagtgcagtaagcctaagtcggtcatctcaaaactcttgatcatatatcttttttaaatttcttgatcatgctctcatcatttcctatgtagatgagatcataaacatataaagtgacgataagtgttgcattcatactttgagtcttgatcacttttgtttctcctgaatccttatttaatgaagtagctgtcaattctattgtatcaggctcatggagcttgtcttaggccatataaagcatttttttattctgagaactttatatccttatccttgcaccatgaacccttgaggttgttccacatagatttatattagttttatggtactaaattaggtacacaggtattatctgattatcattgtgccatatctcaatagatctacagtgtgtgtacattaaataaaaatataaaattataagtttagaatatataccccatgaagactatcaaggtatcctcgaaacgtctcgtatgttgtatccttttggttgattagaaactcacaccgtagtcttccaagtcgatccaccacacacaaggaatagtgtgagctattagaataaattgtataatgtgttcttgttgaaattctcaacacatgagcaagaacaatttgagagagagagaactgttttcttttttttctctgataatttcaaaaattgctgttgaaaagcctcttctaatttctctaaccagacttctatttatagtagttaaattcttattaattaaatcatatttaattatttaaataaataaaaatctttaattgaattcgattactaatatttatgagagattctcttaactactttaaaatatctttaaccacttcttaaattcaaatatttatctaattaaattaactaaataattaattaatccaaaaagacaaaactcactgggagacaggcgcctaccttgtctcaattaagacaagaatggtgtctt

SEQ ID NO: 350267 - DNA, 589 bp, Cannabis indica
cttcccaaactttattgtcttgcatacatttattctcttcattcatggcatcaatacatttttgagagttagaacttttcatggcctgatgcaagttcattggatcatcttccattattccgattcatcctcatgttcttaaagaaatacaaaataatcatctgaaatagcatttcttttctctctcatggctctcattaatggctcttgttcttgagggcgttgaatttgttcttcatgaacaatagcctcatcaacattatcctgttgaggttctagattcatttcttgatcaataaaaggtgtggaagcctgaacattgtctggaatgatagtagcaactgagtttgaattcaattcctcatcaaaagcaatgtctctagccttatttcttcccctaaattcaacatcctcaaaaatgttgcagatcccgtctcaaaaatatttctgacaatgggatcataaatcttatagcccctacatcgctcagaataactaataaagtagcggctaactgttttggagtctaatttattttcatgtggcctaagttgcctcagctagagatccccaaatgtggaaatgcttt

SEQ ID NO: 350268 - DNA, 1095 bp, Cannabis indica
gctcgcacaattcaaaagctacggtctcagacaaattctaagggaagaaaacacaactacagacgtgttagctcgattggcaagcaacaatgtatgtgacaaggcaaatttggttcctattcagttcctcgaagagcctagcatcactggcacggaagagatcgaaatgattgatacttccccaaactggatgacgccaatagcagcctacctcaactctgggaaactcccagataatcgaaatgaagctcaaaaaatgagaaggaaagttgcacggtatatcatagtagagggaattatgtacagaagaggattctcaatgtcgttgctcagatgtgttactcaagaagaagctgcacgactcctatctgaagtacacgacagattttgtggaaatcatgctgccgggcaaagcttatctaagaaaattctaagggaaggttactactagcaaacaatgattgaagattcaaaagcctatgttaagatgtgcgacaaatgccagagattttcaaagatacctagagcaccacctcacgagttaactcagatgcaaagtccgtggccctttgccatttggggaattgacctgatcggaaaattacccaagggcaaaggaggagtgcaataggcagtggtagcggttgattacttcactaagtggacagaagccaaaccaatcgtaaccattacatcagagatagttcaagactttattgtgaagaacataatatgccggtttagactgccgtacaagatagtgtcagacaatggcaagaagtttgacaaccgatccttcactgacttttgtgcaaaccatggtatcatcaaaagtttctcagcagtggcccatcctcaagcaaatggtcaagttgaagcagtcaacgagaccttgaaggatacactgaagaaaaaaatcgaagatgccaaaggaaattggccaaaagagcttcctgaagttctatggctgtatcgcacaactgagaaaatggaaaccgaacagacaccattcgcaatggcgtatggatatgaagctatgctgcctgtagaactcgagccaccttccacagagattgatgtacaatcaagatacca

SEQ ID NO: 350269 - DNA, 535 bp, Cannabis indica
aatcactgtattctttgttcttaagtcaatacaaataaaggggagtagactattaccgaattgcgcggggccaaacctttttaaaaattctatgttctttatttatcttaccatattacatccaaattatatcacttatcgcttacaattaagactcattgtcgtttgttaaaaacaatgtcaatatttgggtgctttcattgagagcaagaatcgtaaactcgctctttatttcaaatttcatcataaacatgatggtggtacaaactcgtagaggcttgatcgattcagcaaatccatcggtagtggatcccgcactgcagaatctaggaaatgtaggggtcctaccagccacgtgttgggttttgtgccctaaataaaacccatttcaatataatcaaatttactaattaataaagatcagaaattgcattttatgttgcatggttcacatgatttatttcatgattatgtttcatgtctaaattctattaagtccagaacatatgtatttgttcatgattatagtgtcgtc

SEQ ID NO: 350270 - DNA, 1495 bp, Cannabis indica
cgtccaaaccgttctttcatcttcactttttttttataattattattgttagtttctactattcaaataattagattttttaaaaaataaaaatatattatttatatttcaagttaaaaaatactatagtttaaattaattttaaaaaccttaatataagataaatataattgagtaaacataaaataattgaataaaaaaagtaataaaatatggtagagattttaaactttaacttcaatatccaaatacaataaaaactattaactataaagtctaagttttaagttaaacactaaaatgtttaaactttaaatacaaaatagtttaactaataaatgtaatttatgtgatataatatatacacttttataaaaaaaaaatatataaatcggtttaattcggtttattcgggttaattgggcggtttagaataatttgtaaaccacccaatatattcattgggcggtttggatttttattgtattatttcgggttgtattttttatcggtttattcggtttggtttgggcggtttattcgggttgggcggtttgtaaattttattgaacacccctagggagcatagttagtacattaacaatcactgaaacagtaaaattgaatgaaattagacaaaagtccttaaatctaacaatctcaatagttcaaggggaatttttaacggcgaaaaaagttcagggggcatgatttggtacatgtaaaaattcgggggaaaaagccctaattagcctaaaataaaataagggttagaacgcaaaaaaaaataaataaataaaataaaataaaattatacatcaaattagtgtaaatttaaaatccaactatattaatagtactgtagaattaaattggtgcataccaatttgatgcataatttggtgtgctattgaagtgaaatagtgtgaaaattctactccaatttagtgaaatagtgtattattggagatgctcttagagcatctatgaaggatgtttgatgacatggatacattttttaacattttttaattgatgcttaccattggaatgaaaaaaaaaaatgctacaaaagaatgtcataccataacatcatttatgtctttttcttatttttttattattaattattttattataagaaaaattatttatttaatatatattaaattataatatatattattttaatcatttttagagatgcttaccattagattattttcaaacaaaaagtgtcaaaaataatatagaaaagagataaaataaaataatatatttttaagtgatgtaaaagtttttgacactcttaaaagaatgtcactattggtgattctcttatgtaccttaaggtgtccaacatcatactgacatatggcgtttataaaaatatataaagctcgaattaaattacatcaataactaccgatatgacacctattgtgatgcaaacaaatttttactaaaaaagaaagccaaaatataggtggccacc

SEQ ID NO: 350271 - DNA, 707 bp, Cannabis indica
aattaggggtaattagggttaaaaagtagaaacgtaccctgacactcatttaatgtaccctgagactcatctaatgtaccacggaatacattccgtgaaagtacatcacgggacaaaatcatatccctactatattattgtatgatcatcaaaagcttgtattatattgtattcatttcattgtaaaaggtgaaaatgtcctcactcatattgtaaaaactatacaactttaccattagatatacacagggccgatcttaaaatttaatgaactataaaaaaaattaaaatattattttaaaataaatattattattcgaaatcaataaatatatatatttaaaaggtgataaatttttttctcctaaattagatccaaataatccaaataacaacattaacctaaaattgttaggtttataaatcaaatcatttacctatcttcatttttctttcaaatatttcttgtcatcttaaatagtactattattttttcttaatgctatttactaataaaaccatattttctctctctcaaaagactaaacgtcttcttctttgctagggttttatccttttttctcttctcggctagggcgctactgctattcttgcaactcgaaagatataatatataaagtgaaatattatttacagaaaaactaaatgatacctaacaccactgaataaaatatattgtaacaata

SEQ ID NO: 350272 - DNA, 754 bp, Cannabis indica
tagaatgagcgatcatgctccttaccatattcttaagagtcttatttcgtctctcaacaacaccattcatgctaggtgatcctaacgtggtgtaacaccctaattaatttaggcgtgtttgtgtgatttttaacatattgtgtagctcgttgctaatcaacgagattaatgaaaaatatgattaattaaaatttgcttatttaattaaaactataatgtaatacatttataaaatcccaggatcccgtttatataaaatacgtttacaaaagttttctattcatatacaaaagttttgtctcctagcgactatacagcaaaaagttttgatgtcccaaagatcgtacgctccaggcctaagtgccccgacatgtacaatcttcatctgctcgctatcacggctccgacacgatactgagtctagaacgttcatacgacaataacattgaccataatgtgagcctatactcaatatgctagtcatactctagccatattgatgtgacagcatcgatcagtatttcagccaacatagatttatcagtaatcagtacaactctaagtatactatcactgctatcaatgtaatctaacaggcataaataacatgtatattaaacatgtaataacatatgcatgacattatactaatcttaccttaattccaaattcaagtgtgccggccaacttgagtggaaaaactgctcggcgaattgcaggctcctaaatcacatcgataataacatggataagt

SEQ ID NO: 350273 - DNA, 550 bp, Cannabis indica
tttaacgacttgaaaagttcaaagagccgacatgatttggtacatgtcaaagtccaacggacaaaaatactaattagcctttttatttttatggtaacattttcctcttatataatatatcacttttttctgctttaatattccaaattaatgtctcacattagtgctatgttagcaaattaattaagaaaatgaacaaaaataaataaagatagcatttgcaatatagttagagtttaggaaaaaaaattcaaaaaagaaaaaagttcaggaaaagataatttagaaaaaacatattctatttattattgtaattgttacattttttttttgtattatttttgtcattttatattataattattattattttacacattaactgtctatgctcattgtactaaaaaaagagtctatatgatcagattaggagacacggttcataaataatctaacaataataaagtcattatagtgaggcatatttataaaatcaattgagtatattatttttatttttgtaaattaagatagaaatgttactaacata

SEQ ID NO: 350274 - DNA, 739 bp, Cannabis indica
agtttttttagtttttaacaatttttttttattttttttaaaaaagggtaaaatgggaagttcatgtaatcaatggaattaatttgtacaaattagtggagggtctaaattttgatattgggggttttattaggtgcaaaaagtaaaatttccctttaataattattaagtacttttagttaaaaaaaattgttttttatttttattttttataaatttaagaacttttcaagattcaactacattcttcttcatcagtcacacatgcaacaaaatagctgaaaaagcttaaaaagaaccattcgtgagtctgagaatactaaggtggcatttagttggaggtaataaaatagaaaaaaaaaattattctatttatttgtttaattacatcttaaagtattggaatgacatttcaatgaaataacttttctatcatttcagtagaatgactattattctattttgaaatggaatgaaagactattctaatgcaatatcaaaaaaaaaaaaaaaattgtttgtcggtcaaaagcagatggtggattggggattaaaagatagctatatggaatcaagctgcaatgtttaaatatgttggggctattgcaaacaaagaggagaacttatgggtgaaatgggtccatagtgtctatctcaaacaggaggatttgtggagctatgaagcttcaccacaagggagctggtactggaaacaagtagtggctgccaaaaatcagat

SEQ ID NO: 350275 - DNA, 749 bp, Cannabis indica
ctaccaaaaagtcatcgtagttagacatcgaagttgtcaccaatgttgaacgtttgagttgtcatcggagttggacctttgaatttgacaatgaaaaatcagtaatatttatcagctaattaaaaatatgacaccgagaaactagttatgtagattaaccaaattaaaaactaaaccttagaaccagttatgtattataacaaaaataataatttaatacagaaaccaatttcatattacaattaaataaaaagtgaacaaacatatgaagcctaaagtaataaaaagatatatcaattataaaaatcagttacttaaaaaagaaaaaatacataccataaaataatttttaacgataacttataaactaaataacaaaaatctgttacaataaacaacttagcaaaaatctaatatagagaaaccagttacgtaaaataattaaattaaaaattaattcacataaaccaattacctaaataactaaaatcaaaattaaatatagaaaccagttacttaaaaatacgctaataaaaaaaataaacaatagaaaatacagaagctcaaaatgattacacaaaacaaaaataacttacgaacgataaaactataaacagaaaacctaaaaacaagaaaaatcataaaggaagaaaccagtttcttttgataagaaaaattaccaagggagcagcatcaacatgagtctcactcttcttcttgccatgggatttagaaactggtttcttttt

SEQ ID NO: 350276 - DNA, 945 bp, Cannabis indica
tattccgctgcaaccactgtaagttttcttatactttatatgtgtttatttcatatcgttttagaacttcatatttaggatgttaaataacatacttgttagtaaatctaagatcctggtaaaataattccaacaataactccccaacaagaaggccaagccatctactcaatgcttcaaccatcgaggggtccaagtacttaggagggacaacgaagtgacaaaccaaccaccttaagggggctggtcagccactcctggccggccctctggctagcataggccgaccaacttttggacaccatatggtcggccagcatgcactctgcaagtgcatggccgaccaacctttgtcctaacaagattttggtgtgtagctttcatccgcggactgcaagtcaaaccacgaattgggccttaacatcccaccaaaatagagggaaaatatcagcaacttccctatttttgaggggcaagttagtcatttgtattttattaatttattatgtaaataatagctttatttacctattttaagagatattaagaatgtaagctctcttatataaagagcattagtcaagccctaaaatcctaagtctaaaaccctaagccttaagctctaagtctgataacttatctcattcctctctctcacacgcctattgctctattctcacttgagatttgccaactctgattatcacattgtaatcttaaaagagccactttagatctcattactatagtgatctaagtagtattatctctggtatcattacaactaaaaggagagtaggtcgttactcgctaactaagggagccaaacctctataaaatcttgtgtctatttacttttttattttagttgtgtaacacgtggcaaacatcagtattaaatttgactccgctgtcggttggccaaatctgaggtcaacagtttgg

SEQ ID NO: 350277 - DNA, 510 bp, Cannabis indica
atatatatattatttttgttattatttaattatatgatgattgaagtaaaatatttttgtatagattttggaaacacgtgtatggggatgatggtcatctaccactctccttccttgatggtcatctaccactcaaaataatagctcaaagagaactcaaaataatactcaatgaatccattaaaacacctctaacccaaccaacccagcttatgtgcacccctaagctcgggttagtagattaatgtgtgttgagggattacaccatggatgatttgctgtgattatatttccttgtagctcatgagattgatatctcttgttctcattatcaataaagattggtggcaatgctttcagactggagtatgactaagttcacattgaacttaggatcggaaccaatataaatctctgtgttattgtgtttgacagccatttagattcatctgtattatatttttctagtttatgtgtttgcttttttgttcttgatttgtttgttttgat

SEQ ID NO: 350278 - DNA, 757 bp, Cannabis indica
tgggatcgacctcactcctggtaagtctactacttgaaacaatacgtacacttgcgtgtgcaaaattatcgtaacatgtatggctcagtagaatcacagtttagtattttagtatgttggggcagtttatttagaccttgggaatgtcgggattagtcgagaatttagaatttcccaaattaccccttagtacccttttatgttattttggtgtggagaggcaaaatggtcatttttgccccataagcttttgtcctttagtggacttagtgttatgtaatgttgtgatttctttgatatttgttggctgaaataaaggttagaattatactttttatcacttattcaaaaattagaaaattgggagaaatcaaagaaaaagacaaaattttattttctctctagccctctctctttcggccctccttgagcagaagaaatcttggtttcattgcttgggttatgttatttggagtatttagaacaggtctggaaggttgcatgaagtttgaggttggtttgagtgagaaatgaaattttgaagtttcctgcactgaaccagaattccggttcagggaagcctttagcaaccagtctaccgcttggggcttccaggaattttccagaactggaattccggttgtagaatcggtctgccggttgggaaaaaattgggaaccctagttcttcccatttttatgttgtttagggtatttccatgctttttatcgatagggaaacttttagtttctagttt

SEQ ID NO: 350279 - DNA, 684 bp, Cannabis indica
tgggcaaaattaggggcaacagcaaaattccaaactccattccaccactgaattagcctagatgaatcggcaactcccccatctacctggagcgaccacacaaatgtgtagccacttttaacatgataaaccccatctcgatcatagtgccagcactgtccattccccaccacttgtcttgctaatggaatggataaaatatgttcccatccattggcaagaaacctgttgaagcttcaccacatctcaaatacctgagggaaggataaattcactcactcgacaatcattattaatccttctcgtgattggcttaaaagacgtcgaacgtgggagccatggatccttgaaggcccaaacttgtgttccatcaccaatggacctttgaatattgcattgaagaaaatcctttccccagatcaaactcgaccaaagatgaaaagaaccatctgttgggattttatgccctaaataaaacctatttcaatataatctgatttgttatgaatagaagattagaaatcatttatgtttacatgtaattttcatatttatggttgaatgtatacaatttctattaaatccagaacatatagttatacacaattacaatgttgtcaacacagtggaaggtaattgtgattatatgcttcaaaagttaatgtcccatgatttatcagtgca

SEQ ID NO: 350280 - DNA, 726 bp, Cannabis indica
ttcaacaaggttgcaacaactttatatttatctttttttttttagatttgacactggttgtcagatttttctttctttctttttttttttttttttaaggttgttgccaatcatttttttttatattctctcaattttcacacacatacaacaagcttcccatccaaattcccccaaactaaagatctacttatggtattattagggttaaattgtggatattcatgggtttatctctttaggcttaatatgtgcagaacaaagaataggtgaaggctcaagaaagggtaactaggataaaaattacaaggatggcttgaaaggcacaatcgatccaaaaaattacctaaatcactttcctagtcatgcataatttatttatttagcctcaaatagcaagcaagcaagttctagaatttatttcgaacaacttttcacatgtttcaacaacttttccatgttctttcaagtgtaaaattgaaattagtcacaagtataacatcaccaagcacacggatttttcaaaataaataaacttttcaaatcatgttatctacctactttcaaattaactcacattaagaaaattaactcacactaaaaaaattaattttagaactaaaaatttaaattaaaaatttaagttaacctcccaaactaaagtgacacattgtcctcaatgtgacatttaaaactaaaggggagggaacttacctgagcgccatg

SEQ ID NO: 350281 - DNA, 693 bp, Cannabis indica
ctgagtgttgatcttgtgagttaccattggccgagtttgacattatactcggaatggactttttatccaaatactctgccagtattgattgtaaacggaaaatggtcacttttcaaccagaaaatgaggaaccttttgttttgtgggatcagtttacggtcttgtatccccagaatttcaacactaattgctaggattcctaggggttataattgattttggtaaacctgtgttgcttggacctgaggaggtcaaagtggttaaggaattcctggatgtttttcctgaggaattactaggactaccacctcagcaggagatagatttcattattgatttgatacccagggaagaacctgtttcaaaagcaccttaccgcatggcacctatagaattgaaagaactaaagatacacctatggatctagggttcacccgacctagtgtgtcaccttggggagctccagttctgtttataaagaagaaagatggaactcttcgaatgtgtattgactaccgggagctaaataagttaactattaaaaacaaatatcctttgcctagaattgatgatctgttcgatcaacttcaaggtaaggcggtattctctaagattgatttgagatctggttatcatcaattgagaatctgggaagaagatattccaaaggcagctttctgcactaggtatggc

SEQ ID NO: 350282 - DNA, 804 bp, Cannabis indica
agcatgctttactgtttatttttgtttttggggtggatgttgaatttctgggaattttggtttgagtttctacacaacgccgtggattcttcttcttttgcgtttagaatacttcttttcaccatattttggtcgaggaaccaccttcgtcgcacgtaacgacacttaagggtttagagcaaacttcgtcttctcgatttgacccttttttctttttccctccttactttttgtaatgtcactatctgtgggattcttgcacccgactcttgtcaagggaaaccttttgaggctttctttcttggcaagtgtccggagggggcctctttccagcggttaggggaccccattccctttttgaattagggtttggtttggggcctgactgctggattttttcaatctttttcagaaccaaaaatgtcttcttctgcatccggttctaagtcttcaaagaagggagaacaacgtttggccaccctggaggaggtcatgaaggttcccgtggcccaagaagggcacaagttccgtgccaacgggtgggaagcggctgagcttcgctctaccctgacctgccctcaccagctggaacagatcgtggtggtggcaggcatcaagcctactacctccggggacctaccaccggccgccccgggatgaggagatgcgcaaccataactacgggggcttcggagccttgagccagacacacctgatcgccagggccatgcttcctctccaagattattttattaacttccttgtatttgtcggccttgcgccatattgttgggttttatgccc

SEQ ID NO: 350283 - DNA, 588 bp, Cannabis indica
agcatcatttttattcttaagtagatatatccatactttcctagaataatcatccacaatagataaaaaataagaacaaccaccatgtgtactaattttctcaggaccccataggtcagaatgtacatactcaagtattcttttagagttgtgagtacctgttgtgaactttaacctgtgatgctttccaagtatgcagtgttcacaaaaatctagtttactcactttatccttacccaacagttgttgctcactcatgagttgtaagcctcgctcacttatatgccctaatcttctgtgccatagagtagctatttcatcttctttgtcgttgtgagttgtgatgttacaacttgaaataggagagccttgtaggtagtaaagtccaccattttttatgcctttcatgattgttagtgctcctctactaagcttcatatgacctgcctctatcttactcacaacacccaaatcatcaagcacactaatagaaattagatttctagagagattaggcacatacctcactgctgttagggttcttattatctcccatcatacattttaaatctgattgatcctgaccct

SEQ ID NO: 350284 - DNA, 924 bp, Cannabis indica
aggttagacaagaacttggggctttcactaccctagtacaccctctgttcttcaccccttcaagaacatggttttacagcttagaacactaagcaatctctctctaaattctctcttttattcttactatcaatagtgaaaagagtagtctatatatagttgtaactcacaccaggaaaaataggtacataacaggtgccaactaactaactaacacactagaaagttagttaagttaattggtgtaggtgagttagttcaaaagttggtttaaaggatcaacttccacaaatttccaccttcattctctaaagcaaactacttgtaatcttttcacagaagccttgatgatgttgatatctcaaaatgttcagcaagaactaatgtttagcaaactgagagaatgcatcagtttgttgaatgtgagaaccttagttcccatgtcaacagggttgtcacttgtgtgcacctttttcaatttcaaaaccttgtcctcaatcttctctcaaatccaatacagtctaatgtcaatgtgcttgctcttctcctggtatataggattcttacataggttaattgatgacagactatcagaatagattgtccctttgtctttgagtagatgcagctcttgtagtattccctgtaaccaaataacttccttgaaagcttcagtggtggccatgaattcagattcagtagttgacaatgccaccactggttgttgttgtgatttccaacatatgcagcttttgttgaccatgaacacatatgtagtagtagatctttgattgtccttgtttgatgcataatcagcatcaacatagccttctaacctcacattagatgtatccttttgataaatcataccatacttgattgtacctttcaagtatctaatcagccacttcactacattccagt

SEQ ID NO: 350285 - DNA, 525 bp, Cannabis indica
tgtctttggcccttatagataaacaaaaagggggagtaattgggtttttaattgtatactcaactgtctagggggagttgaggtttgtgtttgttttgtgtttgtgttcgtctttggtcaaagttagctttttattttggtttaatgttgtgcttcttaggggggagtttttatgtttgtttcgctaactttgttttgtaggtgtttgttaattaataatattttgattatctaaagtgccaaagggggagattgttaggtccttttttggcaatttagttgtcaaaatattttttaattaatgtgcattttattgagcattcaatttgtttttatcaactctggaccctttttccagggggagttgtgtttggtacttgtgaacttatttggattaaaagttagcatgttgttttgttgttttacaatttcgagtgtgttactcagggggagttgttatttgttcttgctaactttaatttgcaggtactttgtgttaaaaaatattttgttcatctaaagtgc

SEQ ID NO: 350286 - DNA, 520 bp, Cannabis indica
catcaggtgagatgtatttttggaattaaaaaccctaattatttggttgtcatgtcttctttatatctctattatatgaaatatgcaagtttttagcggctaaacccttctaattatcattttacttacactttacccttcaatctcaagtttgcagttaactgtgaaacatagatgacactttaaatttattaaccgttaaataatttagagggttttactactaaaatttgaatttagagaattaagtgtaagtggaatgatagttgagagggttcagccccaaaactcttaaatgtgcttatgtaattgctcttaatttaaacattgtgattcaaatttaaatttactatacatgtctaaaaatatttaatcttgtgattcaaatttaaacgcatatatctaaaaatgtattattattattattattattattattattattattatttaaacttatctctattatattatatttgccttatattaaatgtgaatatttaatgaaaattgttagttt

SEQ ID NO: 350287 - DNA, 1101 bp, Cannabis indica
ttgatgttggtaaagatattataatcttaccgttgtatctttctatgtcaatatcactggttgatcttagataacaagatcttaatcctgacatgcttaagttcaatctcaagagtgttatttgtgttctttgatctgttagtcaaggcctaccttttggtctggatgatacgtaaatttcgggaacgtgatagtataattgagtgggagcgctaaacatagatatggaatctatagcttctatctggacatagaagtgaaatgatgatttccttcaagcttggcttaatagtgataaatggaagagctcttgtttcagttattcgattagtttactgaaatatcattcataggaagctaagtgtcttaaggataaaatacattgagaggtgaaacagtaaatttgtccccactcggtgtaaatcatctatagagggtctttgattattgggattagaacgatggttaaatgtttatagcgtgtctatatcgtggaacatatagagcgttctatataactgagagtgcaactccaagttctatggtggatgcaatgaggaattaataagttagggaatttacttggtaaattctagttctacttgttggaagctcggttgtatagacccatggtccccatactagttgtgtaagactcagttgattttaatttatcaattataattctaaaattagagtatgtctagtttatgaattttcactaagctagggcttaattgtgaagaaaagagattctagggtttatttgttaattaagatactttattaagtctaattaataaatatgttaaatggaaattttatttgataattaatttcaattattaaataaatagttttggcatttaagtggttgaatttgaaaatatggcatttttgagaaaataagataaatagttgaaaaatggtaaaattgcaaagtggtagggcccacatccatggccgaccacttaagtcaattttactatttatgttatcaatttgttaatgcaaaaataatttaaacctaaagctagttggattcctgcaaatagttagtgatggtctcaaattaaaagatgatgaattcacttgccttca

SEQ ID NO: 350288 - DNA, 957 bp, Cannabis indica
ctctcttacaaaacgaagcttatagtgaaagagtgagtgcccacacacatcaagtggtactcaatcatagtgtgtaatgctgtgaagaatccagtttcaagagaaggagattcggactcagatcttggtgatactctgctacagaaaggatacaagggtaagagatctgagtggaaggagacatgatattccgctgcaaccactgtaaggttcctgatactttatatgtgtttatttcatatcgttttagaagttcatatttaggatgttaataacatacttgttagtaaatctagatcctggtaaaataattctaacaaagttaacattcaaacgagcttcaaaagaactctttgtgaataaaacctgcgatcgtcacaagacatgcatcatcgaccttggaaggaaaactaatcccagcttgctattgagatcactagaaccaagcttctgtcgagacatctccagatacaacaattaaagacatgtttaatacacgatcattttgacccagtaaaagtgggaaaatcacaggtacatgattttcaaatcatgtccgcatttacactatgtgatatgtaatcaaatcccgtgattttaggggatgatcattgtaaacaaattacggtcaactttgtaattaattgtccactatgtaattataaatagtggcaaacaagatcaaaaaagggacgaaaaaactcatgtaagagagggcctgaaaaacaatcagaaatctgaataagattaactcgtggactatgcagaattttaactgcaaaaccacgtaaaaaaaccttatgtgttcatacttttatttttataacttttattttttctgtgtgagagtatcacggctatgctcaaatttagttaacgaaaatctgcgttaacaattattactacaaatttaattattaaaagataaataactatttatacaaaaaataaaaaaaa

SEQ ID NO: 350289 - DNA, 714 bp, Cannabis indica
atgtttgattcataataaattttttctataaaaaaaaaacttttcctatattctgcaaagtaaaaaaaattcacacatatatatatagttataaatatatatgtaaataattgaataattatttaatttaatagtattaatttagtttacatttattattttatgtgttttttaaaaaataattaatttaaaatagatattttatagaaaatttattaaaataattgtaaaaattaatttataaatatatgctacaataaaatattaaaaaatgagagaattaaggagaaaaaaatagttttggagagtgttgaacgaaaaaaatatcaataatgattattattattatagtatatgaatatttcttgcagttaaaacctaaagggaatatttgattattgaaataataagaaaaaaaaatgggaatgggtcagtcaaaaagaaaagagcaaattaaggagattttttctccacttccaccacttttacgttaagtggattttattaaaaaaaataaatgaaaaagaaaataaagctataaagatattgagggctgaacagttaaaaaaaaaagttgaaatctccagcaaagaattgatacgtcagagtgaaacaaaaaaaaaaaattagagaaaagaagagaaaaaaaaatttcaatgttgtgattaagagtcattctaatcctctttgatttactagacttcagaaaataag

SEQ ID NO: 350290 - DNA, 875 bp, Cannabis indica
aaggaatttcacttcaccctcggctctcaaagccttttcaaccatctctggttgcctcagtagtagtaataaccagatcatgtctaatctttgcactcaaacccgccaaatatttttctttcttactgaagtcagttggcacaattcccgctgccaacttggccaaccggtcaaactttgtcgtatattcagtaaccgacattccctcagtttgaaccaattcggtgaactctttccgctttgcactgcggactgcttcgttgtaatacttggagttaaacaactccttgaattcttcccaggtcatcactgtgacgtctcgagtgagggttatcaactcccaccacacgagagcgtcttcctgaaactggaaagtggcgcaggtcacccgatcattaccaaccactcccataaaattgaggatacgatcaatcactgaaagccactgctcggccttcatcacatcaggacctcccagaaacactggaggtgcctgcttccggaatctttcatacaacggctccatacggttgccaacaacaggttgttctgctggcaccgcaggaactgccacggcctgaaccacttgaggaggcacggcaggaggaccctgctgcctcaatctttgaatctcttcatcttgttggcggattctatcttgcatttccgcaaatctttgctcccaatcaggaggagcttgaggtggatttacagggcgaccaccctgagctctgccacggccacggccgcgaccacgaggattttggggattcctctgaccgcctccggtctcaaccatatcaccctgacttcttgtatttcgcggggcgtccatttaataggacttagcctgcgaatccataagccaggcaggt

SEQ ID NO: 350291 - DNA, 611 bp, Cannabis indica
tcagagaatattacaaaaacccaaaagactttgaaaatgcagtcaagaagcctcccaatgaacttaatgaagaccaatggcgactaatatgtgaattgttcacaactcatgatttcattcaacggttgaagcaaaactctatcaatcgacagaagatgaaactctcttcaacacaagggtcggtaactatggctgagattcttcgtcaaaaagtaagttaatatattaaatttctattttataaagtttactttaaatataattttctaacaagttatatttatcagcaagaaaagggttacattgagacatggaaagaatgtcatactaagaaagacaccaacaccttcatcaatgaggctgccaaaaataaatatgtaagatatataaaataataactttgcttgatttctaacttatttatattataggaagagatgttgacaactcgaaatagtactcctgaatcttcacaagtttcagaacttgagattcttcggcaaactcttggagagaagtgtggccatcaacgaggagtgggtcgcaaattgaaaggccaatcatcaagacgatgctcagaacctgcaactgctgatcaaccggacttacgg

SEQ ID NO: 350292 - DNA, 743 bp, Cannabis indica
gttagttatgaaggatgaatgttgttgtagaaaaagagatggatctgctggagaaaatgaaaacttgataatgtgattctctgttgtggttcatttggactaatgctagtaaaaaaaaaaaactaatttgtagtaattttttttttggttatgtaaaaattaaaaataaaattaaattgagtactaaggcagcacaagctaaatttatacattgccaaatatttacactctaaagaatcaaactcaagttaattgacatatagtactagatatagatattataaatgttattatgagaaaattataactgatggtgcagaatcaaaccaactaaactttaaacaatcaaagaattagtaatgataagattaacaaatcacaaataataatcagacaaaaaaagaatgaacaaagtatgaaattcaaaaacaattaaagcactaaaatgataaaatcaacaccaagatatatatatatatattaattcaagtcctatagatcgatgtgctctatagctctactccagatttggaacaccaccaaatcttctttattgattgagcaagaacaagtacattacagtcgagattaattctctgatgagttctctcaaagtgtttcaactctcacactcttacccaataatcttcttcatctacataagattcttcatacaaaatccaaacccaatctctctctttttatagtacctttctctctctacctctcaatttctctctctc

SEQ ID NO: 350293 - DNA, 1447 bp, Cannabis indica
cagctgatctaattcgaaccaagtaagctttacaattcattccatcaaaccctacagcttcagaagccctatggtgatcgaacttccttaggatataagatgttgtataaacaagggaatgatctgtctgttgagcattctctgccctctaatgtcgattcaacaaagaaggaagatgagttacctgacacctcaaccaccattaacgaatctgactcatctgagaagagacaggttccaactggacccattaaactcaagtttgaaggaaggaggactgatgcagaaaatctactacagaatgacaatttcattcctacatgtcatttctgtaataggagaggccacattcgtcccaagtgttacaaattgcagaactacttgaaagccatgatcaatcgtccaaatagtttccctcaaccaaataagtcacatggacgcaaacctcgtcgagaatggaaaataaagtccaaaccaaatcctgatgttggtttggttgcaaagctatccctgtctgcctttgttgaagggtggtacttcgacagtggatgttctcgtcacatgactggaaataagaaattgctagttaactacaaagatgaaaaagggggatctgtcacttttggggatggtaacaaagggcagattgctgggagaggtgatgtgaatgtgaatggagtagctcagctaacaaacgtcctatatgtgagaggactcaaagccaatctcatcagcatcggccaattgtgtgacgacaacctctctgtaagtttcactaaaactcaatgtttagtttcatctgatgggtgtgttgtcttaacaggaaacagaacagtagaccagtgctatgctgtatgcaataccatagtgtgcaacaggaccttcttggacaaacctgacttatggcactacaggctagggcatttgaactacagagatctccaaagattggtgaagcttcaagctgtaaggggaattcctgacataaaagtgtccaaggagagagtctgtggaccatgtcagcttggaaaacagcataagacacctcatcccccaattaatagactcctcacttctcgtgtgttggaactaatgcatgtggacttaatggggccaatgcagaatgaaagtatcagtgggaaaagatatgtaatggtcttggtggatgactactttcggtttgcctgggttgaatttcttagagaaaagtctgacacattcggatcgttctctgccttgacattaagactgcaaactgagaaagactccaaacttgggaaagtatttaggctgagaagtgaccatggaaaagagttcgaaaattccatattctcagagttctgtaatggaatgggaattcatcatgaattttcagccccaaaaactcctcagcagaatggagttgttgagcgaaaaaacagaactctccaagaaatggctcgagtca

SEQ ID NO: 350294 - DNA, 975 bp, Cannabis indica
ttaattaattgtgagaataacaatgcaagtaatgaacttattatatacataaataaaacccatgatttccatatttatatataaacaatattaattaagatttaagagttccatatttgaatagaacacgctttgttctactcttctagtcgaagcaaaagaaaagaccctattaaagtgagtcatacatttaatcatataatatatatgtatatggttttattaaaagaatactaaaacatgcagtgccccactgccatgggcacttactttaattttcgtgtatttgtaacataataattaattatgataattaaagtaaccaaaaggagatattaatatatgttattatattttcaattaacaaactatattatatatggtcccatatatcccaatactttaatatttgttttgtataataacaaaagaaaaggttgaactttgttactttagccaatcacgagaagacatgatatgcagataaatggtcagatagtccattagtactttttctctatctaaacaaattagttcaatcaaggccacccaaaaagccaccactagtatctataatactatacccctcctcgattatattaataaaattaaataaattataatttaaatgtacttaattataaattataatccctttaaaaaaataaaaaaattataatgtgaatacacaagttatgataatctttttttttatatatgatcatgtgatccatgtttaccattcaaatcatgcgcccaattgatcatggccttttcttaaccttataagacacgttgagcaatgcactactgcaattggtatttattacacattcacaaaattaagtcaagttaaaataattaatcaccacgcgtcagggcgggccttgagggtaggcgggctaggcgtgcgcttcgggccctcgaacgctcagggccccaaaattgtgaaaaaaaataatattaatatataga

SEQ ID NO: 350295 - DNA, 1631 bp, Cannabis indica
  modified_base (139)..(139): a, c, t, g, unknown or other
catcgtttgaactttttatgcaactttagccgtttactcactgaagccaaacgtatagccacataaaaagtcaacatgactctcgcatgcacgagttttttgtcctaaagatcatgggtatgaacgcttcaacctaccnctttgaaagagaaggttacttgaattctctcacacgtccagtgatgttaaccctttggcttttaaagcgaagtcatcgtttgaattttatgcacttagccttccttgcagaagctaaagtctaccacataaaattcaacacgactctcgcatgacacaccgatttttgtagcctaaaagatacactcgggggtatcaaccgtcttcaatcctccttcctaaaaagagaaggcctacttgaagtctgtacacacgcccaatgaggtttcaccgttaatggacttttaaagctaacgtcatcgcttgactttttatccactttaagcctttcttacgacagaagttgaagtttgccacataaatattctaacatgactctcgcaatgcatgtagttttcgtgcgttgaaagttcactgggggatgacatggcttcaaccctccttctcaaaagagaaggactgcttgaagtctgtcacatgcctagtgatgtttcacccttcggtctttaaaagtgaagtcattgcctaaaattttatgcaactttagccatttttcgcgaaagtaaaagtctactacatagtcattgaagataactctcccatgcacgtggtttttttgtgcgtgaaagatcactgggggtatgatacgtcttcaaactccttcccagaagagaaggactacttgaagtctgtcacaagcctagtgatgtttcaccctttggcttttaaagcgaagtcgtcgcttgaatttttatgcaactttagcctttcttcgtggaagacgaagtttaccatttaaaaattcaacataactcttgcatggacgacaattttttgtgtaggaaagatcactgggggtatgacacgacttcaaccctccttcccggaagagaaggtttgcttgaagtctgtcacacgcccaatgatgttttgaccttgggtcttttaacgagaagtcattacttgaatttttatgaaacgttgttctttcctcacggaagttgaagtctcccacataaaaattcaacatgacccttgcatgcacgttgttatttcgagcgtgaaagatcattggatttatgatacgtcttcaaccctccttccccgaagtgaaggattgtttgaagtctgacacaagtcaatgatgtttcaccgtttagtcttttaaagtgacgtcatcgcttgaatttttatgcaactttagcttttcctcgcggaagccaaagcctcccacataaaaattcaacatcaccctcgcatggatgtagttttcgcgtgcgtgaaagatcaatagggacattgtaaagaccgcttagcttaaatttggaaattagcagataattagggtttaattatgaaaattatttattgatatttaaataattatttatgttgatttatttgaattcagaatgcatttaatatgtcatatatagaaattttgtatttttgcatgttcggtgcccggcaacattggaacgcgttgtttggct

SEQ ID NO: 350296 - DNA, 552 bp, Cannabis indica
cctcatcttctaccacatgaacccaatagtcatgtatgtaacgtttgtcttatcgataaaattataacacatttaatatactcttttatttaagaattgttattctactatactttacttaataaaaaaaaaaatgctcctacaattgcatgctcgtaatattataaaagttttccttctcttatgaacatccttacatgccattaagagtaaaactatttattctcctctgaacatccttacatgtcacttgagaacacattatgcaatacaaaaaaaataacaaacaacaaagagtaggttagaagaccttatgcaaacttctctttatatcatgctcttccgttgaatgttactacatacaaaagcttaactttctatttattaatttacaccatagagttacagtgtcacctatagtttcatagttgttactctatcagttatagatacttgttctcataacattgggaaataagcactcaggccctttataattcccttatataattttaatgatccattcaaccaccactcagtatgagctcgctt

SEQ ID NO: 350297 - DNA, 687 bp, Cannabis indica
gcaacaccacttgctcaacatttcaagttgtctgcattcagtcaccaaaaacagatgcagtacgagccaagatgagcaaggttcccaatgcaagttgtgttgggagtctcatgtactctatggtgtgttcaagacctgacttagctcatgccatgagtagtaagcaggtacatttcaaaccctggccctgaacattgggaagcactaaaatagacaatgaggtacctacaaggtactctaaacactggaattgtgttcagtgaagagaaccagttcaaggaagaaatcactggttatgtggactcagattttgcatcaaacctagacactagaaggagcctaacgggatttttgttcactcctcttggggtcagctggaaatctaacctacaaaaagtagtagttttgtcatcaacagaagttgaatacatggctgcaacaatcaaagaagctctatggcttaaggagttgacaaagaagttaggtttcaaatctgaggatatcacagtttactgtgacaatcaaagtgctttgcatctcatgaaaaatctaatgtttcatgaaaagtcaaagtacattgatatcaagttacagttcataagggatatcgtgtcatctaagtaggtgcaagtgaaaaaaataagcacgcatgataaccctgcaaatattttcactaaaaatgtaact

SEQ ID NO: 350298 - DNA, 516 bp, Cannabis indica
cttgtaagtcggcctaccttgcccaagcagcagatagggcccctcattgtgatgttgctcctacactttggaataaactttagagatgcaaaatttcagaaagattgaagaccctgtggtggtgtattttctccaaggcaatcccggtgcatgctgagataaatagaaggttccctattgaggatgtgaattgccccctctgtgggacagaggaagagtctattgagcacttgtttctatcatgtactgtggcctatcacctgtggaggtcttctccgtggggtatttaccatgtctgtgacaatgacatccgtatgtgggactcggttaaatttatatgggatcttaaaaataaaggcatcaatgcggatgaggtcttcctatatgcatcacttacggcagatgttatctggtggatacgtaatgacaaggtccataataatagtctgattgatgtatttaaatgtattaacaatgttcgctcttcttttgcagtttatcatacctctttctttc

SEQ ID NO: 350299 - DNA, 1073 bp, Cannabis indica
agtagaataggcgcatgtttttaattttcaaattaagcggcattggtaagctctcattgatcatgacctgatatgacaactcttagtttcgtaggctgttcagactagatggacgccatgcgaaatactaggagtccgggaacctcggtctggtcaaatcaaggtcagggaggtcagtttcccccaaatgctcggggccgaggtagaggtcccagggacagggctcgtggtcagggtgaggttaacccgccacaggctgcccaggctgcccaagccactcaaggagcccagaattggaaaaataggtttgcagaaatgcaagccagaattgaggaacaaaataatgagctcctgctgtgcatgtaccagaaattccagtggcacctgcctctgttgtccaggccgaaccagtggtaacggtaaatagaatggaacctctgtatgaaaggttccgcaagcaggcacctccagtttttctgggaggtttgaacgtcgtgaaagccgagcagtggctaactgtgatcaccaggatttttgaattttatgggtgtcaccgggaatgacagagtggtgtgtgccacatttcagtttcaagaggacgctcttgtctggtgggacatggtgtctatgatacatgatgtcacaacgatgacctgggaaaagttccaggaacttttcaatgcgaagtattacaatgaggccgtcagaagtgtcaagaggaaagattttacccacctgacccagaaagaaaatatgagtgtgacggaatatacaacgcagtttgatcggttggcgaggttggcctcgggaattgtgccaaccgatttcagtaagaaggaaaaataccttgatggactgaatgtgaagatcaagcatgacctgatgattactacagacgaacataccacctatgatgagatggtggaaaaagcattgcgagctgaaggcgcagttgggtgtatgattgagtcagttaggactcccgggagtggcagggctcctacccttcctgcatcaggctttagcaggggaggtagtggttcggccatggaccagaagaggaaagcatccac

SEQ ID NO: 350300 - DNA, 1078 bp, Cannabis indica
gacgatgcacgtcttgtgacgactgttgttcttatttacgaaggattcttcaaggcttgttttgactgttagcttctgacttatcaggattataagtctcattgagaaaatttctgaagttaactgatgaagttacaagaagccttcccgagataggcacttcgcttactaggtcttgagccaacctgactgccacacttagtttgtacattatgccctcagtgcttctgtacttgatgcctcgctattcacattcagcgacatatggtttctcgctaatatactaagcaacagtttgtatatcgactcctcgcataagacattacagttagcaggttacaaatatactctgatgcttacgtaattattgaattattccataaaaagcgatttcatcgattcgtattccctttatcctgacacgtgtcttccactgagatggcaaccaaattttgggtataataattgccccttaaaaagttcttttagtaaacattactttttaataattacagagggcatttatgtcataatccttttttggaaagacgcgtcctttgattctggctgttgtacggtttcgagggtaattatgaattgcctcttcatatttttccctattcccaaccgttagatttcccaatctttggctttcttgtcactggacattctgtataaaagggaggctcaagtttgccatatttcacaaacttttggttttttggtgagatccatcttgagaatggattgtctctttcttgctaaaatgccccatctaagttcagaagtttaccctcccaaactcataataccaggatgcaccaaccattttccatttgttcccaagaacttcaaacctcaattggaaccagaaatggtggattccaaggttgaggagcttctgaccaatccaaacaaggggaaccccgtagcccatgatgggtaatcctcaaaagtgatccttgagcgtaagtgttattccttgcgaatggtagtttgagtcggattattattattagttttttgctccactgaccttttttcttttctccacaggaatagacatagatcatgtgag

SEQ ID NO: 350301 - DNA, 1657 bp, Cannabis indica
tttattagggtacaaaacccaacagtgcggtatgaccatagtacttcttgtagttcctctggccagttccctttagcttcttcaatccatttttttcaaagtgtcttattgagttgttcgacctgaccatttgattgagggtgtgccactgcagagaaactttttatgattccatgattcgtacagaaatctatgaacaattggctgacaaactgtttgccattgtccgagatgattttgtgtgggagttcgaaccgacatattatattcttcaccacaaagtcctgtacttttttagatgtaatttttgccaatggtttagcttccatctactttgtaaaataatctattgcaaccactgcatattgtaccccgcccttacctttgggcagttgtccgatcaggtttattccccaaataacaaaaggctaaggactttgcatttgagttagctcgtcaggcggtgcacgaggtattttttaaaatctttggcatttatcacatttctttacatatgcctttgaattttccatcatggtcggccaaaactatccttaccttaatattttctttgataggctttgccctgctgcgtagttgccacataatccatcatgtactttggacaataaccgtgcaacttcttcttttgtaacacatctaagcaatggcatggagaatcctcttttatacattacaccttccacgatgatgtaccgtacaactttcctcatcatcttccgacctttgtttctgtcatttggaagtactctgatgttgaggtaggctactatgggtgtcatccagttcggagttgtgtctatcattttaatttcctctgtacaagtgatgttgggctcttctaagaattgaattgggattagagtggctttatcagttactgtgctactcgcaagtcgggctaaggcatcagaagtcgtgttttcttctcttagaatctgcctaagagtgtaacccttgaattgtgcgagcagatcctatattttgcttagataagctaccattttctctccctgggcctcgtactctcccgaaacatgatttactaccaattatgaatcactacacatctcaatctattcagcatgtagctcccgagcaagtttcaagccggcaatgagggcttcatactctgcctcattattggaagctttgaatccaaatttgaccgccccgtgcagaggttgccctcaggtgtgacaagggcaattcctacaccagacagttgatctgtagctaacctgtctacgtgtaatttctaggtaggtctatgttcattgttgttcggtagggtttcttgtactggctccgagttgtccctaaggttgctttcttctttgcccgtgccctcaattacaaagtcagttagggcctatcctttgactgctatttgtggttgaaagattatttcgtactgacctaactctaccgcccatttaagtaaccatccagaaacgtcaagcttttgcaatacttaacgtaatggtcggtcagtgtatacccgaacaggatgagcctgaaagtaaggccttaacttccttgttgctaagattaaagtaagtaagctattctatcaatggatatcgtccttccgcttcaatgagtcttttgctaatatagtagactggatgttgga

SEQ ID NO: 350302 - DNA, 686 bp, Cannabis indica
gaaattatatgtgtataattttaaattataaagagttttgttataaaaattcaaataatttaagtgtaagaaaaataaattgctaaaagatccttatttaataataaattttgcaaaaaattaattaataattatacttaatttaattttaaaatataattaatcttaattaaagttttaaaagtatataaattaacaggttaacatcaggttacaggtcattttttatttatttttatttaatttccaatttaatcacaaccatttaatagtaatccaatggctaaaaaaattgtaatcatgatggttacaataaaaatgtaaccattaaaacctcctcctaatataatatactgaaaactaaacaaaaatataaatttggaaattaaagactaattgagcagatgaaaaacataacatagactaatcaaaatagagaaaataaagagcaagacagcctcaaccagcagaacattaaactaaaaatcaaaaccaaactcaagcccagtaaatcctcacctccccaccaattgcctctgcaacctgaactctggccaactccgcgaaccccaaggcaagcctctccattgaagatctacagagaaagagacaagagagatattatggagagagagatagataagagagatcattgcacacacacacatagagagagagagagagag

SEQ ID NO: 350303 - DNA, 772 bp, Cannabis indica
aactaaaaagaaagtaaataaagaaaggaaaatgagcaaaatgatgagctagaacaatcaaatccacttagaatgcaaattcaatgtaaatgccaagatgaatgcattagtaattaaattttgtcaaccgaaaatataaatgaacatatgatttttccaaacctatatgttatgggctctcaagattaagttaacatattcctatgaaaatctagacctagagaatacaaattaagcaccaatgtcccatgggtcatacaaagtcaataacatattcctataccatctacgaatcacacttttccaaggtgataatcttgcatcattcaagtattttctctaatcttatttttcccaaaatcaagattagctaacaacgtacaattggtgatcaagcaaaagtaggtagacaaacattaggcattcttgaatgaagaaaactttcttactaagaacattcataaaacattaacaaaattcacaatccaaggttcattaaaagttctaactaagataaattagttcatgctcaaaaacacaaaaatacccaaaattctatcatctattacaaagtttagaaatagaaaataaaatacaagaagagtaaaagataaagagaacaaactattagcataatctcaatctctttcatttcttgtacttctcctccatttcttctttttcttcttcttcatcctcttgagtttctttgaataatggctgccaagaaatgtgttcttccttttttttttggtataatggaggctgccct

SEQ ID NO: 350304 - DNA, 733 bp, Cannabis indica
actttatttaaaatcaaaatgtcaagtacaacttttcaagacattaaccctaacaaggaccccacgccactcccctactattagttatttaaattttaatctcaaactctcactaaaacaccctaaagaccccatgttaatttccctcccaaagatatatagtaaaacctacttaaatgaaatcaaatcatctcacatcaaatatttgtaacatttacttgttctattccctttatatcacataaaataattatttttcgtgaaataattattttagtacaaaaagtccttacacgagttctcaatttgccaaaaaatttacttttgagattttacctcttgagacaaaattcgaagcgactaaagtaaccaaaaaatcatgcaataatatataatctacaattattatccctaattcattttaatttaagcaaaaaatataaataaattgttcgtaatagttaattaaaaatatgagctttgatatactttgcttgtcctcaagcaaaaagaaaaataaagaaaataaaacaagagacaatatgacactaaaattggtgatctccacatttccttaaaggttgattaatgaacatagcttagagaaaaataaaaagattgtccagtgattgtgaaaaattcaagcacaagttttattccaattttgattactccaagtgtgtgtgtgaaatgccttttatcaaaatattacttgcaatttagatcaatttat

SEQ ID NO: 350305 - DNA, 1916 bp, Cannabis indica
ctattttcgacgtattttattagatgtttgccattagagtgaaaaaaatactaaaaaacagattaattgcgcatctcaacttcattttgaaaatattaatgaatttctctctgcctattttattgcctcaaataccgatatatttttatattgtttttgaaatgtatactgaaattaaaaaatatttctctcttctattacactaatatataatacgcctgagctatttatttatgctttttattttactgtttttttcttttacctagctagtagctaaaaccattttcttttgtgtgtgaataaaggtgatagtacgttatatatatatacactatttattattttgactcaaaatttgcaccattgtaatctattttttatgatgatcattttgataagtgggaagcatatattttttgtcgctacaaaaacaaataacgcgaagagtaacttttaatttttttttctatgtacctagttaacaaaataatcaaactttcatcttaaacaaaattaaatatatcaaccaattttataagttactaagtattgcgtttgatttttcgcaaaatatgtggacgcggatgaagatgacacgtggatctgaaagaaccatcactcacgaaaatcaattaagtcttgaataaaagaggaacaacatatagaagatgcctcccaaaaaagggcataagacacatctttatcctccgggaggctagggccatgataaggcatgtcgaggaggtaaagagattacttgaacaatcacttcacatttaacgccgcatggggcaagacgtattggaacttccataaaagatgtgatagatggcgtacaccccttttttacggcgatcacacaacaatcgatgagtctaatgacgactactttatgaagaatcacatcagtcaagaggagataaaagattatatccacctaactcctaagatacctacggtgtaggtcatgtatttcatattttgtatctactgggaatatgtgcccctatgaagctaacacagatagacaagtgatccattcctagggatccccccagaaaaacactagaaataccccaccaatagatggaaaaggggtcgatcgattttatttaaggaatcgcagagagaaaataggagagaaatccaccaagaacattctctgtaataaatactctcataaatacaaaagactcgtggactaaggctcattaatgccccgaccacataaaaatatcctgcattaaaatttctacagctcttctcatacattatttaattggttgtccaaaacctcggtcaacattttggtgctttcattgagagctgaaggaagcgtctttatacagacaacaatcagaaaagctagatcaacaatggtggaaactcgcaacaatacatgtcagcctcgtccccctcaggatgcacaaaacccagaggacgaagaagtagcctcaagagtgaacgtgggctccgagggacgagatgaggccaacgacgaagagtacgaagagaactttgacgactatgacacttacgatgaaggtagctatacaaacttactggtcttgaggcaaaaggttgctgatcatgaagctgagatcgtagcccaaaaagagcagaatagaaaaatgcaagaggtgatggtccccatgcaaaaagcaatggagacgacagggattcacatacaccctaaggccatcccagcaagactctaagaaacactggaagagtcctcaccaagtactcaaaaacccaagatcagggaaccaagccctatacggtaccctttcgaggaagaccatgggaaaaatcccacttcaatccctgggagaaagaaaaaggtgcaggatccgcggaaagtccgctcagatttctcgaaagggaaaggtctacagaggggcaggctccct

SEQ ID NO: 350306 - DNA, 983 bp, Cannabis indica
aggcactacctaaacttgaatttccgtagtgtaaatttcaagtttattaagcacgcgtgagtcgtgtcatccggatgggcttagtttttggatctaaatgtcctaccctaataataagtagtggtaacaaaattaactagtcttatcgcaactcatcactcatcattcatcaaatttcaatagttaatgatgttaaagagtattattgttaaagagaatactcttaacaataatactcaataatcaagggagttgattgtattaaataagttaaatattatgtttgaactaaaatttgtattatattaattattataatcataaattttaatactaatactaattgtattattcaacacataaaaaatggtctctgagtagcttataatgtaatttttaagagcttaagttgtatttcggtgggattgaaactggggtttgggtggggggttgagggtctaaggtcctgtgtggggtttaaggtccgaggttcgagaccaagctagagtacatgttttgaagtttgtgtttgtgaggtttaggtagtctgggttcgagttaggttttggggtacgggctcaggatttgagattttagccaggggcaagggttgtcctggtctaggtcgagatcagagttcgggtccgagacagggtacaagctatggttcaagttcgtgatctggggttaggttacagtgcgagttcccagattcttaatctaaggtattaggtatgggtttggaagtccaaattgaagcctaaatttgggccgagatctagggttgaggttagggtttgttaagctcacttatgctaaattattatagatattgttctacataaaataaataataaaatattaaatcatatataagaatatgaattaatttcactaattaattataagatgaaacactataattctctcatcctaaattatacttaaaaaattatatatgcaatcacttgtggtggtcccca

SEQ ID NO: 350307 - DNA, 807 bp, Cannabis indica
gttgtccgtcgtccaccttcttgattttcgaggcctcctccttgaatctctttatgaagttctttagggtttccacgggtagttgttttgtgtttgttagggcaatgacctcaaggttgatcttccttgtcgccacacactaccgccaaaaacttacttgaaacttgttccaacagtccactgatcctggctccagtttcttgaaccattcttcggcagatccgctcagcgtcagtggaaagcatagacactttgcatcattactaaccctcatgacggtcattactctgttaaaccgagacagatggtcactgaggtctgagtctcctgtgtacgtcgccatttcgggtattttgaaagttttggggagttctgcctctaggatgtttcgagcgcaaggttcccggttctcgcaattggagtctgagtcatcccccttttgtctcggggatactctagcgatgtctttttcgaggatcgccaatacagctaagattccctcattcaaagcgtcccttgacaccggtatcacatgcttattcttttcgaggtggtttcttaagtcaccatgtttttttcgttaattttttgtcttaaatcaactagggggtgccttcgacctttcctccctctttccctgagctcttagtgcacagacacgctctttcgatcctcttagtcctgagagccaagactctctcgagggagcttgcccttctgcgaacctttccctttcaggaaatcagagcagacctttcgggatcttgggcctttttgtttctctcggggattgaagtgggatttttc

SEQ ID NO: 350308 - DNA, 750 bp, Cannabis indica
aagcaagatattatgctcatggttctttcttttcggttgagttaggagaaaacccaagcttcatatggaagagtatttttgaaggtaagggctgttacaagcaggtgtcactcgaaccactggtacaggtgatcaaatctctgtattaagggacccttggtttcctcacagcaccaataattttgtctcttcaactcatcctgctcttcaaaattagtatattagcaacctttttaagacagacggccgtgcttgggacgaggagattaatagagatctctttaacgttcgagatcaggagctgattctatctattcaactaagtgcaactgctacaaatgaatgttggagttagaaatatgaaaacctcggccaatacttggtctagagtgcttataaatatttgcaagaaatgaaaggggcctggcctaatgatggtgtttcgggtttttggaaggagttgtggaatctgaaggttccaccaaaagccaataattttctatggagggtagcttcgggttcgcttcctacttggttttagctgaagaaaaggcatgttcttgttaattctatatgtcctttgtgtaatgcttcagatgaaacgatctaccatgctttggtggggtgtgattttgctcgtgcgtgctggcataaaactatggtggacgtgggcagcactttgaacgacacattctgcaattggctgctggttttgttcagccgtggtaggcagggagagatggaggaagc

SEQ ID NO: 350309 - DNA, 512 bp, Cannabis indica
aaaatacttctgtttctttatagatatttaaaggataaagattacattgaaattgagctttatttaggacataaaagcgaacagccatgacttttgaagaatggctcaatgcaatgcaagaagaacttaataaatttgttcgcaacaaggtttggattttggttcgaagaccaaaaggtatcaatgtgattggaacaaaattgatttttaaaaataaaagggatgaattcggtacaattgtgaggaacaaggctcgattggtggcacaagggtacacacaagtagcaggtattgcttttgatgaaacttttgctcctgtagcaagattagaatctattcatttgctcttgtgcattgcttgtattcttgatattaaagtttttcaaatggatgtgaaatttgccttcctggatgggatattgagagtgcaagtttatgttgagcaaccaaaaagattcaaagatcttcagtttccagaccatgtgtacaaacttgaaaaagctttgtatggt

SEQ ID NO: 350310 - DNA, 994 bp, Cannabis indica
atgtgaacgtgaatggagtggctgagttaacgaacgtactgtatgtgaaaggactcaaagccaatctcatcagcatcggtcaattgtgtgaagaccacctctctgtaagttttactaaaactcaatgcttagtttcatctgatgggtgtgttgtcttaacaggaaatagaattgtagactagtgctatacagtatacaataccatcgtgtgcaacaggaccttcttggacaaacctaactataccatcgtgtgcaacaagaccttcttggacaaacctaacttatggcactacaggatagggcacttgaactacagagatctccaaagactggtgaagcttcaagctgtaaggggaattcctgacatgaaagtgtccaaggagagaatctgtggaccatgtcagcttggaaaacagcataagacacctcatcctccaattaatagacttctcacttcacgcgtgttggaactaatgcatgttgacttgatggggccaatgctgaatgaatgtctgagtggaaaaagatatgtaattgttttggtggatgaccactctcggtttacctgggttgaatttcttatagagaagtctgagacattcggatcattctctgccttgatattgagactccaaactgagaaagactccaaagttggaaaagtatttaggctgaggagtgaccatggaaaagaattcgaaaattccatattctctgagttctgcaatggaatgggaattctccatgaatttttagcccctaaaactcctcagcagaatggagttgttgagcggaaaaacagaactctccaagaaatggctcgagtcatgatgcaagccaaggatatttcaaaacgcttttgggctgaagctgtcaatactgcctgctatgtgtgcaatagagttcatcttcgcactggtacttctcagactgcttatgagctatggaaagggagaccaccaaatgttagccacatgcacattttcggatgtac

SEQ ID NO: 350311 - DNA, 725 bp, Cannabis indica
ggcatgctacagtgctttttaaaattactgtgcaacctaatttgctaagcaaagggtttatcaaaagtgataaaatttaaactttgataaataaacatatactatattatatttataaaatctgggatcccgtatctacatttttcaactttacattatcaaaaaatattgcacaacgactagaaaattgtgagccctagttgtcccaaagatccaacactccaggtcgaactgtctcgatgtatacaatcttcatccagcttaaaactcactgacgttcaacattaatagcttttcctttacctgcacataacatagcatctttgagtcgacaaactcagtaagaaaagcataaatcataaatatataaccgacctacgactaagtgcccatacacctatcaataagtcataaaccatgcaaacatgtataattgagtcttgaacattcttgaccatagtataattgatcataataccacatgcactcagtactctagtcgtactagtgttggcagcatcaattcaatccatactacaagtacaattagccataataccacatgcactaagtactctagtgtgctagtgttggtagcactagttcatgctttcaaaagtataaccaaccataataccacatgcactcagtaatctggtgtactagtgttggtagcattggttcatacttttggaatcgaccaacatgttaggctatttttagcc

SEQ ID NO: 350312 - DNA, 653 bp, Cannabis indica
tgattacgacaagaaaattgcagagaagatagtaagtgtatattaatccttaattgagttctaccaatgagttagtatatataattcacatactaagtgcttgaatatatgcgtgcattaggctcaattagaggagcagcttactcagaaacaaattcaagtccagggccaaaatgatatcctgacgtaggcgcttgggacaccagagcattctggacatgtcagggctgctgggtatgctagtacttgaaatgttgtttctttagttatataaaaaaatcgtagctaatttgcattttatgatttgaaggttcctgaccagggcctctaaactgtttggtaggaagaaaagggaagtgtctgatgttgtgacttggcagcagaaggagattgaaaaattaaaagccgaactccaatcccttaaacagaagaaaaacactgccgaacaagaggaataaggagaggtggttggtaaggggtatgttccacaaccatacgctcgtgaggatgagggtccaccacaaacctatgctgaggagtttgtttcccttaacgagccagctctcgtgtacaatttcgatgaccatacggtccttgatcagcaagtatatctctgctctgacaacatcgacaacattgtggcccgagtgtat

SEQ ID NO: 350313 - DNA, 552 bp, Cannabis indica
gtacaatttcgatgaccatacggtccttgatcagcaagtatatctctgctctgacaacatcgacaacattgtggcccgagtgtatccgtacgagcatgagagtgatatcacagttcacggcaccccatacgatgattcacatgctcgggttctgatttcaaaaatgttgcaagaggatgctaaaatctcaatctcaattgaagagtgcagatatgttagggacgtaccaaacatgttctttccttggcctaaacacttaattgtaacatccgaggtaaattaattctcttataaattaattattaatgattactggagtttgaataccttcaatattcaaccatagtgaagtaggttctgcgaatataagtgctgcggtgggatggaagaataaactactgttatatctgtgttatttgtcattatacagacatgtttaaaatgtttgggggcattcaattacagtcgttatgctgccaaaatttcggtagaatttagatcaaatttgatatattatgttttgttttgtttagggtccactcgctcaaccgc

SEQ ID NO: 350314 - DNA, 629 bp, Cannabis indica
tcgttattagatgccttgaatcagaatttaatcgcaacgtccaggtgttgccccccacgcgtgatgagggcaattcctacaccagacatgtgatttgttaccgacccatccacatgtagtttccaggttggtttgtcttcattgttacttggctgaggtactggctcgagattgctttctggtatgctttcttctttgcctgtgcattctaccacaaagtcggccaaggcttggcctttgattgctcttcaaggttggaagttgatttcgtactgtcccaattctaccgcccacttgagtaaccgtccagaggcatctggcttttgcagtatttgtcgtagtggttggtcggtgtatactcgaacaagatgagcctagaaataaggcctcagcctccttgttggtaaaataaggtagtaggtgagcttttctatcaacggatatcggccctcggcctcgatgagtcttttactaatgtaatagactgggtgttgtacgctgttctcttctctgatcagtaggacactcacgacatgctctgtgacagctaagtatatccccagctcctcgccgtccaaaggtttagaaagtacgggaggtttagcaagctgtgcctttagatcttgaaa

SEQ ID NO: 350315 - DNA, 1717 bp, Cannabis indica
aaaactaattttgattaattaaaaaattaataaaaattaattttattctgataattaaatttttatttgaaaatttggattctacacaaaattctactaaaatttgaattttgtttcactaaaaattaatttttgaatcaaaagatatcacaaaaacaaaaattgggcacaagggtatgcattgcatactcctgcgcgcgcatgagggaagctgggcatggaaagggcagcattgcaacctacttgaccaagctagctcggcgtgcggctgcttcaaataaagccttgtgcgggtaacacctcggtcaaacacctgtctgaaacgcgtgcatgccgaggtccgcgcgcgcacatgatgcacaattttgggatattttcacgcaaattaaaaaaaatcataagtaattcataaaaaattcaaattaagttctgtaaaagcctaaatttattaatatttcatctaatttccagaaaaataattccagaacgaaactaaaactatttatcatcgtaaaattgtaattttcatacaatcatcaaaatgcacataaaccaacatgaacacatccaaatcaacaaaatcattgttttaaattcatatttcatgaaagtaaatcattaccatggttgtgaggccagttgttggagattattttaccaggatctagatttaccaccatgtatgttgtttaacatcctaaacatgaatttttaaaacaatagaatttaaacacatataaagttcaaaaaaacgttacattgattgcaatagaattaaatgactccttccactcagatccttaacccttattccttttggtcgtagagtattatcaagatcttagcctgattctccttcaggtgttggattcttcacagtcttacataatatgattgagtacttgacttgctatgtgtggacatgtactcaatcactaagaggctcgaaattttttgaagaacaatgaaggaggttcaaatatagaagaaggaagaagaataagtctcaagaactctctagttgtctaacaaattgtaaactacgttaagagtcattagttggataatgagaccatcttattccttttatattatttcacttagggttagatttaaattatatggccttaaaaatgattaaaattggggaaaaaataccttaagtggctggccacatagggggccccactaaattggaatttttactattttgtacaactatttatcattttcttttagaaataccatattttccaatttcaatcctttaaatgtcaaaactatttattaattattaaaattaattatcaaataaaattaccatttaatgtatttattaattagaattaataaagtctcttaattaacaagtagatcccaaaacctcttttcttcacaattaagccctagcttagtgaaaattcataaataagatatagtctaattttagaattataattgattaattaaaatcaattaactgagcttacaagtagtattgtctcaactagtgtgggaaccatgagcctatataaccgagcttccaataactagtagatctagaatttaccaagtaaattccctaacttattaattcctcctttctagggcattggtaaagtttaccagtatcagatgtatggagtgagactgatattgaacttggataagataccacaaacttacctttatatctttctaagtcaatatcaatggt

SEQ ID NO: 350316 - DNA, 621 bp, Cannabis indica
ggtatacaccgaccaaccactacgacaaataatgcaaaagccagatgcctctggatggttactcaagtgggcgttagaattggattagtacgaaatcaacttccgaccccaaacagcaatcaagggccaagccttggccgactttgtggtagaatgcacaggcaaaaaagaaggcacagaaagaaatcccgagcgagtaccacaaccaagtaataatgaagacaaatccacatggaaattacatgtggatgggtcagcaacagatcaactatctggtgcaggaattgccctcgtcacgcctggggcaacacctgcacgctgcagtcaagttcggattcaaggcctctaacaacgaagccaaatacgaggctctaatcgctggatttaagctagcccaagaaatgaaggccgaacacattgagatctgcagtgattcacagctggtggtaaatcatgtatccgacaaatacaaggctcggggagaaaagatgatagcatatctgagcaaaatacacaacatgctcccacaattcaaaagctacggtctcagaaaaattccaagagaagaaaatacaactgtagatgtgttagcttgattggcaagcagcaatgtaagtgaca

SEQ ID NO: 350317 - DNA, 697 bp, Cannabis indica
attaatggcattaaaaaaatgataaataaatggctaaatagatcttaactggctggccataggatgtgggccccactaattacaattttgcaattttatttaactatttatcctttctcttacaaatggcatatttttcaatttcaatcatttaaatgtcaaaactatttatttaaaactaaaattgattattaaattaaattgtcatttaatggatttattaattagacttaataaagtcttttaattaataaataaatcctaaaatctcttttttttcacaattaagcccttgcttagtgaaaattcataataagacatagtctaattttagaattataattgattaataaaaacaatttaactgagtcttacaagcagtattgtctcaactagtgtgacgaccatgggcctatataacagagcttccaataagtaaatgtagaatttaccaagtaaatcctctaacttatttattcctccttgcaccactatagatttggaattgtaccctcaattatatagagaactctatatgttccatgatatagatacgctatgaaattatccatcgttctaatcccaataatcaaagatcctctatagatgatttacattaagtatggataaatttaccgttccacccctcaatgtattttagccttaaaacacttagcttcctataaatgatatttca

SEQ ID NO: 350318 - DNA, 1013 bp, Cannabis indica
  modified_base (55)..(55): a, c, t, g, unknown or other
atatcgaataatgagggtttttgtcttgaactataactattaccatattatgtcnctctttttttttttttttttgagcaaactgatgtgcttggacggaagtctggtcaccccaggtcttctccaccctccgaaaccccttaacccaacctctttcccttttcctcccactcgatccgacctctctctctctttattcactgtctcacacggacggctaggccacgatggccatcctccagtccacggtagtcgaaacgaaccacaccacggtgctcgcaaccacggcaaaacccaaatcccaaagatttttatttttctctctcgccggagccattttgggttttctctcgccggagccaacctcactcctatatctctcccgcccgccatggccactccctcgctgtaagtaaattttctacttctctttttctcttttttatttactctgaatgagtggatctatacatatacatataatcaaatgtgtaggacctaattctatacatatgcatatacaaataattccaaacaaacttaggcagaaaatagaggcatttgctggcatgaattaagaattgaatgtccctttgttttttgtacagggcatgggcgtcttctctgggttcactcggctatgcaagggtgttaccgtcgaaaattatactcactaggctatgcaagggtataagtttgagtgtaattattttttagaggcatggtgctacagctttgaatcttgagactcatagaatttgtgaatataagtttgaaataaaattgtttgggtataaatttatttactatttaatgtaattgtttctgataattgaaaaaatttgttagatcttgaaaaaaaatgttagtataaaaggataattgaatttatgttttataaattttattttattaatttttatttatatttattattttgtctgaaattaatttatattattattgtaattaaataataattcatatataataaattagtttaaatgtatttt

SEQ ID NO: 350319 - DNA, 925 bp, Cannabis indica
cctcgtctatgccctcgaattcgaacatgactaagccatggtcaatcaaagtcttggagaggcggccggtctcagcagtaatttgaaaaaagcggcaagtgtgagatcagatgccttagacaaaatattaagagatggagtaaattacgaagtactcaccgcggccatggcagagcttatgtcttggacctggtagatagagttcagggaggcgcaagcagcatatctcttaggtgggaattgcgtcagatgggagacaaactagctagtcatctccgaggcaaacggagccaaggtgggcccaacgaagtgattgaaccagtccttcaacaaatccatgttcaagtcccacggattccgaaaggcttcctcctggagagtattttgttgctccttccaaaggatcttcttcagggcctccacctcagcatgcccccgactgtactcgtcaagggcgtaattgtgtttggccactcggagattctgcctctcctcgtccgcaggaaccggcgtcaacactatgccgtgaggcacagtgtattcctccaccttagaaggaatcccagagtcatggctcagggccggagtgtccaccctgtgggtccgcttagaggactccacctccaccatcttgccctttcgcttacgctcaagggcaaccgagtcctcttcttcacctttttcaactttctcctcctcatccaccaagacgatggtgcctgaaggggcattggagaaggacctcccgggagtgaccaactgagaagcagccggaggtggggaagcatcaggactgtaggcttcagcaagagttgccaagagttcatccatgggcctggctgctgcaacaaagaaaataagtaaagtgtcaggacattcacgagacagcatacacttagcagaaaaacaataaaactagtcctac

SEQ ID NO: 350320 - DNA, 577 bp, Cannabis indica
attgcttcaaactttttaatctacgcaaaaattcttattaatcataaatcgcacataactcgcacataaatcgcaaaaattacgaaggcaaaatgtttctgatgtcatcgcacaaacatcgccaaaaattgcataattttccagaactacaattatatcgcacaaaatcgcataacaaatcgcataatatcgctcaaaaagtccaaactaacagaaatcttaaccacattgtcacatcgcacaaaatcgcacaaaacactaaaatccagaaaaaccaattccccctagcctagattcttctccaaacacaaaacttgcaaatctaaactttaataaactacatatttcagttatatatatcacagattctaaatttaaatgataaattgcaaaaaaaattaagggaagccatacctggttcgagtgttcgaatgggttcgtggacggtgccgggaacgatgctgaacagagactggatctcgtgggtcgactgggatcgagtgggtctcgtggattgactgtgttcgtgtgggtcgaatgggttcgtgtgggtcgacgtcgactgggttcgtgggtc

SEQ ID NO: 350321 - DNA, 512 bp, Cannabis indica
aggatagggacctgggaaacagaactaggaccggaacatagtacccaacccagacccgaacttgaacataggacccatctcgtgacccgacaaaagaaatggatcagattgggacccgagattgggacgtggatctggacgtagggctttgacaaattcgtagtcggtatctggattagggacccaaagccctggacccgaaccctgacaaggacccgaacccacacccatatcttaacccagtcctaaacaaaaaagtggacccgaacccgtaccctgtgacccaaaattggaaccaaaaccggaagttgaccgggactggaactaggacttggacttggaatcataactaaaattcgacctagatccagaatcgtcatcggaccaagacccggacaccaaatccgacctagacccgaatcccatcccaaacgtggactcgggacccaaactcgaacctgaactaagacccaaacattgaacaagactagggacacagaaccagggtcggg

SEQ ID NO: 350322 - DNA, 553 bp, Cannabis indica
cagattgagaaattcatagcaattattcactttcatatagctcggagaatgaaaaccctacgataatcgtgagtaaagtgttaaaagctttttagaaccttaataaagataaacttgttagataattaggttgttactaaattaaagggtaaatatcttttggactatgtattttgaaatatttataaattagatattttattttgttaaatgataaaatagacttggcaattttcaaaatggtataaataggattttaaattgaatttttatcaaaataaaatttaatgataatccgatttagatgtgttatgacaaaactaattaaatttctttcttgttaataattgtcttcaaattgattatattaaaaaaaattgttcaaaattgagctcacgatcctatttgtaatattttaaaaaatacagagtttattttgtcatttaacaaaacagagagtctaatttgtaatttttgtgaaacacattatccaaaatagtatttaccctaaactaaaaaactcaatgccattctgtttaatctctcaaattca

SEQ ID NO: 350323 - DNA, 469 bp, Cannabis indica
tcaaagttggcctggggattagccttccaaaaatcaaagaagagctcgaggccggcattctccaaagcattgaccttctccttcaaacggttcgcctcggtgacctgggcgtccttatccttctttagccgaagaagaacttgccgcagagaactcctctcatcctgaagatgatcaacttcagcagataaggtctcgatggtttcctcaaagcgatcagcagcctcgaggtcctttgttagcacgatgatcttcttctcggcgccaaatagcttcttgttgacctcacccaactcatggcaaacagctccagtctccgccctggcctcctcagcttccttcttggccaagtccacctccgtcctcaaggtgtcggacagagccgcactcttggaagtagcagatttagcccgggagtaggtgtaagccaacttcaaactggcctacataaaggaaaaagtcagcatat

SEQ ID NO: 350324 - DNA, 691 bp, Cannabis indica
atacttgtgagtagatctaagttcctggtaaaataacttccaacatgctgctcctccacagtcagcatgttctactactaaatcagtaccatggaaacctccaagtgtcagtgcactcaaattgaatgttaatgttgtagtggacgtttcaaagaatgttataggtgttggagatgttgttcgggacgtaaatggccatgttgctgttgctctttcgatgtcgataattggcaatttctcatctcataaaatggaggccaaagtgctagttcatagcttaaactaggcccttcaacatcagttgccaatttcacaggtggagaccaacacactgatggtttctactactttgagagctcccttcattgcaatcttttcttttcaagctgacttgattgtagatgtctctagttttttgttctttttccctaatgtatctattactcatgtcaaacgtacaaccaacaaggctgctcacaggttgactatatttgcattaggtatggctgaggtttgtttttggttggagaatattcctccacctatttactctattattgtaaatgactaccctttttattttataataacatgtatttcactaaaaaaatctatatatctataaataaaggaaagcataagagcattgatgtggcatcttttccttccatttctctattttctctatttt

SEQ ID NO: 350325 - DNA, 515 bp, Cannabis indica
tttttatatttttatggatgaacattaacaagttcttaagaaatttataataatgctttacttgttcaacgtcattctccgaagtgaataacacctttaaataatcaaggtcattatttactgctcaaatatttctagaaaaaattagaaacaacaagaagatgaaaataccacaaataatcaaagtgcatggatacagggacggagggactttagcctatgtgtaggctaaagccctcactcaaatatatacattaaacttttcacatattgatatatacatatattaattcactttactcaacttattaaagcccaattcacaaaagccctcactcaatatttcaatcataattcatgggtctactcttattctaatcaagcccattttaaaaatagcccaatacaaataataataaaaataacactttatctaaaaataaaataatattattttacatggaaatttgataatccatgctaaaaaattagacatggtgtttaattatccccaa

SEQ ID NO: 350326 - DNA, 658 bp, Cannabis indica
ctttgagcagcagggattttgccactttcctttgtgaattcaagttctttttgtgttcaaaccaagctaggttagctcttagtttctctctctttaaatttcttgaaaatcaagaaaagatggtgaattgcatgcttaatttggagtgttgttgctgctgtgtttgtgtgttaatttgtaaagtttaaacttgtttaatggagtagaatagagctggttgtgatgcatgctagttgtgttattcaaagttttgaattttggctcaaaagctatgattttcaaggtaatttgatgaatttcgtggctgtagttgttgtaattgtttagtgttgtttgcagagggatttatatgcatatttgagtagtttaaatcaggttttaatgcatgtaggtgagctttagccaagtttgagttttgaactcaaagcttggagctcacatggcctttttcatatctgtgatttttgggttgttttgatgctttggaaatgtttattggggtatttagaacaggtctggaaggtttggtttggtttgggtttgttttgagtgagaaacgaaattttgaagtttcctgctcagaaccggaattccggttcagcaaccggaattctggatggtgttccaggaattcccagaaccggaagtccggatgtag

SEQ ID NO: 350327 - DNA, 934 bp, Cannabis indica
atatagaaaatataaaaaaaaaacgatttacagtaaacagcgtagaaatactaatttttgacatagataaatttcgattcagtaaaagctttcttcataagaattatgggaaattcaataagctttctataggcaccaagattgcgagaattggatgagtatttaaagagatatgacagttttactgagacatgtttcattctaaaaaataagaaaatgagacctacgaatattctcctattgtgatcaataaataagtaaatgtagagtttcttacctcaaatacatcaagctgcttggatcgatagacataagatgatggtgatcaaagatgagagtgaagagtggtatagatttggctaaggatgtaatggaaagatgacttgaaaattttagggttagtcttgctcagatgtgtgggaagaatagaaccatataattttagggttaatgaaacctatactattctgactgttattaggtttagttttatgaataataataataatataataacaacaataatatgataaattattaaataaataaatatctaacttttaaatttaaattgtaagctctcaatcccgtaactttagggcttagttttgacctagaaaaattacgaattatgatatagctatttctacaaaatttatagatctttgaattatctttccaacgccactgaatcacctcaatcggagttataaaactccagatatggtcgttttagtaaaatagtttctaaacctgcgaatttctttaaacttacaaattttctcacattaattaaataataatattatttaatactacttatacaattaattaaatcaaataaatatatcataaaaaaaacataatggactttcatatcaggctttaattaaacgattacctacttataaaaataccataatattttactttc

SEQ ID NO: 350328 - DNA, 1435 bp, Cannabis indica
tttattgttatcttgtaacttggagcagacctttttagtagggtccaatcatgcttgttgtaggatctttgttgccaaggaatactcttcaaggagtaagtcttttacgaagaatttttttcctcaatttgtgttttgaagggcctcgttagtctttgtgggcagacatgctgctttgagttagcttggtctcttcttctttccctttcgtcaagggatcctgctagcaagatgtgttttacctcttggtcactgtagatcagaagtatgagagcaaactgcaggtggatctggctagacagagtaaaaaccaggtggccagccacattgagggagcattgcctagcccgttgaatgaggctatggccgatcaggctgtggaggtattggctggctcggttgttgattttatggtcggccaccctgttgtggccaaggtcggacaaccttttggaggccaggtcaatgctacagtttaatcccatctatacttgattggctttgcctccgacatgattatcgtagagcctttgtgcactcctttcaatagctttttagcttttttcttggtaatgcattttagaggttgtattgggataccacgtctatgtgttatgttgtgcaagattggacaccctgcagccatcccccgaatccttactttctgccatggtttttatttggaagtatgctgctgtaggtgtatccatgttggttatccagcatgttcgttccttttgaaacaaagatgcttagttctttgaagaactaaggggttaccaagtctaccttggttgtcaaggcacagttggctagtcgagcgagtgcgttggctgttgtgtgagcttcggggacttcattttagtatagcctttgagctgacttaacaagtcttaatattagctcaagtaggtcatcatcttttgcattgagttgcatgttaacccagagcatgatgtacgactagttaagagtcgtggtgtatgtctaggtgttcacccgcgctttgtgtgctagcttgagtccaacaattacagtaacttattcagcctcattgttagaagcttcgagtctgacctttagtaatcgctcccaggtgtttttagggctaggcctacattgggcaagtggtaaatgcacctcctaggttgagcagttttgctcttgctctcgcttcttcgctggctttacttttctcccaaacattgagagatttggggagatatgcttctacatttagccatgaagtttgcaagatcttggcctttgttggccatgcttggttgacaggtggccttatattgtgcgagcctcggttgtctacttgagtggtcgaccaggtgctacaagttttggtgacacctatcaccgtggcttgttggcatacattgcatcgggagttttggtaggagagtgaaccatgcacacttctcct

SEQ ID NO: 350329 - DNA, 648 bp, Cannabis indica
agcaaaaattacaaaaataacatatttcacatataaatcaaataatgcccctagactttaataaaatctctggaattgataaattataactctaatattcatttctaaatattagggtccacaagtaattatttttataaataatcataaaataacagaaattaatgctaatgtcctttactaatctaaaattactaaaccggtcgttacagtaatggtggtttataagttagctatgatctaaactttttattgtttgaattgttgaagaaccctatgttttagtttagtaatttccttatgcaaatatttagtaaaaattctcatgttcattcgagtgtgctttatgttaatttcttgttattgattggccaccaatagcttgatgttgagttatattcaattcttgaaaggttaaatgtaaaggacttaacttggatgatgcaagttcttaatcttgttagattagattagagataacatagaaatatgttatgtccttgtgtaacatttgagaactgtgcttggaaatgacattcttgagcttgattggcataggaatatgtttgattagattcaaagatttatagcataaaatttggaagagttttatgcactttaatgaagttcttgttaatctgggatttt

SEQ ID NO: 350330 - DNA, 666 bp, Cannabis indica
gagcttcgctaaacagagatgaattttcactgagcaagggcaaaattgtgaacaaaagagattctaggttttatttattaattaagagactttatatgtctaattaataaatatattaaatgacaatattatttaataattaatttttagttattaaataattagaattggcatttatataataatagtataaaaatgatatctacgttttttatttttttttaattttttttaaaaaattaagatataataataataacaataacaataacaacaacaacaacaacaacaacaacaacaacaacaacaacaacaacaataataataataataataataataaaagaatcagttgtacgtgatactaaataatatttcaattgtacttttaccacgtttcattaaaaatattaattaattttaacaaaacctaacttaaaaagataactttaatctcaagtatcacataattatagctaaagaacattgttattggacaacagtagtgcccaacacctttcataggtggcacattacgattggttagagatagctcctaaatcttatttttctttaagttatatgagacctgctacttaattacactaatagtgataccatgaaggattgccttttagcatttctcataactaaaatatcatattt

SEQ ID NO: 350331 - DNA, 744 bp, Cannabis indica
aattgaccattttacccctagctttagaaatacccaagttataactttaagggcatttttgtcatttgggtaaatgagaaataggtggctgcctagctttttgacagctagcaagctgattttttcagcaagggaaattgattttcccttatcatttatctcatttaatgaaattaagagaaaagaccaaaaaattgaagaactctctcctttccttctctctcatttcggaaccagaaaaatcaaggggaagagctgctgatttttagtgtttttagcaaagaaaccttgggagattcaatctaaggtaagccataatagaacccttccttgtttttaagcttttcttgatttgaggttatgtttttgaataatgagggttgttaggttaagataggtttagggttcgaattttagggtttctttgagttgatttcaactcctagcagctggttttagtggttgatattgattgtatgcaactttgaacattgagttcaaagctttgagctttaatggcataaattgatttggtgtgtttttctgtgaaatactggttggattatgttgtgaatacattgaacaggtactctggaaagtttggtaacatttggtggaaaattaagaaaaggatgaagtgttttgggaatactggtgcaaactggctagccggtttgcagtgccacaaaaactggctagacggttttggcaggattcccgaacacttcgttttctcaatttttg

SEQ ID NO: 350332 - DNA, 674 bp, Cannabis indica
ggtaaaatatttccaacacgcctaccacttggcccacaggtggagcttgtgaccagggattggacggctggccgttcagagtttggccagtatgcccagttggaatttcttccgagctgctcagtgggatgttggatgtaggttggtgattagcaacttggtaggctctttttatcagtatggtggccagccttattcggtcgtcgatggctgcttgttgagcattcaatgtttccatctctctatctctccgttcggcgaacttccgcctttgctatttgaacacaaggttcattgcagcacggagctcttcctgatcatgatgcatggtattagtatgaccttgcatgagcccaagagcattacggaggttctggatctcagtgtcatctccaatggttgtctggacatttgttgctaaagggatcccagtgctgggagtacccagttcagctgttgaactggtgtttccagtctcttgcacaccgggcgtgattcaggccaaaggagatgtcacaccttgacccgtggtaggtggttgcgtgtttggttgttcaggattggtggctagtgggacccttgcattccctggagtcttcagtgcagatctgccgccagtggatccacctgatcaaccacgcctctgcgagtttgtacctgttgggttttatgcc

SEQ ID NO: 350333 - DNA, 525 bp, Cannabis indica
tctgtgattgactgcctcagacgagatcaccaaaagtgttactccccatttttatttgaacagcatgctaaagctaatgttgtgcttgtgtctgttacttttcatttttgtcagttttttagatgaacacattattacgtactgttttgttacaatcctcttttaagattatcaataaattgttttttattttcatatatagaaaatgcttacacacgactctaaaaatatactttgattcaaccatccataaaaacatgaatatgcttttgttgaataatctgatataatatgcctaaaaccctacctatgccgataataaatgaataactaagcaacagcataggtattaattagccaagtaaatttacacgtaatatatacagagtcaaacaatatccaatgcaaaagagaaaagtggcgtttggctcacttcaacgggttaaaaatagagaaaattacaccaattactgcctttatcattttttttttctatttgtactgtcgcacggtcattttaacttt

SEQ ID NO: 350334 - DNA, 744 bp, Cannabis indica
agtaaactacgttgtagattatcatatcagttaaaccttgtgtactgataaatcataaaaatacagttaatcacataatatttattactttccactgtgcttacgactcaataaacaagaatatcaatggggtaaggatttggatgaatttataaatcaaataaattaataaatgatcacttgaacaaaataacacattaaacaagtaacgaaatgaaatctgtttctttattgataattaaatagaaaagattacattgaaatagggttttattagggcacaaatcctaacaaaatcttctaataacctttatagaagacgttgccaagcatgttcactttccacgcaatgacccattagtgatagaagccgaaattttaaacaagaaagtgtctagagttctcggagacaacaaaggctgagtccacattctcttcaaagaagattttaaagccatagtccctggggaaaaaaatctgacatcctacccagtaactccaaggctttaatggagacacacttgttccaatgggaaaagtacaactacctgttacactgaatgggatgtttttggcagcaacacgatattgtcttttatatgctgtacttttatggtggtggattgtccaacaatctacaatatcatcctaggatgacctgtcttaattgactttgggggtcgtcacgtcgattcaccatgtgacagtcagtagtcccgtgatccgtaaggggaaacaccgggt

SEQ ID NO: 350335 - DNA, 770 bp, Cannabis indica
atgtgccataaaatataaaatatgtattataatactacattcaataaggtgagaatactcttttaaagtgtgagttatgtcttaattagatgtaattgatggattaagaaaaaacttcagtagtatttattttgtatgcacatattattacccatagcacaatatttggattattctaaaataaataaatatttgattagaaatattttgtttgattcttatggaaaggccgagtttaataaattacaaaagaaataatggaatgtacaaattttaaattattttgtattcataagtaatgagtacacttagattaggcaaataattggatttaattaaatatgctcaagttacgtgcttgtagatcgtttttggcaataaaattattgtcttctagctaacaatgacagagccttgctataccaagctattgtttatagtaatataataaaatcaagaaaatgctatatttgtgcatattagcttttggaataaaaaattaccaagttgaattattagtcaaaaagtacttctctaatctttactactgcatatgaaaaaggtgtgatatcacaactaacaacttttagcaaaacaaaatacaactttttattaaaattatagaattttaatataagtatgtatataaatattttttcttttttcttcaaaagatatatctaacctatattaccactgttgtccttattttctccttaaatacgtggacctggataaggctgacacgtggatctgtgaggatcaacaca

SEQ ID NO: 350336 - DNA, 1440 bp, Cannabis indica
acaatcagaacaggtatgttacatagcctcagagtagtacaagagaaaacccaattctctcactcagacactccaagaaacacaatttggacagtgccacactcttacttttcactctgtttcttcacaccccaatcagactacactctctctgatttttctctctctcttgcttcctaaagagctaacatgcctttatatataggcttacatgaagataaagagtaagactaacagatttaactacccgaactctgaggagtgaaaaatataactaaattaactaacttccaacaaacttggaaccggttaaaaaataacttgtttatttgtttggattaccaaaacctacaacctagtattaagagattctcacattctacaaactttaatatatgtttacgttctagctatctatatttctatttaagtcggtaaaaaaaaaatactccaatcatgagagaagaagaaacaaataaaattaagaaaagttaagtagtaagttgaattatcaaattaagagaaatagtatagggtatataaatatatatttttaaatatcttaattttaaaaaaaaaacgtaaatgatcattttttggataattgttttgaattgcatgcagctatgtgtaatctctttttaatatttataaatatttttgttaattaataaataatgaattaattaatataattaaaaaattataaaaataagagaattaaggagaaaacaaataattaataattaatgaatcaattaataaaattaaaaattataaaaatagaagaattaaggagagaacaaataatactaaatagagagaatgacttcgtatattaatttttaatttgggggaattacttcatattttaaatatccttatatacattagtatttatatataagaaaagataattttaaaatacaaaagtttatgtcatactgccaacattggaaaatcaattgcaagttaagtgaaaattacattttcattgggttttctttgtcaggcaaactaaagtccaccactttcacttagtcagcactaaaatattaaaaacgtaaccaaacacggtaaatttttagattctcattcccacttctcccaatacagcatactaaacattccctgtcacatcaccatctcatatctctcctttatatatatataaattatagtattaattaaattttatgtgatgggattttccatgggtggtcaggccatttggggttgcctcaagtatattcccaataggtatggcagtgccagttataaaataaattgttgtcctgttttaaattggtgatgttttaactctaatcttctggcattcttttatcttgttctctctttaataagattagagttaacttttctttagcctttttgtcattttttcatcaatgaaatggtgtaagtttgttctgttctaat

SEQ ID NO: 350337 - DNA, 962 bp, Cannabis indica
aactaaaatattaaataaaattaactggcttgacacgtaacaatcacctagtatatatatatatatatatttatataattatagatcgttttagtgcttatagtctataattgtatttaggaccatatataatagacatataaatatggcagaaatagtaagtacaacatacatagtagtaatatatatatatatattaattgttttaatcactacgtataggtatttttaacatatttcgattaatagttatttacaattttttttatatgtatatatattacgatatataatataatttaacaggattttaattttaattttaattttaattttttttagaaaaacatagaataatttagaaagctaaaattatgatttaatacaactcgcaaaaaatataaaaaacaagcttgcataaatctctcactagatttccaaaaatatttagaaaaaatagtgagagatttcctgtaattaaattgtacactgtaaaaaataaaaaatagatgtaatttatttatgtaccaaaatactacccataattctaattatatatatatatatataatattcataaataatcgctatccaccaattttatacatatatattatatatttataataactaaacataccctagctacccaataaataaatattctaatatgaaaatataaatgggcatgcaactaaaattaaatatataaattggtccatattatattggtcctccctaagaactagcttaaccactttttatttttctctctattgctttctccttgcaattagggttttcccaacctagtgcacctttacatctctataagccctctctagtaaaccacttgaggctaactcaagtgaccataagaaagcgtggactggggagaatatatctgtgggtctgggtttaggtctagactatgcaataatgtttgtacatataaaatgctt

SEQ ID NO: 350338 - DNA, 805 bp, Cannabis indica
taagggttatttcaaaactcaagacatgaattcttagtttctttattgaatattaatttctagttttcaatatatcaaattgcttctattattctatgttcaatgctatgattattgttttaatcttgtttggatggccactaaattaggttttactttaatctaccgtcatcttagaattactattcaccgaatagtctaggattttaagtgtttgtgataaattgcaatttttatttgtgatgaaaaatagaacctaggttaaataaattatatgcttcatagatttgttgcctaaattagtctatctccataaaactcaatattttatctaagttaaataaattgcatgcttcatgaatttactcaggttaaaagagttaattattgagcacttcgccttaattacatacaataggaagattgggataattgactgcttcagcgttatctgtgggattaatagtttgattagaaactgaaaattacatttttttaataggaactatgaatgattgttgtgttgggttttatgccctaaataaaactccatttcaatgtaatatttatattttaaatatcaataaagaagcagatgtattttcattacttgtttgtgtgtcatttggttcatgttatcatttatttgtttatttgatttataaattcatccaaatccttatcacatttatattcttgtttattgtgttgttagtatagtggaaagtaatcaagattatgtgattaaatatatattcctagatttatcagtacacagggtttaactgatatgataatctgcaac

SEQ ID NO: 350339 - DNA, 558 bp, Cannabis indica
ttgtctctaattttctcaaaatgtcgatcgcgtttttcatgcctttgaatgtaattatgcaaggtcattgatgcaattactttttttacttgcttctggtggataactaggcatatctctcaatattttttatcttttcttccatactccaaaagttctttcaataacacttcgaagagaagaatgtgcctagttgaatatctccttataaccagtaggtttgctacctcgttgaaattgtggaagatggtatctttggcctttatgtggtcctaaaaaacctataatttgtgggtatcctgcatccactaaataatattttcctgtcaaataaaatataaaacataataaaaaaattataaagactttaataatttataaatgtgtttagatggcaaccttggggtggttttggaaaatttgaagttgaattacgtaaaactgaatagaaaatacttgtatcatgagcagaaccttcccacctagcatatgcatatataaattgcatatcaaaattacatattgccataacattctgagttggtaccccttttctac

SEQ ID NO: 350340 - DNA, 699 bp, Cannabis indica
ttgcgttctacgtatcccaaacagcctatgacggtttggccaactatttgtctaaaaaatgctctttgtagaataaaatcatattatgcacccctatcacataattttttgtattttattttacttttttacttaaaataaactaatagaattcttatgttaagtattagaatcaatggtttatgatgtatttgttaattctactacaatgaaatgtgaaattactaagttttttttttatatctcttctaatatttaaataaaatcataatagctaatttatgcacagatagtattttggtatattagtaaaaacttatcagtgtatctttttgatcacaagttcaaattccaatagaccgttttttttttttttgttagcttactatatcaatctttagcactcaacattatctatcctatgtattacatcaatattattcaaaaattaatctaagtatttaaggattagctaaatatatatataaaaatatttttataaaagtagattaaagaaagcataccttataccaaaaattatgtacctgacttccgataaagtcatttccgataaaatcctaacaaccaagtttaagcgaaactaaaatcaaataattttatcctaattttactgaaatttcggtagcataacgactataattgaatattttcaaaaaaattcaaacctattaataacaa

SEQ ID NO: 350341 - DNA, 1197 bp, Cannabis indica
ggagggacagggagagacagagggttttccaccaatgaagataagggttaggattggaagaggagggaacatcgacagatgcaagagagcaagcaaggtggtaagcagatttgacagttataatgccagaggaatgaaatccccaaataagagaatcagtcgatgtagggtcaatggggattttgaggatatgttcaacttggtaagaaggaaagaaatactgaagtttgtggacattccaagtagaatcatgattaataaaggaagaaacaaaagcttgggactggtctaaaggatgtaagagaatgggacgttgaatattaggtatccaattgggagcagataaggggacattaacaccagtaccaatcttccaaaccaggcctttttgaagcaattggcgaccccaaaggatacttctccaagtaaaagaagaattgtggccaacaggggcattcaggaaatcagaatgtttgaaataccgagctttaagaacagaatggagaagggagttcctatcattccaaatacgccaagcctgcttagctagaagggcttggttatgagaggacaagatacgaaaaccaagacacccaaagaactttgagacagaaataacatcccaattttcccaatggatttttttagtgccctgagatccccaccaaaatttagctatcaagctttgaattttcaggcaaatcaatttgggcactttgaagcaagacattgcaaaagaaggaatggcttggaccaccgcttttattagagtttccttgccagcccgagagaagaatttttcattccaggagtttaatctggaggagactttttggaggagataatggaacatggaattagaaactctgccaacacaatgaggaacaccaaggtacttactaatgaagccctccccatgaagttgaagggattgacaaaattgaagctgagcatcagcagaagtgttatgggagaaaaggatagaggatttatctctgttaaccaattgacccgttgctttattgtaaagatcgagaataacattaagggaatcactggctcgagagtgaacttgggagaaaaccatgctatcatcagcaaacagaaggtgagacaagggctgagcacccctgcagatctgaattccagaaaaatgagcattagtttcttgcaatcgaatagcagcagaaagaccct

SEQ ID NO: 350342 - DNA, 596 bp, Cannabis indica
aaatttgaaataaacaatataaaactggtcaatcggctgagaaactgcttaaccggttttacaggtgctgtaaaactggtcaatcggtttgcctacaggcgaaaccccaattttggttcgaaaccaattttgctcgaggtgttttctagagcttggattagggtgttttaaggatgtttaaactaactttgaaccagtgggagttagaatttgtctcgttgttaattagggtttgtttcagggattggataagttgatgatcgagttttgttatcatgacataggacccaggatcgtcgagcatggttccactcaggtcggcccgcacactcgatactggtttgaggtaagaaaagccttatgcactgctaagcatattggtaagaaacgattattatcatttgtgactcagttatgatcgaggtaataatgaggaacaattattatcgtttgtgactcgattataatcgaggtaatgatgtggaatgattactatcatttgtgactcgattatgatcgaggaatagacacggtcattaccgttattgagaatgaatcaagatacgatcattaccgttatgagtaattactcttga

SEQ ID NO: 350343 - DNA, 998 bp, Cannabis indica
gtggggattccccatcttagtggttaatggggcggtggtgggggacaatttcaatacccgaagcggggatggggcggggcggggataatactatccgcaccatatccgaccccgatatagatatatataattttttttgtttttttttcaaactttgacacatatttagtttttattttctattaggttatgctttttttaagtaggtttattttttatcttctatgaattatgaatgcataataaatatttgtgagaatattagtttaatttatttttttcaattattttaaattaatttgttttttcattttaccttaatggatacccgatgggttccccataaccgatgggtattcccctaccccgaatccgttggttattagacggggatggggcggggatgggggtataaataggtagcggggatgggggcggggattgcattccccgtacattaaccgaccaatttccatctctaaatacaaccattcgccattaagttttataaattattatacaagatgagatcggagagattttgaggaggaacatgattatgaggccatgtatgaagagtcacatgaaattcatgaagaagagaaagttgcactcatatattagaaaggaggttgaagtagatgtgcaatttttttcattaccaaaattgtataaattcttctattttacaggtagtaatgtgctaaaaggtttcatccatatattactcataataaattatatagctcatcatacgaatgaaatacttaaccattgattaggtgttggctagtaccaattttttacaatgggggtggggccgctagtgatggtgatgatacaattattgtaaagcccgcttagtttaatttggaaattagcagttaattatgaaaattatttatagctatttaaataatttattatactgttatttattgaattcagagatgcatttttatgtcatgtagtattttgcataattttgcattccggtg

SEQ ID NO: 350344 - DNA, 535 bp, Cannabis indica
aacgttaatggcgtttttcatttacgggctcgatttttatttctgttacgtaaggatggtaatatttatggaatatatgcgccctgtgaagttttgagtgatttggataagtttttatagtgtttcggtgagtgcaaaaattaggattttcgagttttatagtttttaaaaattcctaagagatcagaaatcgtatttttgtcataacttttgacttgggtttccgttttggacattctatataccgtttcgaagcttggaatgagctctacaatatggtacgtatgttttatagcaaaaatataagttttattttagtgtatttatactactgggtttggtagcaaatcctagattatcttatatgaatattaagtagtgttttgggttaaatacttattggtttactattgttgtgacatagggccaagatcatcaacgatagttctccacttgggttggccgaaatgtatgaatatggattaaaggtaagaaaagtatattgtattgcatagtacgttgtatgtaatacaat

SEQ ID NO: 350345 - DNA, 536 bp, Cannabis indica
ttaattaattgatagaaatattcaaactcactgactacatagacatatgcgagataagaataataactattaattcatttaattaatgagataatatgtccgcctcgggataaatagagtaataaaaatatacaaaatgagacagcaagggtcatacgacccattgacccacatacatgagcagggtaaaaatatctatactcaatcgtctcgcgttctacacaacatagtagtcatctcgcttcataactacaatatgaaagtaatgcaagatgaagcatatatacacttagtatttttttctctcaagacatataagaaggataacttatatttgacgagaaacaatcttcttagtcagcatagtcattttaaggataaagacaaggagcagttgggtagttattagatattatcccatgtgcaaataaatgaaacgtggaaatgtccacgcttcatcagcagttgtaaatgaaacgaacccaaaaaaaaaaataactgccaacctatacacttataaataggggtagaatcca

SEQ ID NO: 350346 - DNA, 1060 bp, Cannabis indica
gggaacatcatccataaaagtgattatatctaaaaaaaaatatgaaaatagaggtaaaaattaaaacaaataaagtgaagtaggtatacactgtaattttttttaagtcgggccttgtgtgaaggttttggttctatcagcccattgttcattctttgaggccaggatttgcgtagtaaataactaagtttaactctcagttgtaaataaatatttaagcttaatttttttatggtgataatacttaagttatatatatttctgaaactttcataggtatctgactattaaatgaagtcatcatccacgtgtcgttttcttattggtatatttaaactaattttaacaaaaattaaaaacttgaaccaatcagagattgtcaagtgacaatttatttaacaattaacagtcaaatacctacaaaagttatataattataactataattactgtcaaaaactaaaattaagtatttatttataatcgataatcaaattatgatatttgtgctacaaattattttataatttaattttaaatctcacatattttattaagtaatactaaaaatttatttctttaaaaaaaaaattactaaaaatccatcgctatttatattgcattatctaatgtgttatttggcgccttaaaatattaaataacagtgcttttattactaaaaaaaatggacattttaagctactattacaaaaaattataattaagactaaattgtctagtatattattaatagggatgtttataaaatagtcgatccaatctaatccgcacgatccaatccaatccaattcgcaaagtacggatatccgcacttgtgcggattggattggattgaaaaattcaaaatccgcacttgtgcggattggatgttgattgacatgtaaaagtaaccgatccaatccaatccacacatatttataacagaattaaaaaattatatatacaaataacattttaatataaagaaaatagtaatttaaaagtttaatacatataatacaattatattgaaaaatttaatagataaaatgtatattct

SEQ ID NO: 350347 - DNA, 561 bp, Cannabis indica
gaatgcaaataggaaaatgaatgtgaatgggaatggaaatgggttgggaattggaatgggaatgggcaagggaatgggaatgggaatgggactgtgaatagcaatgagaatgggaatgggaatgggaatataaatggaaatggaaatgtgaattggaatgggaattcgaatgcgaatgcaaatgttaatataactaaaacccactaggatctaatgtgtcaaatcagttttatactaactatatattaactaatttattattataataatttaaattagattgcacctataaaattaaccatgaatttaaatcataaaatatataaattttattataaaatataaaaccgcgcaaagcacggtaacattcccaaataaataaaaaagtcaaagattattatcaatatacataagtgatgatgaactaatacataatggaaataaatgataagataattattttcttacatctatttatttactttattaaaattaagaaatgaaaaacttgattaaataaaagataaaaaacaaaaaaaaacaaaaaaacaaaaaagaata

SEQ ID NO: 350348 - DNA, 1015 bp, Cannabis indica
gcataaaacccaacagataaatgtttctttatgcctataaaagcttcctagcattcttctgttctttcaaacattttattgcctcgtaaaacattaaagaatggtagacatttatttgttgattttgaaataaatatgtttaatgttgccattcttcctgttaaggcttagacttctttcagttttgttggtgaaggcatctctattaaggccttgaatttttctagatttgcctcaattctccaggcattaactatgaaaccaaggaactttcccgaggaaactcaaaaagaacacttcttcgggttaagcttcatattgtaatttgtaagtattccaaagcattctgcgaggtcttttgtatgatcttcacattttaccgactttaccaacatatcatcgacatcgacttccatatttcttccaattttcttttcgaacatcccattcactagtcgctgatatgttgccccagcattctttaaaccaaatggcatgactttgtaacaacaaagtcccatgctggtgacaaaacttgtatgttcttgatcagggacatgcattttgatatggttatatctagaatatgtgtccataaatgtcatcagctcgtgtcctaaagttgcatccaccaactggtcaatccttggtagtcgaaaacaatcttttggacacgctttatttaagtttgaaaaatcaatacaagtcccccatgtgccgattgatttcagaacaagaataggatttgaaatccatgaggggtagaaggcctcatgtatgaaatcattggttaataactcttccacttcttctttaagtgccccttgcctctcagaatctaagagttgccttttctgcctttttgccggataatttgggtcgatattcaaatgatggaaaatcactttaggttcaatccctatcatatatgaatgggtccaggaaaattgatcctagttttcctttgaaaagtttgttaactgctattttagtttttcatccaaatttttcccaa

SEQ ID NO: 350349 - DNA, 735 bp, Cannabis indica
aattaatgtgtaattaatcatatattaaatatataccttaattatttttaaattattgtatggttgggaatcattgcctataataatggatagaaaagtgggaaaccctcaccgagagatggagccaattcacaagtaggggggcaaattgttaacaaatttattttgagggggaaaattataaaattacatattaacatatttaattatatataatgtatatatttatgatttataattaataaaataagttgatttggagaaatttttatttttatggtttgaatttttttatgtcaaaaaataagtattttagtaaaatatcagatatgtttttttggttattttataatttatttatagttgtcatgagtttagatttatcaatatttttagtttagttttatattttatttatagttgttgtgagtttaatttgtcattatttttatatttaatttctttgctttttttttttgaaaaaagtttgtatttttataattttaaatctttaaaattataaattttgtaaataaaagtttgatactgtaaaattataaataaaacacaacaaacaattatttttgtaaaacaagaagccgatcaatgatgtttttttttttttttttagttttcgttttctttatgtaaaattttatcttttggagatgacaaaaatttaacaagtttgaacaagatctctctccaagtattcgagttagagataagtttcta

SEQ ID NO: 350350 - DNA, 700 bp, Cannabis indica
cgtgagtttcacaactccactaaccgagcacaacgctttagcaaatcaccagtgatattgcaaagcacgacaacctttcaaatgctaaacatgttgtggaagattccttccatattctaatgcgtggtcagcaagttggaggtacaaaatgggcatccgagagaaagctgcaagctcccaacactcttaagtcctaagagcttgggataaaagttatccatgttcccagatgaatcgtatgtggcaatcacggaagggaaccacgtcagattatcttatatcttccactaactagggttatagaaggcattgtaatacccaaaagttctccccaccagcaaaggtggaaaggatttcgagattttcattaattatgcgctactgaaagtgaatgaaagtcgcacacgctccagaatggtagcaaattagttggtccaggaagaccttagccagaccttcctggaactctataatgcctaatctagagctaacagttgcatatcgtctaacaccaaatcagatcttgtcccccgcgtcagaccttggtagtgcgcgtacgtgctttgtagctcctttttgcccaacaatttgtttatacaccaactttctaaggtgaaacctttgagcgacatgtgtaattagtcctatagattgggatgtcgtagctgtgtaccgcgcaattaggaggtttcctagccac

SEQ ID NO: 350351 - DNA, 1163 bp, Cannabis indica
tgtcatattttcctattcaaccatttaaatgtcaaaactatttatttaataattaaaataattatcaaataaaattgacatttaatatatttattaattagacttaataaaatctctttattaacaaatagaccttaaaatctcttttcttcacaattaagccctagcttagtgaaaattcataaataagacatagtttaattttagaattataattgattaatcaaaatcaattaactgagtcttacaagcatcattgtctcaactaatatagggaccatgggtctatataaccgagcttcccataagcagatcttccctaacttattaattcctccttgcatcactatctatttggaattgcactctcaattataattgatgttccttgttagattacatcttagatggctccaatcaacagtaagagtctggttaaagtaatacaaaagtgtacacttgacctatttactattggttcttagggatctattgttgtgatgttatatcttagtctgaaacaaataaatttcttctagactaagtcatcaacataccaatctagtattagcattaatgtaaaatacttgcttaagattaagtaatcattaaagattccataaaatatttcataaggattaggtattttgcctaagtcattcaatagacattataaaattctcctatcttatccttataattctgataagttatctctatccatatgaatggttagatttactttatcagtttattctaaagttcctatcatgatcataacatagtaagctatcactagtgtcatccaaataatgatgggctagaattttaaagttcttccactcagataaggtactgtgatactatgtccaagaacttcgttagtatcaatttctattactataataacaagttaattggaacaattacagaatcaagaataaattctaataatgtgctaatttgtttattatattatatccatgtctaatcaaaatatgtgtgccatagagatattgtagtgtattgagtatagtctagagttcaaagagaaagaactacatatgtcaataacttcttccacccctaagtgttatagagatactgtggagttatgaatataatctagagttcaataaatataaaagatcgttgaactgcat

SEQ ID NO: 350352 - DNA, 799 bp, Cannabis indica
gtggtagacttggccttaatttctgaggaggccgagcagcaagtaatgaaagagcaggctgcaaaggatgccgtcatggcatcaaatcctcctgctagtggtaatgtcagtaaggggaccgacagtggcaaccctgagcacaaatggaaggctgaggcttccgaagcttcaaggggaaatagaaatttttgggaaaatagaggtggccgtcagggtcgcgggtcctcattccgatcatatccagaatgtcctaaatgcaagaagcatcatccaagtgagtgtccagccaaggcatgtttccaatgtggcatggtgggccactttatcagagactgtccccaagccaggaaagaagagcctaagaagaatatcgcttagaacccgggccgactttttactataactcaggctgacgctgatgctagtccgtcagttgtgacaggttaattgtctattaatggttgtatttataccgtgttatttgattcgggagctactcattcatatgtatcgagtagagtgataaaaagtttacataagccatgtgatatttatgcttcggggtttggaaccctgttaccctcaggagacctgatagtatgtataaggtggattcggtccttgtctttttggatcgacggttgtgagttgactgccaatctaattgagttgcaattatctgattttgacataatcctgggaatggattttctgtctaagtatggagcaatgattgactgtaaacgaaagatggtagtgtttgagcctgatagtgctaacccagcggtgttcgtgggta

SEQ ID NO: 350353 - DNA, 729 bp, Cannabis indica
gtgagggtatctcacgttctcttcgtcttcctcagtgaatggtaatgggggggttcctcagttttgaccttcttagaaggttttgggacaaagaccgactactcgttctttatttccttcacatatctcttctgagcaatattgctttctcctgcaatatgcggccctcccaaaataaccaggatgtcctccctttccgcaggaataggttgtaacccctgactatttgggttatcaggctgacggagctggttgtatccctggccctatcttctcacatactgcttaaaatggcctcgagcgatgaaactctctatctcatcttttaattggtgacattcgtcggtcgtatgcccaatatctttatgaaatttacaatatttgttaggatctgttttgctcctcgaattcctcataggctcgagtttaccaaaggctaccttctactcatgtgcgaggtaaatattttcctgagtttcattaagctcggtataaatagtatacactagcacatatttgtcatggttcttttgtttctttctatccttcgatggttccctgattctgtcctttatttttcggacaagaagcccccgaattatcaattctcatggaagcagtccctgttgaaacactgctgggtttacctctcgagcttgttttcaacaagttcatttccttttgggcttcttccttctgaacaaatacctgagctctctcgttgaactc

SEQ ID NO: 350354 - DNA, 509 bp, Cannabis indica
tcctctgaattctcacgaccaatgtgaccacaccaacacccacaagaccacaacttccatgtcaaaatcttggaccccatgccaaaatcctatcccgtaagccacacacaagaatcgtactattgctaaatcttgaattcagaaccacacccaaccgcacccaacttctcagtcggaccccacacatagtagaaaaaatccacaaaatcacccctccactcaaaagggccccacacccaaacctttctgcatcgtcgataccctcctggacattcgaaccctcttgtacagtctaaccccctacacaaacaaacaccaaacacacaacaaaaccgccatataaaccctatcattgactcccacgaaagaacttgacacagaaccctggccttggagcacatgcaatacacttgaatcacacgaacacactaggtaaaaccctaacacatgtcaatagacaagactatttatagagagtacttaatttaattataatgtgattagtgctc

SEQ ID NO: 350355 - DNA, 1190 bp, Cannabis indica
tacctctttatcaatagaatttcaaatttgaaggaacaagcgagcatcctcatggagccatattttcctttaatcgtctttttctttggaaggatcatcagtcaagtgatcttctttgtcaatactcctcaaatacagttgaatcgtcttactccatttcaaataatttgaatcaatcaatttatggtccgtgattttagacatcacgggaaccacatcagaaactacgattgatttcgaatctgattttatctctgccataatctcgaaatcaaaaacaattgaaagaaaaaagaaagcaaacacaaaagaatgaacacccaaacacgaataaggcaaaagtatcaaaccacaaactaccaagaaccgctggagaccgatgcaaggaggacgaggaacgaccgagagtgtgacgggtgttgactgtcaccgaagaagatgtcggacgcgccctcacgcgtcggcgcgtgggaatctggacatcgaaaaatggcggcgcccacgcgcggtgaatctagatgccagaatttggggttttgtagttcggtaactgggcattccttctatgtgggcggtgagaataaactttcactccaaatagggtttccgaaaaacaaccctaatctcttttttttgtttgtttatgaaccctaatttcgaattacaattatcattctaagtatggctctaataccatgtacagaatggtgaatagaattgtgtattatattccattgaatagtatatatttatatacaaagctagaagactaaatgggaaactactaaatacaaataggaaactattaaacacagttaccctaatttttacaactaatatacagttaatattctaacaccaagtcagttttgtttaaaaaatcatgaactttgttaactaaaaaatcaagccaatgtacttatatggatattaaatatactccttaaactttagacagttatcaaaaattagtattatgctattctgttaattttcttagttatcttattgatgtggcattatattgtctaatttaattttctacctaagcaaactaaaataaaaataaactttacaaaattttattttgatttaatctttaatatattctatgtttcaactttttttctttggtaatcaaattagttttaagtttttttttttagaaagtttagtttacaaatataatt

SEQ ID NO: 350356 - DNA, 541 bp, Cannabis indica
taaggtaaaatctagagtgatcgtctgaagaacataacgaaaactcatatccacccctgaatgtacctccatcttcgaatgagatgattatactttcagtggatataggcatattgactctttgcagagaatgatcttgtcaaaaccactatgaacaagatacaaatgccatagatttataaaatatgtggttgtggtctttcgatgacttaggtctagttatatcaaagagttcttagaatagtccaagtggatttggtcacaaattattaaactcatattctataccaacatacagtttgaatccattgacagaaaatgatattaaacatttgtgaaagtttaactgtattgtattctggaaatagaaatataaaatttctatttggaatctaaaatttaaagtcaaaggcttaaatttataccaaatatacaatgatttttattctggctttgaccaccactactaatctaactctaagtatgattgcctatagtaagcatatacaagtagaagatttctaagattgaggatttatat

SEQ ID NO: 350357 - DNA, 934 bp, Cannabis indica
ataaagattagagcaatcatataatttgagttttaaattttatttataaattaaatattagtttagttttattattttattagttatgtatttagtaattttttttaatttgaatctgcgtttagtgaattttaatagtatttatttttatatattttaaattataaattctatcatatatataaatgatatgatacatgaagttacaagaatatatattggtaaaatagttaattatgcggatgtctttcttttataatcttaaatttttttaaaaaaaaaaacttgatttcaataatttgtatatttaaactcatcgagaataatagcaagactacaagtgagatatggtgatgataagggtttgaatatagtagtgactacaggtgagatacaataattacaataatttcaaaaatcatactgtaatgatagcaatttgaatgtagtgataattataagtgagatacggtgataacaacgatttaaaaataataatgtataatgatatatctattctatataaaatatggttatgtaacaaaattcttaattcgaaggtattttttaattttctatgttaattttaacaaaatatactattacttaatacaattttttttttattaatgttataatattattatatatatttaaaaacaaaaagtatataaatattttatataagaaaatttaatttaaatttaaaatatttaaaatattgtagatattttttaatcacatttttaacttgttagtttaactttgaattaaattaagagacaattccactcaatcgggaacacaacgatttgtcatgatatctcacttgagttttattgtacatataaaatattgtacaaatatatataatcaattaatcacatccaaaggacatattaatatagccgcaatagctaaaaaaaatcttcaa

SEQ ID NO: 350358 - DNA, 600 bp, Cannabis indica
aaaatcaaacccctaatcaaaacttttcaaactgaaccaaactttccagacctgctaattagaccccaatgaacatatttcaagtgataaaacaaagcttcatgcacaaataccaaaaatgccattaaagctccaagctttgagttcaaaactcaaacttggttaaatctaataaacatgcatcaaaacttgatataatctactcaaacaagcataatataactgtagaaatcaaacccacacacaaacaaccactacagcaactaattcctcactttcactttgaaaatcatagtttttgagccaaaactcaaaacttgaacaaaggtaattagcatgcatcacaaccagctctattctactcaattaaacatgattaaacttctgaagacaacatcaacaattaacagcagcaacaacaaacaaaaaccaagcatgcaaatcaacatatttctccttaaaactcaagaacacatcaagaaggctaaaggaactaataccttagcttgaatcacacttagggttgctgaaaatacaagaattgccaagaaaaatcccagccctagcagcccaaattccaaccgaaaagagagagagaga

SEQ ID NO: 350359 - DNA, 840 bp, Cannabis indica
aagttcaactaacaaactctaaatctaatttttttttacttattatttataattttcaattaattattttttaatttaaaatttaaatatttatttttaattaattttattttctacttaacacaatattaattgtagctagaaaagtacaaaatattcaagttatttaatcctacaataatcaatacaaccaataatataataaagtaataatggtgtaagtggtaaaattattatatatcaagtacaatgacatgagttcaatcctttcaaaagatataattttttttaatttaagattttaaattaattttaataatttgaatttcttttttttttttctaaaaaatagttcatttttttaatattaatttactaatatgaaaaaaatattatactataaaaattttaaagtttgtaattattgtggtggaaagtcttaaacttttatttgttaatatatattgatggttgtgttacataaagtatagtagtgaacaacaaaataacacatgcaataataataataatcaaataaaaagtgtgtcaaataaaaattgaataataaatttaatcaaataaaaaaatacattataaatagatgaaaaattttgtactaaaaaattatctgaacgatttcaatttaccatctatctcatccaaattttatagtttatgacaactttaattataaggtgtgcttcaaacgtactataaacgatcgaattgctgcccttgtaaagacatgattttttttattatttattattaatttaacttttaaattaatttaataatttaaaatttttgtttcaaacaataatgtatggaatatactat

SEQ ID NO: 350360 - DNA, 444 bp, Cannabis indica
ttactttctgcttctgcaaacacttacagtttttatattttcttatatataactgtcattttgtaaaaacacggtttttcagtgtgtgcatgcgttattgctctggctggaagtgaaaaagacgaatgagggtaccaggaaaatcgatgaagatatgagagtgggaagagccacttctggtatggtagggacgacgatagagaggaaaaaaggcagagtgttgttgaatcgttgatttggtttggctatcctggaagtgtgagttgacgaaagagagggaaggaggcggagggagagtatgcgtgagttagggttgcgttagggttaggggttgggttttgtctgattttctttctatgtataaaatatgtaattttttttaagtaatagaaacacatatgggttgggttgggttcatcgggccacaaaaagcccagcccgatt

SEQ ID NO: 350361 - DNA, 760 bp, Cannabis indica
tttttatattttggtttataattatcaaattaaaaaaaatacatttaattttttaaaaagcaatatttttgttcgtgggggctatagcccccacattgataagagtaggtccgtctctgagtgtaattaagtatcgagtctcatataacttaaaaaaataacttttaaaaattatcgttcatcaatcgtgaaacaccatctatagaaagtattagagaccactggtgccccgtaacagtactcaattcagtcacacctataaatgcacacatttaatgctcatttatatactagttagccttttagttagaccaggttggacaatatagattttgatacttttcaattaatagaatgaaaacaatagcatataaatattgaccatatatactacacttactaacgaaattgactatgtgaattttgcaagtcattagaccattattgaatggccaatgtgttaaatttggctaaaaaaaattagactaatgctatattttaatttgaccataattctaatgcatttgttgtaaattgacttaaaaaattaactatgttccttgacatgtttgctaagacatgtattccatgttgctatttttttattattaattcaaataataaaaaaaatctaattcaactctatcatattttttaaagagaaatttcattaattgaccctaataatacaacttatatcaaaaattggacccttttattttttgtacaaattgataccactaattcaaaaagattccta

SEQ ID NO: 350362 - DNA, 602 bp, Cannabis indica
catatgcatagaaatatatatgcacataatttgcattgcctaatcaggtaagcccgtgtcataatacaatatcatatataatatcattgtaccacctaattaagtgagcccgtgcaacaacttggcactaatatatcgcatcatctaatcagacaatctcgtacctactcatggtacttatcatatgtcactaacgcctgtacctacacgcgatacgtcgctaggaaaaaaatccaacaatgatttcaatctatgccataaccaggaaatttcatatcactggcacccgtacctacacccgatacattgccagaaattttgcatcacctaatcaggtgagcctgtacctacgctcagtactcatcatatgtcactgacgcccgtacctatgcccggtacgtcgccaggtatatcgctcaactaatcaggtgagcccatatattatgtccatagtatcattacattatcattacctaatcagacaatcgataatttcagaacatgtcatgccatgcgatacattatacttttcttacctcaagttctggatcaggtatgttggctgacctgcttggagacgatcgataatcttgggccctatg

SEQ ID NO: 350363 - DNA, 475 bp, Cannabis indica
ggcataaaacccaacagtaaacgccacaatcacaattgcatcaaaaaaactatgagtaataagtagaaaagaatagagattttaattaacatatttaagatttttatctcatttttacctttgggacaatgtcgtgactagctcgggcgtattgaattctcgggatctggctatcgtcattcaaatctactgccaacatttgcttgttaagtgggaactcgctagatgcatgtatcaaagaaggcagcaggtcctcccagggcttcatgatggcctttaactcacttttactgcaaatggtggaattacagtcatacactgttattttccacaactcgatgtcgaccttaactgtatctaatgtctttattcttgaagattcaaaatgtaatgaccgctctagtaatatgattagaaaaggcaattagcactaatctttattattttattattatttgtgaattaatttatttgt

SEQ ID NO: 350364 - DNA, 559 bp, Cannabis indica
atttaatattaactcacttcatggaatgtaaaagaatatatataactactacctctggacaagtaattacacatatagtcaaccaaaataaataatattttcttcaacatataaaatttggtcataaaacaatcattcaaaattaataattttcagccaaatttccaaaatagatatatttattgcttataatatattgataatcaaaaaataaagtgtccatcataacacattatttgtgcatcaaacaatcaattttacaattttagaacatcgcaaatgaaagatgtgaaagtaagaacattggtggagattacataatcatgataaatcaaaataagagagtgactatgtctaacaggttaagaagaaatccgaatttttttctataatttatagatttcgaaaaaacatcaaaaattatttttaattatttttaactacataagaattattaaagtaataataattattaaatggagtcaaaaaattaattaaaaatcaccaaaaaataaaaaaattaaattctaatacctccgaaaaaaatcctaaaaatgga

SEQ ID NO: 350365 - DNA, 859 bp, Cannabis indica
aaattttcataagccatgtgatatctatgcttcggggtttggtaccttgttaccctcaggagaccttatagtatccactaggtggattcagttttttatccttttggattgacggttgtgaattgaccgccaatctaatggaattgcaactgtatgattttcacataattctgggaatggattttctatctaagtatggggcaacgatcgactgtaagcggaagatggtggtgtttgagcctgatagtgctaacccagtggtgtttataggtaaggttcaggggacacgcataccaagaataacattgttgaaagctaaggacctgatgagcagaggttgtctgggattcatagtcactgtagtggataccagccaacctgtgacatcaggaccttggaatacaagattggtgtgcgagttccttgacgtctttctagaagatttatcgggattgccacctacccgagagattgaatttgtaattgagtcagtttcaggagcagatccagtattaaaagcaccgtatcgaatggctccagcggaattgaaagaattgaagatacaattacaagaattattgaatctgggattcaattgactgagctactcgccttggggtgctccggtattatttgtgaaaaagaaagacggatctctacggatgtgtattgattaccgggagttaaacaagcttaccatcaagaacaagtatcctttacctcgaattgatgatctgtttgatcaactgaaggggaagacggtcttttccaagatcaatcttcgctcaggttatcatcagctgagaattcgagaggaagatatctcgaaaactgcgttcggtactaggtatggacatta

SEQ ID NO: 350366 - DNA, 515 bp, Cannabis indica
acaagtgcagattggggtcttcataggggagtccaccgaactgaactgaggatttcaccatttggagtatggcaggctttatttcaaagttgttggcatctacggcgggtggtcttatacaagactgaacccccgtcaaagttggaagaatatagtccctcagactacgaccattttcttgatcttcaatggcaccaccgttattaccgttgttgcctccattgttaccgccattgacattatcagccatgatttctggtattttagcaggtgctaaaactctctcttgcgttttgttccttctgtttctcctacaagtcttctcaatttcaggatcaacgagcaatatgactcattgaccttgacgacgcatacacttaaaatccctgaaatagataaagacaatattgcaagaaacagattagaaatttagcaagagaaatagaccaaagtagaagttagtataattttatgtaatattaatctttatacaattccccggcaacggcgccaaa

SEQ ID NO: 350367 - DNA, 818 bp, Cannabis indica
actaatatactaaaaaatacaaacaaaaattacaaattataaaatattattagaaatataatataaatactaaacggttcccgttgggacgaaaaatgtgatccctatcccgctctgtttaacattcggagataaaaaataaatttctattctcactccgttccctatttaaacagagaatccaaaagaccttatcatgatagaagaaatgtgcatccttaatttttacccttgaattattatcattatcatatagtactccttaaattttttggtctgttaaataccctcaaactaatgaaagtattggaatattagactgctatatattagaattgtgttacatgtagctaatataaaattatgatgtagttgatgtatcattgcaacattagtgacatatgtgtaatttaaataaatattaatttaaaatttaatatctttttcttattaacaattaataacaaaattataattaatttattaattattagtaataaaatatttttaaagatttttgagttgcacgtaaaaatttgatgtgaattatattttaaattgattatttttttttttttagaaaaatactttaaattaattaaaaaattcacacaatttaataataattgttgaagaataaaaatcttgtaacttacaagtatataaatatatatatatatatatatatatattacatttgtaaattcatacttttacaaaatctccgttttcataattacaatagtcaagtgagagttttttcaaggttaattagaatttttgctccttgaatttcgacatgtaccaaatcatgctcc

SEQ ID NO: 350368 - DNA, 929 bp, Cannabis indica
gatcattctctacaaagagaaaataagtcaatatccactagaaagtaggatcatctgtattcaaacatatggatgtccattcaggggtggatataagttatcattaaattcttaaggcgatcactctagattttaccctatgaaaagaaatttaaaatgtttgagaaatttcatgagaatctatcattgttgaaaaactattaaggtaagtggttaaagatcttgtgaactaataagcgtggagaaatatttggttatgctattcaaagatcattaagttgaacttcgaattgtatccaaacttacctcccccaaaaatttggattgcatattgatgaaaatgaaagtgaaaggtctatgattagtactagtagcttcctatgtccttcaagggaaataccctagtgataggaaaactttagaatgatggaatggttatatacttagtgtaaagcattactagattaaaggatgttccgatcatgaacttaagaaaagctagaattgttaactaaggtttgcatgtttaatagctattctaaagtgattaggggtggaccatcctatggtcattacgaggagaaagtgtttgttcaacaaataccactttactaggaatatgattaaatctatataaaaagtagcaaagtagaggagatattttcaattccaatgtgttctatcatcttattctacataagatggtctcattgcctttgttgtcttgacacaattgatgaggagaataccactaatgttcttagatagaatgtcacggtctctcattgtagtgggaggatttcaagggacccaccctgttatgacttggaagatacttgtaataaaaatctattattagtttaaacatgtagtggatagtacaaataaggaactaagaagcaaagccaagagaactatggttaaaacca

SEQ ID NO: 350369 - DNA, 802 bp, Cannabis indica
cttttagttgaaaaaaaaataaaaagcaaaaaataagagataattagactccatatgctttacaagcctaccaccaaacggtccaagaatgtcattataaattgtagtggttcattttttacgccactataacctaaaactatatacttaagaaaaaaaaaacaaaaaaaaaattataagtgagttttttttttttttttcactaaagtagaaattcattcaaaagggctaagccaaagttactacaaagggggcaactctccaaaattgaaacaactagaggaatcgaaacaccagcccacttggtgatagagagcatgactattaaaagatcttgcaaagtgaaaaagcaaaattcaaagcgcaattgtttaattagttttaatgaattttactgatagctaagattagataatcgcgatactcgtaactgtttataattattcttttaaaaacttataatgtggaatgttaaaacaatttaaatgaatcaatgtagaacaaagaaaggcaaccctctggtttatattttcttgtcgagtttcaatatgatttttttaaaaaaatttctgagtttgccccaagacattccgtatggggcaaatggtactagggtaggccttaagaactaaggtggtgtttggttggaggtaatgaaatggaaaaaaaaaaacaatctcatttcatttcatataattgtctttccatcattttggtggaatgactattccattttgaaatggaaggaaagactattctaatgcaaggtttgaaaaaatttaataatttttatcaatttttt

SEQ ID NO: 350370 - DNA, 531 bp, Cannabis indica
aataaattttgtcttttgaatcacccaaaaagattacttcaaacttaagttatgccgaaaaaggaatttggcacgtgaacaatggctcgagtttcttggaccgtttctgaaaaaccagaccacacacatggtcccaacgttgaggtttcttggcatacctccccatccatgcacgtacgtgtctctatgatcgagtgatgctcgacatcatggcctgcttcgcgcgcatcacttggtgtcacccgagtgatgctggtagccatgttgcccaaatttcgaaaagccaataactcttttaatttttcatcgaaatcaagttctgtaaaaattaaacttgcctaatttttccaaatgtttcaatataaataattccagaaaaaaaaattaacattagtttatatagaaaaatagcaaaatacaatcaatcatcaaggcatattatcacttaacatgtaacatctaaatctcacataaaaacacatgaaaaattgtttttgatatggtttacttgaacaataaaaaattaccatg

SEQ ID NO: 350371 - DNA, 614 bp, Cannabis indica
aatcatagacagttaattggtgattaagaaattaaaagtaattaaatacgaataaaatagaatacatagaaatcgagggaaaataaatcatattaaaaccataaagcaatgtcaacaatatccatctagatcctaattaagtgattagctactcatgttcattgtagcaaaagcacacatgttaacttcagaaaagagaagaaaatagagaagaaaagaatactgaaaatcctctgaagaatgcctccagtattgcagttggtctctgaaattcgtactctatcttctgctgtttttttccttctgaattgcttgttaagagtttctgagtttttatctgaaaacttactaaaaatgctaataataacgtgtttatataggctaacaaggttacctaaaagatactaaaaagatttaaagtttaaacttaaacaagataaacatcgaaaatctatccctttttcttgctatctttttatcttgtttttttttttttgaaatttcttgatgcgacgactgatagtatttgggccgcaactctctcgatattgctcagaattaaatgattcaagatgccctgaaaagaccattgtcgaatttaggcttgaagtttc

SEQ ID NO: 350372 - DNA, 654 bp, Cannabis indica
tctaattttacaattataattgattagttataatcaattaactaagtctgcaagcagtattatctccggtagtgagggaccatgggcctatataaccgagctttcaataagtagatctagaattcattcaccaagtaaattctcaacttattaattttgccttgcgccactatagatttggaattgaatagcactctcaattatatataacgctcaatatgtaccacgatatagatacgttaagattatccattgttacaatcctaatagttaaagatcctctatagatgatctacactgaatagggacaaatttaccgttctatccttcaatgtatttatccataattactaaaatgagatcttaatcaattatctctatgttggaatatattttaccaggatctagatttactaacaagtatgtttttaacatcctaatatgaatttctaaaacgatgaaaataaacacataaaggtatgagaaaccttacagtggttacagcggaattaaatgactccttccacttagatctctaacccttgtatcttttctgtcgcagagtatcaccaagatctgaaccgactctccttcttgttgtttggtagttcttctagtctcactgtaacgccctaactagctaaggcacgctac

SEQ ID NO: 350373 - DNA, 1263 bp, Cannabis indica
tctgggtcctagtcagattctagatcctgaattcaaacccagacttggacttggaccctggtctggggtacgggtaggtctgggccagggtcttggtccaactccgggtttgggtttgagtccggatataggtcctagatccaaacactgactacgggtcaggtccaagccctgggtctagatctggatcacagtctcgagtcctagtctagttccacttggggtcccaggtcccggtctggttccaaggtcaaggtccgggtcaaagttcatatcctgggtcgcagtcccagttctgatgcccgtgtcccgggtctaggtctgagtcctaggtctcggtctgagtccaggacctgatcggggttcaagtctttgtccgaatctagattcaggttccgatttaggtatgggtccagatcagggttcaagtctagttccatgttaaggtccaagtcctaatttttcatctgggtctgggttccgaggcccaggtccaggtcccccatccaagtctgggtcataggccccagtttgggtccatgttcgtgtttgggtcctagtccaagtttcaatttccattcagtgtttgggttcgggtttgggtctgagtctgggtcgaggtctgagtcctggtctaagtttgggtccgggtctgagtctaggtacaaatcccgatgtaggtctgtgttcgggtccaggtctgggtttgggtcccaggtgcgggtctaggtctggttcagggacagggtctctgtccggatctaggtcccgagttttgatctcggtctgggtttgagtccagatttgtattctgatacctatctaggtccaagtttgggttcgggtctcggtcgcggtctggttacatgaccgtgtctgggctcgagttccggtctcggtttgggtttggggctaggtgtgagttcgtttctaggaatgggtctgggtcctcgtcacgtccctagtcttattcaagggtcctggtgtggcggttcttgttcaggttccagtttcaggttgctggttcggcaccgagtcgaggtatgggttgggatccgggttcgggcctaggtctgggtgggaatccgggtcctggtccggttacggttttaggtctaggtctatgtttggttacggtttgaggtccaagtccaggtccaagtccttgttccggtcctgttcccgggtctcgatctacttgtggtttcatttccaattttgggtcacagggtacgggttcggtccttgttagtgtctaggact

SEQ ID NO: 350374 - DNA, 504 bp, Cannabis indica
aaccgaatgacactttaaatttgctaatagtttagtagcaaataaatacaagagcttagatgacaattgagagggtttaaccgaaaaaaaaatatatatatttatttaattaatttttgaaagttccaccatattctccttaaaacctttttaaaatcttcaaaagcattatcatgtcatgatttacccgtttcatttttgtttgttttaatatgtataaaataagacagagagaaagataggaaggactagaaagcacatgaaaaaccaaaattctatcattatatataaaattaaaagagcagaatccaagtggctgtcttattaatagccaaaaataatactaataaataaataaaaagaagcttattaacaaacgtgtttggtagttctacttacgaaaataatattattaaaattaaaatcaaataaataaaaacatgactggttgttgagagagaaagattttggagagagaagagtcaaagaccaaaaacatctgtg

SEQ ID NO: 350375 - DNA, 1148 bp, Cannabis indica
tgccctaactcaagaaaactttctaacttcttgagttttgactttccttcgaacatggttgtttttaatctgttgagtactcctggtcggcatatttgcttgtttttcgtttgtagatgaacccaggtgagtcttaggaactcgagcatcaaattgaccaggatttgcttcaacttctgcacgaaggtcatcctcatcttcgcgctagccctccttctagcaaaggaaattcttctgacctggtactcatccataggatgatggctcgtacgaagaaaaccacgcgtctggctgacgcttctgatcctcaagtggctcggctcgccactcttcccgacgctgaacaagatttcgcggtcccgatggaggaggaccgtgagggggacggtgaggaccaggaggttgaggagctggacgagacgcgtctgggcagtcctccctctacagagggagagggcagctagtcgatgctgacagagacgtcctcgttgagggcgtggactacgtcagtgaggagcttgctgaggcggttcctcacaggaggtagggtgccttgggcgccaggtgggtaagtcctccgtccaagatttcggaggcacgcctctgcactctcgactaggatgggtacctgggcaaactggactgctacattcccacccacgacaatcgcgccacaaaccatgataagggaatgtgcgcctgttcgtgggctcatggccagcaaggggtgctgatgcccctgcataagtacttcagggatgtgggggacttcttcaacctctgcctaacccatattactccaaagggcatcaagtatttatccgctctcttcatcctctacgcttcccaggaataggatgctccttccccccacgaggtcgcctgattcttcgacctgaagtctacccccaagcaaggcaagtcggggtatttttacttctctcagctaggcttcaagtggctgagcggtacggacgataaggccatcagcaaaatagggcattttgttgatgagtacttcatggtgaaggatccgagcatcacccgaactcagtttcagcaaatcccgacatatcaccgtcctcccctcactctttctcttagggatagagctcaaaaaccttgcccggttgctggaggaagacagg

SEQ ID NO: 350376 - DNA, 540 bp, Cannabis indica
tttaaattatttttattacatttattttgtgcctctaattactcttatcttctaaaaaaagattctttctcagctggtctcttttggtttaggaaacttcttgtaagacaagggattctcttatggaaagttatctaactttgggaaacttgactttctctttttattaattgatgattttggtttcgcctttattagaacaaatcaaataaactttattttgaagtctaaattcgtgatcttgaatcaatttgaaaagttttctttctggtcttgatatgttgctgcagagcctgattctgatgctgtaaattaggaaatttttttaagaaagttttgtacagctggaaaatcatttttgtaactatctttagggttgctatggtttataaataggacctagagagcatccaaacgatttcatctcttctagtctcatattttcatatccttctttgtgagaagagtgtttcattagttaaaacctagagtgttcaactaggttttagttttattattatgatctcatactattcttag

SEQ ID NO: 350377 - DNA, 50 bp, Cannabis indica
cttccaatgtatactccatacatccgataatggtaaactttgtcaatgcc

SEQ ID NO: 350378 - DNA, 537 bp, Cannabis indica
gactggaatcaaaactacatttctgtgccacaaactcaatcaacgattgacgaatcctaaccgatcaaacctgtacattgtcagcaatggaagagaaattccgaacaaacattgacgaattgctggagcaaaaccttgaattttggctgagattcagcagcttcttccatcaaatcctgaaatttgacactgaaatcaacgatttaaaatcagagatatccaaattagatgagaaaaaaatgaagtaagactctaatgatactaacactcttcaaaacctactcaaatctgatgctcgtccattgtacaaacacctcagagagattcagaccgaactcatagtctggttagagaagagcggtccgctgaaggaggaacttcagggacgattctcatcattctgtgaaattcaagaggagataactacgcgctgaaagcaattacaattttttaggaaattaggtttagtatcgttttaattttaatattttttttatttctttttggagttaacgttgatgttaaagtgtatcgtta

SEQ ID NO: 350379 - DNA, 914 bp, Cannabis indica
ctctctctctctctctctcccgtgcatgtgttctgattcttagtgtgcattgtaccgtaatttattttgggttttcattttagttttttggaatcaatcattcggtattttgatttaggttgttgcaataaagagttgcattgtttaaatggagttggttgcattgtactgtaatttaggtatttttggaatctgttagttgatttggttggattttgattttttagggattggataaatggagatggtttgagcaatatttggttgaaaagtctgtgttgtcaatttctatatttaaaacttgtttgtcatctatatttgtttgttgcatttagtttaaaaatagttaataattattaatgttaagtacttttaaaatttattatgattttgattcatacacaacagtgattaaaaccttaatttaaccccactgttagtgttataatcatgccttcaacatatatgttaaagatcaagtggaattgggtagagaagacatcctaggaagttaactgctacggtatattaataaaggtagttcaaaaatttgttggcttaacaagcttcaacaaagcatgccccaataactacttctccttgcctagataagacatttgtttttcattttatttgaaatcattttgtataaaatcaagaaatcatatcatttccatacttattaattttgaaacaaatgtgccaatagcataaagtttgagtcaagaaaaactatagatgaatgtatatgtacaaatgatgaagtgttttaccttctcagtccttctgggacccaattaacccattaaaattggagacttaaatagaatatttctatttttgctttctgttttcttacttttagaaaagcttgtaaaattgtttggtaaggaattagttgttgggttttatgc

SEQ ID NO: 350380 - DNA, 1363 bp, Cannabis indica
ttctacacgaggatcatcctcgtctttgttctagcccaccttcctctagtgaaggacattcttcaaatcttgtcccagtcatagaatgatggctcgtacaaataaaaccacgcgtctggctgacgcatttaaccctcaagtggctcggcacgccacttttcccatcgccgaataggatccagccgtctagatggaggaggatcatgaaggggaggctgaggtccaagagattgaggggcaggatgatgtacgtccttgcagttcctctgaggaggaggaagaggcagaggttgaacccccaaactacggggagtacaacgaggctggggagccagtcgatgctgacggagacgtcctggttgagggtgtggattacgtcagtgaggaacttgctgctgcggttcctcataggaggcaaggtgccttgggcgccaggtgggtaagccctccatccaaggttactgaggcgcacctttggactctcgaccaggacaaatacctgggcgacttggattgctacattcccgcccacaacaatcgtgccacaaaccctgaaaaggggatgtgcgtctgatcgggtgcccatggtcagcaaggggcattgatgcctttgcatcaatacttcaagaatgtggctgacttcttcggcctctgcccggccctgttcactcctaagggcatcaagtatctgtctgccttcttcgtcctctatgcctcccagaaatggggtatgccctctccccacgaggtttcttggttctttgacttgaagtccacccctaagcaaggcaggtcggggtacttctacttctctcaaccaggcttcaagatgttgacgagcacggacgattcagccatcagtaagattgggcgttttgctgatgagtacttcatggtggatggcacgggcatcactagcactcggttcccacaaattctgacctatcaccgccctcccctcactcttgctcttagggatagagctcagaaacttgcctggctttcgggggaagaccggaatattatccagttgaccttcgaagataactttgtgaggtacgggttctatcccaaggactttactcctaagtccgtgacggggaagaagaggaaatttggtgctggccggacagaacaagctcatcaggagaatgaactcattcaacttaagcgcgaagctaagttgaagggaggtgcaagggccaagcagtatgctcaagagcccttgaatcctgaagatgagactgatgaagagcaggtgactccattgaaaaggaagaagaaactcctggcaccgcccaggcctgttaaacatgcaattcgcataagggagcctatttcacctgttcagccatcccctccc

SEQ ID NO: 350381 - DNA, 758 bp, Cannabis indica
ttcttatcttctaccaagaactcatatcgcagatgactagggagcaccttcaactcaagctctggaggtttctcagtagatggcacaagctcttttggtactactcccagctcttcataatactttctgttcaatggcccataggaatcaagccatttaacatactccaatacctcttttccctcttgctccgtcaattcatcttcaattaagctcagttctagaggatcatctatcaactttatctcattcataatggtatcaatcagatcaacaaataaacagttatcacttgcctttgggtatgtcatcgcctttaacacattgaaaaccacttcttctccttgtactcgcagctttaattcacccttctgaacatcgatcaaagcttgaccagttgccaagaatggtctcccaagaatgattgggacgttgttatcttcttccatatccagaacaataaaatcagctggaaagatgaacttgtcaaccttgactaacacatcctcaatgactcccctaggatgagctagtgatcgatccgccaattgtagagttaccgtggttggctttgcttcccccaactgcaatctttttaaaaactgacagaggcatcaagttaatgctggctcccaagtcgcatagtgcatttattccttcaattctcccaatggtacaaggaatatgaaactccctggatctctgagtttgggagggagtttcttttgcagaatggtgctacactcctcagttaatgc

SEQ ID NO: 350382 - DNA, 516 bp, Cannabis indica
ggaatgactattccattttaaaaagaaaggaatgaccattccaatgtaacaagaaaaaaaatttaatgatttttttattcaattttttttaaactttggttacaaataaaaaaaaatgaaaaatcactcatttatgcattttacataaaaattagttctcatattctcataaagattattttttttcttctttatcattttagtatttttcgattctcaattttttttctctcttaagaaaatctataaatatttgtatttaaaaattaatttttcttcataattataccttctcatattaaaaactaagattataataattatataaaaaaatatataagcaaaataatttattacgtcattcaatatgtattcaaaaataaatttaattataattgcaatttagccacattttggtcattctaacgaaaaaaaaaaagtcaattttttgaactcaacattaattatgattgtattttctttttctttctggaaataataaaataaaattaaaaa

SEQ ID NO: 350383 - DNA, 829 bp, Cannabis indica
agattattgttatcacttttaaaatttcaccgtatattatctataaccatatatttactatttaccgagattttcagcaactaaatatttttcactacaaaaaaaggcttatctcggcagccctatctcggcgagctcgcgtgtgcgtgtcgagataggcctgattttcttaaaaaaaattctgagcatggcaataacggcgggcctatataggcccgccgttattgctattttttaaaacttcaaatttgagcaatctcgacgggctcgcgtgtgcgtgtcgagataggcctgatttttttaaaaaaacattctaaaacttaaaatttgaccaatctcgacgggccaatataagcctgccgttattggtccagctgtggttaccaataacggcgggcctatattggcccgccgagattggtcaaaaaaagcctagcccacccatataacctctcttttcatcttctttccattacatcttaaaaaaaaaccctattttcttccccataaagaaaatggcagccattcttccctaatctaaaatttcaaacattgatgttctcttcttctatttcatcacaaccatttcaaaaaaaaaaaggtgagcttaaatatatactattgatttatttttatttttttttatattcttatcctaatagttgttaacttattttagtctaaaaagttagtaaattattgaaatattagtttgcatttgaatgttttagattgaaatatgtttgggtaagcttcatacaacgtaaaggaagcttgagaattgattggaggttcattttggtgagttttgatttttttttctttattt

SEQ ID NO: 350384 - DNA, 743 bp, Cannabis indica
aaacaacatggttagaggaaaaagggcatcagaagcataaaaagcatgatagtcaaaaactttaaaaataagacagaatatcctgcaaaacgattgttcgagcaagactcgagagtccatcatcacctgacaagtcccttatctccgccatgatagctctcccttacctagtacgggagaagatggccgagcaggtaaattgggctccctaattcgaatggcatgttcaacgggcctgggctgggcgggaagtttcttcccccttttgagaaagtcacctgctcttcctcagcctcatcttcaagattcaagggctcatgatgttgggatttatgccctaaataaaactctatttcaatgtagtctctatgatttaaatatcaatatagagacagaagtatttttcatcacttatttaatgtgtcatttggttcatgttatcatttatatgtttatttgatttataaattcatcaaaatccttatcacattaatattcttgtttattgtgtcgtcagcacagtagagagtaatcaagattgtagtgattaaatatatattccaaagatttattagaacacaagggtttaactgatatgataatctacaacatagtttacttgcaccttggataagtgctatgtcctttccagggccattggttaaagtaaagcttgggttagatgcatggagtatgcatcagaagggaccgatattaaaatttgaattagatatgttaaattt

SEQ ID NO: 350385 - DNA, 576 bp, Cannabis indica
gggttggccgggttggtcggcccaaccctacccatgatcagccctaccaacaatacacaacatatagaaaaaatggtactaaattataaatattaaactatttttttttttaataaaatcagtatttttatcaactaatcaaatccttaataacaatagaacgtgcttcagaggaacaatcctccaactgaagcacacgacctgaagagaaacaagaatctctgactaagcagtgagccagtttgtttgcagatcgtttgacataacacaaattaacattgtctaaagataaaagcaacacacgaacatcatgcagtaaaagacgaaaagaaaataacatagaaattttactttgaatagcttgtatgcataccaagctgtctgattccaaaatcacttgtccctaattgtgccgatcaatccaacttaaagcttctttgatgccaaccatctctgcaactttaggttgaatcctccctaaatgaccccgattgaaagcctccacgacattttcatggcagtcgcgagccacacaaccccacccaaacctgccttcatgctcaaataaggcgccat

SEQ ID NO: 350386 - DNA, 712 bp, Cannabis indica
tgttgccctaacttctgttatgactaatatgttgtgtgattcacaggtgaaagctagattggtatgtttgaataataccactaaacaggaagaatcagattctgatgattctgaaatctgtgaagagtctcttgctgaatcatacaaagtcatgtatgaaaaatggattcaggttactactgaaaatagagagttgattaaaatgaataaaaaactgtctcatcaaattgaaatgtttgagttaaaaataaaagaatatgagacagatttttgtgttaaagatgaaaaaatcactcttttaaagaaggaacttgaaaattttaagaaaaatgttcaaatgcttaaccctggatcttctatttttgaaaaagctcagaatgcaggtcaaagaggttttgcaggcattggatcaaaagttctggaatcacgaagtttgtaaaatctagtgttccgacgaatcttcctgatactgcaaatgtgtagtctgctgcaacagtttcacaacctgtcgttgcaaaaacaggttctggtgccgcaaaatccccaagatttacaaaaagagtaagatctaaggtaaaaagatttgttcctacttgtcatttttgtggtagaaaaggacatatcagacctaaatgcttcatgttgcaaaatatgtttaaaacaaattattttggtaatttggaaaaatctcaaaagaaacataaaggtttga

SEQ ID NO: 350387 - DNA, 733 bp, Cannabis indica
attaattttgttaaacgttctgtaaacaaagctgtacactgtcttgctcgtagctcttgtttgtattcagatcgtattttcagtgagagtactgttcctactgatcttttatctattgtaatggttgaacgttcattctaataaagtttaccattttccttaaaaaaaataaaaaaaaagaattaatcaaaattatttcttacttagagttagaaattagttttgtttctcttttgccattgtttttctttaacctgctaaataataatgagctgtcctttgctaaaaggtgattagagaacaattgacattattttatacaactaattattatgtgatcatttctcaaataaaatcagtcttgttaaggtaaaggtttaaaatgttgtcaatatttaatgcacattattgtatatgaatgtgtgttaattttactctttaaaaaattttgtgtgcaatttcaggcgggtctatttctataacattaataaggattgtactattttactaaattgatatagaatatgtttatatcatttaattgcactaaattttacactattaattatattaaattttgaatttacactaaattgatgcataaatttcttcttttcattctaattattttcttaatattttattcaaccacaaacaccaaattacaaaagggaaatttgatttttatgcttacatttggttaaaaaaaattcctaaataaataataattaat

SEQ ID NO: 350388 - DNA, 705 bp, Cannabis indica
aactccataatatgtcgatttggtattccatacaagctcatctcagacaatggaaagcagttcgattgtaaagagatgcgacaattatgtgacgatctgggaatcaagaaggcgttctccgcagttgcttacccgcaaagcaacggacagactgaagctgttaacaaaataataaaacacaccattaaagggagactagaagaacgcaaggggacttggccagatgagctatcgcaagtcctttggtcttacaatacgactcctcgatccacaactggcgaaacacccttctcgctttcctacgggtgcgaggccatggtgccagttgaaattggggcaggttccctacgcagagatgttttcaacatctcgcagaatgaagaaaaacagtcactctacctcgatcttctggaagaaaaacgcgatcaagcacacttaaaaaatgcggcttaccaacgacgaactgcaagatactttaattctaaggtaaaagcaaaagtcctgcgaacaggagacttggtccttagaagagtaatgccaaataccaagaacccagcgcatggggtctttggggataattgggaaggatcgtatctcatcgcggaaaaaataggtgacgctacataccgactcgcagcactcgatggtactgtgattccacgagcttggaatggcgaaagcctaaaactatattatcaatagtac

SEQ ID NO: 350389 - DNA, 573 bp, Cannabis indica
tgaaaatattatttaataattattatttataaattttactattctattttaaaaattaaacatattacatagatttatttatttaatttataaagaatattttatttaattaattaaaatattcatttattaatttgctaaattattttctatttcaatttctaattttaattatttttttacaatatacacgttactactccattgtaaaaaaaattagtttagcttaatttcttattatattatttttatcaaaatttcgacaacataatagcttaaaaatcataaacccaaaattttaaaatctaaaaaaaataagcaatcattgcagaacaatatgtgcacaaaaaaaaaaaaaatccacccatccgaccacaatacatttaatcacataacctacttcaccacgatgaatatttaaaatattcaaacgcttctatatcatgatgtacatatataagtgctatgtattttctgatataagaaatgtaaaaataattacaaacctttgaaatgcaaaaagattattattgtaaagcccgcttagttaatttggaaattagcagttgttta

SEQ ID NO: 350390 - DNA, 564 bp, Cannabis indica
ttacatttttttaagaagcatatgaaaacaatttatgcttttcttaagtatataatgtcaaatttccctatataaatatataataattaaataattataaataaataaggttaattttcttttttctctacaaaaaaaaaaaaagattaattttctttttaagcattgttataggatattttataatgttcaacattatatataaattattattagtaatttttgatattatttattaatttgccacctcttattacttcgcacggtaaagtgcacttaccatttgtcaaactctcctaacttccaatatatatagcacaataatgtgggttaccatttaagtaattaattattaattattggagtgttgaacttagggattcgtggggacctgcccttaatgaggcaaattcttttttgtctaaatgggaaacgggataagaacagagattatattttttatccgcgaatgttaaatggaataggaacaggcaggggcggagacagaacttaattactaggaggccaactattaatttttttttttcatcccttcactaaaaa

SEQ ID NO: 350391 - DNA, 584 bp, Cannabis indica
tatggatgattaattttcagacactttatttgtaatacatacaaacaattattaatttcaagttaatattttctttttcaagttaacattattagttttaaattaatgttactattactaataaatagtatatattttttttaaaaaaataatgtcagctgatgtatcaacttatcatggtggagatggtggtggtacagatccaccagaccctagtagggtaccgtcgacatgtgagtcagctccaccacaaagaaggaaggggcgtcgccttgttactaaccttactgttgaacaacaaaggcaggatgcaggaaaaccattaccactgacacttgatgaagtgataggcaaagtggttggtacggagaaccaagcttttgtacgtcaaatgggtgtcgaagtcacaatgacgtttctaggacactacttgaattttaaagatgtacctcaatactttaaagacctaattgtacaaaaaatgaaggtaaaacaaattaacaagtataatgttgcaaattttaattttaatgaatacaaaattctttaacaaatactatttttttgtagtatttgtacgatat

SEQ ID NO: 350392 - DNA, 968 bp, Cannabis indica
ttattcttttttttttctttcatatgagttaatgtatgaattattatatgaaaaatacaaattgacactttattttaaaaaatacctccataaggtgtggacaacatttataccttttttgtgcttttaattaccaaaataactcttacactatcacttactatgtataccacctattaactttttttttttcaagaattcaaaatagcctgttttgattaattttggtcatcttcttaagtgaagtcgctagaattaatgatagttctctttctgtggttggattttatttcgattgcgttgggttgctggatggttgacccaaggttgaatcagacaaaggtttcaatctcagaaagcatggatcgtgggttgaaggtgtgtgtaagaggtatttgtttaatatttgtaatttaggatgtatatttgtttatttggccagctggaagttttttttggtaagattgaccccaatttttctccttgtggctaaaggtggtcgtcgtccagtgaagaagaagtcgaaggtgtctttgctagaaaaaaaaattcaacttcaacggttagaaaagaaataagtcaacttcaaggaaactgtgatgaaactgtaatgcaacagttatatctgttccgagccaactaacataaaatcacaaaacaactaattctgcatatttaatacaaacaaatattacaacaatcgtgttttatttgttcagatcgcgtatttgacaatttggagtcctatttttataatactatgatattgtagtagcaaaactattatttaactaacgtgtaacttaattgtaactaaaaatattaaatgtgaatgtgtatatgtaaaaaaaactatttgtcagtatttgtacctaatagtaatatgtggagaaataactgttagcacaatatttatgcagctgtaatacaactgttatgaaacattaaaaatcataacagtgtttcca

SEQ ID NO: 350393 - DNA, 488 bp, Cannabis indica
aatcatcgcgtagcaatttgtcagcccagtaagtgtattttggcagaaagtccagctggcattaatgaagaaaaaaaaggagcttgaggtggcgaaaatgtggccaatgactcaactaatatgtggaaaatgaagggcaagtgcaccatgacttggatttccaattagggtaaactttagtaccctaattggggagcaaaataggaagaggataaatggaaaagggtggctgcacttgaagggaggcagtacgaaattttcagagagaaaagaagtacagaaaaagaaatgaaggaaaggaagagagtacaaagactggaagaagaaggagaagaaggcaacctcaaaagagaagatttgagctcaccactcatttctcttgctctcctcttccattttgtatcactttctactctttattattttcttaaactccatgaacatgtcattttctgattttgagtttttaatttcaactatgaactaaa

SEQ ID NO: 350394 - DNA, 1497 bp, Cannabis indica
gtacgatgcctgtactgccaaactgacacagtggttctgtcgctatgatagcacccaaaacataaacaatcacaacataacatgcatacattcacgtatatacattttatgctatcttacctcgttttcgtgctcaagtgtgccgatcagcctgagtggaattgcaagttgacgctttacagggccctaaaccataatatttaaaacttgatgagagacacgctaaaacacttctcgaggactttaaaataaaactaggaataaccatatcgatgaaagacatgaccataccctaaaaaaaatcaacaatttggggaaaactagagttccttgaaaaaccccaatcggtaaaccggtttcccaaccggtaaaccggttcactgggtttactaagggacaaaaccagtttaccggtttctcaagtcccacaaaactagttaaccggttttgtgtaggaaaacccaaaaatcgacccccttaactcaaatcaatcccaaactctccaatactctccacaatgcttgtatatactccaaaaaaccaatatcaagcaacagaacctaacaattagcacaaaatccaaaatcaccattagagagctaggtttgagttctcaaactcaaactttgctcaaacctcaactcaactaacaattccaacccaaattaacttaaacaataccaaacaaactccagaataccgaaacaagctaccttaattcatatagcaacataaaatcccacattaaacctaacttaggctaaaggaaaatcaagaaaagaaaggatagggagagataccttgaatcacaacacacaaattccaccagaaatccttgagatcattcaaacaattccaaccctagctgctaccttgaaggatcgaaagagagaaagagagttgtgaagagagagaaagatgttcctttttctaaagtcttttccttccaacgtaagtaaaataaacatttttatttttaattaaattctattctattattcagccactaatattcacaagggacaaaagaaaagtttctaacaaagtgataattttgcccttaacaaaaggacaaaaactaataacataaaagggtaatttggtcatttaaaaaaaccccgacacttctcgacattccccacgtctaacaatgatgtcccgctattacaaatattctaaaccaaatacaagcgtgactctctaatggcccaacgtcgctttccacaactaccgatcacaaccacaaaaaaatgagtaattcacatatatagcataattaatacatgttaaatattaaataattctccacaaacatgcaaatcataattaataattaaatctcataaattaatcctaattatttaataatccaacatataaaacttaggcggtccttacactgtcaaagctaattcttcttcatccattgcgaatgatgcttttgcatcccattcttcatcgcttgttttttctgcatttgatgtggctgcattgcct

SEQ ID NO: 350395 - DNA, 564 bp, Cannabis indica
tttttttaaaaaaaagtaaaaatttaatgacttggaccaatcaagaattgtcacgtgacaatttacttaacatttaacagtcaagtacctacaaaagttttagaattataacttaggtattattatcgcaaaaaaaataaacttaggtatttatttgcaacgagggttgagcatcggtcagtttgatcaatttttttctatataaaaattcagaatttgattttcggtctagattggtgcaattcaaaaactgaccgaccaatccagaacctatcttaaaaccgaccattttgaacctcggtttggtcggtttaaattgctcaaactgaactttttttttaaatataatctaatttattctataaacacattattctacattttaaatatacaaattaattgttcattattttctttaactttaatattaataaaatatattattattatatattattagtaattacaatatataaagcaaaaaaaaaaatataaaattaacatatatgtataacggtcagctttggttttttcggttggtttattacccaaaaaaaaaaaaaa

SEQ ID NO: 350396 - DNA, 1004 bp, Cannabis indica
tacattacagtcaaaattttggtgaatggatcatctaagttgtcttcagtgtcaactttctccatcactacgtcccctcttgccacatattccctaatgatgtggtattttctttcaatgcgtttgcttctcttgtggcttcgaggctcttcactgttggctatagcaccaatgttgtcacaaagtaaaactagtggattttcctttcaggaacaacacgaaattctgtgaagaactttcttagccagaccagttccttaactgcctcaacgggagctatgtattcggcctcgatggtatagcctgatgttgcagtttgcttagcacttctccgaacaactactccatcccaatgagtaaataccatcccagatgtagacttcttgtcgtcaagacaagcctgaaaatctaagtcagaatagcctacgagatttaaagcaccacccttgtagaataacacataatgccttgtacttttcaaatatttcagaatatgcttaacttcattccaatgttcctctactaggtttgtctgatacctgctcacaattcctactgcatagcaaatgtcttgtctagtgcataacataacatacattagacttccaactaatgaagcataaggaacctttctcacgtcttctatctcttagggatttgtgggacactattccttagatagacagatacaatgtttagaaggcataactgcctagtgtaactcatgaaaaattgctttagtaccttatcaatgtaagctgcttgcgagaaatttcatcaacataaaggaccaggaatattaccacttgattatccttgtgttggtaaacacaaggttcatcttcattttggtgaaagttgtaggatttgattatttcatcaaaccttttgttccaagagcgagaagcctgcttaagtccataattggaccttttgagcttacaaactttctcttcctgaactggaagcttataaacttctagttgctccatatagatggtttc

SEQ ID NO: 350397 - DNA, 750 bp, Cannabis indica
aaaattcctaactcaatcaaatcaaacccaattcataccaaacctttcagacctgttctaaataccccaaagaacattttcaaagcactaaacaacccagaaatcacagatatgaaaaacaccattaaagctcaagctttgagttctaaactcaaacttgagcaaatccctctaacatgcattcaaaccaactcaaatctacttaaacatgcataaaatcacctctgaaaactacagtaaacatcacaaaacagcagcaacagatttcaacaattttctttgaaaaccatagttttgagccaaaatttcataataaactcaagaaatcatcagccctaacatgcatgaatcaacattttaaatcaaaaataaacctctgaaatccacatcaaaatacagcagcaagcacaactcaaaaataagcatgcacaccatttctttttcatccaaaaatcaagaaactaaagaaaggaagctaagacaaggattacctctacaagattactaagaacttgctgaaaatcacaagaatcaatcaaagaaatccagccctagcagctccaagacttggccgaaattgagaggaaagaaagagagagtgttttgttttgaaacttttctctaaattttctaagtgtaggaagtgaggcttgaagagtaaaatgaattaaagaggattcttttcagccaaataacatataaaataaacatttattttcaaataaataaatcactaaaagacaaaatacc

SEQ ID NO: 350398 - DNA, 1266 bp, Cannabis indica
cccctgtagtattaacggaacgtacgtttgggttttttttagtttttattcaactcgtatatttgtcacttagataagtttgatgtgatcaattataatcagtcttatttaatgacaaagaaaacgatcagcattgcatggaggattaacattatattttcaaactattgatacagaattaatattggtcattaattaagtggtgacgtaatgaagttaatgttggaaatggcagtaggtgattagagtgagattgatacgtaccgttttgagtttttatggatattaattatatctatatatatgtatggtgatgttaatttcgtagctgtgttcatctctcgtccccatactggtaaaaatttattatgaccacacatatatttatctaagtgatacaagtcacagtagttaataatgtgagtttattcatgaactggagttagagtgagtgagaggaataaacaataaatagagaagtaaaattaattgttccgtatctaatttaagctttgaaaaatgatcagaattaagttggttttagaggaagatatatatataatatatatatatatatggactttcatgagtgaaaggtaactataaaagcctatccaaactcaaaccaacataacaaattaacattaataatttattaagaaaatgcttcttcatcaatttcttttctttattttacttttttttaaaaaaaaaaaacaataaatatgcgtttgtttgccaaaagtcggtaaaaattaaattgacacatcatgtgagagatgtggcgccctttaaattttatttttatacacacaacaaattccagctaaattagaaaaatggctgcatatgttataaacttgatgtatatatatactctcatatatttattgagtcttttaccccacattaatttgtataattgtacgaacgacaattataaataaatatactttccaaataatatagaagatataatgctgtaatagcagctaccaaaagtgaaaaagaaagttaattattgttagagaaaaactaaaaattaagcacaaataatgtctaggcctagtatcattacttcacatttgaagtattatattattgttagtataattaagtattgagtcatataatttaataactattataaaacaatatccctaatcatttataaagtgtcatctttaagtggtgctagccaatgataccttacaataatgctttaatgaaaatgcaatgtttaaaaagtaaaagtatatattagaa

SEQ ID NO: 350399 - DNA, 775 bp, Cannabis indica
tgttgcagaacaagactattccagtagttaaagtattgtggaggaacatcaaggttgaggaagcgacttgggagttagagtcgcagatgcgggaacagtatcccgaattattcaggtaaattttgaggacgaaatttatataaggaagaaataatctaatatctaagaaaatataataacatttaattggacatattttattaaatgagtaattatatggacattagagtaggattataatcctacttaagctaattttgaattaattagtgaaatattgagtaaatgaataaacaaagtgtaaataaataattacagagattttatcagattatgtgggtattttacataccattttcaaaataaaatattttcagattcaaagacctggaaacttgacagattggtcggaaatgtcacagcgataaatgatgagatatattggaattatgccggacttgtttagaaagttgagttgtcatagataaattggaattatatcgaactagtttagaaagttgagttgtcagtttagttggattagttagaaatgaccaaaatacccctaggttatgtttttagcttaagtgatcttgaaagggtaaaatagtctttttttggggtttagattttgtcttacatgatttttctaggctgaaagtaaggtttttaatgttaggttatattattaatttaaatgtttatttatttaattgaagataaaacctaaaataagaaaatcacaaatattgctctctctctctgtctctctctc

SEQ ID NO: 350400 - DNA, 592 bp, Cannabis indica
tttttttttctaattttagttaaaaaaagtctaacatagatgaaagttcagaggacttgatttggtacacatcaaagtttaaagagcatgatttggtacatatcaaagtctaaaaaacatgatttagtacatggaaaatcacagaataggtaaaattgaatgaaattggcatgttcttaaatctaataatcttaatagttcatggggaatttttaacgggaaaaaagttcaaaggacatgatttgaaacatgtcaatgttcaaggagtaaaaatcctaattagcctaaaatataaataaatataattgaggagtgagtttgggacattatataagcgagaatttattaattaaaatatttttgtgaattaatctaaatattgactttgtataaaaatcaattaaataatataataattctaatataatatattataccgatattcaaaggttggacccagtgttttgtcaaatactttgtgtttaaggaggacttcaagcaatttacgttggatctatcatataagaaagaaaaaaaacattccacagaaatattattaattaattagatagcaagaaaggaaaaacacaaa

SEQ ID NO: 350401 - DNA, 571 bp, Cannabis indica
tgactagcccctggcctttcgcagtgtgggggatagatctcattgggtctttaccaacagaaagggaggggtaaagtatgctatagtagtcgtgaactacttcacaaagtggacagaggtcgagcctatgaagaccataattgctaaaaaagcattagactttattatcaaaaacatagtgtgtcaatacggcttgcctcataagatagtcttagacaatgaaaagcagtttgactgcgaagaattcaccaacttctacaaccaacacagagtcattaaaagcttctccgtggtggcaaggccacaaacaaatgggcaagcagaagccgtcaataaaatcttaaaggtcaccctaaagaagaagttgctggcctaaagaattgccaaaagtgttatgggcataccggaccactccaagaaccacaatcgggcactcgccattctcaattgcgtacggttgtgaggctatagtcccggtggaaatcttgttcccatcccacaagagaacgacatatgatccggtaacaaacaaagctttattacaagaagcactggatcaaatcgacgaact

SEQ ID NO: 350402 - DNA, 524 bp, Cannabis indica
gtcgggtcttctaggccggtaggagctggaggatctgttgtttgaacaggaggtacatcagcattctagccggaggtagaagcagcggcctcaatttcaccataagccacttgggaagcgcagaactcgaggtacatgtccttggcttcacccaagtagtcaaagtttgcctgaggattagccttccaaaagtcatagaagagttcaagaccagctgtctccaaggcatgaactttctctcccagcctcgtcacctcggccgtaagctcctcctccttagacttcttctcctcctccacccgacgaaggaccgctcgaagagatgtcctttcatcttgaaggttgttcactttggcagataaagtctcgatggtctcctcaagtcggtcagaagcctcgagatccttagtcagcttagttattttcttctaggcagtaaaaagcttcttgttgacttcacccagctccattcgaacagctccaagtttcaccctagcgtcatcagcgtccttcctggccaagtc

SEQ ID NO: 350403 - DNA, 676 bp, Cannabis indica
aggcctttaagacatcatgaccggccaagcggtctttaaacttggaattaattttcatttttcggacaatgggctgaccggacagcttttaatcccgatactttatgctcttgctatccttaatgaatttcattctctgtttataattacaatgcaattgtgttggtttttgctaaccacacttgttggtttttgctaacctacgttgttttatgtttaccaaatgtctttgtacaggtataggtcgccccccaagtgaccgagtagacttatgactctaggtcactttttttatattttttgcgagtgtgatttcttgtctgttcggggtttcgggctcgaccaaaccatttgtacacattttatggtaaattaatgacatgctaatacattcgactcaatttgaattttgaaataaacatctttattcttttattgattggaaatatgtttgttaccttagtaacttacatcaaagcaattatactgatctgacttgatctttagcttaacatgaaataaaacgaattgtagaaattaaaaattgtactttcaatggtggtcatccgacctgagtactttgtaattttatctaggaaaggaacattggaagacaatcaagtgaatattaagattaaaaagaggaactatatgttagtcgataagggtgtattta

SEQ ID NO: 350404 - DNA, 628 bp, Cannabis indica
ttgtgatcagggatagtgagccagaaaaaatccacttatggtcaagttgtccaagatggtgaacaaataaaataactactatcttgagggaatgttagatagtcccacatcgctaatgtggaaagataataaaatatataagaggaatgaactactcctcctattactaattggtttgagatagaaccccattctcaacatctattggtagagtgttaagtggcataaatattgaacaacattgtcccacatggattaaatataaaatattgagtcaaagtcatatataagaacatgagctactccactcatcaccaattaggtggcgtttcaaggggtgttcatcctatccaatccgcactattttgctcatagcgcatccgatccgcattaagtgcagatttcattttttagatccaatccaatccacacaatagctcaaattcaatccaatccaatctgcaaaagtacagatttgatcggttattttggattagttactttttaatatttatgaaaaaaatattttttttacataagtactagcaacaaaataaagtaaagtatagttatgttatgtctccaacaacatatatatcaaaataaataaaataacaaaattacaaaa

SEQ ID NO: 350405 - DNA, 639 bp, Cannabis indica
aaggcgaaacatggaggtttacggtgttgatatgttggtgaaattaataaagagtaaggatcatacctcaaacctcacgaaatgctttaaaacattaaaaaagtataacatgaagctaaacccgaaattttttttcctttggagtctcctcgggaaagtttttgggattcatagttaacgcgaggggtattgaggcaaatcctgaaaaaatcaaggcattaatagacatgccatccccgacaaagcctaagtacaggccctgacaaaaagaatggcgacacttaacaaattcatttcaaagtcaacttataaatgtgtgccgttcttcaacatattgcgaggcaacaaaaagtttgagtggacaaaagagtgcgaagaggcctttcagagcataaaaaggcatctcgtaacgcctctagtttcggcgaaacccataactggagagacattatttctctatttagccatctcagaagatgcgattagtgcagctatagtgcgagaagagggcaagcactagcaacctatttactacgtgagtaaaagattactaggggcagactatagccatactcgtgttatgtctagtccatgtgtctcgcaaactatagccatacttccaggctcaccccataaaag

SEQ ID NO: 350406 - DNA, 752 bp, Cannabis indica
taaattctctaacttattaatttctcattgaaccactataaatatttaaccatcaatttcccactctctccttatacaaaattttgtgttcacaaattcccccactccaccttttaggcacagatcccatggccgttatctcaatcaattccactactttttgcctaaatttttgtgccactttctccacttattggagtacgaaaatactaatttagagagccattttggctctataaataggcagcatttgtagtaaaaagacattagatttttagaatatagtctccttattgtttcttattactattttatttatacttattttagtgacagaaatgagtgtattagaatagtaatattggtgaggttagactgtagctattgtactttccaattttaattatttgtttttgattctttttgcgcctccatctccatatctcatttattaagttgttttttcatcttctagtttttattcctaaaatttatagtatattttatataagtttagttatgttttcttatgtaagttagattattaatttggtatttattatattgaatgtttattactgcattctaccaatagtggtattttatcgatttatgatatacaatatgatatgttgtaaaattaaaagtgagattcaatttatgtaagatttaatttattttttgcttttaacatatatgtttccagttgtaattaacggtgtagagttacaattgtgttttgaattgatatc

SEQ ID NO: 350407 - DNA, 980 bp, Cannabis indica
aaaaaataaaattacataaaattttctatgccccagtattggcttacattattttttaagaaaaataataacgaagcctacactcaatttttaccatataattaattaatgattcatcacctgtcatacatttacaataatataaccatccattcacatacatataacatatatatataaatacataaaactcacacaatatttaatgtatatatataatagaatcgctctgatacactagttttattgtactaaatcaggtacgcaatgaaagaattatatatctaattattatcatatcatagtctcaaggattactatatgtatatacattaaatctaaagaataaattacatgaaagaaataaatacctcttgatgactatcaaggcatcctcaaaacttcttgtaatttggatccaataaatctcacatcgtagtcttcaaaatcgatccatcacacacaaggagtagtgtgggctacaaggataaagtatataatttgttcttgataaattctcaacacatgagcaagaattgtttgagagagaaaaataatttttcttttctctctagtattttaaaaatcacagcgttaaagtatcatatgatttctcaaataaggcttatatttatagtaattaattctcaattaattaaatcatatttaattatttaaataaatatctataaccaaatttggttattgatattttagattagggaatatctctcaaccacctgaaagaatatctcaactactttgaaggaatatctcaaccaacttgaaatatctttaatcgcttttcaaatttaaatattgggatatgattttgtcccgttattgtactttcacggattgtaatccgtgatgtacgacagccgtcagatgagggagttatttgatctgacggctgagattgatctaggggtaattagggttaagaattagaaacgtaccctgacactcatttaatgtac

SEQ ID NO: 350408 - DNA, 980 bp, Cannabis indica
agttcactacttggtgtggttcaaagatcatattaacaaggtggattacaaagagttgcttcaaatcattagagggagtctaaatttgtttaagtcaattacttttgtaatatttgatactttactaattgattttattctctgggtgtggccccatagactagtagtgtttgaaagaacactgataccacgtacaattctcttgtgtcaagtttttaaattctgcactatttatttctggttctcatatgcaaatctgtgttctgtagtgacaggattgcaatctgttattgcagactgttacaattgcgttcttactaaaatttagtataattattagcattttttaaaaacagttttttaattggtatcaaagcaggacacaaaactcttagtgtggtcctttaatgttttcttgtgttttcggtgcaatatgtcgttctttgcagaaagtggctctttatctcattcttcaaaggttggcaacaacaaaggcatgtctaagtcctcgagaggtagtatttactcaaaatttttacatccaacaaaaaaggtgtacaatgtagaaaatatcatggttttgtacatatacaatcaggatgtgtaaatactttaaaaacaaccaaaaaggttacggatagtacttactctagaattagtgatgaaaaggaatcaaataatatagcactaacatctatgttttctagttccatgtcatttgcaggaaaattagaactttgtttgtcttgacaacactagttgggtaaataaagatgttgatgatgctttagggactgattatgatgaatcagatttggatgaggatcccttgaaagaagcgtacagaaatatgtatggtgagtggttgaaattgtgttcaaagtatcgtttatggacaaaagatattaaatctctttctcaaagaaatgaagagcttgaactaaatgttaaaaattttaaaaataagattgttgagaaaa

SEQ ID NO: 350409 - DNA, 634 bp, Cannabis indica
tgttcgttacatggtagctgaacgtgataagaagcgtactactcaaaatagcggtgtctctgtggcgggaacagaaggattcaattattatggaaccttagaagatgtgatgatgttcactttttgtggtgtgtattcagtgacattatttcggtgtaaatggttcaataccaatccacagaggaagaaaacaatcattgagaataacatcattagtatcaatgttagtggtgaatggtacaaagatgacccatttatacttgctacccaagctaagcaagtattttacctcgatgatttgcttagaggtagacattggaaaatagtcgagaatgtaaaccaccgacaaatttgggacattgaggaggatgaagatgatgaagatgttgtacatgatttaagctcctcaaattttcggttgactgtggatctaggagagttaattttgcaaccttctgaagtggcgacaataattgatactacacaaaatttgaatgtaaatcaggctgatgaaaatgatgtggatggtgacgttgatgacgtaatagatgacgaaggtgacgagttgctaattgatcgatgtgaagacgatattgtttctgaaaatgatgagtgtgatagtgactattagttt

SEQ ID NO: 350410 - DNA, 913 bp, Cannabis indica
taatgtatgctatgctatgcactagaccaaacatttattatgtagcgggaattgtgagcaggtctcagtcaaacccaggaaaggaatattggacaacagttaagcatattctaaaatacttaaagaggacaaaggataatgtgttagtctacaagagtggtgctttaaatcctctaggctataccaacttagatttccaagcttttcttgatgacaggaagtctacacctcggatgatattcactcttgcgggtggagcagttgattggaaaatgtcaagcaattcacaatatctgactctaccatggaggtcaaatacatagttgtcgttgaggctgctaaagaattagtctggctaagaaagttcttcatagaacttggtgttgttctaggaatggaaaaaacactagtgttacttagtgacaacactggtgctatagccaacattaaagagcctcgaagccagaagaggagtaaacacattgagaggaacactactacaaaagtggcttttttcaacgatttataactgtcttatatatcattttccaacggttcctaaaactgttggctatgtgggcgtcataaaaatgtaagactttaaaagacgatttataactgttggaaaaagtcactttaaatgacggtttacaaatgttagaaaaaattactttaaatgactatttatagctgttggtaaaaaaattgtgaagattaaattaaattacttttttatatatatttttaataaatatatatataataatattaattttcatcaaaaaaactaaataacatttattaaaaaataaataaaattaatatattttaatattttacaaaagatacaattcagaaaaaaaaattacaacaaattcaaaataaataaatattaaatatgaacattacaact

SEQ ID NO: 350411 - DNA, 1220 bp, Cannabis indica
attaacaataaaccctaaaacctcttttcttctcaactaggccatttgcttagtgaaaattcataaataagatatagtctaattttagaattataaatgattaataaaaaccaattaactgagtcttacaagcagtattgtctcaactaatgtggggacaatgggcctatataatcaagcttctaacaagtagctctagaatttaccaagtaaattatttaagttattaattcctccttgcaccacgatagatttggaattgaactctttattatatagagcgctatatatgttccacgatatagatacgctatgaattatccattgttataatcctaataatcaatgatcctctatagatggtctacattgagttgggacccgttacacccttcattgtattttatccttaaaacactcagctacctataaatgatattttagtaaactaatataattactgtaatgagtactcaaccatttatctctattaattcaagctcgaaggaaatcatcatttcacttctatgtccagatagaagctatagatttcgtatctatgataagcactcccactaaattgaactactatgtccttaatctgtatgtcacgagaagatccattggtcgactttaacaaacaaattgaaaaacataaatgacagaactaaactagaacctaaccatctcaggattgagatcattttatctaagatcaactaggtgatattgaattagatagatattatggtaagtttattatatcttaaccaggttcaatatcagtcccttctgatgtatactccatacatccaacccaagcttactttaatcaatgccctggaaaggacataacacttattcaaggtgcaagtaatatacattgtagattatcctatcggttaaaccttgtgtattgataaatcataccaatactaatcacacagtcttgattactttccactgtgttgacatcacaataaataagaatatcaatgtgataaggatttggatgaacatataaatcaaactagtgatcacatgaaccaaataacacattaaacaactaataaaataaatctatttctttattgataaatgaatattcaagataacattgaaataagattttatttagggcataaaacccaacaaactcccacttgcactaacataaaataatcagtacatttcaattaattctagattcgttctgtgct

SEQ ID NO: 350412 - DNA, 712 bp, Cannabis indica
tcgccaaccgatcaaactgcattatgtactccgtaacgctcatgttctctttctgggttaggtgagtaaactctttcctcttggcacttctgacggcctcattatagtacttcgcattgaaaagttcttggaacttttcccaggtcattgtggtgacatcgtgtatcaatgtcaccatgtcccaccataccaatgcgtcctcttgaaactgaaatgtggcacacaccacactgtcattcccgatgacacccataaaattcaaaatcttggagatcacagttagccactgctttactttcatgacgtcctgacctcccagaaaaactggaggtgccttcttgcggaacctttcatacagaggttccattctatttaccgctaccactggttcggcctagacaattagggcaggtgccactgggacttctggtacaggcactgcaggagcaccctgctgtcttaaccgcttaatttcgttatcttgttcttcaattctggcttgcatttctccaaacctattttcgcaattccgggtttcctgagtagcttgggcagcctgtggcgggttaatatcaccccggccacgagccctgcccctgggacctctacctcggcccctagcatttgggggaaactgagctccctgaccttcatttgacccgaccgagttgccctgactcttggtatctcacctggcgtccatctagtgtga

SEQ ID NO: 350413 - DNA, 294 bp, Cannabis indica
ttccgatgcataatccatgcatcaaacttttccttaacaaagaactttaaaggtatcaaacttttacttacaacagtaaaaacgaaatggaacatacaatcaagatcaagaatttatattgacaatagctgactcattatattacttccatgtttaaagaagatatgtgttacatagggaattgtggaatagactccacccctaagtatatacatatagggtattgtggataaactccacccctaagtatatagagattatgatccacccctaaaggttgtaaagatcattatt

SEQ ID NO: 350414 - DNA, 1076 bp, Cannabis indica
taagtgctagtttgtacattgattcctcgcctaagacctcacagtcagtgggttacaaatatactctgatacttacacaattaatgatttattccataaaaaagatattgcactgattcacattccctttaccttgacatgtgtcctccagccaaaattcgtgtataacagcattatataaaaaatacaatatatacgactttagtattttttttcagaccaagtttgagttgccaactaataaccctatgttcatgaattacgtcaccaaatctatgtcaaaaggattacgtgaccggagagcagatacgaagaaggcatagaaggagaatattgaaaaatatggggaggaagaagcgaacaggagatcacctcaagatatagtgacactggaagtgtggcagaagttatcgcatactagaaagacccgaaacaacaggtaataattgacaattgtagtattatttttttctatatgcttaatatttttttttctcaatttgctaacaataagtatacgttagattacatgcaagagctgaacaaaatacgaaaaacccaactaacatgaaggttcaaggtggatggggatctaagaccatagttggtcacattgtgagcgaggtatgacatttttaatatgactataattttgtcaataagcaaatttttaataatatttttctaatttctaattttgtttaaaaataggctgatccccagacagggggagcttcccagtgttgtggatacttttttaaagttccactgcaaggacaacaaatggcgcgatgaacacacacaacaactgcatataagtatctttatatttttaataagggatattggtggcgaaattaccaaaactttctattttgtaacacttaaccataaaaaccaaaattttggtcccaaaccccgtttctgttagctatttaccccttccgtcaaaaaattatgttaagtgccacggtggacatgctacagtgcacacaagtgtacacatgtcaaatttttagtggtccatgtaatattaattacttaaatattataaaatttagaaaataattttaaaa

SEQ ID NO: 350415 - DNA, 1066 bp, Cannabis indica
gaggaccaatacgcgcctcgagcatggcgtcaagttctccctcttctcctgaaatttagcaatcatctccgcaggtttgggatagaagtcaagcttgatgttctggcaatttgtcgaccaggcccatgtaggcaccgtcatcaaagcgcttgatacaacgcttgcatgaaaaaggggagaagagctcatctcttttagccttctttaaggcttgatctctgaagtctttgagctccttcatctccacggctaagttagcccctggactccaagtccacctggtgaaattcctctaaggacctcaccttggcggccatctcgtctagggcctcccaaagcttgcgcttagccttggcaatggcctcaccctccgccctcacacgcctcacggtgcctcgcctccagcctatccctccgaaggacctcctctcggagcatcgcctccgcctaggcttcccgctgtttagcctcctcctcgagcttcgccttagcaagagcctcctttcgctcagcctcctcctggatcgcccgcctttcagcagacaagtcctgcaggatcctcacgacctcgtctatgcccccaaattcggacaggacgaagccatgattaactatggtcttggaaaggcggctggtctctgcagtaatctggaaaaagaagtaagagtgagaataaaagccttaggcaaaatatcgaggaaagaaataaatcacaagtacttaccgcagctagggcattgctgatgtcctgaacctggtagacagagttcaaggaggcacaagcagcgtaccgcttcggcaggaatcgagtcagatgggagacatactctctagtcagctccgaggcaaagggggccaaggtgggcccgaggaaacggttgaaccagtccgtcagggggtccatgtttagatcccacggattccggaagttcgcctcgttaagagtgttttgcaactcctctcgtaagaccctcttcaaggcctccacctcagcatgcccccgggtatactcatcaagggcgtagttatatttggctatccgaagatcctgcctctcctcatctcc

SEQ ID NO: 350416 - DNA, 767 bp, Cannabis indica
agtgcgagaagagggcaagcaccagcaacctatatactacgtaattaaaaggttactaggggcagaatccagatatccccctctagaaaaactcacgttgggcctagtccatgcgtctcgtaagctatgaccatacttccaggctcaccccataaaagtgttaaccgatcagccatttagacaaattttataaaaaccagatgcttctggaagattgataaaatggtcaattgaactggggcagttcgacataacataccatccttaaacatccatcaagggccaagctttggctgacttcttgatagaaggtataactccagaagagattccacctgatcagcaagacgaggaaacctggaggttatacgtggatggcgcatcgaacgagcaaggtttgggtgcaagggtaatattaatatcgccagaaggcttcaagtttcactatgccccgaggttccaatttgacgcatccaataacgaggctgaatatgaagcctcgatcgccggcttaaagatagcagaggctttgaaagtcaaaaatctcatttgtcatagtgatttgtagctgatcgtgaaccaagtcctcggggaataccaggccaaaggcttaaaaatggcaaagtatttagagaagtttgaaagaacttggaaaggttcgattactttaaaattgtacaaattccgagagaacaaaactccaacgccgatgccttagcaaaactgtaatgccctgatgctaaggcacgctacagtgctttttcaat

SEQ ID NO: 350417 - DNA, 1051 bp, Cannabis indica
ttgactataaataagttttaccataaataaatatataaaataattataaatgtgaggatttcgtcatcaatgagagataggggacattaataatgaaatagaaatttttgatttaatcctatatataagatgctaaaataatggacaataaaacttaataagtatgagttttattatttttcatatgtattgaaagatactaatataattagctatatatagtattaagatatacattattattttcctccgacatctatctatcttaatactactagtagtatattttaatttatttaaaatgcagtcaacttcaatagagtcaaataatagtgtttatcctgctggtaatgtaaaaagtttagatttttcaaggttgtttttggaagatcttcatcaaacaagatagttaatttctatgattgatataatagaaatggatcaagtggtaatttcattatacatatatggtagggtttaggttcattgttttttactaaattacatactaaaatttattttagatgatatggtaagggatagtgactttaagaaggttatgaagtagagtgctataattcagttgctactagccaaagggtaacctttgactagttttagtaatttttagtgggattatggttgcttagttcttgttatttggtagattctgatcaatttgataattttttaataaaagttttattctggttttctgctatttttcaggtgtatttcaatgagctaggagtgttgtttgaagatgttatagttttattgtctaaatttctgggggcagttttatccatgtggctcgctctgagaatttagtgactcatagtttggcaaaacatgttttgcagttagacgatgagctatcttggtttgagaaaattccaacaccgattgcaaatatctgcatcgtaaatttatgagttattctaccgtcaaaaaaataatgttgtaaaataataaagtgtaagtgtaggtattaattaattaatgtaaaattaagaaaaaaaaaacaaatatgaaaagggaaatttgaatt

SEQ ID NO: 350418 - DNA, 1435 bp, Cannabis indica
agacatcaatgtgtcttgataaaagaacttcaacctagtgtatgaatagataatataactattcatgtaaggaatcaaaaatgtacaaagtgataagatcattaaaagtatattcaagtttgcttaagatagattataactgttattgcgaggcagaattgataactgctcacaaatcaaaagcctgacagataacaaactgcccgcgcacgtagtagattactaactacttaaataggaaaaatacgagtgttatcccaaaattggcactctgacgtggcatcacgagaatggtgacacgtggcatctacttagagcacctggtcggatcaacatgccgagcaggatgcctcgctggcatgtccataatggaatactcaacgagccgtgcagaatgagcaacacttagcgaattcaaccaagcgcatcgtgagtcaccagctcaatccctataactcagggatcaacttgcgtggatgtggcatacacacgatcccactatcagtgtattcagcctcaatcccacgatcctagcattcagcattgatcacacgatctttctgtttatgcgcattgtaacgagagaggaaactcttcctcctcaagtttcctgccctataaatagtgaggaatgttcactgggcaaaggatcgaaaaactgtaaacggagaaattgtacgccgaaacgctataagctaaggctatctaagaattatatattcagagatattattgtaagagctataagaaaaggaatcttcttccttattcttaagtcaatacaactaacgaggattaggctattaccgaactgctcggggctgaacctctataaaatttctgtgtcttcttattgctttactacatattcttattacgacatatcgtttatcgcctatcaaaaagacttattgtcgttggctaaaagcgaagtcaacaacgagcaatggaaagaccaagcgtactctgaatttgatcaaaatataattgtgtacattgtgaataaaaacgcaagcaaacataaatatattaagttcgaatgcaaaagtacggagcatttaagatacataagagctaagttggccagctaactttacaaacttgtctttacgaaaatgccacaaggggcaaaccattacgccgtttttctaaacaaagaatacaagactcagtctacgttattataggggacatataggttcgaggagaaccatctccggataagaaccagagaactcgacctggtgtgctgacccggtaggatgcacctcgacaatccttgcagtagagacctcactcctcgcagcaaagacctcattccctgcaggcaagactgttgggattattttaccaggatctagatttactaccatgtatgttatttaacatcctaatatgaatttctaaaacaatataatttaaacacatataaagt

SEQ ID NO: 350419 - DNA, 578 bp, Cannabis indica
cgaaaacaacaacataaaatcaataagaaaactacataaaagtaacaacaaaaaataacatacatattataaaaaattaacaacagattaacaagattacaacataaaaaaattatattttctgtaaataaaataaaaaaaatcgtaaaaatatttaaaattctatgaaaccgtctttttgtaatttttttgttgtttttatatttttgtgaaataattccattaaaaaaggtatgtaatataattttctaaacattaattaactttgaaaaatgtggaattatccttttattttcttttatatttgttattcaaatttcatttttagcccataagccccagccctattaattagaggcttattggactcggtaggtccactacaaaattttaggaatcttttcaataatatacttaaaatataaattatttaccaaaataccttaataaatctcaattacaataatactttgccacgtcattaaaaaaataccttaattctaaaataatattcctaaaacgaaattaatcccaaattccatttttttttattattttcttgggttttcaaaagtaac

SEQ ID NO: 350420 - DNA, 715 bp, Cannabis indica
tttcaactaagtgaaatgagtaccccaccatttattttcgtttggttaagctcaaaggaaatcatcctttactttctattcgccatatagaagctatcgattccatatttatgttagcgctcccactcaattgcactaccatgttcccaaaatgtacgtatctgttgtcgagtaaatttcgcaacaccaattttatataatattattaataacagaaagaattctatatgaagaacaagtgcgagtattcaacctgggagtgagaaataattaacgtaaagctggaaataacaatgagacaaagaattatagtggttcagtcagatcacggtctgcttagtccaatgtagcaagagtttcgtaggtggcatttcacggtggatcacgcatttatatacaaagtaggtgtccgatcagttatacgaggattgcattcattgtcaatccgtttttacacattgaattacaataattaactaaacaacgttaatattaataaatgaacggcagttactaagttcatcaatatatgcgtcttccaaatctgcgagttgacttgttcacgttctgatgttaaaatcgcaggtttaacattatgtttaggatgtctgcgtccttaaatagtcgccttttgtggacatcgcatgatgagctgatagaacccagacatgcaagtctatgcggtttatcaaggctgcagggttcttagaaccaa

SEQ ID NO: 350421 - DNA, 528 bp, Cannabis indica
acgatggtgcaaactcgtagaagtttgactgatccagccaattcacagacggtggatcctgcctggcagaatccaggaaacacaagggttccgctggctgttaatcctggatagacggcgagcgtggggaatggtgaaacaaatcctatcgatggaattgtgcctcgtgtgcaagagactgggaataacagttccgcacccaaccagggcgtccatagcacaactgttccgcctagaaccaacaccctgacgactatcggatatgcccctaaattacaaaatctactcgacatgctcggactcatgcagggtcgtaataacaccctgcatcatgatcaggacgaactgcgtgccacagaaaatctcgcgttcgacgaacaaaggcgtatgttcaccgaatggaaagatagagagatggaggcattaagggctcaccatgtagagattgaagatcgtagtcggcaagctaccgtgctgatacgaagagcctaccaatatgtaggtcagcagccgccgaatgtcattccc

SEQ ID NO: 350422 - DNA, 618 bp, Cannabis indica
agatttctcggtcaaggaggctgtaactcctcctccccgcgcgcgtccatgggcagttgcagcctctcatggctgtacgtgcagcctagctgccagcaagcactcaaatccaattttttggggattttccccaaaaaattttatttttttaattttcaaaccttaaaattaaaataaaatattttttcaaaatattcaaacttaaatatcaattttaaattaataatatttaatttttaatagaaattgcctaaccatatctatttttaaattgattattttgttttcttaattttattaaattatattagaaaatgatattaaaaataactattttttatttttaaatcatttatcatattagatatttaatttaatttaataaaacaattcaaataaacctagatattttaaattagtttcagttttgaattttaaattttgaaaagatatttaaggttgttttaaacaaccctaaatttttaaaatttagttggttagttaaaataataatttaattatattaatatcttatttcacatttgttcaatgaacattgtttgttatgtatttcttaattatttaatcaatttttttttaacaaacctattattttat

SEQ ID NO: 350423 - DNA, 540 bp, Cannabis indica
aatagttcaaagggcatttttaatgacctaaaagttcaagaagcatgatttagtatatgttaaacttcggagtaaaaatcctaattaacctttatttttttaaatatattgtacctgtatatttttttacacatgtggtgttaaaaaaacttcaaaacaattcatggatatattttttaaaaaagagtaaataaataaactacacagcttaattattcgatctgtttgtaaacttgagacttaatagaaaaagaaaaaaagcttaagaaaagcaatagtaaattactaatatattggaccgaataatagtaacagaaatagtactagtagagtcaaagtatatatatagtagtactatagttactattactaaagaaaagtattagtaattagtacttagtaggagtactatactactgcatccacacctcaattactagaagcttgtgtccaagttgcctcattttttgttaatttatagttattaacaatatcatcattcaattaatgagaagaaaaaacaacaacaaaaaaaggtga

SEQ ID NO: 350424 - DNA, 928 bp, Cannabis indica
tcctctcatctctactattatttaattatgtcacttatttaatttttttaatggtaagtatttttttttaaagatttcaaatttatcattatatggtaagttttctatagctttttatatttatgagttcttatgtcgttctttatattttagatttcttattttcattataaatttgtcattttttaatttttttctttcatttctaaacttatttatttattttctttttattttattttctaaaagaactaaaatatttaaccttacaaaatatctataaaaccaaaattcttctaaatttatttaactattttctcctttcaaatttttcttctattttctaaaaagttttaaaatatctaaccctaaacaatatttataataaaataatattaatattaattaagtaatattctcaaaccctaccctttttattcattatatatatctatataaatcaattaaaactcaaaatcgtaaagttttccccaaatttttattaattttctaaaactatttttttaaaaaaaatatatattaatatttaaaactaaaaccttatgtaggttaaacctccattataataacaacctaatacatattgtaacgcacgtatttgaaaacttactaaaccaaaattttacttattataatataattatataaccttataggtcaagatcccaaatttttttaaaacacagttgaaaattacatttattatatataaagtttcatatatatatatatatataaatatattcttaaacgacagggcaactacaaaatatagttcataaggttgaaagattgaaaccctccaagctgcactatcgcgatatgtacaatcactgccaagctccaactcactgctcctccagcttagcttttcctttacctacacaatgtagcaaactgatgagtc

SEQ ID NO: 350425 - DNA, 797 bp, Cannabis indica
tacgcctctgttcgtcgaacgcaaggttttactgcagcacgcagttcctcctgatcatgatgtagagtattgctgtgaccctgcatgagtccgagcgcagcacggagattttacaattcggttgcatctccgatggtcgtttgggcgttgatgcctggtggaatagtcgtgttatgaacgccctggctgtgtgcggaactgttattcccagtctcttgcacaccaggcgcagtttcagtaacaggagttgtcccatcattcaccacgcttcccgtttgtccaggattgacagtgggtggaacccttgaactccatgggtcctgcaatgttggatccagcgtctgtgagtttgttgggtcagacaggcctctacgagtttgcaccatcatgtcgaatgttgaaaagagcaatttgcaattcttctctcaatgaaagcactaaaatgttgacttcggttttagccaacgacaacaagtctttttgataagcgataaacgatacgtcgtagtgaaaatatatatatgaaagcaatgataagacacaggaattttatagaggttcagtcccgagcagttcgttaatagcctttgtattgacttaagaacaaggaagaagtttccttttcttatagctcttacaatagtatctctgaatatataattcttagataataatatagacttagcttaactgcgtatcgacttacaatttctccgttcgttgcccagtgaacattcctcactatttatagggctgaaaacttgaggaggaagagtttcctctctcgttacaatgcg

SEQ ID NO: 350426 - DNA, 950 bp, Cannabis indica
ttacctacacaatgtagcaaactgatgagtcatcagaattaataagaaatgcataacatatatataagcaatgctctaccggctttatgcttaagccgtcttgagctcgacaaccgagctcaccaaatggttaagaacgttctcaaccgaagtacgaccattgtaccatatgcactaaagtaccaactgtgtattcgtgttggtacggcccttactgtactccgaggagttactaagtgttgtaccacatgcacaacgtaccccttggtactcgtgttggtaacatactaccctaatatcctacactgtactaacacccttaaaatcacatttcagttagtgttagtagtgtaaacaattaataataagcatgcattcacatatatatatcatttatgctaacttatctcgtttccgtgctcaggtgtgccggtcagcctgagtggaattgcagctcgacgctttactgggccctaaaccacaatattcagaaactgatgagagacaccctaaaacgcttatcgggaatttaaaatcaaaactaagaataaccctctcgatgaataggatgcaaacactctaaataacataaaacggggaaaattagggttctggaaagtggcccaatcggcagaccggatcccaaccgaaagttcgattcccaaggaccaaccagtcgaccggttgctacaggtccccttgaactggttgaccagtttagtgctgggaacccaaaaatgctccccacaccacaattctgttggaaattattttcggctaaagatagggagagagaaaggctcagttttttccactaaggttaggtttgaattatttggcattaaaataatgaaaatatcagagggaaaaccctacaaaagtggccggccctacaaagtggatttgggcctcactttttgcaattttgcagttttatcttttctgcatct

SEQ ID NO: 350427 - DNA, 505 bp, Cannabis indica
ctttatgggaagttggagttgaaacttttaatgagtctacaaaaaaaaactttatgttacgagcatcactattatggactattagtgattttccagcatatgcaaacttatcaggatggagcactaaaggaaaatatgaatgtccatcttgtcatcaagacacttattctttgtggttgaagcatagcaaaaagcattgttatatgggtcatcgtcgttggttagaaaataaccactcatttagaaatgatgaaaaatctttcgacggtacaaaagagaaaagattggctccaataccattaagtggttcaatgatactagataaattagaaggctaccaaattaaatttagaaagacaattgttaatcctgagttgccatatagttcgaagaaaaagagtatattttttgaattgccttactggaaggataacttattacgacacaatctcgatgtgatgcatattgaaaaaaatgtatgtgaaagtttagttgggacattatt

SEQ ID NO: 350428 - DNA, 931 bp, Cannabis indica
catttatacacatatatcactagggtaataaccctaggccatcaaccgctcatattagggtaataaccctaatcccggttactaaacaatcatacatatcattttcaatataagcgccactgtgcataatctacgtgctaatcactatcttacatgttttcccacaatatcagagatttcgaatctccaggtgctcctgatcaggtaccgataatcctagtcacacaaatcagggattttaataaatagggttaaaccctaatttcactttcataaaatatttacatggcatttaaaattccaatattcacatagagctcaaaaagagctttccaacggtatatagaactcccaaattggagtccggatcacaaagttatggctatttgaagtttgcaaaaaggatctgcccagaaagaaaagggcgcgtcgcggcatgctaaaatcatgtcgcggcacctcggtttaaaacccagaaaaaccagtaataaaccacaaatttcagcccttaaatcacatccaaacaacccaattcataaccaaaactcccaaaccataaaataggtttttaatcatcatacagagagtttaaaacacatacttcatgcataaaattcacaattaaactcaaaaatcagattgcataatcaacccaaaacatgcttaaattcacaaattttaagctctcaaacttgagtttcaactcaacaattttctccaagttatccagcaacaaaaacaatatttaacatgaattttccaactagagaatctccaaaaatctcacccacaacaccacaattaaatcaacaataaaattcatgttattcacacccaaaccactaaaatcaaacatcaaactcaacaacatgcataatcaagagcaccacaccctttttatgcttttctcacaattaaattcagccataaa

SEQ ID NO: 350429 - DNA, 696 bp, Cannabis indica
tatgatgaaaaaatgcaacttgttctagtaccacagtattggaatggggaacatttaagaaaatactaccaataaagtaccaggtcagatgaccattctaagtacagaaagaacatttacttttaagtgaatggcatgctggcaaactacgctcaaaggtttcgacgaaaaagaaaaagtactcaagtcggatgactgccatttaaagtacaatttctaatttctgcaatttgttttatttcatgttaagctaaaagatctgattagatcaaatagctctgatgtaagttactatggtaacaaatacattttttatcaataaatgaataaagatctctatttcaaaattcatattgagtcgaaattactaacatgttgttagtttaccatccagtgcgtacaaaaggttagtcgaaccgaaaattccgaacagataaaaaagtatacttgtaaaaaacaagtaaccaagagtcataagtctgctaggtcacttgggggaacctatacctgtacaaagcatttggtaaagataaaacaaccacaattggacgatgattataaacatagaatgaaattcattaaagataacaaaagcacgtaataccgagattaaaagcttcccggtcagtctgttgtctgtaaaatgaaaaataattccaagtttaaagaccgcttgaccggtcatgatgtcttaaa

SEQ ID NO: 350430 - DNA, 753 bp, Cannabis indica
aattatattgtatactcatagatgtatgtttggctcagatactgatcgactctatcacatcagtacggctagagtatgactagcgtactgagtataagctgatattatggtcgatagtattgttgtataaacgttctagactgagtaccgtgttggacacgaggatagggttatggttgggtgtatgggcacctaattataatccaggttattactatgttattatttatgcttttcttattgagtctgttgactcacagatattgtttgcatgtgtaggtaagggcaaggctagttgagcagccgtgagagcgagtagatgaagattgtacatgtcgggacagttaggcctggagcgtacggtcttcgggatagctgggcatattttgtatagtcgttaggcgacaaacttttttactatgcactgtaaaacttttgtaaatattttttaatgggacccaatttaatataagtattttgttttgatatttatagataattaagtaaagttttaattgttcatgatttccaataaactcattgattagcaatgagctgcacaattaagttaaaaatcacgttaacacgcctaaactagtagggtgttacagtaggtatgggcgtgagtgacatatgagtaccttgtgtaggtatgggctcgtttgattatgtaaagttatatattggtgccaggttgtggcacgagctcacctgattaggtggtgcagttatatgatatatgatgttgcatta

SEQ ID NO: 350431 - DNA, 829 bp, Cannabis indica
ttgaccggtcatgatgtcttaaaacaaggccttatggctgaataacatatataaaaaagaaggataaaaagagaaatagtcaaacagctggagtctcaggctctcaattcgggtcttcttggccggtaggagctgaaggatctattgtctgagcggaaggaacatcaacattctggtcagaggtagaagcggtcggctcaggttcaccataagccacttgggaagcgcactactcgagatacatgtctttggcttcaccaaagtaatcggaatttgcctgagggttagccttccaaaaatcataaaagagctcgagaccggctgtctctaattcatgaacattctcttccagcctcgccacctcagctgtaagctcctcctccttagacttcatctcctcttccagccgacggaagacagctcgaagggtcgtcctttcatcttgaaggctattcacttctggagataaggtgtcgatggtctcttcaagtcggtcagaagcctcgagatccttagtcaaatccgtttttatcttctgagcggcaaaaagcttattgtggacttcacccagctctagtcggatagctccaagctccaccctagcgtcatcagcatccttcttggccaagtccacctccgccctcatggtattggagaaagccgcgttccaggaagcaacagacttagctcaggagtatgtgtaagccaacttaagaccaacctacacagagaaaaaactttaaggtctgaaccaaataaagaagaattaaaggaaactatcaacaaaggcttaccctggtaaattccttcaagactcctcccatcagca

SEQ ID NO: 350432 - DNA, 1190 bp, Cannabis indica
tttactaatcgatgattttgattttgtctttagtagaacaaatcaaattatatttatttggcaggtttgaagtccaaatttgtgatcttagtttaatttagaaagtttcctttgtggtcctgacttgctactgtgaaacccgattcagatggtgcaaatcaaggatttttttaagaaagttttgtacagctggaaaattgttttcgtggttgtctctagggttgctatattctataaataggacctagagagcagacaaacgtttttatctcttctagtctcatattttcatatattgctttgtgagaagagtgtatcatttgtaaaaacctatagtgttcaaataggatttggttttcttattatgatctcgtactattcatagaataggttgaagagaagctttgaacaagtgtgggtcttcaggagaagacttttccaagtctcatttttgggaggaagtgagcatatatcttcggaagaagatttatttaagccttacttcgaagggaagtaagcacacaacaatagctgaagggagttcactacatggtgtgtttcagagatcagattagcaaggtggattacggagggttgcggcaaatcactagagggagtctaaattattggcatttacaaaaactcaatttttcaattgttatcagagcgggacactaaacttttagtgtggtccttttaacattttcttgtgtttttgcaatatgtttctctttgcagaagaaacttctattgttcgcccacctctcctcaatgattctaactattcttattggaaggttagaatgagagcctttatcaagtctcaagatgagaaagcatggaggatggttctttcaggatggtctcctcctattgtggtagatttcgaaggtaattctatattaaaatctgaatttaaatggtctactgaagattataaattgtctgcttataatagcaaagctttacatgctatatttaatggagtaggtgaacattatattaagcttatatcttcttgtgaatctgctaaggatgctcgacagatccttcaaactgagtttgaatgaacttctgatgttaaacgttctagatttatcatgcttcagaccaaatttgatgatcttagaatgtctgaatctgaaaccttaactgaattttatgaaaggctatctgatatagctaatgaa

SEQ ID NO: 350433 - DNA, 575 bp, Cannabis indica
ttatttttttcatggaatttttgttacaatttcatactttcatttttttttcttttcctttttgagtcagtgataactaaaatgataatttatttttaaaatttaaataaataattacattaataatagaaataataaaatattatgatttcaaaattgggtatataatataatgggtaatatataattaatatgtcaatatctactactgtacattgtgtttattttattatattttctctatcttttgttgggattgagttgagaaataaggtcactcacacttcatgttttattataagtgttgtaagttgtcttgataaggctaaaaataggtaggaagtgcatgaaaagcacaatgaataatgtaagagtcaggaagaggaatattttgatctttcaacttggactgaacattcataatttttaaaataaaatcccgcactcctttgatttatcaaattgaatggttgtcatttcatccataaaatgtccagctgcaacgtttttattttttaccagtatcaaatatttttcttctactttgaaaaactcattagcatttgtggtgtttg

SEQ ID NO: 350434 - DNA, 1171 bp, Cannabis indica
gaccaggaaccatagccagaccaggacctagactccaacccagacctagacctgaaccgagaaccagacctggatctcaacccagatctggactcggtgccgaccctggacccgaactcagaaccaaacatggaaccagactcgggacacagaaatggggccgggacctaaaaccgcaccccagtctcggtcccgaacccaaactcggacctaggacaggggacctgaaccagaaccaaaccgggacacgtgacatggatccagatgtgtgactcagactaggacccgaacccggaccaggaccaggacccaaactgggaccctaacccagactcgggacccaaaacgggaacctaaacaagaactgccagactaggaccctcgaacaagactaggatagtgaccaagaccctcactcaaacctagaaccgaactcgaatttagccccagaaccaaactgagaccgaaactcaggcctagacacagttgtgtacccagaccatgaccgagaccttgacccagacctagacttgggagttgatcctagacccagacttaaagctagatagggatttggatatgaacctagactcgaacccagacccagacatagaccgggatcgaaactggtgacctagatctggaccgagaccctgacccagacctagacctggaccaacacccgggacctgaactcggaccaacacccgaaccaagacccagaccgggatcagggcctggaccctgacccggacccagactcaaaccaggactcagaccccgacccagacccagacccaaacctgaacccaaacactgaatcaaaatcaaatctgggactaggacccaaacccgaacatggacccagactaagacctaggacccggacctggacctacgcctcgaaacccagacccagatcagaactcgagactcaaacccgaacctggaccaagactcgaacccatatcaggacccagaccgatatcgaaacctgaacccaaactcgaacaaggagtttaaccccaatcggctcttagactcggaccgggacctaaaacttggacccagatgagggacctggactcgagaaacgggcatcagaactgggaccgagaccctagacccaatcccagacccggaccctgaccttggactcggaatgggacct

SEQ ID NO: 350435 - DNA, 923 bp, Cannabis indica
cccaatgacccaatagccctaacggaccaatgtaagttcgcatgtccagatgctaccaacttcagcatgcgacgtctgtaacgagcgatcacctaaggacgcagacgttccaaacgtacgtgcgaccctacgaactcaacagacggaacacgaacggtcaactcgcagatgcgaaggacgcatacgttgatgagttcagtaactgtcatatatttattaatgttaacgttgtctgagtttaatcatgacaatttaatgtgtaaataatggattaacaataaatgtgatcctcatgtaaccgattgggcacctgctttgtatataaaggggtgatccaccgtgaaaatgcacctacgaatcccttgctacagtggactaagcagaacaaaatctgactgaaccactatatttcattgtcttctgtattttttccagctttgttgtctgttctcgcattcctatttgagtactcgccgttttaggttgaatactcgcatttatcatctttcaaataattctatcttttaccagctaaattacacttcttggtgttgtgaaattctagtaacaacataagtacataataatgttaattattaaagtcagatctgtttaaaacataaggcatatgaaatcggctgtcaaagttttgacaaaatattgaatttcaaataattgacctcagaactaacccattcgcaagtcggaatattagaaaccgactaaattagtctttgtaaaatttaatttcaaaaacatgcttaattatggactatttaattcactactaattaaatttaaaataaaatttcatattttaaatgaattcaattattattttgagttaaactataatatataataattatatcataagatattttttcaaaaaaaataaaaaattatatatttaatattaaaaa

SEQ ID NO: 350436 - DNA, 1418 bp, Cannabis indica
gattccatactcataaaatatattcatggctttaataattcagataatcatacagagctcggaatgagctttccaacaatataaaggactctcaaatcggagttcggaataaaaaattatgaaatttcaaagttggaactccaaactgcccaaaaaattcaagggcgggccgcgacaagcccaagccatgtcgcgacaccggggaaagcatcccaggttccaacaacaggggcgggttgcggcatgctcagaccatgccgcggcacctaggttccaaacccagaaaccagcagcctgaaacacgaatttcagcaaccaaacacatgcaaatcctcccaaatcatatcccaactctgaaaacacatccacaaactataaaatttaaagatatagtattaaaatatatattacatgcatcacaactcataatataccctgaaaattcagtttgcacatacacataaatcatgcttcaaactagcaatacttaagctcatgaacttgagcttcaagcagaaaacacccatttcatacctaaatttcaacctagaaaatcctgtgaaattatagcctcaactctataataaaatctacaacaacttcatgcaataaagacccaatttcatcaaaatcaaacatcaattcactcatcatataatcaagaacactcaaagcttagaagagcatgctttcaattcccgaactcagcaaaaaattcaaaattaaagagtgaggagaagaactacctcaaattcaagccacaaccaagcttaattcctcaaaagcaagcttaacacaagcaaatttctttccaaaaatcaaagttgggaataggttaaagagatagagagagagagaggggtcgggtgagagggatactaaagccagaaatttctttgcttttccttgaaattaaatttttattaaagtatatcaataaaggtcaaaagaccaaaatgcctctgttgttgagcaaaattcgcaacacccaatatgaataataatactaataataagaagaaattatgtgaagaacaattgcgagtattcaacctagaacggcgagtactcgaactgggaacgtaagtacttagtaaaaactggaaatatcaagaagacaaaggagtatagtggttcagtcagatcacagtctgcttagtccactgttgtaagagtttcgtagtgtgccatttcatggtggatcactcctttatatacaaagcaagtgtccagttagttacacaaggattgcattcattatcaatccgtttatacactgatttacagtaattaaactaaaacgtaaacatcaataaatgagtaacagtttctactcactaaatacagcaacgtatgcgacttctaatgtttgagttggctgttcatattctatcctaagctcgcaggcttaggatata

SEQ ID NO: 350437 - DNA, 871 bp, Cannabis indica
ggtgccacgtcacaaactcttcggtttctgtgtaggctggccatctgtggccgttggattgggcgactctaggcattccaattgccacgtgtcgtgatcccaactaatgagggatttgggtatttaaaccctctgattcgaaccaaaaatccccattctccctcattttccttaactcccttaactcccttgttccctctctttcagagaaaccagcaaaacttcccataaattgcccaattttttgtttttctttgtgggctttttctcgattctccagtgctgtcgagagcaattcgtgggaacagattaccagaagtaaaggttagttttcaaaacttcactgcatttcgttttctgtttgagagggaacactgtttttctgggtttttaatatgcatgagagagtttaagaatgaatgtttgtaggggatatgtatgaggctacgttttttaggtaaaaaactgggtaatttcataaaaaatgacctaaaattggcataaccgcatactgtataaaaaatgcttgaataggcactgcttcatgttttgaatactcgcgggtattcggacgaacacttcgaatactcgcatgcttgcgagacttaattacttctgattgtcgcctagatctttaggattttgtattctgtgaatttggttgtgagaacattgactgagtctttcaaatggtggatgtatcacagtattctaatggtcatatatgcggttatatgttccttgagatactgagatacacccagccatttgcgacatgtgttaatgttctaataagcgtactctttggctggtagatatcctcgaaacggtgggagtacctcagtaacttcagggtcatgcttgagaacgc

SEQ ID NO: 350438 - DNA, 720 bp, Cannabis indica
tttttttaatttttgaaataagtttgagattttgattttttgaatttttttttagtatcttatatattggtgtgttatttagatgtgattgtatatatacatattttatgtacaataaaactcaagtgagatattgtagtgaatctttgtgtacttgattttacagacgcctcttcttttaatttaaagttaaacatgcaaagttaaaaatgaggttaaaattatctacattaatattttaagtattatagatttaaattaaaattacttatataaaatatctatataatttttactttttgatatatatatatataatattataaaattaataaaaaatattatgtaatgtaatagtatattttgctacataattttatttttagatgtatataataatattataaattaaattaataataaatattctattaagtagtaatatattttgttaaaattaacgttagaaaactaaaaatactgttaaatacaaaaaaaaaattacataaccatatttcatatagaatattaggggtgttcacaaagtatccgatccaatcaaatccgcacgatccaatccaatccaatccgcaaaatgcggatatccgcacttgtgcggattggattggattgaaaaatctaaaatccgcacttgtgcggattggatgttgtttgacctcaaaaagtaccgatccaatccaatccgcacttaattatata

SEQ ID NO: 350439 - DNA, 538 bp, Cannabis indica
gaggcacaagggcatatcttttaggcgggaactgagtcagatgggagacgaactcgctggtcatctctaaagcaaaggaagccaaggtgggcccgacgaagcggttgaaccagtccgtcaacggatccatgttcaaatcccacggattccggaaggcttcctcctggagagtattctgctgctcctcttgaagtattttcttcaaggcctccacctcagcatgcccccggctgtactcatcgagggcgtaattgtgtgtggccacccggagattctgcctctcctcatcagctggaaccggagtcaacactatgccgtgaggcacagtgtattcctccgcctcggaaggaatcccagagtcatggctcgaggccggaatctccaccctacggggcttcttagaaggctcctcctccaccatcttgcccttgcgcttgcactcgagggcggtcggatctgccacttcaccttcttcaacttcctcaactccctcctcctcgtccaccaagacaatggtgcctgaaggggcattggagga

SEQ ID NO: 350440 - DNA, 925 bp, Cannabis indica
tacatggtatcaatgttctttcgaacactcctagtccacggagccacgcacagagaatgaaatcaattagtaaagtctcaaataattgcaaaaataatcaacttaaacaagtttagactccttctaaatctttgccgcaatcctttgtaattctcttcatgaatttgatttctcaaacaccatcaaacagcgaattccctttttcttagatgtttgagcgcttacttcgtctataagtaagacttgaataagtcttctcctaaagacctttctcttgtccagtcaagttgttcaaactgatcctaagacgagactaaaaaacaaaaacactaaaacctagcttaacaagtaggttctcacataaagaacactctcctcacaaataagaaactatgcaaaagtgaaaactagaagagctgaaccgattgactgctatctaggttctatttagagaatatagcaaccttagagacagccacaagatcgattccactgccgtacaaactttcctaaaaaaattctaatttgcggcattaaaattgagtttttgcagcaacaactcagaccagaaaggaaacttgcaaaaatggtgcccaatcatgtaaatggactatatacctgccaaaaattgggtgcttgatttgatcttatcaagacacaatcgaaaacattaaggagaaagagcaaggtcaaagttttcaaataaaatcaactttccataaaagaatttcttatctttcaagaagtttccaaaacaaaaaaatggacagctaaaaaagaaatgaaactagtttatttgcagaaggaaatcacacaataaataaaaaatattttgacacctaaattgccaaaaaaaggaatttacaatctcctcctttgacactttagataatcaaaatatttttaacagaaatgtacctgcaaa

SEQ ID NO: 350441 - DNA, 371 bp, Cannabis indica
attgtaacataacgtaaccctatttttgttgatatttttttaagctatataatgaactttgttgtattaatgtatattttcctaataataataataataataataataataaataaataaataaataaaaggttaacgctaagggtgtttatcaaaccatctcactccatataaaaaaatgcagtttgaaattcttcatagtgcgattacaatttgtatttttttcaaactgtgcggtgcagtgcagtttacggttttgaatttaataattgcaatttaaactgcatcgtactatatataacaaatttaccgatatatataatataatttttattcttttttcatgaaaaaataaaatataatatatgtat

SEQ ID NO: 350442 - DNA, 519 bp, Cannabis indica
ccaccccgatatacacatatatacacaaaacaaaccaatttaaataaatccaaatccaacaaataaacaaacacacatatatacacaaaatttcagtccaaaaacacaaaccttaaaaccctaaatttatttctccacaaccattatctttctacagatctgaaaaataaaaatcacaataatacccaaaaaatttatacacagatctattgcaaagaaaaattatgaaaaaccctaaatgagagagagaggtatcggtgatcgatacctaggttggggtcctcgtggccggctcggtggtcctcgtcaacggacggctcggtggtcctcgtcgacggcaactggactattctgcatcatcgagagagagagagaagagggatgagagagagagagagacagagaagagggctgagagagaaagaaagagaagagggctcgaggttaccctgggtcggggaagcttcagcatgccgtgcgcctagcaggtggtcatcggcgccggccgcgggtctgtac

SEQ ID NO: 350443 - DNA, 545 bp, Cannabis indica
ttgatacctcttctatgtctctgtttgctgatttttttgactaattttagcatgtttcctgttcagtttctagggaataggtacacttggtctaataaaaccatttatgaacgtttagattgggtagtagtgtcagattcttggagtgatttttatcctaaccatagtcttcagcatctaggtttttatgggtctgatcaccgtgttcttaagctaagtttagctcccaccaatactaattataccactcataggactaggcgttttcggtttgagaataattgggtggaggacccctccttttatgatgtggttaaaaatgtctggaatagttctctggttccaggttctgttcaagggcataataactctcttataggttgttatgagaactttcttaagaagtaaggaaattgtatttcctctctaagaaattagaatagggacaataatctcctttttaaaaccagaatatagcatcttactcacgaaattgatatgattcaagataagatgtttttaaatgatgaggatagggctcgttt

SEQ ID NO: 350444 - DNA, 619 bp, Cannabis indica
gcgattcagaacagtattttatgccttcacaatttgtttgtaaaacgatctgcaaataatttggctcattacttggcaagcgactcttgtttctctacaggtcgtgtgcttcagttggatgactgttcctctgaagtgcgttctattcttttgaacgaatttattaattagtagatcttatgatttttattaaaaaaaaaaaattgattcaattttattttggggctttttttatttttacactaaaatatatatttttttctttcatttttacggaattctatatagaaactcctattgccactaacgctgcaacctaaattgcaacaaaaatcatacaagatcccctattataactagcgctgcaaccactttagaaactaaaaccataaatttaaaaaataaaaattaaaaaaatagtatataaattaattctcaattcatttaaaaatatacatattttttcaattaggaagtgaaaataattaataaagcataataaaaaagagacacagaaacatgaaaaataaatatttgaataaagcatgaaaagaagaaaggaaaaggaaattaaagattgaagaaagattatttatttatttctttttttttttttttt

SEQ ID NO: 350445 - DNA, 422 bp, Cannabis indica
taaaataatttccaacacttttccctatcaacagtatgtcatcaacattgaaagagtgtatcattgaagtatacacatggatcataagcactcttggtgaagccacttttcatcatgaaatcatcaaatctgagattccgttgcctaggagcttgttttagcccatagagagatttttgcagcaagcagaccttatctctatcttcatcaaaaccttctgccatcttcatgtaaatgatctcatctaatttcccatggagaaaggcaattttgacatccatttgctccatttctagatcttctaaaactgccttggccataactgctctaactaaggcatgtttcacaataggtgagaagatttcattgaaatctactccttctctttgagtaaatcctttggccacaagtctggccttgta

SEQ ID NO: 350446 - DNA, 546 bp, Cannabis indica
tttaacacgtcgaaaatagagtttaaagtttcaacagtctgttacacgcatgactcttttattttatacatatgtgagatagacggtttgaatattgctttctatattgtaaattattttgaatttctcaaaatattataaaataccttaaataactataacttacatcaccataaaaaaaaaattagactaaatttctttttaaatgttgaaatagtaaaagatgcatcgtggagtggcggaaccagccacaaatattaggggtaaaaaaaaataacaaaaattacacttataataaaaatataaattttatagaaactagagtagatatatgagaataaaaatagggaaacttacaaaaatactgtttttttccccaagttttacaatgatactgccacacggcaataatttcttttttactgtccaagcccctttttttttctttcatactgtccagacctaaaatatttacttttatactgttaacagtaataaagcacaaacgacacctccttcgtggttggggacggacaaatcaatacc

SEQ ID NO: 350447 - DNA, 621 bp, Cannabis indica
aaaaaaaaaaaaaagggaagaataaatcagttttacaaataaaattttatatttaaaaaaaaatctactagaaatataataaaatgcttacctcaaagtttcttctaatttcagaaccactatcacaattacaaattcacaatatgtgcctggctatgcgagagaaatggaagtttaaacaaaggagagaaactgaaaatgaaaatactataactataaaactgtatgtatatatgtgtgaaaaataagaactactattactaatatataatatatgatatatgcatatacaatacaacaatacaattactattactaatttactaatagggatattggcggctaaaccacctgaactttacggtttgtaacacttaaccacaaaaactaaatttttggcggctaaactacctaaaccctggttccgttttgctctgcacacctccgtccaaaaatcacagttaagtgccacggtggactgtccacgtgtacacacttgtacacatggcaaatttttagtggtccacgtaatattaattttaaaaaataattataaatatttaaaaaaaattaaaaataaatttaaattataaaaaaatattttatatatatttttttctt

SEQ ID NO: 350448 - DNA, 501 bp, Cannabis indica
ttcaactgtatctgaggagtattgacaaagatgatcacttgactgcgatcatcccaaagattaagacgattcaagaaaaatatggctccatgaggatgctcgcttgttctttcaaattcgaaattctatcgatggttaggtaattagtttgattaatcattgtgaattggttaaagaattaataaattacttggagtttttgtattctggcaaagacaacatatctcgcatatatgatgtttgcaaagccttttatcgtacggagaaacaagatcagtattttatgagttactttacggaatttaaaaaaacatatgaagagcttatagtgttattgtcattttagtcctaatgtgaaggcttaacggcactaacgacaacaaatggctattatgagttttcttgcaaaactctcatatgaatttaactctgcaaagtcacaaattctctctggttctgatgtctcctctttacaagatgtgtttactcgtgttctttgca

SEQ ID NO: 350449 - DNA, 784 bp, Cannabis indica
ctatactcaatacaccacagtatttttatggcgcacatttttttgaataaacatgcacataatataatgaacaaattagcaaattattagaacttattcttgatcctgtatttctattccaattaatataatactatagtaatagaaatagataccaataaagttcttagacatagtgtcacagtaccttatttgagtgggagagttttaaaattgtaagcccatctttatttgcatgacacttgtgatagctaactatgttatgatcatgatagaaactttagaattcaactgagaaagtaaatctaaccattcatatggatagaaataacttatcaaaattttgagaataagatagtagaattttgcatagtctattcgaatgacttaggcaaaattcctaatcctcatgaaatgttttatggtatctctaatgattgcttaatcttaagcaagtattttacattaatattaatactagattgctatgttgatgacttagtctagaaggaacttacagttttagactaagataatatgtcacaacaagatgtccctgagaaacaatagtaagaggttaaatgtacttctacgttcgaacttaaccagactcctactgttgagtgggagctatctaagatgtaatcaaacaaggaacattaggagatagtcaagaaatatctctgaaagtgacctatatgttagatgataggggtgtatattagcatcctcatatctacaccaactcgtaacctattcgagatggtggttactctgggggtgg

SEQ ID NO: 350450 - DNA, 993 bp, Cannabis indica
ttacgtcaacatctttctgagcggggatttgagtacgggctccggggtacacaattgtggtaacattctgatcgtctgctcccctacttctgtttagatcattccttaggtcatgggttgtccctaatctttcgaacacagatgcgcttggctgccttagtggttgattcgcttggttgacgggtggaatggcaccattgatctggttggaaccatcaggtatgactcctcctgaagaattaccagacaaggtctgctcgcctaccgctgggcccacgagtggaactcgtgacaggcaattgggcggctgaccatttgcattctaggaagtattcatcgtttgatcctcatcctctctcccaagggaatgacatttggcgattgccgacctacagtttagtaggctctttgtatcagcacggtagcttgccgactacaaacttcgatctgtacatggtgagcccttaatgcctccatctctctatctctcaattcggtgaacatatgtctttgttcgtcaaacgcaagatttactgtagtgcgtagttcgtcttgatcatgatgaagggtattattatgaccttgtatgagtccgatcgcgtcacggagattttgtaattcagtggcatctccgatagtcatctgggcgttggttctaggagaaacagttgtgttatgaatgccctggttgggtgcggaactgttattcccagtctcttgcgcaccaggcacaatttcatctataggaactgtttcaccattccccacgttcgctggctatccaggattaccagcaggcggaaccctcatgtttcctgggttctacgatgcaggatccagcgtctgtgaatttgttggatcagtcaggcctctacgagtttgcaccatcgtattggtgattggatgttgaataaagagcgattcgtgatccttctctcaatgaaagcaccaaaatattgacgtcgcttttagccaacgacaacgagtctattt

SEQ ID NO: 350451 - DNA, 584 bp, Cannabis indica
aaccatgcaacataaaatgttatttctgatctttattaataagtgaatctgattattgaaattggtttcatttagggcacgaaacccaacagttttcacaaaatccattgtgcacttcagacaaaattcgtgcagcttcttcttgggtaacacatctaaacaatggcatggagaatcctcgtctgtacataattccctctactatgatgtaccgtgcaaccttccttctcatctttcgagattcatttcgattatctgggagttccccagtgttgaggtagggttctatttgcgtcatccagtttggggaagtatcaatcattttaatctcttctgtgccagtgatgctaggttcttcgaggaactggataggaaccaaattcgctctatcacacattactattcgcaagccaagttaatgcgtcagcagtcgtgttttcttcccttaaaatttgtctgagagcgtagcttttgaactgtgcgagcaaatcgtgtatttttctcaaatatgctatcatcttttctccccgagcctcgtgttctccaaatacgtgatttactaccacctgtgaatcactacagat

SEQ ID NO: 350452 - DNA, 675 bp, Cannabis indica
aatctaatattgactcttacactttttttaccttgaaaatcttaattgaaaatcttaattaaaagcattaaatatacctttacgctttgctgtcaattgttacactttttgagcttttgaatttcttaaagggtaaaatggaaaatatttaatatattaaaagcattacattaaccaaaacatgagctgtcaaatgactattacactttttgagatgagttgtcaattaagacagataattattaaaagcattacattaaccaaaacattagctgtcaattgactattacactttttgagatgagttgtcaattaagacagagaattaaataaaggtgaaaaggcaaaattgttaatattgaatttcttaaagggtaaaatggtcttcaaactatcacctcattacaacacttttataatagtaagatatatttatacggacttttttatgccaattacactacatacagaaatttttaacttttttacgtggaattttattcaaaaatattgtattttttttatagaaatactgtgtaagttttatactgtgtactgtgttaagttttcactattgttctacggttgttttttagttgttctattgttgttttaattgttttgttttgtgttccactgttattttataaaaacacagtatatttgaaaagattt

SEQ ID NO: 350453 - DNA, 802 bp, Cannabis indica
caaactttttagtcaatctttatgttcaaaattacaaaatacaattttttataaccgtattttattatttctgtaaatttttaaaaaatttcgaatggcttactatatcaaaaatagagttcttgatatttcaaattaccatgcttcttaaaaaaaaattaaacttatttttggtatctcaaattttttaaaaaaaatttacaaagatgataatataaatactgccataaattggcacaataatttgatgtttttgatgacttttacagattttgtgccttttaccgttgttgtgccatttattatggcttgtcattaattatttaggatagttttatgatatggtcattaggcaagagaactgatttattttgtgctcaaacttctacttcaacgacttttcaattttgacaaataaatatttcaattattttttttaagtttttatatttgatatagattgtttaatattatatcatgaattattttgtcatcgttcttttcacattatttagttttcatttaattttgttgtaatatagttctatttattgttatttaattttgttgcttggtttttgtagtagggccttaaaattattaagacttctgccaataagtttaattttattataatcaaaatcacacgtgatttggtgagtgttgttagtttgttgcttttagctaaaatgttatacttttggttggttctttaaaggttttagttagtgttagggcccttttttgacaatttagttatcaaaatatttttttaattaatgtgcatatttattgaacattc

SEQ ID NO: 350454 - DNA, 800 bp, Cannabis indica
gaggttgtctgggattcctagtcactacggtggatactagtcaacctgtgacatctggatctgagaatataagattggtgtgtgagttccttgacgtctttcctgaagatttactgggatttccaccttcccaggagattgaatttgtgattgagttagttcttgaagaggaaccagtattaaaagcactgtatcgaatggctccagcggaattaaagatccagcttcaggtgttattgaacttggggttcattaggccgagttactctccttggggtgctccagtattgtttgtaaagaagaaagacgggtcactatggatgtgtattgattagtgagagttgaacaagcttactatcaagaaaaagtattccctacctcgaattgacgatctatttgatcaacttaagggaaagacggccttttctaagatcgatcttcgctcaggttatcatcaacttagaatttgagaggaagatatcttaaaaattgcgttccgtactcggtatggacattatgaatttctggtgatgtcttttggactcactaatgctccaacgacattaatggaccttatgaatcgaatgttcaatgattacctggatagatgtgtgatcgtgttgattgatgacatactggtttattttgaatcagaagagggacatgagatacatctgatatcagtactgcaacgattatgagatcacaaattgtacgccaagttcaaaaagtatgaattccagttagctcgtgtctctttcttagggcacatagtggataaagatgggatcatggttgat

SEQ ID NO: 350455 - DNA, 615 bp, Cannabis indica
agatatctgaacgaaaggagtcattatattccgctacacccaatgtaaggttacctaaactttatatgtgtttatttcattgttttagaattcatattagggtgttaatgaaacatacttgttagtaaatctagatcctggtaaaatatatccaacagtacgtcaactacaacatcaaaaactatatctgaataaggtacctattatacaatacgatacatactactgcttataacacattacaccttccgatttctgaaaacacctaaaaatgcatcatgtttgttaattctgttaaacatgattatttaacaattaatcagtactaatcagatagtttaccaattgtaatcagaactgatagttaactaatcaatactaagtactttaaaaatgacagtacactataaacctttgtaattgtaatcgctccaatattatagttcaaaatgtaggcatctaattcgtaaaactgcatatagaccttgtaataaatataaaatttagtttattaacagaacacctattcatatcacatgtttattattttttatatacatattgtaactatgaacaaaattttactgtatacaatacttaacatgattaaactaa

SEQ ID NO: 350456 - DNA, 662 bp, Cannabis indica
tttcagttgttgaagctggggttgcacttgcagcccatgtgaaagttaaatattgaataagaagaagaagagagctcagttgtgatgaacgaaccattatgaacttaatttcttttaactggtttttctctcagtgatacatttgaaaaatgaagagtgtcggtccaaattatatatagaaaagaaaagattatatatataagtatttacaaggcaccgtttgactagtatacttaagaaattcatatcggttgtaaataaatgcatgcgggtaatatgctaaacaaacaaaagattaattgaattttcgaaaaagtcaaaaaaaaaaaatatgctaaactatttgagaccatactaaataaatttaggttaaattgaaaaacacctgtctatttttaatttataattaattgaaatatattttttttttacatgtactttatctaaaatacactgacataaaagagtcacataaagagtatattaaagtgatataggcaaaattgataaactgttaaaaaaaaaatgatagacttcaaaaaaaaaagaataaaaatagagattttttctattttaggctaagagaatctaaaataaacacttatgtacttcttaaaaaaaaataaacattatggagctcgaagatcaggagctttttaagg

SEQ ID NO: 350457 - DNA, 720 bp, Cannabis indica
ggctatggtcttattccgaaggactttatcctttctatcaaggatttgaactggctgaaacgtatatgagtagggtctgaaacgtattttctcaacatagagacatggaatacgttgtgaactgctgaaagagctggaggcaaagctaaccgatatgccacttgaccaaccttctcgagaatctcgaaaggtcctgtaaacctagggcataacttgcctcttttcccgaaacgtttgatccccttcattggagatactcgtaaaaacacatggtcccctacttggaactcaacatctctgcgtttcggatctgcataactcttctgtctactctgagaggcaagcattctagctttaattttctcaattgcctcattggtccgctgcactgattctggacctaggtatttcttttcccctgtctcatcccaatgaatgggagacctacacttcctaccgtataacaactcatagggagccatccctatcgtactctgataactgttgttgtatgaaaattctatcaacggtagatatttactccaagagccttcaaaatccataacacaggctcgtaacatatcctccaatatctgaatcgtcctttcggactgcccatctgtctgaggatggaatgctgtactgaattttagttttgtacccattgctcgttgcaaactctgcccaaaacttggaggtgaactttggatccctatccga

SEQ ID NO: 350458 - DNA, 918 bp, Cannabis indica
aagtgcatttcgaagatgatctgctctagactggcagaagttcttccttgtttggtgagtgaaaatcagggggcctttgttaaaaacatactccttgctcataacatcatgatcttccaagttctcctcaaaggttagactagaagaaatgtttctgcaaggtgcattatgaagattgacttgagtaaagcctatgacactgtagactggcattttgtggaggacattttgaacagcctttgctttccttcgagatttgtttattggttgcttgtctgcttgagaggtacgacttacttccttttactcaatggtagaattcaaggctcttttaaaggagaaaaagggcttcgccaaggagaccccttatatcctctgttatttgtgttgataatggaatatctgtcgaggcttttatctcaggtttcgaacaaaaaagggtttggctttcaccccctttgtaagaatctgagattaaccgacctctgttttgctgatgacctcataattttctgtaaaggaaatatgaagtctattgagttagttaatgatgctttccaggaattttgccaagcgacagggctttcagctaataagaagaaatctcatgtttattttggaggggttaaggaggaaaccaaaatcaaaatcttggctttaactcaaatggaagagggatcttttcccctcaaatatttgggtgtaaagctaagaccaactaagtggaaaccttcagattgtggtgtgattttagataagctcagtttgaagttaaatggttgggcaagtaggaacctctcctttactggccgtgctcagttaatccattctgtgcttcttggcattcgtaatttttggatgagccacttcatcttacccccaaaaaatagttgcagccattgataagaaatgtagaga

SEQ ID NO: 350459 - DNA, 518 bp, Cannabis indica
tcggtttatcggtaattgggcggtttagaataatttgtaaaccacccaatctattcattggacggtttggatttttattgtattatttcaggttgtatttttgtcagtttatttggtttggtttgggcggtttattcgggttgggcggtttgcaaattttattgtacactcctactttcatccccaaaaggacctatttccctgattttcatgaagaataagaagatgcaaagtcaaattgtcgatctgatacttggaagacgcccaaattgacaaattgtcaaccagggcgctagggtgcttggggccccgaggcccagggtgctgaaaatgaactttctccaattttgattgtaatgccttaaatatatttgtggtatgtctatttgttgtcccaatgcaaagtttcacccattttcactaagaatatttcataaaactgaaaccctagttgggtgtaaataccgcttagctttaatttggaaattagcagataattagggctttattatgaaaat

SEQ ID NO: 350460 - DNA, 576 bp, Cannabis indica
gtgacgggtcacgagctgggtcctaggttcaagttcgggtctgggtcgggtactaggtggtcctacttctgtttctcaggtccctatccttattctgggtccaggtcccggttattgtgtgggtttgggtcccggtctaggttcgggatcgagtcctagtctctgttcaggtttaggtctcagtcttggttttgatctaggttcgggtttgggtttagggcctagtactggtcctagtcctagctcggttctagttccatttgcgattatgagttcgagtttgggtttgagttcgggtcgaagttcgagtcgtggtctgagtttgggttcgggtccgaatttcagtctaggtccagatcaggcttagggtgtggattcgcgtcctgggtcttggtctaggttgggtctgagtccacagttcgaatcccgatttgattctggattccgttttgggtctaagtccttggttcttagtgttggaaatttattttaccaggatcttagatcaactcacaagtatgttgattaacaccctaaatatgaactttctaagacgatgaaataaacacatataaa

SEQ ID NO: 350461 - DNA, 659 bp, Cannabis indica
gagtcttacaagcattatggtctcaacaagtatggggacaatgggcctatacaactgagcttccaataagcaaaactagaatttatcgagtaaattccctaacttattaaatccttgttgcatccaatcatagaacttggaattgcactctcagtcatatagaacactctatatgttccaccatatagatacgctatcaacatttaaccatcgttataatctcaataatcaaagatcctctatagatgatttacaccgagtagaaataaatttaccgtttcactcctcaatgtattttatccttaaaacacttagcttcctataaatgatattttagtgaactaaaatataattactgaaacaagagctcttccatttacctctattaagctaagctcgaaggaagtcatcgtttcacttctaaatacctatagaagctatagattccatatctatgtttggcgctcgaactcaatcacactaccatgttcccaaaatgtacgtatcaccctgacaagaatgtaggtttaactaacaaatcaaagaacatgaatagcactcttgagattgaacctaagcatcttaggattaagatcttttgatctaagatcaactagtgatattaacttagaaagatacaacggtaagattataatatc

SEQ ID NO: 350462 - DNA, 1241 bp, Cannabis indica
aaaaaaaaaaattctttgttattatttttgctatttatcgaattaggaaactctatcttggttaaaattaataaataaaaaatctcataaaactcaaacttaccataaaatatctcacaaaattcaaaaaaaaaaatattataaaaatgagataataatgtgatattattacttttgctattacattgttcaataataaagtgtaattatactaaaatgaattttaaagccactaaggctagcttagtggtgagggagggatgggaaaagggagaggtcatgggttcgaacccaagacttttaagttataagctattagttgattgtaagaatactattacgctacactcaaaaaaaaaaatactaaaatgaattttacttatacttaagtataattttttaagctcaaatttttgtagtaaaattagtgtacactcttatatacaaaagatatttataataatacacaatattattatttaaaaattaaaaaaaaaaaaaattatttcacaattcattttaaaactaaaatataattttgagcaggatgggaggcttaaaggttgtaaggttgctaatggtgctacggttatatctcatatgttttttgccgatgatagttatgtctattgtcgtgcaaataatagagaggcttcgaatatattacatctgcttcagttatttgagatcgcttctggtcaacaggttaatttcagtaagtcctctgtcttcttcagtactaatgtgcctaatgctactcgggaccgattgtgtgggatccttagaatgagacttgcggatgaacatagtacttatcttggcctcccttgtgtcatgggaagaaataaggatgccattttggggtttttgaaggacaaaatgcagaagcgcattcaaggctgggagggtcgtattttgtcaaccgctgggcatgaagtcctaataaaaactgtagcacaagctttgccaagctttgctatgtcaatgttcttattgcctttgaaaacttgttcacatttggaaagccttatgtctaagtattgatggagtccgggtagtaggaaaggggtgagctggtttagttggaggaaattatgtaaaaataagaactctggtgggatgggttttcggagtttgcgtgagtataatctatctttgttgggtaagcaaggttggcggttgctgctgtatcaagactcccttgtgggccggatatataaggctcggtactttcctaactg

SEQ ID NO: 350463 - DNA, 647 bp, Cannabis indica
gtctaggttcggtccgagtcccaagtccttagttctgatcaagggctgggttcgtgtttgggtccaggtccgggtcaaggtgtgggtttgagttcgggtccgcgtctgtgtctgggtttgtgtccagatgtggaccctgatctgggtctaggttcgggtccaggtcccagttcgggtcccgagttcgtgtccaagtttgggtctaggtacatgaccgtgtcctggcgcgagttccaatctcattttgggtctgtgctcggttcttggtttgggtccgggtcctggtcacggtcctagtcttgttctaggcaactggttaggcgattcttgttcaggttctaattttgtgtccgaggtctaggtctgggttcaagtttggttcttcgtctagggtctggtcctagtgtgagtcccagatgtagacaccaactactggtctgttccaggccccgttacctgaatcctgaggcaagatcactgtcacgggtccctgtctggttctggttcacgtcccaattcccatttttgggtttttgttcgggatcgagactgggtgcagttctaggtcccaaccctggttttgtgtccctagtctggttgtaattttgggtcacatgtaaagggttcgggtccacttttgggtttgg

SEQ ID NO: 350464 - DNA, 495 bp, Cannabis indica
agttagaaatattgatggaattattgaggtaagttgattttagaaataccaagatattttggagtacttggaattaaccaaataccctagaagtagagattttttagtagttaagaaatgataagctaaaaattaataataaagttttattattattattattattataaaacttatctctgataagtttatatatatgtatattaagtttaagtttataaattaaacagtacgaatgaaaccctccatcctccatcgaacaaaaccctcattttcctctattaattttctttcattttcaacctgaaacctagcgatctaagctccagtagtagcgggatagtaaattcttgaagaggaaaagcttaaggtatggtttaattatgctttaagctaaaaacgattagttttatatagtggttttgtggattagaatagttatagaggttctgaccttatagaattgttcttgggtagctatggaactagttttga

SEQ ID NO: 350465 - DNA, 573 bp, Cannabis indica
taattcaccctaggtgacattttttaatggaccacctttggttaaactgagaagtctagcatagcctatgcggccaagtcgtaaatgctatagatatgttttatcttcattatcaatcttttgctttttatggtttctaggtttaataacattaaaaagttcgttcatgagcgtaattaatatagctcttaaaacataaaaccctagttccatgtgagcaacacataattgaatgctattacgacaaatagaagaaatagaactcggaaaattcaattgaaaatgttgtgtttgtaaatatgaaacactaatcaagtttctactaaaatttagaatatataaaacattgtttaaaatcaaaaatttattctgaaacttgaggggagcttctcctctagcttggaccgatactaatttgtcattaccaactttgagcttcaaactcacttggatttaagcaatcccaagttttaagcaactgcaatgaagagcaaacatggttagtagatccagaatcaataatctaaatggattgtcattctctaaaatcatgattcaaaaaactaaagcatt

SEQ ID NO: 350466 - DNA, 676 bp, Cannabis indica
ttatctcatcaagttatatgagacaaaaggagagtgaggttggacaacattcctcgtcctcatcgccgcctgtaggaaacacacaactgccaccacaaggtgtgcaaccaccactagctggtgtccaacctcaacaggacctgaaggctcttatcatggagggtattcgggaatatcaggctgcaacaatgcctattctctgatatcataagccatacccgacttattatgaccaaattccatttctaccaaactacaccagacaaaagtttgatggaattaatgattctccccatgagcatttggcctatttcacctctgcatgtggtgaatctgcccaatcaaatgcactattggtttgacaaattgtgcaatcgctaaaagaggcagcgttcacctggtacactcaattacccccaggatcgataaatacttgggatgacatgcaaaaagcttttctggcataattcgtgagttcaaagaagactataagtctccatgacctggtggaaacaaagcaacgaatcagtgaaagcgctaatgagttcataaccaggtggagaaatctcaatctccaatgtccagaaaggatatcggaacaagcggcggtttcaatgtgtgccaaaaacctcaaccttgaggtggcaacttttgtgggcacagcagaacccaaaac

SEQ ID NO: 350467 - DNA, 654 bp, Cannabis indica
tccttgtttgattacatcttagatggctcccactcaacaataggaatctggttaaattcttacataggagtacatttaacctcttactattagttctcagggacatcttgttgtgacatattgtcttagactaaaactataagttccttctacactaagtcatcaacaaagcaatctagtattaacagtaatgtaaaatacttgcttaagattaagtaaccattcgagatactataaaaaatttcataagaattaggtattcttcctaagtcattcgaatagacttgacttaactcgctaggatagcaatccaagtttaagcagctagggctaaaacaaaagaaaataaacacttttagtagatccagaattaataaccatagaggataataattctctaaaacacatgagtttatagcatagatagaaataccttgtttctttaccaaaaacttagcacactagggtttccagtggtccttttcgttgcaatagaagcactttcctttttgctttgcattaggattaacagcctttttcttattagctgtattaacaactttaagaggcttctagatacttttccacttcttctttttgctgggtttcgaagtagaggcaatgtttgccacagccttggctgtaccattagca

SEQ ID NO: 350468 - DNA, 1316 bp, Cannabis indica
ttctgatctatattaataaataaatctgattatattgaaatgagttttatttagagcataaaacccaacaacttggactaaggatccggacctagatgggggactttgacccgaaactgggcctcaaaaccgggatcgagatccaaaactcgaccctagactcgagacacaggacacaaccttggacccgaaacgcaagacctaagtaccgggacacaaccccaaacctggacctaaatactttcatatgacgcggcccaagaccttggacctaaactggaataagacggagatacgaatctagacttgaggtttcggcctaacccatagtaagtgtttgaatccaagacccggacccagatctgtacccagacccggacctggacccagactggcatccaaacacgatctcggacccgaaataggaatcacaccaggtttaggactagaacccagacctaggaagtagcaggacccaaacctaaacccaaactcagactagaacccataccgagactaggacttggatcgggacctgtgactttggacctaaacaaagaccgggacccggagcgagactcagacccagacccaaaaactggggctggacgcaggacctaagaacttgactcggacctgggatctgaaactcggacccacactaggagtgggacccaaacgcaaactgggacctgaactcagaccaggactcaagaccataacccgaaccgaaacacaaacttggacccggatcgggacctaggacctggacatagatgggggacccaaacccaaaattgggaccccaaactgggaccaaaacttgggcctcagaacttggatcaggatcaaggacccgacccaggcccaaatcatgacctaggacccacctcgggacttgggatccgggactcgatgcttggacttgacccgtagtcagtgtttggatctgggaattagaacagaacccgaacccaaactcgaactcaaaccaagacccggacacatacccagacccagacccacactcgggaaccaaaactgaaacttgaactggaaccggactgggatctttaaaagggatcggggcttcgacccagatcagaaccgaataccgtacccaacctcagaccctaaccgagaccgaaatacggacctgaacctccccccgaacccaaatcaagactcgaacccagactcagacccaaactcgacccaaactcgtaccctgtgacttgaaactggaaccgaaccagaagcaggacccaaagccagaccctgaccaaaattcgagacccgaaactagaaactgaaaa

SEQ ID NO: 350469 - DNA, 501 bp, Cannabis indica
aaagaaaataaaaaaaaaaagtatctccatttttatagagaatactttttccttacttaagttgctttcttttaattttattatttaaaaataaaaataaataaaaatgttcattaaaaatttataaacaaaatataattaaaagttctaataataataatgattatatttgttgattatataaataaaataatataattttaataataatttaataaataatataataaaatattattatttttaataaggcaagcaactggcatagttaatgtacgaggaggattctatcctattagaatgaagcaggaatgattatttttaactttaaacattcatttctctccttgtcaaaattacgagaaagctatttgcatcaagtaaaaaaaaaaaatcattttcaaagaaaaaaaattgtgaaaaaagaaaaagaaaaaatttagagtatgtttggtattgttttttattttttgttttcaaaaaattatttttagaaatgag

SEQ ID NO: 350470 - DNA, 1572 bp, Cannabis indica
ggtagggacccaataagatctattccctagaccgcaaagggccagggactagtcatcagggtaatctcattgggaggggctcttggtatgttcacgaacctttggcacgaatcacatttttggacgtagtctatacaatcttttttcatagttggccagaaatacccttatctcattattttctttgagagacttgggcctcctgtatgatctccgtagatcccctcatggacctctagcataattttcttagcttcagggtccgatacacaccttagatacggaatgctgagtcctcttcgatagagaatgttgtccatcatcacataacgatgcgcttggtactgtatccttctggatagtgccttttcttggggcaagtcgccttttgttatgtattcgatgatggggatcatccaattgagctcttgttcaactgccaccacagtacttttggctttaacgcttggttccgaaaggagttccatgggcaccacccccagtttctcaatttcactgtctgaggctaacttagccaaacagtttgcgtgagcgttcttttctctggggattctttccactttgtagttcgtgaactcatggagcaactcccggactattgctatgtaggtggccattccttctccgcgcgtatggtattcccccgatacttggttcactaccaattcggaatcgctgaagacttctactcttctggcccccacagcttttgctagtctcagccccgctatcaaggcttcgtattcggcctcattgttagaagctgtgaattcgaaccgtagggctgcttggagtcgaagtccgtttggggataccattgctacccccgctccggatccattttcgttggaggcaccatccacaaatactttccacgttgggacctgcggtgtgggcacgcttgcgttagcctatgccttatgacactccgttatgaagtctgctagcgcttgtcctttcatggaggtgcgtggtatgtaatgtagatcaaattggcttaattccatagcccatttgagaagtctcccggacgcctccagcttttgtaggaattgtcagagggggtgcttggttaatactttaattgggtgagcctgaaagtagggtattagctttcttgaggccattaggaggcaaaaaactagtttctcgatcaccgggtatcgtgtctccgcccctatcatgcgtttgctaacatagtacacgggatgctgagttttttcctcttcccgcactaaggccgcgctaaccgcattctcggagacgaccaagtataggaacaagtcttctccgagaaatgtttctgataggatcgggggtttagccatgtgtccctttagttttttgaatgcctcctcgcactcgtcagaccattcaaacttttggcatttcttcaggatgttgaagaaaggaatgcacttgtctgtggatcgggagataaaccggctcagggcagcaacctttccggttaagctctatacatctttgtgctttttgggggaaggcatatttaagagagctttggaatttttttcggggtttgcctctatc

SEQ ID NO: 350471 - DNA, 485 bp, Cannabis indica
catatagaaaggaaatatcatatcaacagagagtatgtggcaagaggggatgtactggtggagaaagtggacacagaggacaatctagttgacccattcaccaaagttttgtcaagaactgcatttgaaaagcatcgttagaatctaggattaattgaaatgtactgattgttttatattagtgcaagtgggagtttgttgggctttatgccctaaataaaactctatttcaatgtaatctctatctattaaatatcaataaagagacagaagtattttcatcacttatttaatgtgtcatttggttcatgttatcatttatatgtttatttgatttataaattcatcgaaatccttatcacatttatttctagattatggtatgtcctttccagggcattggttaaagtaaagcttgggttgggtgcatggagtatgcattggaagggaccgatattgaactttgaatcagatatgataaattt

SEQ ID NO: 350472 - DNA, 360 bp, Cannabis indica
cgaccctggtcgcgacttgggttgtatagagactcgtaagaaattctaagtttcagaagtcgcgacttgggacattgcaagtcgcgacctattttccaggtcgcgaccccagtcgcgacttccaaattttccagagagctcataatattatcgtaagctagtcgcgactagcctttggccaagtcgctacttgctcgcgtattttctatgaattcaaatttttccccctcattcaaccctacaccaaaaatttcaaaattcaaatcctctcagccgaaccctacccctttccatctcaaaatttcaatttttcatctccaatcttcaatctttttatcttttcttaaatttcttaaaccc

SEQ ID NO: 350473 - DNA, 579 bp, Cannabis indica
attcttaagttttcattcagcacatttcagcaaattaacatcttgacaattctacaggtcaagttttgtaggattgaaaactgaaatcgaaagcagaaaaatatatatacattcttcaaactaaagtatcctgtctactcattcactctatagatactaatatagcaatcatccggaaaaaaaatataagacaataatctatatagcataaccatattttaaaatgccctaaagtttctaatgaatgcccctctttgctatagttaatgtctttaaagaaggagaaacccacatcagagcatctctcaaatctgattccatttctggtttgcattcagtaaaaactcgaagatgctcccaattaactaaaggagaacgacatatactcttcaaattttctggaacgatgagggccttcatgtataaaatcaagaaaccgtattaaaatatataaatatatgataaactagcgatataatttgaaataacagaacaaatcaatcaaaacgagtgataaacatacctcaactgagtcaacatctaagcttattgtattccaacaacatttaagattcaaaa

SEQ ID NO: 350474 - DNA, 634 bp, Cannabis indica
ttcagaactagaagataacatcttcataaaagttttatcaaattaaattaactttctaatgataccaaaatctttaaaattgtaattatattcaaagagatattacaattttaccaaaacagttttgcaagaacaagattctagaaacgaatcacatgatattgaatacaaaactaactttttcacatagtatgacttcaaattaacaaatcgtttcttcataaaactaatggaaaattgaataatctttaaaaccacatatagatcattaaaaatggatgagaattgagagagttattgtattttaagttaaagtactttttcttgaaatataaagaaaacgaattacaaccatagcagaaagatgataattttcgactaagaagaacacccaattggttattcttgataaaatttaagtatcattgaataagctttgcaacgatacaaaaatactctaaaaacagatcaatatcaagagagatatcatcactttactgaaacttgttttttctaaaaacgaaaaatataataggttcgaaccttagataacatttagcattattgagcaagaaaatatttcatacctcttcacaactttctatttgatgtctcaagcccgcaagccttgatt

SEQ ID NO: 350475 - DNA, 586 bp, Cannabis indica
taaatattaaatatatatatactaatataaataaaatgtaaaatattaatataatatattttatattatataatgatatcaaaagaaaatatcaactcatcatttaaatatataattccctaccctaaggtgataaataattttggtcttatcatgatcccatgctagaactaaaaaaggtagatacatacatatcatatccattcattctgtttggaagacggcaagagaggaagaagataatacctatttccaattatagacacaatacaactcatctcttctatactcttattggatttgatttgatttcgatgtgccttttatttcaaattgatagttatatagatatataattaataaataataattttagaatataatatacactaaagaatgttttggtagattaataatgatggtatttgttatagttatttaagattatttttaaaattttataaaatttcaaatagtttaatatactaaaataacgttcaaatattttgttatctgcgtgactatttttttatacacatgataaacaattatttaaattttattttcggcatttcactgtaaaaaa

SEQ ID NO: 350476 - DNA, 568 bp, Cannabis indica
cacaagaacaaaaatacatattaccactccatttaatacataacaaacatccttttaactttttctttttcaagcctaatactataatatttgtttctcttttcttgatttttttgttttccccttttcctctttacaaaagcataggtatctaagcctttgtaaaatttcatttttttctttattttttgatttgtgtatacatgtatataatatattttgtattaacacagatctttttagactacaacatcactaagtcaaatctcattaaaattgttctgaaatttttgcttgagctaattcatggtgttttggtttagattcgaattctaagtcgtgccgagttgagactcggacttttctccgtggaatcgacgtgaactggttgccgtcaacggtggatgtcgaagacaaagccggtgtttcgtcaccgaatagtacgatctctagcgttagcagtaaacggagagagagagaagcaattaatggactgggagggtttgttatgtattaaatagagtgttaatatgtatttttgttcttgtgggctgggagggtttctgca

SEQ ID NO: 350477 - DNA, 562 bp, Cannabis indica
ggtgtatttaatgatcatcattactgcagcgattcactttttgcaggtgtcgattcgtttcttgcacattaattgatacggcgcattaatgggtgtgagacggacactcaagcgtttccatcgccttgatgacaaaccaatttagctgttggatcctgggaattcgaatcgtgtgccttcccaactgcacgattggtaggtgatcacgcctgttccacatgcacttcggcctataaaagccaccgttcttacttcatttggttactttcagactttcaccaattttctttgaatttttcagagagaaagaaaccctcaaaccagaaaaccttcaaacaccataggtttcttactaaccttccttcgctattgttagtcaacgtgtcaccgtcgatcaacaacaacgcccagttctaaagctttatgtaagtttttcgcatcccatactttgttgtttgtgctcattgcatgctttactgttcatctgctttttctgggtttgatgtttgaagtttctgggaattttcgtcttgagtttctgtgatacgttagattcctcttt

SEQ ID NO: 350478 - DNA, 875 bp, Cannabis indica
atattgaattagattatacattatatttttatataatactatatcaaactttaagttatactaaaatattatatatttaagtgtccataaaagttaataccacatatagttttacataaaaatattacataaaatacaattcaatataatacaatacaatacaatacgacctaatacggcgttccaaacgagccctaagaggatactttttgagcatgacaaaaagaataatgataacaattagcttagtctcctcttgattaactaccttcaacaaaccattgagaatctcttgtcaagatatgctctgtgtcaaaaaatagttatgattgcacaatttactatttagattgtgtatataaaatttgctaattgagaaattataacaaaaataaatttagggcttcagaattttaataaacaaataacactgatagagccttgtcaaaaaaaaaaaaagtaacagagtgacaattatatgattttataaacaataaaaattcaaattttttaattcaaaaatattcacccaacaaaatttattagaaacctagatgaataaacaacttacataataatagctatagaattcttgtgatttatgtacagaggagtatcaataacattaatttagttaggatttacacaagaaaaattgaataagaactttctattttagagagagaaagtaactctacatagtagttattatggattttatattagaagaaaacagaatttgggtgatggagagtccaagtagtaaggaatttgtttgtattttcttgtaaaaacacatcaaaaacatagtaactattttttatatactaggctaattagtaattttctccctgaactttgacatgtactaaatc

SEQ ID NO: 350479 - DNA, 477 bp, Cannabis indica
gccgaccggccttggttgattttggcgcaattacatccatccaacacttgtgcctaaaattccccactcagaagccggagtgggaaccgtaaggggtaaccagggagaggccatgcattgttataatgtcgcagcccacttgctggtgctgatggtccgtgagaatattgagccaaagttggtagaagaagatgagttggatccccgtgtgggatccaaaaaaattgtagaacccatggaagacgtcgaggaagtgcaagtgtgcgacctcgaccctaccaagatcctccgcctgggaaagagccttgagccgaaggagagagaccaaattattgaagcattaagggcggccacggatgtttttgcgtgttcttaaggagacatgactggcataagcccgcatgtgattacccatgtcctaaacgttaatccggatatgctgccactacagtagaagcggtgtccccttgacccagt

SEQ ID NO: 350480 - DNA, 579 bp, Cannabis indica
ctggttctggttcaggtcccagaacccatttctgagtctgggttcgggatcgagagtggggtgcggttctaggtcctaacccttgttctatggccctagtccggttccatgtttgggtctaagttacggtttgggttcgggtcccgagtgtaggtttgggtcaggattcgggtccggctcacactttgggtctaggtctgatttagagtccggatcctggtccggttacggttctggatctaagtccattttcagttatgattccaagtccaagtcctagttccagtcccgatgaacttccagttttagttccattttcgggtcatacggtacgggttcgggtccactttttggtttgggattgggttcatgtccgggtgtgggttcgggtccttgtcagggttcgagtgtaggcctgcgtcccaaatccaaactcaagctacgggttttgtccaagccctaggtccagatctggatcccaatctcaggtcgctgtctggttccattttctgtgtcgggtcacgagctgggtcctacgttcaagtttgggtcttggtcgggtactaggtcccggtccta

SEQ ID NO: 350481 - DNA, 543 bp, Cannabis indica
gatccttgagttcagctctcaatgaaagcaccaaaatgttgaccttgcttttggccaacgacagtgagtctgaattgtaagcgacaagtagtataatatagatgtaatatgatgaaataaataaagacattagagtttttatagaggttcggctgcgagcagttcggtaatagcctactccccttgatttgtatttacttaagaacaaagaatgtaatgattcattttcttagagctcttacaataatgtttctgaatatgtattcttagataagttttcgaccctttgcccagtgagaatggatcgctatttatagggttataagcattagggaaaaagtttaccttctgtttacaattgatataattggcaagattacacattaaaatacaaaataaattgatcaagggatttgaagagcttgccatatctctatgatatgatccaaaaattataaggatttcttctgtgattcacgatgcaagtgctgaaactgttgggttttatgccctaaataaaactccagtttcaatgtaatcttt

SEQ ID NO: 350482 - DNA, 643 bp, Cannabis indica
ttgacccagtaaaggcggacgcccttaaaaaagaagtggacaagctgctagccaatggcctgatccgagatgtgtactacccgtaatggctggccaattcagttctggtgccaaagccaaacgggacatggcgggtgtgtatagacttcaccgatctcaacaaggcctgtccaaaagactgcttcccattacactggattgaccaaatggtggatgccacgtccaggttcaagctattgtccttcatggatgcctactccgactacaaccagattaagatgcatgtcacagatcaagagtgcactagcttcaggaccgacaatggggtataatgctacttggtcatgcctttcggattaaaaaatgctggtctaacatatcagagaatggtgaatcggatgttcaaaggcctcctaggatgaaatatggaagtttacgtggatgatatgctagtcaaatccagagcatgcgtaagccacgtgtaggaatgtcaatctgggctattttcgcgggccgggccgggcccccggcccgacgggccgaccgtggcccgaattaatcgggctcttatcgggcttctggcccggcccggcccggcccggcccggttttaaatattaaaaaaaaaacctaaaaccctaaaa

SEQ ID NO: 350483 - DNA, 852 bp, Cannabis indica
agacttagttgatttctttaagagctggtcctctcaactccacatgtcatccttatctaggtccacatattttgggcaaaatcaagggcaacatttacgccccaagccttgtttggtggagaataaactaggcttgtttggtgcctctggttggctcatcggtttagtggcacgtgcttcaagtgcgtgggctgcatttatgacagtcatcattaacctttatttccttttgcaggcaactattgacttcccgtccattaatgatccgacgcatttaatcagtgtcagaaaaggtactcaagcatttttaaccgccctggtgagcatttgtcccaaccgttggatttgcaaaatacgaatcgattacgattcccactgtatgatggcgcctgatcacagctgccttgcacctctcctggtctataaaagccagccttcttccttcactgggttactttcaccactttgccatttcacctccgttctaccgtcgatcaacaccaacgcccagttttcaaccttcatgtaagtcttctgggtactatatgtttttgttgttcatttgcatgctagggtagaacttttgaataaagtgcttgatttctgggaaataggtttggcgaaaacggtcgcatggtgtatgtaccctctcttatttgtgttttgttacttctctttcttctatttttgcaatcgacccctttgttgaaagagtacttaggataggggatagtttttgttcccacgttctgtgtctttcatttttcctctactttcgctgcttttgagatatttgcacccgatgtttgcctaggagatccttaggatttccatctttggcaaacatccgga

SEQ ID NO: 350484 - DNA, 702 bp, Cannabis indica
tcgcttatcaaaaagactcattgtcgttggctaaaagcgaagtcaacactttcaatttttcagtcctttaattgatgatagccacagagtacattcgtgaccctagtaatcaccacgtgtcgtaaacttatctccgagagctggaaaaagactacaagctcccacaacttgaagagtcccagaagcttgctggtaaatgttatcaatgtttctaaacaggtgtcatgtagcatgagaaggaagagataattccataatctcactaattataatcccttatcaaatcatagtcacaaaaagattcatggaaccaggaacaagtcaagactaagagataagcgaaagtctaccttgccttatcttagcttcctggacacgaaagacatattaccacttcaggactcggagtggtccaaactcagtgtctgcccaactgagactcggatgggtactcgaagagcctattgcggacgctaatttcccaagagtatcgcagatgtctaccttggatgcaatctgaatcgtccatagacggttatgctttttctagcatagaatcagatcttgtcccctatgccagaatatagtagtgcgcgcacctcacacacctttctgccagatggttattccaaggctctacttttaaaggttgaaccttttggtgacacgagtccactatgtataatgtgttgggttttatgc

SEQ ID NO: 350485 - DNA, 521 bp, Cannabis indica
taaaatacttcatagccaaagagtgacatgcccttgtataagagtcataattttgtgggcaaaggcccaatagaggtttgaagcaggggcgttgcatgtcaaatatgatttgtaacaactctactttaagcctccattaggtccttacactcactgaatgatggctcttatacacgagtacatcactttagttgcttcctggactggcgactgaccctacaagccaacacgagtgtttccagcatgatttgtcctcacttgcatgcttcctagaaaaacttcttaggatgtcacccatcctgaaattatctcaggtcaagcacgcttaactttagagttctttcgtaatggactactagaaacaagatgcaccttgttgatataggtagtaccaatcaatccatttaagccctcttcaattgtgtagtcccatacctatacagtttcagaatcatcacacttgatcttccccaggcgatgtaaaattgcacagcttacctggaattttctcttacagatca

SEQ ID NO: 350486 - DNA, 1453 bp, Cannabis indica
atagttgttctactctcgttctggtttcatttttgttgcgttgcagattggatcgatggaggtttcttcatcgtctccgttcgtgacgtgcggcttaaggtatagaccaggtggtatttttgtaattttttcaatgtggctacgacccatagtaatattgtaatattttaccctttttggaattttcctatctttttttccaaataaaaaaccaataatcatatagcataatcaaatatttttttaatttaagagaaaaaaaagtcaaggcttttttttattaacaaaaaaaaaaaaaacaagtaagttttattaatggtatctaaagaattaattgtatataaaataactcaattttattatttaattattattgttatttctaaaaacctttaaatgaagagaactaaaaattacattgaattattttataaaacatttttatatatatacattaaaaaaattaattaatatatgtaatatctcattaagaaagtaaagtagcacataaatataatatttattattttgattttaaatatatattttaatttataggatcgaccatcaataccactctagtctatatatattatcttgtatgtaatacgtttttgtattatattttattcatttatcttggagaccaataaactacaattatacatacataatctatacaacttgaatacttacatataaagagtgtataatactcatctttgatcttaccattatcttcttctatctctccatcgtcgacggggttctcctcaatgtattattcccaatgttggattttgttggccagttagctgccagcttcagatgtttttcgatccctgactgtgctcggttgggcgagccctaaggggagcaggttaacgtcatccatggtggcgtcttggcctggaggagtgggttgtgtgacggtggtcttcgtggtagccaccattgttgtgagtataaagtagcttcatgttggatttttagacctaaataaaactatatttcaatgtaatcttgaatattcctttatcaataaagaaatagatgtaatttattacttgtttaatgtgttatttggttcacatatttatttcatgatcatttgtttgatatataaattcatccaaatccttatcacattggtagtcttgtttattgtgatgtcaacacagtggaaagtaatcaagattttatgattaaatgtattcatatgatttttcaatacacatgatttaagtgataggataatctaaaatgtagtttagttgcaccttggataagtgttatgtccttttcaggacattgattaaagtaagcttgggttggatgtatggagtatgcattggaagggaccgatattgaacttgaatagatgtaataacataccgtatatctatctaattcaatatcacctagttgatcttagatcaaatgatctcactcc

SEQ ID NO: 350487 - DNA, 632 bp, Cannabis indica
tatttatttttaatttttattattaattagaccaataaaaaattgacacgtgccattttatttgggtttaacggatcagttagaaggagggaccaatagacttacagaaaatgtgatcttgggactattactgctaattttttaggttagggactaatctgcctcaaccctaagtttttgaggacttttgtcgcaattatcccttttattattgtgttctaaattatatacaaattttatattctagtttatttaattttctaacatgtggtatcagattgcttattgtatatgatttaggacctataatttgcataacaattgatatgtataggttaattatctctaattacatattaattttgtaagtattatttgttaaattttttcgttattgaatcttaaaactttagggattttattccttattaaattctctttcagttgatatattttatgcgtaaaatcattaagtaaattgagaaaattttaagattaaagtttagggtttatatgattttattgttaaattcaatttgtaaatttgattttattgattataatctgacattgattacgaatatcatactttcaactgttttgcaatgagtaggtatcagattaatccagga

SEQ ID NO: 350488 - DNA, 527 bp, Cannabis indica
gtctaatcttatttctctacagtatttttgtaaataccaaactttaaaaataatatttttgtaaatattaaatattataaatgtttattttttctttgaatagtataaatgtttattttaaataattttagcttaaaacagaaaaaaatcctaataataatttgaaaatgtttttttgggatcccaatttctctaagttttagatcgtaaagtttaaattattacaagttttatttttatccgtttatgattaaagtttaaattttgcgctaatttcactagtaatcctatttaggggattagggtttcataagtatcttgggtagcgtgcctaattagtttagggcgttacatgcaggctggtcagccatgcacctaccagttgctggctggttagccatgcacttgtcaggtggaggctggttgacctacactggccaaaagactggccaagggtggtcagccaacctttttagggtggctggttcatcattttgttgtctttttcaggtgtgttttgacaggtt

SEQ ID NO: 350489 - DNA, 476 bp, Cannabis indica
tagaataattgctccacccccagagaaaccaccatctcgcattggttattagttggtgtagatataaggattctaatataaccgctattatctaacatataggagtcttgttaaatttgtacatagaagtacatttaacctcttactattgtttctgagggatatcttattgtgacatattatcttagtctgaaactataagtaccttctagactaagtcatcaacataacaatctagtacttatattaatataaaatacttgcttaagattaagtaatcattagacataccgtgaaatattttatgaggattaggaattttgcgtaagtcattcaaatagactatgcaaaattctactatcttatcctccaaatttgattagttatttctctccatatgaattgttagatttactttctcagttgaattctaaagttcctatcacaagtgtaatccaaatgaagatgggcttaga

SEQ ID NO: 350490 - DNA, 856 bp, Cannabis indica
tcaaaattgatatcctcggtacttacatatcccaaaataatctctgtaattaataaattacgcaatttatttcattgagtaaattctcaataattaccctaagtaagattataatcttacttccttaccatcataattacatatttaataaaatatgcctatttaaatattatttattttctaggatattacaattaatatcagtctaatagatttaaatgggaccaactacgcatactactcaaaaatctcagtactgtaaactcataaaatcatccttatttttcaatattttattttttcaaaaataaaaataaatgtactacgattcttttttgacgtacgaggatggttgaattcattaaaaaaggttggtaaaagcccattaatataagcccaagtgatttaaatgtgaccaccaacccatacaactcaataatatcaggcctttaaactcataaattaatcttatttccaattaatttattaaaaaataaaaataattctactattatactgttctgacgtacgataagagttgaattcattttctaatattgtaaagggccattaatatcaacccaacagatttaaatatgatcaccaacccatacaactctataatctcaggcctttaaaacttaaaatctaatttcactcccctctggactatctttcccttattttttatctcaaatttttagatatcaataacaagccaacattgttctcaagtagattaacgtcaaaggtacaattgtttgcttataaataagtcctttttcattcatcttttccaaaaaccatttctaagctcttatttttcaattttttttgtaatgcattattaatatca

SEQ ID NO: 350491 - DNA, 834 bp, Cannabis indica
attgaattgaatagattttacggtaaacttatcatagctaatcaaagttcaatatcggtcccttccaatgtataccccatacatccgatgctggtaaactttgccaatgccatggaaagaacataacacttatccaaggtgtaagtatatctatcgttgagtatcatgccagtctaactccaatgaactgagaaatcatggaattaaactttcgaacatataaacatgattatttttcactgtgctgacaacactataatcacgaacaaatacatatgttctggacttaatagaatttataatcatgaaatttgaaccatgcaacataaaatgtgatttctgatctttattaattagtaaatctgattatatttaaatgggtttcatttagggcacaaaacccaacaaactcccacttgcactcatataaaacaaaagtgcatttcaaataatctcaacaccttgatatacagatcaagtgtagtttgtagtatactctccgtaatagaatctgacgggtcgtattcaatacaacctttcctccaccattacatttccttaatcacaaaaaccttgatattgtaaaattcctctctatatgtctactcctctagggatactggattctttactttttggcaactacttttgcgtttgtccgaaagtaacaatagtagttaataaatgttggaacaaatgccaaaaatgtatagaactttccttagactgaataagtatctttcctacaactttaacattcagtctctctagtagacttagagacttcagataagtttttacacttctccaaaatcactactccacccccagagt

SEQ ID NO: 350492 - DNA, 577 bp, Cannabis indica
taggttaaactatgaaatctcgtttttatttttctgaaagttattgtcttagtaaaatagtcgtatctctctcaatactcatctgattccagcaatcttggtaccgttgcaaagatgattcggtgatctaaaatttttatgaagaaatagttcaccaattcgattttattctgtgtcgaaaactatcatctttatgctgctattgcaattcgttattcttcatgtttttagaaaaagtactttcacttaaaatataataactctctcaattctcatccatttttaatgatctatatatggtttcaaagcttattcaatttcccataagttttatgaaggagcctttcgttaattcggagtcataatggtatgaaaaaaaaagtttccttctgtatcatgtgattcgtctcttgaatattgtgctttaaaaactattttgataaaattataatatctctctcaatataattccaattcaaagattttggtgtcattggaaagagaattaaagttcctaaaacttttgtgaagatattatcctcttgttctgaacttttcaatgtcaaaagtttatatt

SEQ ID NO: 350493 - DNA, 566 bp, Cannabis indica
aggaattgatgagattgaacaatttgagaggcgaattggaagttatgaatttgagttgtgagaaaaatgtggcagtggagtatgagaaagcaaaattaaaggataaacaatatcttcgatcattgagattggagtggcattctgaagctaaaatggatgaaaccgaggctattgttggttatgagatgtcattagaaggtctccagccacaccaaaatattcagaatctaagcctaacaaattatgggggtgttaagctctccagttggctctcatcacttactaacctagtggagttgactttagaaggttgtgaaaaatgtgagtatctggttccattgaatcaattcaagtgtctcaagcatttgagacttgagagattgatatgtttagagtacatatccaaaactaataatgtcagcgaagacttggttggttcaacaacaacattactgccatccctagagacacttgagttgttgaatttgcctaatctaaaagaatggtggggagagattgaagttgataattcttgttttgatgcaaatgcaaatgaagataatcac

SEQ ID NO: 350494 - DNA, 915 bp, Cannabis indica
gttggatctgtattcccaacaacgccttctttatcacctctctccaaattagaaagcctaactctaagtgacattgatgatctagaatgtcttccagactccttcaagagccttacttctctcaattacttgcatattattcgttgtcctaaattgaaggatttgtgcccaggtattctacatctctcatcccttcgaagtttgcgcctttttggatgcgaggagttaggagacatgctgattagtgatgattatgactttatgtggcaatccctaaatggaacactgcaatcattagacctatcgaagttgccaaacatattgactgttcttcctatgggtatccaacaccttacaagcttacaacaacttaaagtttggtggggtgatagtctaacaacaattccagagtggatccacaacctcaaatcacttaagagtctttcgttatattactgccccaatctgacatcattccctgaaggaattcaaagcctcaccactttgaacgagttatatatttatgagtgtcccatgttattgaagagatgcaaaaggaatacaggtgaagattgggataagatttctcatataaaagacttggatttatatccagatcccaacaaaactgaagaaaatgaggtagaaacgtcaatctctaatgtttgcttttattttcaaatgaaattaacatcagtgcttataatgtttatcctgatattgtattgcagaatacaaggggatgcaacctcttgagcaagtttaggctacgcaatacaagaaatcaagaatagattagatatatcatatgtgtaggtaattatcttcactatgcatgcaattacttccttctgatatgatttatattacaaataaattcaaaaagaataaaacagagtaaaattgacggaataa

SEQ ID NO: 350495 - DNA, 678 bp, Cannabis indica
ccgtacgggatctcgctgcggccacattgttccacgtcgcggccaaataacctctaaaaatcactctctatagtgcacctaattatggccgcgaccacactgatctagccgcggccagaagtgcgtcacgcctaaaattggtgtttttcttggctccgctcgtcttttactgcacttttacatccccgagtccaccattgctccgaagaacctgaaaacatagaaaacacgcataattctatcctaaaacaacgtaaagcgaacataaagtcgatccaaaacataggctaaaaatagcctaacaaattctcccaaactgaatctttactcgcccccgagtaaaactaagactcaaactaaaattaaacaatgcaatagataactaaactttcaaatgattgaactgctactaccatctgctcaacttcaagcaatcaataaccagaatttcaactcaataactctaagaactaacttggatggacaattcagaagtaagcaattcatacagacgcaaaacgtcgcatttgacattcatatcacaactattctacactctccgacattccgctaatccatggtaaataagctaggatgacatacctctctccactaatgttaacaattcttgctcggagtcaaaaggtctttttcggttatactatcatggcttaggta

SEQ ID NO: 350496 - DNA, 1236 bp, Cannabis indica
atcatcctatggctgggtacggactcagaagaatttccttgtctagaaggagagttagcacgaagacaagggctcacttcgtgcagaagttgaagcagctcatggtcgatttgatgctcgggctcccaagactcacctgggtccatctacaaaagacaacacacaagattagtgttgaatggagtatcaaacaaaaaacaagcaaatatgccgaccaggagtacccaacagatttaagaacaaccatgttcaaagaaaagtctaaactcaagaagacagaaatttttcttgagttagggcaaaatgttcatgaagcttggaaaaagcaaaatggaaaatagatccaatgcagttctcaaataagccttacggctgaaagctaacacaaggacatggaaaagaagagtcgcagaagtttcaaaacctagggtttcctaaagtgttctttctacaatgaaggtacattcaaagcgtaagcatgcaaaagaaaagcataaagggaatcagaaacttactcaaagattcgaatgttcgggttcaagcaagccagaaatcgtctgtaggcactttggcaacttcgaagccagaaaattctctcttttcgctctgaaagtttgcttaacaacgaaggttgataaaatgaagtaatgtgccagtactccaagtatttataggcaaaagggtaactgtacataaaggaactttagacgtctcggcttcccgcctcaaaagaaaatatgggaaatcaaaagtaatcgagtgcaaccgtcagccgtggagagagaaatttggattttgaaaatattaattgtcaaagcattaattagccgaaaaccgaagggacgcccagtcagcttcacatcgagtctcgaacggtcatgctcgacacgtgtccccatacaaaggtagagccagctcgaaaaaagtctacacgcaacctcagaagtcccgtacaaacttggggggcaaatgttatcccaaatttggcactctgatgtggcatcacgagaatggtgacacgtggactctacatagagcatctattcggatcaacatgccgaacaggatgcctggctggcatatccaaaatggaatactcaacgagcagtgcagaatgagcaacacttagcgaagtcagcttaacgcatcatgagtcactagcgcaatccctataactcaggatcaatttacgtggatgtgggatacacacgatcccacgatctttctgtttatgcg

SEQ ID NO: 350497 - DNA, 570 bp, Cannabis indica
ttatttagggcacaaaacccaacatttttttgctcttgatgtgttttttgaagtgccttgctaccttttgctggtaggcctgtagctataggttggcttgttctcttctttcttctactatgttaagggacttttccagtaggcattgtttgtatgttagtcataggttgttcttctatgagacggtggcactagctcaacaggaaacatcgcctgatagccatacgctaaagcaaatggagttttcatagtggccgtcttcttggtagtcttatgcgaccataggacctctaggaaaaatacagaccaatttccttttgattccttacggaacttcttcagggtttcccatcaagtcttcaatcattattggccaaaagtacccctggcagagtatctttttggacaagctttgctctcgacatgattgtcgcagaagccttcatgcacttctatcataggctgttcaacttcggctttggtaatgcacctcaggagaggcatagaggaactccgtctatacattatcatgtctaggattaggtacctagcaacttttcttcttagttt

SEQ ID NO: 350498 - DNA, 747 bp, Cannabis indica
gagtgacaccacgggactctcagtgaagagatttgggaagagagggaaactaagtcccatatatgttggtccatttcagatattggacagagtaggtagtgtagcttacagaataactttaccgccatcattatttggggtgcacaatgtatttcatgtatcccaacttcagaaatatgtgtgagacccatcacatgttttgagctatgaaacactgggtttgcaggaagacttgtcttacaatgaactcctggtaaagattcttgatcaaaaagataggatgagaaataagacaattaccttggtgaaagtcgtatggagaaatagtgtggttgaggaagctacttgggaactagagtctgaaatgcgagataaatatccaattatttgagtaaaatttcaagataaaattttcttttagagggggataattgtaatatgtgcaaactcagaagggtatttttgtaaattttccaaatgagagtattttgttattttacatatttttttttgaacaaaaggaaactttttattcaaaatggacaaaacaaatacaaagaacaaggcaggaggaacaaaccaaccaccacgaaaacacaccagaaaccgagctgttaccagctatttacaacactcaaaacatattgatctttcttcttttggcttttacaatgagcccccaacaactctagccttaacaatatatttgatttccttactaagggaagaaacattgttacaaacatc

SEQ ID NO: 350499 - DNA, 579 bp, Cannabis indica
gtttgagtatgggtttgagttcgaattttggtctaggattgaatcatgctctaggtgttggttcgggtgctgggtctgggtccaagtttgggctcgtgttccaagttctgatcccaattagtgtccaggttcagttctgggtctatgtcttgggtttcgatcccgatcaatgttcgagtttgtgtttgggtccaggtctaggtttgggtctgattctaggtttgggtttgagtttaggtcccaagttcgggtgcaattttcggttcgtgttcaagttcgggtttggtcattgtctgtgtctaggttcctgtcctggtttgggtctgaggcaggtttcgggtccgagtctaggtctgactttggattcctgggtctaggtgaggtcctagttaaggtttgaatccatgttccgatttgggtcatgtttctgggatctaggtcttccatccaagttcgattcctaggtcttggtctgggtctaggttcaggtttgtgtcctgagtcttggtttgagtctaggactcggtctgagttcaggtccatgtctcggtccctgtcttggtcttggttcgggtttgg

SEQ ID NO: 350500 - DNA, 637 bp, Cannabis indica
tacgtattttacaaaagttatcaatttatctattttttaaatgataaaatagactttgtatgttttaaaatattacaaataagaccatgagtttgcgacaatttttttttaatataaccaacttgaagttaagtcctaacacgaacagatacagaaaatgtaacatgttttgtcataacacctctagattgatagagttattattaaattttattttaagaaaaaaaaaagttcaagatcttacttgtactattttaaaaatatagggtttattttattatttaacataatagaaggttcctcaatcaataatttttataaaatacaaggtctaaaataatatttattgtaatttttatatgctttaaaattgtttttttttttctatatgagttaatacattctaattgaaaaatactcttgatgaaaataattaaaatgtaccattgacatccaccgctaaaatagtgattatatatttatatataaatatataaataataaaaatgaaagttgtgttttttaaaatagtacaaataaaattattttgtattgggttatattaaaaataaccaaaacttaatattgatacaagttgaagataaagcttgttgagaatcatggggttccatctcaa

SEQ ID NO: 350501 - DNA, 859 bp, Cannabis indica
agctcattatttaaaaaatatatttttatttaatcatttattttaattatattataataatgaaaattataaatttaaagttggtccgaaattaattgaaaattattttccaacattaatttaatttttgaaagttatacataaatataaaattcgaaaaataaataaactaattgaaatataataaaataaaatttgaaaattatctaattcaagttgttctaagataactaaatttccaacttcaattattatcaaacaaaatttaattaaataacaaattaagttgctaaccacctaatttgaaaaatattccattttaagttgatccaaaattaacaactaactttcccttaggccactataatgcctgaggtaatccactgaaggggcttgctgagccttcagagctaggactggaccatgtcctagagcagtctccttagctagagatattagatggaaaaccacctagagtgagttgggttttgccttccagtatgatccttactagtggtttaataggagatgtccattgcgagtttccctatagaaacatcgggtgcacaggctgttgggttttgtgccctaaataaaacccatttcaatataatcagatttactaattaataaagatcagaattcattttatgttgcatggttcacatgatttatttcatgattatatttaatgtataaattctattaagtccagaacatatgtatttgttcatgattatagtgttgtcaacacagtgaattccctgatttgtgaattcactggatttagactggcatgataatcagcgataggtatactaacatcttggttaagtgttatgtcctttccaaggcgttg

SEQ ID NO: 350502 - DNA, 890 bp, Cannabis indica
ccccgccttgggcggttccctatttgggaatgtcttttcccttgttcgaactctgactggaggatacttcctttttagccttggtcagggcgacgttgtaacattcccgtgcgacttggttatttctctcaggcacccgaccccattcttcgtttgaaacttaaggcacgaatgaaatatcgatgtaacatcttttaggtcatataaggctggtcggcctaacatgacattaaaagttgactggacatctaataccaaaaattgtgccattcagttatgctttttggagcttgcccaacagtgaggggtaggcgaatttgccctagaggtgcaatcggagaaactatatacgggctgaagacggggggttaaatctttcagttggagccccatcttttcaaatgtgttttaaaaaagatatttgcggaagctccattatctatcatagttcgggccactatttttttggctatctgtacttccacgaccaacagatagttgtgcgggaaattaaccttgacagcattctcttcattgaacatcccgtagtatttttggttttctttcttcgacggccaggatcacttctttttgcttgtgctgtaaggttcgggcatacctttcccgggctttacctcaatctcctgctatgtgtgggcccccaatgataacttgcaaatgcccatgtactggtggtggcagtaaatcttggttattgtctgcatgggcgaccctctgattttcattgacctcgacatatttctgcatgtgggggttattctttcttatcaaaaattcaatttcctacttgaaattgttgcattcattggtgtcatggccataatctccatgaaaatagaaaaacgtggacatgtccctcttacttatgt

SEQ ID NO: 350503 - DNA, 708 bp, Cannabis indica
ataaaatattcaatttgtattaatcatatgtgcataattaaagacataaaatgtataaatttgagccttaatcacaacccccaactagcttattgctagtctctagcaattcaagcgaaacaaaaataatgtcaacatgatatttttcagctcaaaatttaaaaaatggcacaaatattcaagcaaaatattagtaacaagccaataagaactatacaaaattaccttgaataaatctagagttgtgagtgtgtgcaccaaacttgaaccttcttaccgcaaaccataacacataaaagctttcgaaaaatgtaccaagtggaagtctcaactccattagcctcacaggtcattgaaaatatttatatatggctaaggtattcactcatggagttggaaattgaaaagtgagcactcgaaatggatagatcaatttaggacaaacatttgaataaacattgaaacaaagataggttatgaattatttggacaaaccaccataagagtaccacaaaccagcttttcgggatttttgaacgaaaatagacaatcttttacatttattctaggagccaaaataaaaaaaatgaaatactacaaactttttttttcttttctatttttttttttctaaacaaacaagagcaaacatgttagacaaatggatagaaatgttgctcttgcaattttttttctgttttttttttt

SEQ ID NO: 350504 - DNA, 893 bp, Cannabis indica
aggagactaggaaagaagaaacctatcttgcaagaggaagaagtccaaagagaggatcatcaaggaacagtcagtcaccatcaagatcgatgtcaaagataaaaaacaatcaacaatgttatcaatgtggaaagattttccacattaaaagattttgtagtcaattgaagacgcaatcttgtttcagatcaaactacgatgacaagagatacaacagaaaccagaactagtactcaaaatctaatgatcatggaaatcaaagaaaagactctgtagctgtggctgagagcagtggagatggacgtttagatgggaaattattttttatttcaaaaaataataacagtaaagagcggatccttgattcgggatgcagtaatcatatgtgtcttgtaaagaccgcttaatttttaatttagaaattagcagaaaaatagggtttaattatgaaacttgcatattagttatgaataatcagttcacagagatttatttgaattaagaaagtattttatatgtcatatatggaacctcataattttgcatgttttgtggattagaacgtggtgtttggctattagaatcatagcttagtatttttagtattgcgggacaatatagttagacattgagaatgttaggaatagttaagattttagaaatgaccaaaataccactaagtaatttttaagacttttagtgtgggcaaggacattataatccttttgcctgagtgatttcttgtcgtttagtggactttaaatgagttcattattcagatatttaggctgaattaattagataaaaccaattcccatttttcatttttactaaaattaaaaaataaaagaagaacacactctctctctacatattctttctctctctctctc

SEQ ID NO: 350505 - DNA, 710 bp, Cannabis indica
aaaccttccagaccctgttctaaacatccaaaagaacaaaatcaaggcaacaaaacacaactacatgcactgaaacaaaacttgccattaaagagccaagcttgagttctaaaactcaaagcttgctcaaacctaataacagcccacaattcaagcttaaaccaacttattccaacatattttaactacatagaacacaaacaaacactagcaacaagagcagcaaccaaaatcccaaaaacatgcataattcatttcttcaaaataagaaactaaagagggagctacaagagactttaccttggcttagattacacttagagctgctagaaatcacctagaatttctgaacaacacccaaaccctagctggttcctgggatttcgagagagagaaagagagagttgagagagagcttcctttccaaacttttttttttaaaaataatgaataaaagggttttatcgaagataatatcgcataacataacttaaaaattgatttaattaactcatctaaagtcacaaaatgacaaaaggctaatggggcaaaatgaccattttgcccctcgcacactaaaagtcaaaaagggcactaaggggtaatttgggaaattctaaattcccgacaatcccgacattcccaatgtctaactatatcgtcccgctatactaaaaaaaatactaggatgtgattctagtagccaaaca

SEQ ID NO: 350506 - DNA, 969 bp, Cannabis indica
atatgcatatatgtttacatgtttagcgtacatgttagttaagcctgttagattacattataaaagttgtatcagtgtatttagtattatattggatatcgataaatatatgttggcttaagtactacacgacagtatcacatcggtacgactagagtacgactagcgtaccgagtataggctaatattatggtcgattgtacgataccacttgagagtatcacatcggtatgactcgagtatgactaacgtaccgagtataggctgatattatggtcagtagtaaaatcgtacgaacgttcttgactcattaccgtgtcggacaagcagatagggttatggttgggtttatggtgcctgattataatttgggttttagttatgttattgttatgcttttcttactaagtctgtggactcacatgtattgtttgcatgtgtaggtaagggcaagactaaggttcagcagccttgagagcgagcaaatgaagattttacggtctttgggacagccggacataatttgtatagttgctaggcaacaacttttgtactatgcactgtgaaacatttgcaaatattttgtataaaggatctcgattttatataagtatgttattttggtatttataaatagttaaataaaattttaattattcgcgttttttaataaactcgtttatcagcaatgagctgcacaattaagttaaaaaccatgttaacacgcctaagctaatagggtgtaacattaaggacatagtagttcaattgagtgggagcgctaatcatagatgtgaaatctatagcttctataagtatttagaaatgaaacgatgatttccttcgagtttggcttaatagagataaataattgagacctcatttaagtaattatattagtttactgaaatatcatttataggtagctaagtgttttaaggataaaatatattgaagggtagaacggta

SEQ ID NO: 350507 - DNA, 448 bp, Cannabis indica
atataaaatttttttaatttcaatttaattttaaaaattaaatttaaatgtttttagctcaacattaatttactaattatatatttctacatagttatactattattatttaaaaaaattgtatcaaattcgtgttaagctgattctatcgtgtttgacctgtttttatttcatgtgaagttgcatcaatctgttttcgacctgcgcttaatttttccaaccgtaacctttaaaactctgtggtacatctagggtttcaccccggtgcccaagttgacatcctcgactaggtttgtagtttttgggaccgtcttagtgcaaaatggtcaaaaattacattgggacatcaactagatacaccgcaaatatatttgaggtatcagaatcaaaatcagagcaagttgatttttgagcaccccgggccccgagcaaccagtgcccaagttga

SEQ ID NO: 350508 - DNA, 631 bp, Cannabis indica
tttctcaatatttaagcattattatttcaattaatattatgtcattgtaaaatttgtacaataatttattttatataaatatatgtatgcaaattttttatgaaaaatatttgtttgcacatcctataaatcttaccaattcacaatttatacctattacttttgctatacttacattgactattcaactcagttttctttatttttttttagctgtatacataatattagtttccacctatacctatgtaactcttatggcatgtttacttaaagggaatgagaataaatggtatggtattgattcccatacaattgtttactaaattttggaaaggagaaaactagtgggacccacacaaattagtgagaaaacaaagggaaaggttctcccccatttttatagggaatgcctttccctttccttacttaatttattttaattttattaattaaaaataaaaaagacaaatataccccttaaaatctataaagagaaaataattatatgttctaataatgacaattttgttaaattaaagcattccgattacctttcatagttatgtaaacaaaataatatgattctggttttctttccggacagtttagtaaacatcataataaaata

SEQ ID NO: 350509 - DNA, 1553 bp, Cannabis indica
cttcgatttcatcaagtgatttgacaaggagtacgtgatttggttcttggatgtacgtcagtcttctgtgggatggtggctcgagttctacgggcagcattgcttcctatccatatgccatggcaaatttagtctgtcaggttgtcgttttcacagttgttcggtacgacaatagaatttcaagaacttcctccggccagtttcctttagcgtcctgaagtcttttctttagggtatccttcaatgtcttatttgctgcttcaacttgaacatttgcttggagatgcgctactgcggagaaacttttgattataccatggttcgcacagaagtcagtaaaggactgcctgttaaattgtttgccattgtctgagactattttgtacggaaatctgaacctgtagattatgttcttcacaacaaagtcgtgaaattttttggatgtaatggttgtcagtggctcaacttccatccacttagtaaagtaatcaaccgcaaccactacatactgcactcaacctttggccttgggtaattgtccaatcaggtcaattccccaaatggcaaaaggccagagactttgcatctgagttaactcgttgggaggagcttgcggtatctttaaaaatctctggcatttgtcacattttttaacataggccttggaatcctcgattattgtcgatcagaaataaccttggcttagaattttcttagaaaaactctgcccgacggcgtgatttccacaaaatccatcttccacctcagacaaaagtcgtgcaacttcttcttgggtaacacatctgagcaatggcatggagaatcctcgtctgtacataattccccctactatgatgtatcatgcagccttccttctcatctttcgagcttcatttcgattatctgggagttccacagtgttgaggtaggtcactatcagcgtcatccagtttggggaactatcaatcatttttctcaaatatgctatcatctttgagcctcgtattcccttgatacatcatttaccaccagctgtgaatcactacagatttcaatatgttcggcctttatctcccgggctagttttagaccagggattaaagcttcatattttgcctcattattggatgctttaaatccaaacttgactgcagcgtgcaggtgttgcctcccaagtgagacaagggcgattccggcactggatagttgatctgtagccgacctatccacatgtagtttcccagtcgctttgtcttcattgttacttgactgagtatttgtactggctcggggttgccttcctatatgctttcttccttgcctgtgcattctaccacaaagtctgctaaggcctggcctttgattgctgtttgagcttggaaagtaatttcatactgacccaattctactgcccacttgagtaaccgtccagaagcatccgacttttgcaatatttggcgtaatggtttgtcagtgtacacccgaacaggatgagcttgaaaatagggccttaactttcttgttgctagaatcaggcagtaagtgagtttctc

SEQ ID NO: 350510 - DNA, 569 bp, Cannabis indica
gagttttgagcaagaaatggggggtttttgggtgaactagtgtaaacaggctagccggttttggcagggtccccgaatgctccattttctcaattctcctccatttcagtgccttagttgggtgtttccctatttcttgagttagagtaatccctagagagtataacagaacctaaagtggtgggttcgagtttcccaaattagggttttgatcatgtgatttacccggttttattatgtgattagggcatccatctagcacgagactttccattcaggtcggccaacacacttaaatctggaatgaaggtaagaactgtatataatgtgtaatatggatatgcaaatgtatgtctatgtttagtgtatatgcatgctgataagttgtgattcataccccaccaacacttgtacggttacggtacaaagtgcattggtaaggtgtatgacgtctgaaagtacatcgtggtgttaccagcacttgtacgagaaggtacaaggtgtctgtggtacaacacttaacagtactcaaggtgtggtccataccctacctacattagtacgaaggt

SEQ ID NO: 350511 - DNA, 1531 bp, Cannabis indica
cacctcgggggcatccattgatccggcttcttcaatcttgaaccagattgtttcatttcggagaggtaagaagcgtactcataagcttgtttttcctaacttaatctataaaattctttcctctcagaaagatgtggcctattctcatgagacttttgagcctcccctcattggcaccatctttcaaccctcggagtactttgatggagcttttcccaagcgtcctaaagctggtgctggtgctgctggtggtgcaagttccagttctgctcctgcaaatgtcctggaggtcaagtaggaagttcttcaggtgaacaatcatcttgctgtcatggaggaggttcagcaagatatatccaagcagctgtccacattgatcaagctttatggggcataagtctttctttctttttcatgtttttttgttcgacatattttcattactttttatctttggcccttagataaacaaaaagagggagtaatagtttgtttttaatttcttgttttttcaactttggactctttttccagggagagttgtgtttggtacttgtgattaactttggattaaaaattagcttgttattttagttatttcagttttacattgtgtttctcagggggaggtttgtttagtatggctaactttgatttgtaggttcttttctgttaaaaaatattttgattatctaaagtgtcaaaatggggagattgtaaagtccttttttggcaatttagaggccaaaatatattttatttatggtgagatttctttgtgctatcaatccaatttatcacctttattatttggttttattgctcttttcttaagaaagaatgatttttcagctggatttttttcttgtatggaaacttcttataagagaagaaattctcttatggaaagtttgtttataaaggaaattttgactattattattttccttattgagttcgattgtgtcttgataagatcagatcaaacacactatttttgacaggtatcaagacccaatacacgatcggacatgtttttggcaagtttcattttttggtatgatttgctccgacaaaatctgtttttgatgttgcaaatcagggttttacttaggaaagttttgtacagctgtagattcgactttgtggttgtccctagggtttctatgttctataaatagaacctagagagcaaccattcgaatcaactttttattttttttttgcatttttctcatttgtgaagagagagttctttttgtgagaacctagttgttcatctaggttctagtgttttcatatctgttcttactgccttagggtccgttagaacacttgattaaacaagagagaggtcttcgggagaagacctattcaagccttactttggaaggaagtaagcaggcacactttaaagacgaaggaagttcgctgtttgaagatgtttctgggatcagattcataaagtgcattacaaaggattgcggcaataatttagagggagtctaaacttgtttaagtcagttgtctt

SEQ ID NO: 350512 - DNA, 595 bp, Cannabis indica
ccatctcaagaattcgcgtctctactgaatgaatacatcgcagtcagcagcgcgtggttcatcgactaggccagcttggcaaacgacctctctaagtttggctaacttgagatcttttcccaagtccacgcgtggctggccaattcctggtctcgtctctcatgcataatacttgggtacatattcagttgttattcttggggggttcaccctaaggattcttccttcagtcggaggcgcctgtggagggtcctcccttggaggtagggaccttccacttcaattcattgggatgttaatttgtatcagtctagccactataaagtcctactaagtaatcctagctgcccatagaactaaatgggaggtgtggccgcccaaagtctccaggatctcgaaggtcaagaaatgcaggatctggcaggctaaggtctgtaggtattggcaggtcactatagctccactaagagtaggccagacattgttggaaatattttaccaagatctagatttactaccaagtatgtttgattaacatcctaatatgaattctaaaacaatgaaataaacacatataagagtttaagaaaacctt

SEQ ID NO: 350513 - DNA, 649 bp, Cannabis indica
acttttccatcttcgggaagttcagggcaaggaaaaaggtttcgaggaaaccagaatagaggaggacgtcagacttattcttatcctgagtgcccgcgttgcaagaagcatcatcccggggtttgtaaccggagagcctgttttcagtgtggttcggtgggacatctcaggaaagactgtcctcagttgaagaaagaggaaccgaagcccgaggtcaaacctgtacctgcacctgctcgtgtctttgctataactcaggcagatgctgctgccagtccttcagtagttacaggtcagcttctaatcaatggttttgcttatactgttttatttgattcgggtgctactcggtcttatgtgtcatcaagacttcttgatcagtttgatagacctagtgatattctcgagacggggtttggaaccctgttgcctaatggagaattaattatttcaagaaagtggattaggtcagtaataattagaattgaagatagagaattgagtgctgatctcgtggagttaccattggccgaattcgatattatacttggtatggactttttgtctaaatactctgctagtattgattgtaaacggaaaatggtgacttttgaaccggaaaatgaggaaccttttgtttttgttggtt

SEQ ID NO: 350514 - DNA, 616 bp, Cannabis indica
ttaacaatcttggatcactaatacaatcatcatcgtcatctcaaaagatggatacacaaatagaaaaagtttgggtctcaccaagtggatattatagaagagcaccttagagaggacaataggcaaatcagaactggtaggtttaaagagcaccttgcaaggattcaccacccaaaatttgagctaaaatagatgagaatcaaccacttgatcttcaatgcaaaatggcaaaacccctttctctctctagctttctttctcttctttccctctattttcctttctttctcttggctgacttgctgctcacgaagcacttgctgcctttcttcttcttcttttttttttcttttaattgatttcaaacaagatgggccttaagcccttattgatccaagcccaacaaaagggactgacccaacaatacgtacctttttccatgcctttgctagaagttctcatgaactttgatctcgcactcaccataagtgagaaatagtttggtcattattttttagaaattcatatacatacaccatccttattagatttcaccttgaaatctttttgtaatttaggtggcgtttggtaacactttttaatcagttttttgttt

SEQ ID NO: 350515 - DNA, 849 bp, Cannabis indica
aaaaaaaaaaaaaacttgtaaggtaaagatataaaaattttacaaaaattgatggtttatgtgattatccctatatagtatagtaatggaacaatcccctattttgtgaattgggactaaaacctaactatatccaaattaaatgtcagatgtcacaattatggaatatgaacttacccacttagggtggctcaaaagggtaaagagccagcaatcaatatttcggtttcaaacttttttggaacttaaggtaaactcgctaactaaagctcaataataacgttacattagagtctatacaaacaaacaattactggggagttacaagatatcatttgtttcagtgctattacaaacgtgacaatgcataatactttcaattcacaaaaagataatatgaaatgaaactaatcaaacaacttcatatgtttaattctttcacgtaacaaatcagaatcttggctagtttgggtgcgatatcttcaaatacctactttcaatacatgccatttggttagaaagcaatgatcaattttttaaagttcaatggtgtgtctcaccaatgataaataactatagcacaaaatgtcatgccaatcgtgatggtgtgaatattttaggtgggtggggatcaacgcgtggcaccaattttgggctcaatgtctgttcatgtatgggaatgggagaagcacctttcaactatgggattttgtgtgaatttctttcttcccgcatcaaacatcaatcataagcacttgtatggatatttttcaatcaaccattgcccaccaccattctttatcttattctagttgatattatatggattatatctataacaatactttc

SEQ ID NO: 350516 - DNA, 502 bp, Cannabis indica
tatggaactcttgttcacacaatctgtcaaagtttggagcttgacaagaacaagtatgaacttaatgttcaattccaagtgaaaacaggaataccacctatgaagattaaagatgacaacaattgcaaattctaccaacaactaagaataaaaaatgatgatgaaacaacctatcctttaatggtgaacttcaaagaggtatctacatgtactagaattgaacaagggacaacaaattttgacacatgctctgagtcttacatagacatcaaatatatccatagtaattactttggatcaaatttagaactcactgaaaaataacacaagaatggctggttacaccgaaggaattgcagatatgatagtggatgcagctgaacaataagatcacacagaattagcaacacaagtaattacgctagaatccaacacgtacaaaagataataagaaaaaatatactaaaaaatgaaaacaaaaagttaaaatgaaagaaaaaaa

SEQ ID NO: 350517 - DNA, 647 bp, Cannabis indica
attaccagcagagcatagtatggctgataatcaagtgggatcattgcatgggaaaatttggataaatgaacctacagtccttcagggagattcagatatgaagaatgctctctggactgggagccctaaagaatgtattttaagacctcaagagattatgccacgaaatttggataccgcttgctatatttctagttatggcagaggtggttgggacttcatggttgagcagaagagtaaacctacgtcgtcagtggtgggtttaaatcggaacaagcggttccgaggaaatcaaggcaagggtgtacgccaggattattcttaccctgagtgcccgcgatgcaagaaacatcatcccggagagtgcaatcgaaaagcatgcttcctgtgtggcatggttgggcactttaagagaaattgccctcaggcaaagaataataagcagaagctggaagtaaagcctgtacttgctcagacatttgttattactcaggctgatgttgcatctagtccttctatggtgaaaggttagcttcttatcagcaactcccattttaatgtattatttgactttgggactgtatactcgtatgtagtatcgagagtatttaatcttttggatagactttatgattttcttatagagg

SEQ ID NO: 350518 - DNA, 692 bp, Cannabis indica
acctccattatagtattaaaattttttcaaagataatctatagggtaagaggtaccttcataccttagggattcggacagacgaaatcccttaggaagttgggcttgtcgcacttccgtagtgaagggtgaggtcccacgcaacttgtatatgggctttcgttgctgctcgagcattttcaaagcttgcaggagcatgctttgctcaatccgtccagtcgcaggagtcgggaattctgcgactgcaggagtcgcaactattgcggcgaggttcgctgggacggtgatcccagtagtcgatatcggtgcggtaggcgggttattgtgagtgttgataccttgatcgtccacaaggggatcacggagtgtttcctcattatgaggggtgcgagaacgcgctctaaaaattgcgttgaggtgatcacgcaggtcacctcgatgtacctgacagtgtcccccctgctgcgtttctaaagagccggaccttgtatatctgcttggtgtacgaccatgcgatgacgaagaggctgattctgcgtcgctgtctcttgatggtcgactgcgaggattgcgtcgttcagggtcttcatcagtctgcgtgccctggttaggatacctcacggattggtctctcgatgttggatggttcaggtccaaaccttcagggtgttggaagttattttaccaggaact

SEQ ID NO: 350519 - DNA, 523 bp, Cannabis indica
ctaatatagatagaatttggtttaaagccttgtaaatatttgaaattatttaaattctttagttggagaatgctgtagtgttgtacaaattttcttggagtaatgaaaatcatccgattcataaaaaaaacattcttaataatttaagaaatatttttaatgactttaagaattttaaaaacataatttaataaatataaaaatttaggtaacaaaaatctaattaaccattaatgtatgttgtatatttttacatatatatcgactctattcactgattcaacaaccataaaagtccatagtcagcaaaagtatgcttttaggtcctttaattactttcttctggagaaagcattcgttataaagagattcagatacattgcacaaagtttataagtgtttttccttcaccaaaagtaaataaaataaaataatattaacaatatatatatgggtgactattcaatggttacatttttattgtaaccatatagttacacttttctttaacctgtaatagcag

SEQ ID NO: 350520 - DNA, 513 bp, Cannabis indica
aataactcaaaattctcatcagataaatcttcattatccaaaaagtctagatctttttccatgagaaatgaatatggccgatgcataacataatcttctccccttaaaatatgtctagccccattcatgcttcgacgttcagcaggattcccaacatacttacttaaatgaggaagattcataagatcccaaccactattgagatgacgaaaatgttcaactaaccaacatatcacataatgcataggtaagaaggcttgacctcgccccttgccatgtatgactgaatcatacaaagctcaataaatgtatcccaaaacaaaggtgcaagtgaaactttgtgtccgtgagccatcattgaagccatataaaaagttttaggtctaatgttggagccctctgtaggaaaaacaaaacgacttagccataaagacaggaaggctgcaagactacctcttctgaaatgttcaatgcaatagagtgaacattaacttttggtttacctttcctttg

SEQ ID NO: 350521 - DNA, 1190 bp, Cannabis indica
tccgagtccaagactgggccaacattcgggaccaggaactaagtctaggtcctagtgttagggtttatgccttaaaagcctacaaagacatttttttactaaaatagagttgaacaatttgatatatgtttcaatgttgaattattgatattgtatatttaataattcttatataaatatcaaaaaatttattattcatatataagtttataacttgtattgtacggagaattaagagcattgttcataataaaatactcagcaacatattaaagttatgcaaaatttaagcaatggtagctagtacagctcattaatgcccattatccggaacaagcaatcttgattcagatcgctaatatagcaagacatcttggttaaggtgcaaaatattatagagattatatatgacaaggactaatatgtaattaagttgtctttatcaaatattatagagtttgcgcgcctcggttttgtctgtaggaagttctccacttaatagatacttgacaattggtgtcatccatgttggcaaagtatctatcatctcgatttcttcctcttcacatatgcttggctcgtctaagacctccaccgatactaaattcaatttatcatgatcaaattgagatgctagttattagagttttgttctcttaaaatttattctattttaaaataatctgactttctaagctcttccaaactttctctctaagtatttagccattttcaggtctttcgcttggtatgctcctaagacttggttcacaattagttgcgagtcactataacacgtaatgtttttgtcttttagttcctcaactattcttaaccctgctaacaaggccttgtattctgcctcgttatttgaagtataaaactgaaatctcattgcgtagtggaatttgaagttttcaggcgacatcactataactcctaccctcgagccattctcatttgaagccccatcaaaatatagtttctaagtttctattttgtgttcaatgtcagaattttcttctgagtttattccttctatcaaaaagtcagccaaaacttgccctttgattgaaattttcgggtgacaagttacttcaaattgtcccaatttaatcgactattttatcaatcttccaaagcatcaggttttgataacacttgcctcaatggttgatttgttaagactt

SEQ ID NO: 350522 - DNA, 239 bp, Cannabis indica
tttttgagaaaattagatgcaaaattgataaaactgcaaaatttcaaaaagtgaggcccaaatccatattgtatagggccggccacttttataggatttatcatctgttattttcattaaaataatttccaacagtgagtgctgccctcacaagagaaaaagatggtgtacaacaccctgtatactgtagggttttttgccctaaatataacccatttcaatataatcagatttactaa

SEQ ID NO: 350523 - DNA, 1089 bp, Cannabis indica
ttgagtggagcgctaaacatagatatggaatctataacttctatcagggcatagaagtgaaatgataatttccttcgagcttggctaaacagaaataaatggttgagtactcatttcaaagattatgttagttcactgaaatatcatttataggtggctgagtgttttaaggataaaatgcattgaagagtgtaacgataaattaatccctatacaatggagatcatctatagaggatcatgaattattgggattataacaatggataactgatagcgtacctatattgtgggacatatagagcgttctatataactgagagtgcaattccaagttctatgatggatgcaacattggtaaattctgggtctgcttataggaagctcagatatataggcccatggtccccatactagttgagacaatacttcttgtaagactcagttaattgattttaattaatctattataattctaaaattagactatgtctagtttatgaatttttcactaagcaagggcttaattgtgaagaaagagtttttagggttaatttgttagttaagagactttgataagtctaattaataaatatattaaatgacaatattatttaataattaatttttagttattaaataattagaattgtcatttaaatggttaaattggttgcattttagaaataagaaggaaaatgagaaaaatagcaaaattgcatagtggagcccaatatccattcatggccagccactctacggcaaatttaccatttattttttccttattttaattccaaataaatctaacctaaccctaggtggtttcctataaaaaaggtagtgatggcttaagggaaaagatgacgcatctcattccatcagataaaatttgagcctccttcacaaccgtagctgaaaccacacacactctctctcttcctctcttctaaattgagcctatagtgaaagagtgagtgcccacacatatcaagcagtactcaatcatagtgtgtaagattgtgaagaatcttgtttcaagagagggagattcggactcagatcttggtgatactcttctacagaaagg

SEQ ID NO: 350524 - DNA, 942 bp, Cannabis indica
acaagcaattgataacatgaaccagaacatacaaataaatgaaaaatacttctgtttctttattgatattgaataaaatgaattacattgaaatagagttttatttagggcataaaacccaacaatagaaacactttgcatcatgaacaggatgaactgcgcgctgcagtaaatctcgcggttgacgaacaaaggcgtatgttcgatgaatggagagataaaaagatggaggcattaagggctcacaatgcagagatcgaagatcgcagtcggtaagctaccgtgctaatacgaagagcctaccaaactgtaggtcagcaaacgctgaacgtcattcccctgggagaaacggaagatgacacgacgatgaatacttcccagacaactaatggtcagtcacccaatccccggttacgagttccactcgtgaaccaagaggtaggcgggcagaccttgtccgggaattcatcaagaggagccatacctgacagttccaaccagaataatagcattattccacctgtcaaccaagcgaatcaatcgctaaggcaaccaggctcttctgtgttcgataggttgggaacaacccatgacctaaggaacgatctaaacagaagaaggggaacagacgagcagaatattacaacgattgtgcagcctggagcccatactcaaatccccgttcagaaagatgctcatgtaatccaagttgaccaaaatgccgagcaggtcagcccaaccgtacaggcccagcttgacaagttgaaaaaatatgtttcatggcatggccggatggcgtaataatgatcttgagttagaccatgctcgcggaactcccttcacaccaaagatcaatctcctaccactgcctcacaagttcaaaatgtcaaacgtggaagatgtataatggaaagagaagatccctctttcccatctcaagta

SEQ ID NO: 350525 - DNA, 659 bp, Cannabis indica
atacatattattcacataataatatatattactacattttaatctacatattattatattaaaaataatataacaacatatatatagggacgtgattttgtcctgtgattatacttttacggaatgtattccgtgatgtacgacaaccgttagatgaaggagttatttgatctgagggctgagattgatctaggtaattagggttaaaaaatagtaacgtaccctgccactcatctaatgtaccctgagacccatttactgtacaacgaaatacatttcgtgaaagtacatcacgggacaaaatcatgtccctatatattagacgagcatttattaggcaccacccaaaaatgacacgataaataattacactaaattttatatttaacaatactctatttaaaaataatttttaatttattataaaaaaatctcaatttaacataattatataaaaataacttcttaattataattaattatatattttctaagtcacatattaaaaaaaatatctatataaaagaataattatatcttaataaaatatatataatttataaatttattatttaaaattaataatcttattcaaaattataatacatgtataaatattatatttactcaaaaataattttattataatataatattaa

SEQ ID NO: 350526 - DNA, 580 bp, Cannabis indica
attaaaaaaattatggaaaatttggaaaatcgtgatcatgtgctctgcacctcctgacgcacgtcccatccaactgtcgctgacgtcatccttctcttcagcttgttcaaaaccatataaaattgataattaatatataaaaataaagaaaatatggaatataaaccttttctaatacttaataactgacaacaatttgaataagagctgcaaaaatgggcgcgtgaacagttgaagcctggaagaaagaagacgtgatggatgtgatgatgacgtcaacacacgccacacacgtctcagtcaattttttcaataattaaatttaaaacggtactcaaaacggtacactttagtataaaattgaactcatcacatttttgtaaaatgaatgaaataagtgtactgagatgtaaattttcctattttttttaatcttttaagtatataaaatcaaggctaattagcaatttttctccccgaactttgacatgtactaaatcgtgtgccctgaacttttttcgccgttagaaattcccctcgaactattgagattgttaagtttaaggacttttgtctaatt

SEQ ID NO: 350527 - DNA, 519 bp, Cannabis indica
ttttatatttatagaaattcagtcattttgttttgttccctttcattattctatttaaatactgacatatttttgttaattaacagatttgcccccaaactttgacaattatcaaatcgtactcctcaaaataaaaatgagaaagatttaacattttattttgtaaattttataaaattaatttagatcttaaaaaaaatattttgaatgattaaaaaaataaaaaaagaaattgaaattttaaaaataattaagcgatttcaaaaattcatttagatataaaaaaatcatattaaaaaattaatttttgtataatctaaattttatgggaacaagcttgaggccatttttttctttccaataatctatataattttttttagtttaatttctaacttttttcaaaataagtttatattttaattgaatttttaattatttttctttatcttttaagatacaagtttataaatataaataagtttgatttctttttttttaaaaaaaaaaaactaagtt

SEQ ID NO: 350528 - DNA, 618 bp, Cannabis indica
gaatatacaaaatatattggttatatggacttgaagttattttgagaatgatattgttagtgagcacttctcttttcatactccttgtttgctcatttgaatttcaataagattttttttaaaaaaaaaaaatgtgtaatgtttaatttatttatataataaatattttatattattaaattattttaaaattgtaaattcttactagtagttatggtataattatatcataaattaactattttgataagttattaatgttaataatataaaatgcgaaatcttttaagaaaaatatacttatttgctagaatatttggtgtgaaatattattattagagtcattgcaacaaaagtaaaatatttgacaccaaattagtgtaaaaattgaagatagtctaaaagggtgtactagctataactttttccaatattattttatataggagcaacttgaaataaatttaggttaaataactagagcaaatgaaataaatataggataaagtttatttcaaataattaaaatatcatttaagttaaaaaaacactaactaaaaataataagatatagataaatatacatacgttttgtaatttttaaataaataatattat

SEQ ID NO: 350529 - DNA, 791 bp, Cannabis indica
aaacccgcaaccaaactcctacccaaacatggaaccagactcgggacacaaaacaggggccgagacctagaaccgcaccccagtctcaatcctaaacccaaactcagacctgggacctaagacctgaaccagaaccagaaccagacttggacccgtgacagggatccaaatcttgacttgagatcctagaaatggggcttggaacagacctgtagtcggtgtttggatctgggactcatactaggacctgaacccagaccaggacctaaaccctgacacagacctagacccgagacccaaaactggaacctaaaccagaaccgtcggaccaggaccctggaacaagacttggaccgtgatgaagacccagacccagacctagaaccaaactcggacctagccctagacccaaaccgagactggaacttgggctcgaagacagtcgtgtagctaccgggaccgataccaggagttggacctaaatttgggattcgatccaaaacatagactcagacctagatagggatccggataagaacctgaactttgacccaaacccagactgggattgaaacttgggaccaagatctggtccgagatcttgacccaaacccaaacctagacctgcacctgggacccgaactcgaacccgcacctaggacctgaactcggaccttgaccggaacctagatccagactgggatccaaacctagacccaaacccagacctagactcggaccaaaactcataccccgacccagacccaaaatagatcccgaaccaagacaca

SEQ ID NO: 350530 - DNA, 674 bp, Cannabis indica
aactcacattaaacaaattaactcacactaaaaaaatattaattttagaactaaaatttaaattaaaaattaaaaatttaagttcacacccccaaactaaaataacacattgtcctcaatgtaacatttaaaactaaaggaaagggaacttacctgagcgccacgtcagtatggtagcagtggtagtggcggtgggtagaatccacctcttgcatccatgagggctctcgtaccaaacgaagaaaactgtcctccaacattacaatttttaaaattatccttggattgtgagttaccttcacaattcccacacaactttcttttcatacgtcgtcaaaaagttcgaaagtgttctttagacttccctttcttcttgttagtagtgatttctcgaccatcctttacaacttccattcgataacaagtaggaatttcagttgcgacaaataccttgaaagtttcttcttctttttgaacacgcaactttaactccctcttctgcacatctattaatgctctccccgttgctaggaatggtctccccaaaatgataggaatattctcatcttcctccatgtcaagtattaagaaatcagcagggaagatgaacttaccaacctttaccaaaacatcttcaatcataccccgaggatgagtcaaagaacgatctacca

SEQ ID NO: 350531 - DNA, 643 bp, Cannabis indica
tttttttttttttttttaagcctcttgtagagtttttattttcattagcatgataacgttaatcttaattggttttttcaaaaagaaatggtaaatttagacttggcctttattttaagagaaaagccaaagggtattcattgtgtctagtagtgtaataaatattataaaaaattactaactaatagtagagcgcagggagtgtttcccattaggctttatgttattttgatattgttttgatgttacttttatgtatttttttattgttttttttaaaatattttaaaatatatacattttttttttttacaaaaattgatattttatgtaacagaaatactagagggtactattggtgctaggcactatgattgtctcgtagcaatggtctttatgtaattatccattttttataggcttattagtaatttttccctcactttgacatgtaccaaatcgtgcccctgaacttttttgaccgttaaaaatttccctgaactattgagattgttaaatttaaagacttttgtccaatttcattcaattatactgtttcagtgattctttatgtattaaaccatgctcttcagattttgatatctaccaatcatgtccctccaaactttgatatgtactaaat

SEQ ID NO: 350532 - DNA, 619 bp, Cannabis indica
tctataagaattttttagcctaaattttttcatagttgtgtacgttatagttatttaagacatctagcaaaaattttaataaatttggaataatttgcaatatataaatcaatgtttaaaccgtctatttcacatgcgtataaagtcacacgtgcaatagactctacgaacactgttttcgatccaaattttgtcagatgtcttaaataagtataatgtatacgatcataaatttttttggacaaaatagttttttagatattgaaatagataaggatgcatcgatacacctattttgaaggggtgtattttttaccatttgaaaaataatatataaatgtcttaaaaatgcttctacaatacatcccatcaaaatgagtgtactgatgcaacccctaactgtttcggtattcataagaattttttagtataaatttttcatagtcgtgtacgttatatttatttaagaaatcttgtaaaattttgaaaattttaaaataatttataatatcgaaatcaatgtctaaactgtctattttacacgcgtataaaataaaaaagtcactcgtgcaacaaactttttgaacactgtttttgacgtgttaaatttttccgaatt

SEQ ID NO: 350533 - DNA, 726 bp, Cannabis indica
aactctgtttgccgcttaggccggctagtgaacttttaatatttttgtaaagtttttttgggatcccaaaacatgtactcttgtttataaagttaaaaggtgttacaagtttgttttcattctgttttgtttaaagattaatttcctaggctttttaactagtaatctcgtctaggggattagggtttcttaatcatcttgggtggcgtgcctaatagtgagggcgttacaatttggtatcagagcgccaaggttcttaaacttcctgtacaccggctgaacatgtacattcatcgtcagagacaagctcgactcatggtgcagtaagtgttgagagtaaatactttactgcttatgtgatcatttgcttaccgctttccattttaggcagtatgtaggcatctagagtatttatatgttatgtgatgccatgctttaaatgctatatgtaaatgtttatttatatggagtaatagttgagttagggtttaaggcaataagtgcataagtgtggtattggtgcctaactcgctggggttgttgattacatgggtactagtaaatggacccttcgcaatcatctagaccacagggcgagcaagtagagcttggggttgaccaaaccaatccactggcaccgcctgcatctccgcagaattcgagggataatgcgggggttggcaatgctaattctcctgctgactggcagcagatgtttcaagaaat

SEQ ID NO: 350534 - DNA, 616 bp, Cannabis indica
taatatttacgtggctcaccacgtaactctcttctagttttattaaaatatatttattttttgaatggattgcttaatatactattattatttgtttacttaatatatagtttacattaaataaaaaaatgtaataataacattatttataaaaattagcatatcttaaaaaatataaaaatagaagtaaaaattaaaataaataaacaatataattttctcacaataattcttgaagttcccaatcatgggccacaccagaatattaggcttagctcatggcccatccaattatatgaagtgttaaaataccaaattttactactatctactaaaaaatgttagtgttgagtgtattttgtaacaaatgataatatatatggatgaaatcacgtacagtgtcaattgcgtgactagtcacgtacaataaataatatatataggcagtcgattttgtgtccaaaattagaaaacacataatgtaatctgttgtacggtaggtgggtcccacctcccacgatatctaaaaatgtgtttgaatttatttatttatttgacaaccagttgttgtaggtttgtttaccggttgtcaatttgattttttaattaaaaaata

SEQ ID NO: 350535 - DNA, 1544 bp, Cannabis indica
tgggagcccgagcatcagatcgactaggagctgcttcaacttctgcacgaagtccaccctcgtcttcgtgctaactctccttctagtgaaggaaattcttctgactccgtactcaaccataggatgatggctcatacgaagaaaaccacgcgtctagttgacgcttctgaccctcaagtggctcggctcgccactttgcccgacgccgaacaggatttggcagtcccgatggaggaggaccgtgagggggacgctgaagtccaagaggttgaggagctggacgaggcgcgtccgggcagtcctcccgctgcagagggagaggaagagattggaccccctaacttcggggagtacaatgaggctgggcaaccagtcgatgctgacggagacgtcctggttgagggcgtggactacgtcagtgaggagcttgccgaggcggttcctcataggaggcagggtgccttgggcgccaggtgggtaagtccttcgtccaagatttcggaggcacgcctccgtagtctcgaccaggacgggtacttgggcgagctggactgctacattcccgcccacgacaatcgcgccacaaacccttgtaagggaatgtgcgcctggtcgggggctcacggccagcaaggggcgctgatgcccttgcataagtacttcagggatgtggcggacttcttcagcctctgcccggcccagattactccaaagggcatcaagtatttgtccgctctcttcgtcctctacgcttcccaaggatggggtgctccttcccctcacgaggtcgcttggttcttcgacctgaagtctacccccaagcaaggcaggtcggggtatttttacttctctcagccaggcttcaagtggttgagcggtacggatgacaaggccatcagcaaaatagggcgttttgttgatgagtacttcatggtgaaggatccgagcatcacccggactcggtttcagcagatcccgacatatcaccgtcctcccctcactcttgctcttagggatagagctcaaaaacttgcccggttgccggaggaagacaggaatatcatccagttgacctccgatgataatctggtgcagtatgggctttacccagaggacttttctcctaagtccgcggcggggaagaaggggaagtctgatgctggtcggcccgaacgaactcatccagagaatgagttgattcaactgaagcaagaggctaagttgaagggaggtgccagggccaagcaatatgctcaagagcctatgaatcctaaagattaagctgaggctgagcctgaggctgagcaagcgaccccattgaagaggaagaagaaactcccgaccacgcccaggcctgttgaacatgcaattcgcataagggagcccatttcacctgttcgaccatcttatccctttgctagaaaagggaaggctattatgtctgagataaactcgatgtcaggtgatgatggatttctaactttttgggcgggcaatcactctgcgttttacttcttttttagcttcttgactttcatgctttg

SEQ ID NO: 350536 - DNA, 842 bp, Cannabis indica
gacctcttgaaaccgtctaagaaataattcaatctctgcatcacaacttatttcgttagcttcatttttggtagattttaccaagtcaagcttcctccaataagagtttatacatgctaagggaatagctcgtccttctaactgatattcattaatctcatgggcacatggcaatccatgcgtgcgacgaataacacacccacaagcatgaatatcaaatccaacccaatcacctcgctttgactcttgaaataccttatcaagggcacatcttgaaataaatcctctcaattctttgaataatgtaggcttaaaattatgttgaacagtcgtcaaacttttctcaaacgacgcttttatctctgtgtgttgtagctctagtaaattaagtattgtagaccatgaagtctcaaaatttccttgtgatgagcgtaagtatctctttagctttgcatgtgcactttctacactgtataaataaaacaaaataaaaataaattaaatacattttaaataaatatttatatacaaatgcactcaaaatataataataaaggaagatataatgtatacctatttgtagtagtagtgccaaaatgcattactaaatttgtccatgcagaaacaaatttttctttatatttattcaaccacacatctttgacataatcaattgcttgtgaatatctaccataattttcttcaagtgctttgagtctcttattatactcactttctgatgatgataaagtgagtatgttccaatcagaaagaaaattatcccactttttttttactcaaatttttttcgacatttagtcaacacattattagatatatga

SEQ ID NO: 350537 - DNA, 686 bp, Cannabis indica
aaaattatattcattctttttcgtaatctcttccttttctcaaaatttcagaaaaacacacataaaaaaaattaaaatgagcacaaacacaattttaacatttgaaatcaatcaaaaccaaagcaagatcttgcttttatttcttttgttgatccattatcattattttttaaaacaagtttgttttttaattgatatattttttttagctaattaatatgttgggagaggtatgctaatatagtttataattaggataagtattattttggaccttctgttttgcaaaagttatagattggaccctctattttgttaaatgacaaaatgaatactgtattttccaaaatgataaaaatagaaccttaaactaaatttttgacaactttattttttaatataactaacttaaaaataatttctaacacgaacagatacaaaaaatataaacagttatgtcataatacctttagatcgaattattattaaattttattttgacaaaaaatcagtttacgatcatatttgtactattttagaaaatacacggcctatttttccatttaacaaaatagaggatctaattagtaatttttacaaaacacaggatccaaaatagtatttatttggaccccgtgttttgtaaaagttaccgattggaccatgtgtttgttaaatgacaaaat

SEQ ID NO: 350538 - DNA, 681 bp, Cannabis indica
ctccaccaaatgcaaccatactttccagaacacctaattagggtatacacaatatattccagccagtatttcacaaaaaaacgcaatgaaactcaacatgccattggagatcaaagctttgaactcaaagctcaaacttgcacgaaaccaatcccaaacatcaaaaccagctataagaagctatattcaactcaaatgaaccttaaaattcaaaccataaacatttctaaacctaatagccatccattcacaaaatcatatactcaactaatcttaaaattcaagaacaaaggaatagtgttacaagagcttacgttggcttaatcccctcaagatttcttgctgaaaacacaaagaattacagaaatccccccttgattcagctggtttcgaagagagagagggaagggaagagagggtttcttcacttggcttattttctaatttttttttttctataattgaataagggttaggaaaatcaattccttgctgaaatcaacttagctaggtgtcactttctagggcagccacctatccttcactaaaagaaatgactaaaatgccctttaggttaaaatttaggtatttctcaaaactaagggtaaaatggtcaaattctataagcccgctcaacctcgatatttcattttctataaaatatttcccactaagaaataa

SEQ ID NO: 350539 - DNA, 517 bp, Cannabis indica
atccttgcattcagcattgatcccacgatctttctgtttatacgcattttaatgagaggggaaactcttctcccctaagcatactagccctataaatagtgatgcatattcactaggtaagagggagaaaggcagttgagctaagactataccctaaatattttatctaagaattatacatttcgagatactgttgtaagagctataaaatgctcagggatgaacctctataaaattcttgtgtctttatattgctttatcgtatatttgttgctataaatcacttattgcttataaaaatagactttttgtcgtcggctaaaagcggggtcaacattttgtactgtaaaaaatcgaagatatacaccatatttttagtagtgaaaactgttgggttttgtgccctaaataaaacccatttaaatataatcagatttacttattaataaagatcagaaataacattttatattgcatggttcacatgatttatttcatgattatatatataatgtat

SEQ ID NO: 350540 - DNA, 559 bp, Cannabis indica
tcatcccttaaatctttcattcatacccaatttcatacgaaaaatttatgggtgctcaaatgtttcttaagtgttgatgttactaggagtaaacaaggatttttctgtctcaaagtatgtacttagtttgttaactgagactagaattgggagcaaaaccttgtaattagggatgttcatcgaatcacccacaccgcacaaactacccgcaccacaccgcacaaaaaatgcggtttgaaatcttttgcgatgcgaatgcaatttgcattttcgccaaaccgcacggtgtgtaacgtgcgagctaagatggcacgttacaagctaagtgatgcccacaagttggctaactggtgatcaaggggtggcgcatgttgatgtgcatggtggtggcatgcaaatgcttagtttgtatagtagtggcattttcacaaaaatcttcaatattgtccggatcgggacgagacttagtattagccatttatttgggtctatgaatacaatggcgcaatcgaatatgagaaaccctgtaatttggtatatggtgatgaccatatgtcta

SEQ ID NO: 350541 - DNA, 707 bp, Cannabis indica
tattaaaaaagtagtgtattactagattttagcacacttagaaaaattatacttcaatagtactctaaaaagtgtactaaatttagcacaagatatagcattgtacaaatttagctgacaataaatactacttttttatttactataatgctactaattattatgatttatagacttttaacaaactttatttaccatattaccaataattgtatattctcaataaaatatgaaataatcatcaatataattaattattttttccttattttatattttgtacattagaacacaattgtgtcaaatttaacacaaacttatttttttgtgtcaaatttaacacaaattttagatctaatgatatatattaataagggccaagattcaacaattaagtaaataaatgtccattttttaaaaaaactaacaaaatatccattcagttaaaaatttgatgataaaattacaattataaccttgaataattaagtgtttggtatagttattttgcacaatagtatatcgtttttatgtgtaataatatattaaaaaaaactgaaaggtagtatatatatttttttttgaaataactgaaaggtagtatattagtttacgattgtagtatataattttaatgtgctatggtatataatgaacgaaagacgaaaattaaaaaatgtggaatattagtttaagtttgaggtata

SEQ ID NO: 350542 - DNA, 751 bp, Cannabis indica
gaagggagttccgcgtgcacggtcaaactcaagatcattcttacgctgcccggccatggaaggaattatattcttcagttcgtcgagctgggcttgtagggctgtgctgacttgattggcgttctagtcgggttggattacgtcagcgtctttctgagcgggggtttgagtatatgctccggactgcacgttcgttgtagtattctgctcgtctgttccccttcttctatttaggtcgtcccttaggtcatgggttgttcccaacctatcgaacagagaagaacctggctaccttagcgatttgttcgcttggttggcaggtggaatggctccattattttgcgtggatccgtcgagcatgacccctccagatgaattcccagacaaggtctgtccgcctacctcttggcccacgagtggaactcgtgaccggggattggacggctcactgttggttgtctgggatgcattcaatgttgggtcatccttggcttctgccaggggaatgacgctcggtgtttgctagcctacagtctgataggctcttcgtatcagcacagtggcttgccgactacgatcttcgatttcttcatggtgagcccttaatgcctccatctctttgtccctccactcagcgaacatacgcctctgttcgtcaaacgcgaggtttactgcggcacgcaatttctcctgatcgtgatgcagggtatgttgtggccctgcatgagtccgagcgcagcgcggaggtttt

SEQ ID NO: 350543 - DNA, 795 bp, Cannabis indica
gctagctttatttattcatcaattttataattttttttttgtaggaagtaattatcatgaaactaaaaagcataaaagtaataatgaaaattttcttattaattaattcttaatattcccttcaaaaaaatcttaatatatatttaaaccgttgtgtgtcaagaaatatccgacaagaacaatatattgacattaaaacagtagtatacaatccaaactgaaattagaaaaatatgtataaattaatatatattaatggaatcaaagtcaaagatttataatgtttgcatttcaaaaattagaaagaaaaaaaaaggtcaaataatgtgggttttcaaagaaaaaaaatcccttcaattatatctatataaacaccccaaaactcactaaaaaataatcaatatcgacagagcaaaagcaatatttagatataattacacagaaaaaaaaaaagaggaattataaaaatggctgatgaatcatgtcctggtgcaggtaataaatccaacacttatatatatgtataatttttttttgaaaggaaaagtagatcgatatttatgtgtataaattaagtgtacatattaattaattaatcatctcaaccattttattgctagctattatataaatatatatatttcgtataatattaataaaatgagaactatatatattattaggtcatttttcaaaggtaatatctctaaaaatattataagttttttattatatgtatttatttttatttatatgagtaattctatattaattaaattatactaataacgatat

SEQ ID NO: 350544 - DNA, 587 bp, Cannabis indica
acatacttgtgagtagatttaagatcttggtaaaataaattccaacaccaaccccgtaaagataacaaatacataagataacaaatacataagttaaaaatgaaaagtcacaacacaatatacatggcaaagtatttaaggttactatttatgataaaatactaacatcactttgtacttattattatttgggtcacaaactgtaaagttcttttttggcaagttagatgacaaaatattttttcttttatggtaagattgaattgcattcatacccgattgtcttaccatgtatattcggttttagttactcttttctatgttaggaaagatgcattttgcagttgaacttttctttgtttggaaacttcttgtaagagaagcaattctcttatggaaattggtttttaaaggaaactttgattattgccttttccttattgaattcgattgtatcttgatacaatctgtatatataatctgtttatggcaggaatcaagtcttaatagaagatcagacccgattatagcaagtttcttttttttggtcagatatgctgtgtcagctttcgattctgatgctgcag

SEQ ID NO: 350545 - DNA, 738 bp, Cannabis indica
acttaaacaaatttagactccctctagtgatttgccgcaaccctttgtaatccaccttgctaatctgatctctgaaacacaccaagtagtgaactcccttcagctattgatgtgtgcttacttcctcccgaagtaaggcttaaacaaatcttctcccgaagatatatgctcacttcctcccgaaatgagacttggaaaagtcttctcacgaagacccacgcttgttcaaagcttctcttcaacctattctaagaatagtatgagatcataatacaaaaaccaaaacctagttgaacactctaggtttttacaaatgaaacactcttctcacaaagaaagatatgaaaatatgagactagaagagataaaatcgtttggatgctctctaagtcctatttatagaatatagcaaccctagagacagacacaaagcgatttcccagctgtacaaaactttcctaaaaaaattcctgatttgcagcatcagaatcggatttcgcagtagcagatcaggacccgaaaggaaactttttaaattgaaccaagatcacgaatttggacttcaaacctgccaaataaagtttatttgattttttctaataaaggcaaaaccgaaatcatccattagaaaaaggaaagtcaagtttcccaaaattagcaactttccataagagaatttcttctcttataagaagtttctaaacaaagaaaaatttagctgaaaaatgattctttcct

SEQ ID NO: 350546 - DNA, 1019 bp, Cannabis indica
taattataaaataataaaaattaagacctaattcacataaagttaattataataattaaaagctattaaaaatatatattcaatgactttttatattaataataattaatataatatatattattataggctaaacattagataaattttaaaaattataaataattaattgagaaaataaaacgacaaagaaacatttttatataaattgttaacgctgaaaagtggccaacactagctcgctagattggagagatgaataattaatttaagtaaaaaaaaactaagagagactataaatttaatagtagttcactcatcatatcatgatagtaataaagctacgcctactttgagtttttatttatctacaagaattaattacaagaaaatactacaagtctaaaagctctaattctagagagaaaaataagagagagatgatctacgatatgggttacttttttgaatgtagaaaaataataagatgagctctccttttagtagggaaggaggttctaattaaaaataataataaaatattagaaaaaaaatatatttaagctattttgaccattattgatgatataacggtgaaactgacttcggaggtcggtcatcaatttttagaacttgagtcgcgtctgcgggacctacttcaagtaagttgtaattgaaatttatctctcttgaagacaaaatttgaacttgataaattcaaaattacaatactttatatatattgcgcaagttgaatcgcgtcaatcaaataaatactatatgagttatgatcgttttattgaagggtgctctgataccaacacacaggttgacatgtgatgtcaacctggacgttgggccaagagaaaatcgtgctgaaaatgtattttattatgctaagtgatatgaaaatatcacttagctagtttatgtattctagtcaatttgttcataagttctcaaatgttactttttcgcaagagttgaaactaccctatttatgactaaatcatttagct

SEQ ID NO: 350547 - DNA, 828 bp, Cannabis indica
aaataatttgtatgcaaaaaaaaagtgagattacacgagcttggcgtacaaaacaaccaatgcttttgttcgtttacaaggaggctcttttaaacactagccaacttgattcttcgctacctagtgttgttatttctattttgtaggaatttgaggatgtgtttccctaggaggtaccacacggcgtgccacctattcgaggaatagaacatcaaattgattttattcaggtgcgtcaatcccaaatcgtcgagcatatagaactaatcctgatgaaaccaaagaaatacaaaggcaaattgaaggattgatgaccaaagggcatgtgagagaaagcatgagcccttgtgtggttccagtaattctcgttcctaagaaggatggaacatggagaatgtgtgttgactgtcgagccatcaacaacataacgataaaatatcgacatcccattcctcgtttagatgatatattagatgagttgcatggttcttgtgtgttttctaagatttatcttaagagtgggtatcatcaaatacgtatgaaagaaggaaatgagtggaaaactgcatttaaaactaaacatggattgtatgaatgcttagtcatgccttttggactaactaatgcacctagcattttcatgcgattaatgaatcatgttttgcgtgctttcatcgaaaaatatgttgttgtgtattttgatgatattctaatttatagtaagagtttgcatgatcatgcttcacatttgcaatcagttttggacgtgcttcgaaaacattatgctaaccttaggaaatgcactttttgcaccgataagattgtttt

SEQ ID NO: 350548 - DNA, 835 bp, Cannabis indica
tatgtaccaaatcaaaccaaattgcatattcatttaataatatccagatatatatttattaggcattatgcacatgccaataaaaatcaaatattatatcatcataaaaatctcatacatatttaaacccataaatatgtaaaataataaaaatactctccgctaaaaaattacaaaaataccctttctgagctagcggttattacaattatccccctctaaaagaaaatttcgtcccgaaattttactcaaataattctggatattgttctcgcatatcagactctagctcccaagtagcttcctcaaccacgctgtttctccataggactttcaccaaggtaattgtcttatttctcaaaatcctatctttttgatcaagaatctttaccggacgttcattgtaggacaaatcttcctgcaaacccagtgtttcatagctcaaaacatgtgatgggtctgacacatattttcgaagttgggatacatgaaatacattgtgcaccccagataatgatggcggtaaagctattctgtaagctacactgcctactctgtccaatatctgaaatggaccaacatatctgggacttagtttccctctcttgccaaatctcttcaccgagagtccttttcgtggtgtcactcgaagaaacacatgatcacccacttcgaactcaatgtctctccgcttcaggtctgcataagatttctgtctgctctgagctgtgatcattctagccctgatcttctgaatagcttcgttggtgtgctgaactgcatctggccctaggagtttgttctctcccaactcatcccaatgcagtggagacct

SEQ ID NO: 350549 - DNA, 460 bp, Cannabis indica
atgacacaatataatgagctcgaaactacagcacgtaaatataaatagaaaacacaacaaattatcaactatatatttaatcaaatgattatgaaactaaaatataacactaaattataattaaaactaaatattgattagttttagagctgtgagttaaaatttgagtatttattagtaaagatttaatttctaataattataaactttttgtatatgattatgtgaaatatttttgaaaaataattaaaattataaaaaaatacatcatttaattagctcattcgttctcttaaaatatatagatgattattcaattgttacattaaaaatgtaaccatgataattcatttcttataacctattatattaagttaccaatagataaaaattttatttttaaatttaaattaattataattaactatataattaaaataaattaacttttaattgatat

SEQ ID NO: 350550 - DNA, 591 bp, Cannabis indica
tagagaaatgaattcttagaatgccacctcacattgtcttgtgcattactttatatatttatatagatagattagttgaaattagtattcttatattatatgatcatttctgttctatacttaatcacaatggtttagtgaaaaataaaaacattttatggtaacttatgaaattggtttttattttagggttattttagtctttttcatttattttagttacctatataagattttctaattgcattatttacttttttttcacgaagccctagactgtctacatcactttattctttctcaaaaattatcaccgtcgactccagctccggcctcaatctccattgttctcggcgacacagcggcggtatcactctccaacatctactgagtttgttctctgatgatcaatatctgtatttgttttaagtttatgaattcctttctcaactgatcattggcttcataatcataatcataatcataggtaaacatgtcatctcggccggaattccaagcgcctcctgagatattctataatgataaagaagctaggaagtatacctcctcttctcgaatcatcaaaatcca

SEQ ID NO: 350551 - DNA, 601 bp, Cannabis indica
gttacatcaaatatgtaagtacagtggttacatttacttttaatggtaggatcattgttaaatgattgtgattactttagaagttaaataaaaataattaataaattaccattaacatgatactaacttgattttatttaattttttataaataaaaaacatttttaaatattagttgtgaaaaatgtcttattaaatattttaattgaaaaattaatttattttaagtatataattaatttgagtatcaaaatagaatttttacctattagtaacctactatagtaggtcataataaaatgtaaccatcatagttatatttttaatgtaaccattgcatagtcacccaaataataataatatatagagaacttttatggtgcacctttcaaaaacacaatgcaccccctattgtttctgcatccataataacactattacaaatattaaaattcgcgacggtccttaaacaattttttttgaggaccgtcgctaaaaaaaattaagtaattatttaaaatcgtcaagaaaaatttagtattctcgacggtttaaaattgtagtaaacaaaataggcgtaataaaatgcgattttttaatg

SEQ ID NO: 350552 - DNA, 1263 bp, Cannabis indica
ttttcttgtatttgtcggccttgcgccataccaactcatccctcaagcttaccgcctgctttcaggcttatttattttttactctgcctggggttggggctctcccagtccggcagagattttgtacttttatgaacttatttctgtccctaaaaagggagacaaacttaaggacgacttttacagttttcaggcccatcctttgaatgagggcccgatcccttttaaccagcaaaaacatgtcaaggagtaccgtcatcgcttcttcttctcctccgggttccaggctgtggaacatctgcagcttctcacggagtgggttaggatccctccttacgcgcggactgaacctactcagcttttcctccaacgggccaagaccttcgccacatatgacaagatggcccttgacgtcggggagctggtcacgatgcagaactgtcggaaggccaagctgatccaggggcaccagtcggtggatgactccaacctttccaaggtcatatgcccgaacgtaagggttccggccgcggagaaggtactccgggaggacatcatcgccacggcagaagataagtaccagaagtacctcttccagaaggcccaggagcaagcttatagtaaggcccaagcggccgtcggaaggccccttcgtaatgggagcccggtggagagaagacccccagaccaaggcctacggtccaggtgccaaatacgggggctcccgatgccaacacttctggttctggtaagtcccctttaatgataaattacgtcccttctgtccgtgagtacgctagccttaggcctatagggttcgatgaacgtctccataggtttaggatgccctccactcggtgggggaatcatgcaaaggagtattacttctcccagttaggcgattacttaggctggtcccggatgggttctggacctccagtgcccgttcccttggattcttcagcctatctgtcttctagctggttccgtccctcggagagctatcttggggatgatgcagccagtgttaagattcgggactttgctagggccgaattagagagtcagggtagggctagcttgattgctttttaagtgtacgctgctttcgcagatattctaacacttgactcttttctcttgttgcagcagccgatcccatggatgcgatcttggccacccttgctggagcccacagtcctgatgcttcccctcctcctaattcttcccagttggtcacccccgagaaagcttcttctagcg

SEQ ID NO: 350553 - DNA, 1231 bp, Cannabis indica
gtaggcattgtcattgatccttttaagtacttaaaacaaaccatctcctcgaggaagcaatttggaacgtctttgggcttgaccctggttagcttgctttatgtatttcttgacccttctctctatgttgagtcgtgccctctcatagatttgcttcacaaattctgctttctttttgacatctaaatgcaaatgctcagaaaaaggtaaaggtaataaatccaaaggagtcaaaggattaaaatcataaacaatttcaaatggtgaaaatttagtagcagaatgcatagaatgattataagaaaacccaacatgtggtaaacaatcctcccaagtcttaatatttttacttatgatagccctcaataaagtggataaagttctattaactacttctgtttgaccatcaatttgaggatgacaagtagtaaaaaacaaaagttgtgtcccaagttttccccacaatgttttccaaaagtaacttaagaacttggcatccttatcagatacaatggttctagacataccatgtaatctcacaatctccctgaaaaataaatctgcaacattaaaagcatcataagttttatgacaaaagggataaaatgagccatattagaaaatctgcctaccaccaaaaagattgaatccctcccacatttactcctaggtaaacccaacacaaaatccattgaaatatcaacccatggtgaactaggaataggtaggggtgtgtaaagaccatttggttgaacccttgatttagcttgcttacaagtgacacatctaccacaaatttgcttaacatatcttttcgtgtggggccaaaagaagtgttcttgtagtataactaaggtcttagcaactctaaaatgtcccataatgatacgaaccacaccaacagttgtgatgaaacccgacacataatatggctgactctaagaattctcaaaatttggatgtggaaccgtgacccaatgcttagttaaggtggaaccttggtatgaaggaagacgccacaaacgatgatggtaatccatttgataagtcaggttgaacgccacaaggaatactccttgataagttggaatagttctcccaagaactcaagaagaaaacctctcaaaattttattccaaaaaaattatgattttccaaagtgattacaaggctttaaatagccaacttacaaccaagttaaaaaaaaaggaaactaaaacaaagaagaaaa

SEQ ID NO: 350554 - DNA, 1176 bp, Cannabis indica
tttctttcttactgaaatctgttggcacaatacccgaggcgagctcaaacggtcaaactttgtggtatattggtaactgacatcccctcagtttgcactaactcagtgaactctttccgcttagcactgcggacaacttcattataatacttggaatttaataactcttggaattcttcccaagtcattacaatgacatccggctgagggacaccaattcccaccacactagggtgtcctcctagaactgaaatgtggcgcaggtcacccgatcaattccaaccaccgccataaaattcaaaattcgatcaatcacagtgagccactgctcagccttcatcacatctggacctcccagaaacactggaggtgcttgcttacggaacctctcattaacgactccatacggttgccagaaataggttgttctgtcggcaccgctggagctacaacagcctgagcttgctgtggaggcacggtaggaagaccctgctgcctcaatctcaaaatttcttcatcttgttgggaaattcgatcttgcatcttcgcaaacctctcctcccaatccaaaggagcttgtggtggattcacatgacgaccaccctcaactccgccacagccacggccgcgaccacggggattctggggaattcaatttccctgaccgcttccggtctcaaccaaatcaccctaacttcttgtatttcgttgggcgtccatttaataagcctgcgaacccatacgccaggcaggttagacaacgatcataaaacttaataccgctcttatggattttaaggcaacgcatttaaaagtaaacaaccataatctaaaatgctttactagtcacataaaaaactaaacaagtacaggcttactgaaccgtgagccgagctttctctgatgaagattgtacatgtcttggcaagcttcggtagacaaacctggcagctctgataccaaaattgtaacgccctaatgctaaggcacgctacagtgtctttttttaattacagtgctgtctttgctaatcaaagaattttcttgaaaattgtgtcaaattaaaaacttttatattagacattaaactttataacttacaaaatcatttacaagtatcgggatcccgtttttaaacttttatacaaaatacataaccaggtcgcacagcgacta

SEQ ID NO: 350555 - DNA, 1227 bp, Cannabis indica
aaataatttccaacacaaggaggaattaataagttagggaatttacttggcaaattctagatttgcttctcggaagctcggttttataggcccatggtcctcatactatttgagacagtattgcttgtaagactcagttaattgattttaattaatcaattataattctaaaattaaactattgtcttatttatgaattttcactaagatagggcttaattgggaagaaaagaggttttagggtttatttgttaattaagagactttattaagtctaattaataaatatattaaatgataattttatttgacaattaattttaattattaaataaatagttttgacatttaaaggattgaaattggaaaatatgacatttgtgaaaaataggataaccaattgagcaaaatggcaaaaattccaatttagtggtgcccactatgtggccgaccacttaaggggatttttgcccaatttttatcaatattttaatgttatataatttaaatctaaccctaagtgaaatagtataaaaagaataggatggtctcattatccaactaatgactcatttcctagtttactaattgtcagacaactagagagttttgagacctcgttcttctttcttcttcttctatttcaaaatcccttgagtgttcttcaataaaatttcgagcctcttagtgattgagtacatgtcgacacatagcaagtaagtactcaaccatagtgtgtaagactgtgaacaatccaacacttgaaggagaatcgggctcagataatctaaatcctggtaaaataatccccaacattaacttcttttgttagacatgtagctgaccaggcagcttatgtctaatctaaagtatgccagtcacatttacttagctctcaattttttgcttaaaaaagatttaaattttttaagtttagctatgcttgttcgatgtcgtacagtgtgggtgccccccagtgatcgattagacttatggtctcctagtcacatgcaattcaccaaatactatagatctttgcttgtgaattttcttagagggacctgtttgtatgtgtagaaaatagtgattcgaattgtgtatgtatttcatagaatagtacatatttatatacaaagctaggagactaggaaataggaaactaccaacaaaataggaaactactaaatacaagttgccctaatcttttacacctaatatacagctaat

SEQ ID NO: 350556 - DNA, 487 bp, Cannabis indica
aaaaaaaatgattaaaaaaactaaccatcttttgtatagcctcaacaccagatgcaatagcggctatatttgcaaggccagtcctgaaattagaataaaaaaacaacgaaaacaaaactaacccaacacaaaaataaatgtaaaataatgaagtagatataaccacttagaaaaacataaaagaaccacacacctcaaaattattttgccagtgagctcgtcaaatgtatttataggaaaataaaaataaaaaaaaaaccaacaaaaaaaaccatagagaaggaagaagaaatatatttatctttcacgctgagagacagaaccaccacaacaacacaagtacatccggaaaacaatcaataatttcggcgagattgagtaagaacagtgaaatcgacgtcaaataaataaattatggcaaaacaactttaaaacaatactaaaacaaattaaaaaaaaaaaaaaaacgaaaattaaaaaacttaaa

SEQ ID NO: 350557 - DNA, 568 bp, Cannabis indica
ttgtagtatttctttatgttgtaggttgtgaggtcaatttgtaaggatccgacttatttggtgttgatcggtttctagcaagctcgaggtatatatttactaatttttattattaattaattatgaacgcttagtagagcttgaatatcttaaatattcatctgtagtgaagtaggttctacaatatattgtaatctggccagatagatggatgaaataatatgcatgttagatgagtttgaatattttaaatattcatccatagtgaagtaggttattgaatacatgtacttccgtcggatggatggtaaattttatattgctaaatgttattgtaattattttatattgtttgaattgtattttgttgttattaataggttttaatttttcgaaaacattcaattatagtcgttatgctgccaaaattttggtagaataaggataaaattatttgagtttaatttcacttaaacttggttgttaggattttatcgaaactgactttatcggaacatttagccgctttggtataaggtatgctttctttaacctacctttataagaa

SEQ ID NO: 350558 - DNA, 773 bp, Cannabis indica
tcaaagaagagaagatgaggcataaatggagagagaaggtctaaaagcatgccatgaaaaagtccaatactcagctagacaaggctgctcaatagaggctactacaagcaagacgagaatgaagaagtccctatccaaccaaaagttcaaacagggacttggggggaaatattatcctaaattttgtccacctgacatgttcgcgtaagctaagactgaggacacgtggaatacaacattgctaatagaaggacaaagtctccttaggtataacaaaactataaagcgacaagcgaaaggagttaagcgagccgtcaatgagctacatcaccatgtctggccgaccaaggggattacattggccgcccatgatgaccttgtatggtcggctagggttcgagcaaaagctggccgaccaaaggtgactttgtgactaaggaagggtatgttcgaccaaggaagcctaacctctataagaaaaaggtctacaaaggttggcattggctgaccaacacctacaaaggctggccaacacctacgaaggcttgctaacacttgccaaagctggcaggaacacgacctgccagatcctggtaggaacatggcatgtcagactccaacctgcagacagtatgtggtcggccagccagcaccttgcaggtgtatggctggctagcttttgcttggtagaccattgatgcgcatccctcatccgtggacagcaagccaaactgtaagttgggcattgacaacccacgaagataccacaaaaa

SEQ ID NO: 350559 - DNA, 554 bp, Cannabis indica
catactaactgtgtaatccgttgataatcaatggatttgttggaaaacatgtttaattaaaactttacttttagttgaaaataaataacctttataaaaactgggatcctgctatttaaaatttacatccgataatacaaaatattaattacaaaagttgtcccctagtgactaatcaaaatataacctattgtcctaaagatcaaacactccatgtctgaccacttcgatatgtataatattcagtctgctcgcactcactactgctcaaccttagcttttcccttacctacacatgtgaacaataactgtgagtcgacaaacttagtaagaaaagcataatcaaaactataaacttaatccagattacaattaggcacccatacgcccaatcataaccctatcccgcatcccacacgtactgagtctagaacattcgtacaacagttctattgaccataatatcagcctatactcggtactctagtcgtatcgatgtgatatcgtcaatcaatactaagccaaacatacattcatcagtatccaagtataac

SEQ ID NO: 350560 - DNA, 502 bp, Cannabis indica
atatatatacatatataatcgtatatatatattaaactatataaaaatatcataaaaatatataataaattaattatatggaatgaaatcaatgaataaatgagtataatataaaaatgtataccgaaaaatatatgtaccgtaaatgaaagtatataatatatataaacgtgtatatgaatatgaatatgaatataaatatgtatatatgtatatgtaaaaatatattaagtatatgaatatatatataatcggattatataatataaaaagtatatatataaatatatataatgtatattattgatgagaaacccatacgaatatatatatataatatataaataacaaattacaaataaatcaagacagagatatataatttgctctgataccaactgttagaaattatattatgtataaaatgaaatatatgtatgtatatataagatgcgaaataaatgaatacatacactatataactataggatcgaaatacctc

SEQ ID NO: 350561 - DNA, 533 bp, Cannabis indica
aaaaaacaacagtaaaaaagtaaaaaataccacctgatagtatttttgtaaaaaaatagcaaaacttagtatactatgtaaattttcctaatattaaaatgatgactggtgaatctaaactgtacatgtcagcattgaggtaggcccaaggttgtacgaacgataaggagtgaatcaagatcatctatttaaaaatggtatcacatactgtgttaaactaatctaaatttaatacgttaattaacttaatttttttaaatatgttaactatttttgttgacttaattaaaggtttaaatttttaataaatacaaaattaattgatgtgttaaacatagattggtttaatactgtggaacactactttcttacggcaattttcctggtgattagaacacttctttttcatcttgtattattctaataaatagataagaaagagttaattttgaacatttgacaaaaaataaataaataaataaacatgtaaaacaaattcagaataaatttcaataactttatatttttttttt

SEQ ID NO: 350562 - DNA, 612 bp, Cannabis indica
ggtatgcattgcataccatccccgcacgtgtttgggggcatttgaccgaggttggctgcacatccatgttgcatgcagcatttccacgcacagaggaggtttcagaaaagaaccctggctgagcttcctcggacaaaacgtgtttgaatgcgcatgctgaccgagtgatctcgggtgtgcgtgcgcgcaggggagtgatccccacccttattttgtccgaattttgaaaatttataactaattcaatttaaatcggaattcagttctgtaaaaaaataaattgcttagtttcttccatactatctaaataaaataattccagatcgtgaatccaattatttttcgtgaaaatttcgtaaacatctatcaatcatcaaataaatacatagatcaacatgaatgacatccaaatcacacatttatcgttttaaatccatatttcttgaaagtaaatcattatcatgactctgataccagttgttggaatatattttattaggatctagatttactaacaagtatgttgattatattctatcatctaacaccctaaatatgaattcctgaaaacaataaaaataaacacatataaagtttagaaaatcttacatt

SEQ ID NO: 350563 - DNA, 977 bp, Cannabis indica
actcttatgtgtttatttcattgttttagaattcatattagtatgaaacatacttgttagtaaatctagatcctggtaaaatatatccaacaagagttattttttgattacaagttagttgatggaggaagagttataatggacaatgagcattcttgcaaggtcattggaaacgggaaggtggccatcaaatagtattatggcagaatcaaggtgctgacgaatataaggcacatcccacaccttaaataaaatctcatatccctagatgcgtttgaagatgaaggatacaaatacaagtccatacacgaaagcttgatattaccaaaggttttttggtattgatgaaaggcgaatagatcaattgtttatatgttctccaaggaaaaactgtcccaactggagaagctagtatggtgaaagggctataatcggatatgaagttgtggcatcgctgacttggacatatcagtgaataaggcctcaaagaacttcacaaacaagatataattaaaaatttaaattcttgtgtcttaccattttgtgaagcttgtattttagggaaacaacaaaagttgaagttcactccgataaggcacataactaaaaagatactcaaatatgtgcacgctgatctttggggaccatacaaggtgccttctcacttcagtaagcaatatttcctttctatagttaatgattattgtaggtgtgtttggacctacttgctaactactaagaatgattgcctggaaaagtttagaatttggaaaattcaggtagaaaaactgatctcaaagttaagaaccttagaataggcaatgggttagagtttatcaactctaaatttgacaagatgtgtcaaaagaatgggatctctaggcatagaaccgtagtgaagacccacgtagctaaatggtaatgctgaatggatgaaccagaccttgttgaacaaagttagatgtttactgttcagt

SEQ ID NO: 350564 - DNA, 608 bp, Cannabis indica
tttgttgatcttcaatcggcccaagcaaagagggaaacgacccagcttccttctgcacgtgcatcacgtgatgcgtctctttgaccgcttcagagacattaggcgggtttgaattcctcacactatttgagaaacagtgtaaggtctttctcaacgttatatcaggaaaaatttcagaagcttttccattctctattttctcaccaagaacaccattaccattaccagaaaatttggccgtaccaccaccctgcttcgatctggccacccacgctgccgacttcggaaaccccatcgacgcaggagagcgacaggtcactcccttactcattctcgaaaaaccacccacagtgggagccgttcgcctggaaatcacaccgttaccacccttcgacgccgaggaggccaggccgggaagtcgatgtggggggaaggtcgacaaaaagccacggcttggcacgaaagtattggcccccgagaaaacatctaggtaagacgaggatgttgagagccacggaccaaagagtggaaacggaattccatttcctttctccaccgtgacaggggaggagagggagcacccccgtcgttgatgacccaggcatcca

SEQ ID NO: 350565 - DNA, 648 bp, Cannabis indica
gttattgtacgagaattctatcactggcagttacttgcttaggaccccttaaaatccattacacaggctcataacatgtctctcagtatctgaattatccttttggactatccattagtctgaggatagaaagttgtactgaattttagtttggtagccatagcccattgaaaactctatcagaatttaaaagtaaacttcggatcgctattcaatataatggactttggtatgccatgtaatctcactatctctttaacataaaaatctacgtactgatctattgaaaagtttgtttttaccggtagaaaatgtgcagacttcgtgaatcgatcaaccacaacccaaatcgaatcatacattcctgtggttctaggtaacccaaccacaaagtccacggtgatatcctcccacttccactcaggaagtgtctgttgttgtaataaatttgctagtctctaatgtttagacttgatctgttgacaagttaggcaccgggatacaaattctaccacattcttcttcatcccgctccaccagaagtagggtttaagatcttggtacatgttggtagtgcaaggatgcaatgaatatggagtggtatgggcctcctaaagaatctcatttctaagttccgcactacttgga

SEQ ID NO: 350566 - DNA, 871 bp, Cannabis indica
tgttccattcttcaacatcctgcaagaaaataagcaatttgagtggacagaggaatgtgaaaaagcttttcaggagctaaaagcgcaactcgtaaagcctcccgtactctcgaaacctcttgacggagaagaacttgggatatacttagctgtcacggagcatgatgtgagtatcgtgttgatcagagtggtaaacaacatacaatacccggtctattacattagtaaaagactcattgaggctgaaggctggtacccattgatagagaaaatcacttactgcctgattctagcaacaagaaagttaaggccctattttcaagctcatcctgtccgggtgtacactgaccaaccgttacgccaaatattgcaaaagccggacgcttctggacagttactcaagtgggcagtggaactgggtcaatatgaaattactttccaaccccaaacaataatcaaaggccaggccttagcagactttgtggtagaatgcacacacaaagaagaaagcatatcggaaggcaaccccaagcaagtacaaatacctcagccaagtaacagtgaagacaagcggacttggaaactacatgtggacgggtcggctacagatcaactatccggtccaggaatcgcccttgtaacacttgggggcaacacctgcacgctacagccaagtttggatttagagcatccaacaacgaagccgaatatgaagctttgatcgctggcctaaaactaccctgagagatgaaagccgaacatatcaaaatctacaatgattcacagctggtggtaaatcacgtatctggagaatatgaggctcggggagaaaagatgatagcatatctgagcaaaatacatgacctactcg

SEQ ID NO: 350567 - DNA, 801 bp, Cannabis indica
gaaggtttcttgaaatggatgatacaaggcgtagaagtaaaaaatatgatgggaaaattgagtaaagaccacctcctccacaattgtcgggggacgatattttagctcagcttgagcagttacaatttcgtttgcctagaaaacacaagcaatttggtggagtcaaacgtaaacgttatgtagctgagttaaattggtcaaagaagagtatattttttgagctagaggacttgtctctccgacataatcttgacgtaatgcatatcgagaaaaatgtctgtgagagtgtacttggaactttgttaagtatcgaggggaagtctaaggacatagacaaggcaagattggatttggaggaccttaaaatacatcgtgagttgtggttatttgaagaacgcaacaggaatttgaggaaaccgcatgctagttacacacttactcttcctgaacgacgtgaattttgcggatttattaagtctgtgcagttcccagacggattcgcttcaaatttagagaaaaatgtcaatgagactgaagacaaaatttctggtctgaagtctcacgattgtcatgtgttgctacaacgcttgatgcccggtggcattagaaagttcttgaagaaagaagttagggatacaatagttgagttgtgtgtatttttccagaaattgtgctgtaaaacattgaatgttacagacttgcagatcatgcaaaaaagtattttagacattctttacaaattagaaaccattttcccaccagcattttttgacataatggttcacttggtgatgcatttac

SEQ ID NO: 350568 - DNA, 679 bp, Cannabis indica
aagtttaatgcaggagatttttacgtggttggggcattaacgagccttagtccacgagtctattgtatttatgagagtgtttattacagagaatgttcttggtgaatctctctcttttctttactctctttgatttctaaatcaatcgatcgaccccttttccattatgtctatggggtatttatagtgtttttctgggagatccctaggaagggatcacttgtctttttgtgttagcctcattagggcacaaatttatggtagatccaaaataggaaatacatgacctatatcgtaggtattttaggagctaggtggatataatcatttatcctctattgactaatgtgattcctcataatgtagccgtcattagactcgttgtttgctatgtaattgccgtaaataggagctaacgccatctgtcaaatccttttatggagtttctgatacgttttcccccatgcggcattaaatgcgaagtgactgttcaagcaatctttttcccgcccgaaaatgccttagcgtagttctagctgttggaatttattttaccaggatcttacatccactcacaagtatgttgtttaacaccctaaatatgaactttctaaaacgataattaaacacatatcaagttaagaaaaccttacattgatgcagcggaataatgtctcct

SEQ ID NO: 350569 - DNA, 735 bp, Cannabis indica
cctcgcttgttggagcagagagtagctagtttaacaagtttactcatcattcaataacttcctgggagtagctatccaaggttagggttaagaatttggatgacaacacacaacttacagcctgacaagacaataaaggcatacttaagtcgttttagcacgggtgtggctagggctaagaatttggatgacagcacgcaacttacagtccttcaggcagggatctttactaatcctttaatcgcaggggcgagttgtgggataacttacaaggacatccagttagaagcatcactgagttcaacgaaagggctcagaagcttgttcagaaggaagaagcccgaaaggaaatgaatctgttaaaaataagctcaggaagcaaacccgacaatgtttcaataagtactgtttccacgagaattgataactcgggggcttctggttcgaagagaaaagacggaattaaagaaccgtcaaaggataaaaagaaacagaagaagcatgataaatacgtgccagtgtatactatttataccaagcttaatgaaactcgggagaatatttacctcgcacatgagcaaatggttgccttcggcaagcccgagcccatgaggaatttgaggagcaaaagagattataacaagtattgtaaattccataaggatattgggcataatcgagctcgcattaaccttaggcgaggcacccttatctgctactgttatgcaagacttc

SEQ ID NO: 350570 - DNA, 566 bp, Cannabis indica
cctgcttctcaaaagccaagactccatgattgatatgtacacagctggaagacctctaaatcgtggttgagcacaaacctttttacctgcaccatgaagcacccgtgagtcacaatgactcagcaagaaaaggtattaaatcagaagcaataaaaatgcaagtattcttatcataacataacatacataccgtgattcattatcattcaacttgcatatgtagtataacgactatacgaactcgtatattacccaatataaaaatctcatagcatcttgccgcgaatagctttatcattacactaatcaaatattcactcaatacataatcacatattttcagtgccacgtaaagcactaaaatcatacatcccagtaaacatgtattcttacatcacgtgagtcatagagactctgcaagaaaaaagactaatttcataagcaatataaaaattcattcattcacattataacaacgatgtatccgattacaaactcatcacataatacatgctaattcattcacaacatcgtaatctcacaatcctagtacttcataaaagccc

SEQ ID NO: 350571 - DNA, 505 bp, Cannabis indica
ctagttccatttgcgattctgagttcgagtttcagttttagttcggatcggagttcgagtccaggtctgagtttaagttcggatctggatttcagtctaggtccagatcaggctccaggtttgggtcgcgtcctaagtcttggtctaggttgggtccgagtcccaagttccaatcccaatctgagtctcgaatcaattctgggtctaagtcctctgttctgatcctagtctgggttcgagtttgggtccaggtctgggtctagctttgggtctgattctaggtttgggtgtttgagtttcggtccgagtctatgtccgggtttgtgtccagttcttgaccccgatctgggtctaggttcgggtctatgtctaagctcgggtccctagtgcgggtccgagttttgtctggatcaggatctcgatccaaatctagctccagcatttcgatcccagtgtgggtcttggtccgagtcaagtttcgtatccggatccctatctaggtcca

SEQ ID NO: 350572 - DNA, 777 bp, Cannabis indica
attatcaccggaggtcaactggataatatccctatcttcctccggcaaccaggcaagtttctgagctctatccctaagagcaagagtgaggggaggacgatgatatgtcagaatctgctgaaacgaagtccaggtaatgctcagatccttcaccatgaagtacgcatcagcaaaacgccctattttgctgatggccttggtatccgtgccggtcaaccacttgaagcgtggttgagagaagtagaagtaccctgacctgctttgcttgggggcagacttcaagtcaaagaaccaggtgacctcgtggggagaaggagcatcccatccttgggaagcgaagaggacgaagagggcggaaaaatacttgatgcccttgggagtgatctgagccgggtagagaccaaagaagtctgccacatccctgaagtacttgtgcaagggcatcagcgcccttgccggtcgtgagcccctaactaggcgcacatgcccttatcaaggtttgtggcacgattgtcatgggtgggaatgtagcagtccaactcgcgtaggtacccgtcctggtcgagagttcgaaggtgcgcctccgaaatcttggacggaggacttacccacctggcgcccaaggcaccctgcctcttatgaggagctgctgaagcaagctcctcactgacgtagtcaacgccctcaaccagggcgtctccgtcagcatcgactggctgcccagcctcgttgtactccccgaagtttgggggtccaacctcttcttctccctctgcc

SEQ ID NO: 350573 - DNA, 505 bp, Cannabis indica
aacataaaaaacacagcaacaactaagaatcaaaactagcatgcaacactcatctttttcatcaaaatttcaaaaaaacttaaaagaaagctagaggaaacataccaacaacaagagatcacaaaatcttgctaaaagagcttgaaatccaagaaaatgccaaagatccttgctgcacaaggaggccgaaagagagagagaggctagagaggaaatggttttgttattttttttttttttttctaatatttccaatttgaaaataatggataaatgtaaataataacctttatttcagccacaaagaagccacatataacacatattcaattcacttagtccactaaaggaaaaatattattggggcaaaatgaccattttgcccctccatccaaaaataacataaagagcactaaaagggtattttgggaaattttaaattccggccaatcccgacattcccaatgtctaaataaccgtcccaaatactaacatactaagttgt

SEQ ID NO: 350574 - DNA, 644 bp, Cannabis indica
acttcagaccggcctgcacaaggaaaaaaaattagcatttgagctaagtatggaagattaaagggaagcattaagaaagacttaccctagtgaactccttcaagactccgccccccaccaatttcaaagaagagtcactgtcagcataagccagttgctcactgacctcgggaaccagccggttcatgtaatgggccaacatctccttgcccttcttggcctttggaagcactggcaaaggtggactatgtgcccacactcgttcaggatcactcctgaccagttcagacccaactatcggtggtccagactccttggacttggcagctttgggggtagaggtgtttgcagcagtccgatcataggaaagatcaatgacctccccggaaggcctcttttccttagtagaggacccctcaccgcccttagacttcttggccacaggagaggcgctagagcttctgcccattctcttttttagagcctcaaacatttgacgagacatgtctgtacaaaataaaaaacaacatgtttagaaaacagacatcagaaacctaaggcatgaaagtcaagaagctcaaaaacaagacaaagcaatatgcaaggtgactgcccaaacaagattcgaaagttcatcatcacct

SEQ ID NO: 350575 - DNA, 515 bp, Cannabis indica
atattatttttaatttgttattaattagaaacttagtatgaatacatgcaattgattatgtttttagcttatttgtctttacgatttatataatatgaagtataaattaaatagaatatttatttcaaattcataaaatccattattttcattttgaattatattacactatttaattgttattatttttttaatctttatgggtacccaagagagccccatactcaatgggtattatttccctaccctaaacatgttggggattaagtgaggcgggacaaagatgggagcataaatggggagcgggaacaaggttgggggtgcattccccactcactacttccccaatttccatccttagtttagtaggaaaattattaacaaggagggtatccaattttaatgttttttagaatatgatgatagtgatatggtcattagccaggtatgggtatgtgcgcaaagaaattgagtaataatctgaatctattcagttttgaaattccgtattttaa

SEQ ID NO: 350576 - DNA, 636 bp, Cannabis indica
tgcattttagtcaatattttaaagaggaatgctaaagggtaccagtggtgtctaacaccctcctatatgtcaatatcgctattggtccaattaaatatcgagtcccatataatttaatataataacttttagggagtatcgctagccaatcgcaacgcgacatgtcaagaaggggctaggcaccactggtgcctaatagcaatgctctattttaaattaacttgataaatattattgtttaaaataaagtaatttgcgacataaatatttaagtttaattctcaattgcaaataaatatttaaatttaattttttgcgttaataatacttaagttataattttggaacttttgtaggtacttggttaaatgaattaccacgtgacaatccttgattagtccaagtcattaaatttttattatttaaaaaaaatagttgaaatacaccaataagaaaataacacgtgggtataatggtttaatatttaacggttaggtacctacagagttccaaaaatataacttaagtattattaccgccgaaaattaaacttaggtatttatttgcaactgagagttaaacttatatatttttggggcttttttcatttttacacttttaaaacagttttttttt

SEQ ID NO: 350577 - DNA, 1065 bp, Cannabis indica
ttttttttttcgttttttgtattttcctgttttttttctcttttttttttattatattgtaacttattaatttattaaatagacttggaagtaacaaaaatatttttacaaaagtaaaataaaaaataagtaacgtaaaagtatttaaataataaattacggaattaatataatctaaaattaaaaacataaattttaaagtaaaaaaattatatattaaataattggtaaataaaatagtagtttactgtattatatgacaactcattagattcgaaaataaattttaagattacgcaaatgtagttcaaataaaaaaaatagcacaatataacttaaaattagttaattgattattaagatatttacaaataaggttttagaggtaaccaaattgtatatcaaattatataatttaaaaataatttttttttacgtgaaagtaattaattagtttcttatcagcattataagtaaccaaaatattatttttaaaaactcaggaaaataataaaaaaaatggaatttagaattaattttgtttcaggcatattattttaaaataatttttaataacgtgataagatattattgtaattgaaatttattaaagtaattttgtaaataatttatatttttaagtatattattgaaaaaattcattttttaattcatgttaaattggtaaaacccagtgggaaatacaagcgtgtcgtacacagtacatataggcccaacgcatatattggaccaagcacaataagcagtaccaaaagcccaaaatacagaacaattagggcattttacaaaaatactggatttggggtaatacttttcaattttactgccacacggcagaattaacatttatactgtcctccccccccccttttttttttctcctttttatactgtaaatatcaaaaaaaaaaagtaatgaggcctctatctttcacaaccacaaacaaaatcaccacaacaacaccaggacagccggaaacaaccattaattctgacaatattaagcaaaaacagtgaaattaacatcaaataaataatcatgaa

SEQ ID NO: 350578 - DNA, 423 bp, Cannabis indica
tcatattaggttgttaatcaaacatacttgttagtaaatctagatcctggtaaaataatttaaacattggtcaggttagttcaacatttctttacttttagtgaatttcctgacttcctaaaagatacgcatatcgtgttaataccgaagaagtcaagacctgaacatacgagggatctttggcccacaactttatgcaatgtaatttataaaattatttcgaaggttgtggcaaacagattgaagatggtgttggcagatgttatctctgagacacagagcgcttttcttctagagtgtcttataaaagataatattttaatctcttttgagattattgttggattttatgccctaaataaaactcatttcaatttaatcagatttacttattaatatagatcagaaataacatttaatgtt

SEQ ID NO: 350579 - DNA, 807 bp, Cannabis indica
gagataggagtcagctggaatggaacaatcccaagatagtttatgtaatccttgaagtagtctcgaagagggagtatggcccctgcactgatatgctcaaggctccaggcgcccatgccagtcgagccgctgaaactggtcttaccactggcccctagggtaccgcttgaaaaacgcgcaagggggtaacagctaaactcaccctctcgcactgacctaactaggcatgatcgcccaagtttgattccacgggtcttcaatatatcacctgtgtagcctgagatagatcgcaccttcgattctattaactcaacttcaaaagtgactctgggatcctgggagtctttgatgtacgtggcttgggagacattatttcaaagtccaagtcgcctgattcaaaagcaatcgtgacttgggtaaaacaaaggcttagccaaagaaataaaggacacactgggagattctggccaggccgcatctcgcaagaaatggcgtttgccttcaatgatctcttacaagaagcgcctgtaacgacttgcattatcttccttgtgggttctcactaaatgttccctaaccctagcatcgttcaactctaatttggaggcggcttttcaagggttgggtttatacgtgatggctaatctgtaggaaactcaagttctaaatcttctggacaataaactcttgaaccaaagtgggacactgctgcaagtagaaagcagtcccaatccctggagagaattttatcaaacctgaatgtggtgagtttgagattctgaaaaacctacgtatttcctaaaccct

SEQ ID NO: 350580 - DNA, 511 bp, Cannabis indica
atgtaatccttgaagtagtcttggagagggagtatggcccctgcattgatatgctcaaggctccaggcgcccatgccagtcgagccgctgaaactggtctcacatctggcccctagggtactgcttgaaaaacgcacaagggggtaaaaactaaactcaccctctcgcactgacctaactaggcatgatcgcccaagtttgattccacaggtcttcattatatcacctgtgtagcctgagatagatcgcaccttcaattaaattaactcaacttcaaaagtgactctgggatcctggggagtctttgatgtacgtggcttgggagacattatttcaaagtccaagtcacctggttcaaaagcaatcgtgactttgggtaaaaacaaaggcttagccaaagaaataaaggacacactgagaggttctggccaggccgcatctcgcaagaaacggcgtttgcctttaatgatctcttgcaagaagcgcctgtaacgacttgcattatcttcct

SEQ ID NO: 350581 - DNA, 687 bp, Cannabis indica
tttttgagaccgcgaattgattttagactaaaggcattttcagcttcactttccttatgcctttctcgtctactttcatatgcttcaagagagcccattagttcagttggtgatagagtttctaaatctttagtttcctctatcacagaaactattgaatcatattttctgtacaagaaattagtatcttttgtactatattcttgtcagaaattatttctccataggctcccatttgatttactatttctttaattctagaatagtaatcttttgcagtctcattatctttcattctaagattctcaaaatctcttctaagcttttgtagtctaactgtgcgtaccttgacggttccttggaactcctcctgcagcgtgtcccatgcttcttttgctgttgctgcgcccattattcgtggaaaaagattgtctgccatagcttgttgcaagcaatataatgcatgagaatccttttgttgattatcctcgagtgccttcttttgatcttccgaaagagttgtaatatcttccggaatagtgattccttcttcaacaattttccatagattttgtgatcgaaaataggtcctcattttgatggaccaaaaatcatagttttctccatggaaaattggaagaggtagtgaagagcgattgtactccgaactcatgttgatgagtggaa

SEQ ID NO: 350582 - DNA, 1405 bp, Cannabis indica
aatcagtggttccgtcatatggcgagacatgtgggtttttgaatcccgaaggaaagggggtattcattatatctggatgataggcctcaagctcctcgtcagagttgtattcagatggtttccctaattcccccacttgatatctcctgaacttgtcctttaggtcgtttatccgcaattggattggatcctcttgctttggaccaagctgttggcaaaggtccagtttcttccgattcaagtgctctcacatatctagttgggagtaattgctagaagacctagtgttactcacagatcgtgtcctagtcttagactttggcattgagtggctcgcagatttactggttcccatactttctcgatcattagctcgttaagtactttcttctcttcgagctgatcgactgtgagttcttgaccgcctcgaggtcacacttacttcttcatgctctgctctttcccccgagagtagtttttcgtatttctcccattagggtttgtatgagtccttgctctatgggtttgggaagaacgcttgtgatttctggtaggtgacctccattctcccgattgagtctcaagatcctcctcattgtgatgcggggtttctcgttcatcagtttctggttgtcttccgtctggctgttcgttttgatttttagggggtgtctcatttttctctgggtttctcttctagggcattttcctgtcccctggttcatgagccacaaggtctacctcgtggtcttctcactccatgttcaggttgagtttgagcatttgtcccctgtgctgccctggccgaggctgcatcacattctaactcagcgtttcgatgttgtgcctcttctagaaggcatctgaggcggcagttttccatttcataagtatcttcttccatagactgggcacctccatgattaagctcttcatccctcgtcttggggttctaaccactcccatgcgtatttttcttcgagtgggttgttcgtgtactaggaccaacatcaggttgggttctccgagaacgtgtggtccgtgcactggagccaccctcaggttgagtcctcctagaacgggtggtctgtctagaccgcaggtttgtagacctcctagatcctatgggatctttcccatgacgatgattagtttcctcatgtggggtgttaacaccttctggatttttcagccatgaaggagatggtttttcttcaaaagaagggagggtttttctgagctttttctacagaggctctcaatgaaagcaccaaactgttaacgcagattttcgttagctaaattgagcctcacagtagtaatttcacacagaaaaaataaaagctatagaaataaaaatatgaacacagggtttttttacgtggttttgcagttaaaattctac

SEQ ID NO: 350583 - DNA, 964 bp, Cannabis indica
tcttactcagatcgcgtcttactcattgactttatctttgagtggctcatggatttactagttcccatactttcttgatcattagctcattgagtactttctcctcttcgagttgatcgactatgggctctggatcgcctcgaagtcacagcttcacgctctattctttcctcttgagagcgatttatcgtctttccccaatcagggtatgtacgagtcctcgctctatgggtttgggaagaatgttggtgatttctagcaggtgatctccattctcccggttcactcccaagatcctcctcattttcatgggggatttctcgttcatccatttccaattgtctcccatctggctgttcgtcctaattttcaaggggtgtctcattttccctgtgttgttcttcccgagcctttacctttctcctggttcgtgagccatgaggtccgccacgtggtcttctcactcgaggtttaggttgattttgagcattcgtcccctgtgccaccattgctgaggctgcctcacgttctaactcagcgttttgacaatgcgcttcttccaaacagtgtcttaggcgacaactttccgtttcataagttctttctcccacagattcggcacctccacgattgtgctcttcatccctggaggttctgaccattcgcacgctgagttctcctcgagagtgttgtccgtgtactaggaccaacgtcgggtcaagttctctgggaacgcgtggtccacgcactggggccacccccaggttaagccctcctacaacgggtggtccttctggactgcgggttggtagatcttctagagcccacgagctttttcccagaacgatgattggtttcctcatgtggggtgttaacattttctggattttttgccatgaaggagatgatttttcttctttgggttttttttgagctttttcacagaggctctcaatgaaagtac

SEQ ID NO: 350584 - DNA, 730 bp, Cannabis indica
agatcgttgttcctctgaccggccaggccttggaacatattttttagttcgtccaactgtgcctgcatagctggactaacttgttcggcctcctggcccacctgagttacatcaacatctctttgagcgggattttgagtgcgggttccgggttgcacgattagcgcgtcaagttggttgtccactcctctcctcctgtttagatcatttctgagatcatgagtcatccccaacctatcaaatacggaaacgcctagctgcctcagtgactgattggtttggccaatttgctgaccggcaccattaacttggttggaattattgggtatgacttctcttgatgaattactagacaaggttttcccacctaccacttgtcccacaggtaaaacctgtgaccaaggatttggcggctgaccgtttatagtctgagaagtattcatcgctggatcttcgtctgttttgcccaaggggatgacagtcacaagctgttgaccggcagtcagataggctttttgtatcagcacagtggcctgtcgactacgatcgtcaatgactgcttgctgagcccttaacgtttccatcaccttatctctccattcaccgaacatgtgcctctgctcttcaaatgtgtaattcaccgtagcatggagttcctcctgatcatgatgcagggtgttagtatggccttgcatgattccaagagcagcacggaggttctggatttcag

SEQ ID NO: 350585 - DNA, 598 bp, Cannabis indica
taataagagcataaatcataaatttttagttgtataattgtgatttcatcacatttggttttttacacagcatggcatgagaccaaagctaaacttagtattggtgtggtgtctccctattttgctgaagttgttgcaattcaagagaaggttggaaagaagtatgactatattaatggctttcgagtgaaagtgaaaacaattgacgggttccagggtggggaggaagacattatactaatgtcaaccgtacgatctgatatagaccagtcattggatttcatatccaaaccttagagaacgaatgttgctctcactagagctaggtctgccactgatgtttttccccaagcatgttgttgcctggttttcataagtgtgagtaaaaaatgtctgttctattgatgtgtccaggcattgcttgtggatacttggtaatgaaagaatccttgctaatagtcaatctatttgggaagctctagtcattgatgcaaaaaagcgtctctgttctgtttctataatgctgatgaagatgtgagtttggtgaaggctatgttagagataaagaaagagcttgatcaattcgatgatcttctta

SEQ ID NO: 350586 - DNA, 503 bp, Cannabis indica
caaaaaaagaaataaaaaaaatagcgttatgtatttaagagcagtagtaagagtgagaaaaaaattatatacaatatagaatatatgagtatgttgatttaccttgatcattaccattctatatacaaataataattgatgagagcttataagtaaaaaatgagttaatgttagagctcgatccattcacttctagaacatgggacaagaagtaaatctggaagagggaaaaaaccaaaacaaaaatatgagttaatggaacaacccaaatgatatttatcatattacccaacacaataatattttcataaaattaaaaataattatatataaatatatattataataattgttcaaacaaatcctttagagcctaaaaggtaggagtttgaattaacaatcgactactagaatggtatcctacatatataatgggtgactattgttacatttttcttttacctataatagcaagttaaatttttttttagaatcaattaatt

SEQ ID NO: 350587 - DNA, 660 bp, Cannabis indica
accaattctcaaagatgttattgttctgcagaaatgagagtctcaaaattctttattttcgagtgagtttctcatgtttaaaatgagaaatgagaagttgtgaattttacttctctgaattcatagatcttagtcattgtgaaaaactagatagatagtcaaattggaatcagaatcaaataagcagaactcaacacatcaggtcatttgttaacctaggcgctcggtacttcatttccaagctcttgggatgttgttttgatccttctaaggttcttgaacttgaggacgagatctcttaccttgttttttaccattttagattcaatggtcgaatcagatttgacatttgagtgattaaaaccagtgcaccaagttgattgtcaacttaggcgctgggcccaacaataggtcaacttgggagctcggccctgtgtctaaggtttcagattgtggttttctccttgagtttgcttgaatcttcattatttctaatgacagaaaaaatacccgaaacacttttttgagaacttgtttagaaatagcccaggttgataatatgtcaacctaggcattgggtcccccttttggcccttcaaaagttctgtttgctccccgaaaatatttgaatcttaatattttctaaaaatgaagaagatg

SEQ ID NO: 350588 - DNA, 634 bp, Cannabis indica
tagaattttccaaactatccaataaaaataattccagatacagacaatcaattatttttcccagaattcacaaacatcaatcaaacatcaatatgacacaccatgaaaccatccaaatcacaaacaaatcgttttaagtccaaatttcttgcaagcaaatcaattaccatggctctggtgccagttgttggaaatatattttaccaggaacttagatctactcacaagtatgttgatttaacaacctaaaattgaacttctaaaatgatgaactaaacacataaaagttaagaataacttacagtgatggcagcggaattaagtgtctcctttcactcagcggaattaagtataaccatgatctgagcccaaaagttcttcagttggatgtgatccttgacagtcttccaaactatgatgaggtactgagtgatgtgtgtgggcacttctctctcactaggattttcaaaaatctctcttgtttttcccctcttgatttcttgtatagcaatgcaaagcaaaagcttgtaaaagcacaccaagagtagagaggggggcagctataaataggaaaagggaagagcacaactttccaaataaacagtttcctattttactgtgtaattgaagaact

SEQ ID NO: 350589 - DNA, 925 bp, Cannabis indica
aagcggatcgggacccaagaatacgactaggaccagtacctggacccaaacccaaaactgtaactggaccagggtgcggactctgacatagacccacactcggattctgtgtctgcgttctggtttgggtctgggtcagggttggggttttagtccttgttcgagtataggtccacgtctagatcccgatttgggtctgggttcggtccaggtctaagttcaggtccctagtgcgggtccaggtttgggtttgggtttgggtctggatctaggtcctgatccaggtcccaagtttcgatcttggtctgggtctgggtctgagtccaagttcgtaccttaatccctatctaggtccaagtctgtatttgggattgggtcccaaatttaggtctaatccaattctcggttccgatctgggtacacgaccaggattaagcctgagtttggttctcagtttggctcttgggcttggtccaagttcggttctaggtctgggtctgggtcctggtcagggtcctagtcttgttacacggtcctgatccggcagttcttgttaggtgctagtttcgggtcctgggtctaggtctgggttcgggtttgggtcctagactgggttcaggtcctagtctgagtcccagattcaaacatcgactacgggtctgttccaagccccagttactggatttcgattcaagatttggatccctgttaccggtctaggtctggttctggtcctgggttccaagtccaagtttgggttcgggattgagaccaggttcgattctaggtcccagccccggttgggtgtcccgagtctggttccatgtttgggtctgagtttgggtcagggttcgggtcccgagtccaggtctaggtggggtagtctgggttcgaggtccccgtttgggtcgtaggtctaagtttg

SEQ ID NO: 350590 - DNA, 775 bp, Cannabis indica
tctctaaaatttacaagaattgtgtactgtaaataatcttacctatgaactatatatatatataaatatttatataggcggttgaaagatgtatttactgcaagctcttctctttgatttatcattaatatgaagtctctttcaatcttaagtgtaacatgttttaatcataattttaagtacagttcataagtacttctaatattactaattttttagtattattaataacaatgtgtacatcataagtttatatatacaattatgacattcttaacaagtctatttttataaaacaaataataaaaataatttacaattagttaccgaatttttttaaaaaaatcactaaaacttaaataaagctaatatttacgtggctcgccacgtaactttcgtaattgcagtaatgaagcagtgttagtatacattgtggctttataatgagcagatgagatttcagttagcattgttaaaattcatgacttctggtaggctgacagtggtagcttcttaggaatacttgtacacattaattttaattttgctctattttagactccatatctaagattggtagtgagaatgttcattcaagtgttagttattcttaattttgtaatatttgtaatatatatctaagatttcttcttggtagtgagaatgttccttcaagtgttagttattcttaattttgtaatatttgtttttccaggtcaaagatgttcttgctgctattattttaagaactggaacaaatgcaacatatattata

SEQ ID NO: 350591 - DNA, 649 bp, Cannabis indica
tttatcatttaacaaaacacagggtccaatttgtaacttttgtaaaacagagggtctaaaatggtatttaccctttttttttggtaaaatatttatatttttacgttcaaagaatgtttttttacacttttacagttttccaaaaaataacacgaaaacaatataaaatcaacaagaaaactacataaaagtaacatgaaaataacaacaaaaataacatacgtgtaacaaaaaatcaacaacaaattaataagattacaacataaaaagaccgtattttctgtaaatgaaatcaaaaaaatcgtaaaaatgtttaaaatttcgtgaaacagtatttttataattttttttgttgtttttatgtttttgtgaaataatccctaaaaagtatgtgggtagctaagaatgtgagccactaaattagtttgtttaacaaaatgagtgatacaaattaggaatggcaatttgggctttttttcgcacttgattcgagtttttattaggctcacggcctagcccgatacatactataagtttacttttttactgtgttttttataagtttcatactgcagtatactatgttaagttttcactggtgttctacgtgtgttttttagttgttttactatttttttgagttgttttg

SEQ ID NO: 350592 - DNA, 661 bp, Cannabis indica
catgttgtttttgttctgtgcagacatgtctcagaagatgcttgacgctctaaagaggagaattggcagaagtaccagtgcatctcctccagccaagaagtctaaaggcggtgatgggtcttcttccaaggaaaaggcgcctgtcggggaggtcattgatctttctgaggagctagcggttgcaagcccctctactccaaaagtttccaaatccaaggagtctcgaggagggagttcggacaggcctgaacaaccgaggagtgggtctaagctgactaagaatggacccgaacagatgcggccccctactcaacctttgtcgatgcttctagaggccaataagggtaaggagattctcgcctactatatgaaccggttggatcctgaggttaatgagcaactagtggcgctaacaatgactcttctctggagctgctgatgggcggagttttgaaggaattcaccaggttaagtctttcttgacacttttctttaagcatctttacttggctaaaatactaaagtttttcctctgtgcaagccggtctaaagttggcctgatgaaattcattaaagataataaaagcatataataccgggattaaaagctgcccggtcagcccattgtctgtaaaatgaaaaataattccaagtttaaaga

SEQ ID NO: 350593 - DNA, 687 bp, Cannabis indica
caaaataaataacatatatataagcgggatcccgtgtataaaatatttacaactgatacaaagtacgtaatacaaaagttgtcacctagcgactatacaaaacataaccacctgtcccaaagatcgtacgcttcaggtctaacccccgacatgtacaatcttcattcgctcactctcatagctgctcaatcttagccttgcccttaagcaataactgtgagtcgacaaactcagtaagaaaagcataactatcaatataaatataactcagattataatcaggcgcccatacacccaaccataaccctatccttgtgtccaatacgatactgagtctataacgttcgtacgataatactatcgaccataatatcagcctatactcagtacgctagtcatactctagccgtaccaatgtgatagcatcgatcagtatctgagcccaacatacatctatcagcatctaatataactctacatatactgatactgttatcgatgtaatctaacaggcttaataaacatgtgcgagaaacacgtaaacacatatgcatattattatactaatcttacctcgtttccgaattcaggtgtaccgactaacctgagtaaaactgctgctcgacgatttataggcccctaaatcacattattcaaaaaactaatgagagacacgctaaatcactt

SEQ ID NO: 350594 - DNA, 755 bp, Cannabis indica
attggattggttactttttgaggtcaaacaacatccaatccgcacttgtgcggattttggattttccaatccaatccaatccgcacaagtgcggatattcgcattttgcggattggattggattggatcgtgcggattggattggatcggatactttgtgaacacccctaatttatcacattattcttcatactagtgagagtactcgtgctacgcatgttaggtattttttaattttcttttaaacaataattattttgaaatgagacacattacttgttataatgattaaataaatatttttaaaaaataattatacatatttacagttaactatatacacattttaatatggaggccaccgattccatatcgtccagtacggcagcggaacggctcacgctcataaatataatatgatatattagttgaattcaaaaaaaaaaagaatactacagctgtatttatttcaaactcttctggaaagctagcataggtgattggtccacaaaatattttgaaattacttaaaaattggtattagactattttggttaccttatgtgtttttttagtttaaaatatttgttcttgggtagcattgtcattcaactcatttgttgatattttaatttgggggagttatatttacaccctataaaattataaatacactccattattaaaaagatataaacttaaataatttttaaaaattactcttaatattttttaaatttttttcctcacattat

SEQ ID NO: 350595 - DNA, 516 bp, Cannabis indica
gtctattaatgccttgatttttcaggatttgcctcaatacccctcgcgttaactatgaatcccaaaaactttcccaaggaaactccaaaggaacattttgtttaggtttagcttcatgttatactttttaatattttgcgaggtctaaggtatgatccttactcttaatcaatttcaccaacatatcatcaacgtgaacctcaatgtctcaccctattcgatttgcaaacatttcatttactagtcacttatacgttgccccagcgttcttcagtccgaacgacatgactttataacaatagagtcccatgttggttacgaagcttgtatgttattgatttgggacgtaaatttttatctggttatatccagaataaatgcgtccataaacgacataagctcgtgcccaacagttgcatccactaactggtcgatcctgggaagtgtaaaacagtcttttggacatgccttattcagatcggagaaatcaatacaagttctccaacttccgttagg

SEQ ID NO: 350596 - DNA, 668 bp, Cannabis indica
atatgcgacccgtttagttacaggcattccacgagttaagaaccccgagaggttcatacatgaatgcccgatacgcgatgcatttagtcgcaggcattccatgaattaagaaccccgagaggttcatacatgaatgctcgatacgcgacccatttagtcgaaggcatttcacgagttaagaaccacgagaggttcatacatgaatgcccgatacacaacgcgtttagtcacaggcattccatgaattaagaaccccgagaggttcgtgtgtttatttgaaccccaagaggttcatacaacaaagaaaaccctgagaggctcctccatttattcaaacttcgtaaggttcataagaaccccaacaggttcatgtagcgataaaaatcctacggggtccgtgcatcaatgcgaaccccgagaagttcccacatccaaaagaacctcgcgaggttcacatttttattatgtcatgatcttatacgaaacctgcgactttagataatcaattgaaaatgtgacacacaacatgaataaggcatcatgatcatcaaaaacgacggcctcagactattttaagttacttccagcacagaacgagtaatactgaagaactagggccatgtgtataggcataaactctaccctccgctcgacgaagaactgtctat

SEQ ID NO: 350597 - DNA, 554 bp, Cannabis indica
caataacacctattcatgcttttttataattatttttagcaataatcaaagatcaaaacccagggaaaatgacctcaaactcaaaccaagagcaagcttaagattcaacaagaacaaagctacaaacaagccaagattcaagctttcttcccaaaaatcaaatttgatgatcaagagggtttgagtgagagagagagagagagaggtcgggtgagagggatacacaagccagaaaattcctttgttttcctcaaaattccattttgtcaaacatagtaaataaaggtcaaatgaccattttgcccctagggccaattaacacatatattcaccctcacaagggtatttttgtcattaaaagcataattaaatccccaattaaattttagattatcaaatatcaaataaaatgccaattaattcaatccaattgcatttcaggcccgaaccctattcggcccgaaatacccggctgtgactataccgcgccaacctgtcaaaacacacttgaaaagacaacacatgcatactatataataatatagttctattaa

SEQ ID NO: 350598 - DNA, 765 bp, Cannabis indica
atcaagtcaagttcctcaatgtttctcatttcttcaattgaggtcactttacacataaatcttcttgggaggactccaagaacttttcaaaccagttttgactttgagtaggtttttcctagggcataggactcattggagatatcacacaagtttgcatgaaattcagctattgactcatcttcctccatggtcagattctcaaaagccttggccaaagcacgcagccttgatttctttgcggcatctgttgcctcattttttattttcagcttctcccatgcttcctttgcaatttcacagttagcaatgacctttaattggttcgtggagacagcattaaacagtgcatgcctttgagttgaatagagccctttccatttcgtcagaggtccatcggctcatgggtttaggtgtaaagaccgcttagatttaatttagaaattagcagataattatggctttattatgaaaattatttattacgattgaattaattatttatgatgatttatttgaattcagaatgcgtttttatgtcacatatagaattttcacaattttgcatattttgtgcccgacaacattggaacacgatgtatggcttttgaatcacatcttagtatttttagtatagcaggacaatagtttagacattgggaatgtcgggaatagtcaggatgttagagtttcccaaataccccttagtgccattttatgatttttagtatgggaggggcaaaatggtcattttgccccataagc

SEQ ID NO: 350599 - DNA, 710 bp, Cannabis indica
gaagctttgtgggaaagcaagaagtcagaaaagaattaagttgtagttcttgtcaaaattaataataaaataaaaaagaaaaacaatataaatagtgaattaataataatagaccaattattccatttataatattgtatgtcacatacgtgcttcctattcctttcctttatttctttttttccaggcactctatcttgcaagaatattttcttgaaattgtattaagaagaaaagaaaatgctacgtgtgcagctagaagcataaattccaattaaattaaattctattatttggttaaaaatagggataaattatctggaaatattttctttacagtttggcacaaaaaaggcaccgaaagatagagttagccagactttctagcatatatataaataccctgtaaggagagaatttaatttcccattgaatatatatgtatatttaaaaacttaataatatattttggttgaaaagctttttggcaattaactaataagttaagcaactataatgaaacgagtatcaaacctgtcaaggaaagttattgggtgtgtgctattactggatttactctaaaagcaattattaataaatccaaagcaaattcaaagttgagcatgcatatgcatgataaagtttttgctagttattcttgagaattatggggttccatctcaaaaccaattggcaatgagtggagtagc

SEQ ID NO: 350600 - DNA, 752 bp, Cannabis indica
tacagaagagagtcaagcctttggagctcctttatatttctgatggtaatgtcatcccaaacgggagcagatcgggcaatttccaggtctttctcaagcttggtgatgtgctttttaaaattaaagtcctttctatggctccaattgttaagtttctctacgcaggaggcttgagtcgagactagcttgaggatgggttcatgctggttcggctggctagtccaaaattggtctaaaactcggtcccaatttggatccttaagccaaacattctcgaagtgaaaacgtttgttattattattaaggcaagtgcccggaggattagaagtgttaatttctagggcgcggtggtcagagccgtagaatcccaaatgggcaagggtggcatcagggaagatatctacccagtggttattgacaatgccccagtctaatcgttcttgaatgttttttggggaagcgacattattattccacgtgagtaagggtccagtagggtcaagaggggagagattaaaagagtcaagaaaatgtctgaattccgaggaagggcccctatcaggatttcccccttgtttatcatgggaaaagagaaaagcattaaagtccccaataataagccacggatcccgagggttacccctaccaattcggttaagaatattccacgtatgaggcttgagagaatcaaccggggagccataaaaacaagtaagatggaaggaaacgttagtaatagaacacgaaacgta

SEQ ID NO: 350601 - DNA, 596 bp, Cannabis indica
ggacattacctttatatattaggattatttgatcatgagtttatacgttttcaatgtgccattttaaatattttagtgatctagttataatcttaaaaattgaaccattaataatttaaaaataaattttttgaataatataaacaaaatcacttgtagattatatattttaaaagattaaaaaaataaaaaaaaaataaagcattttttaaagaaaaataaaattaataataaaatagagggaattactatagttagggagtgaatagtgatgatgacattaatttcgaatattacatgtaagaatgtgtgtatagatcatttctttcgagcaccttttttctaaaaaaaatgaagttgttttgaaaatgttgtctttcaattaatataacaattgtggaggaaagaagacgaagacgagtcactaaagtgactcggtgacggtctcgcagcacgaggattgtagtatttgcttccgtgagcatgatgattgtgtagtgagtcgctaaattgactctagcatttttggtccaataatcaaaaggagaagacaaagaagtcgttggaaaggtagatgacatttctgctctttcggt

SEQ ID NO: 350602 - DNA, 755 bp, Cannabis indica
aagcagccagagtggcgtactcgtgtataagagccattcattctgtgggtgtaaggacccaatggagggttgaagcggggacgttacaatattgaaatgagttttatttagggcataaaacccaacaggaattgctatagtaagggagtgaatcgtgatgatgacattaatttcgaatatcacatgtcagaatgtgtgtatagataatttctttggattttttaaaaaaaaaatgaagttgtttgaaaatgtgtgtttaaattaatataacaattgtggaggaaagcagaggaagacgagtcactatagtgactcggtgatggtctcacagtagaaggattgtagtattggcttccgtgagcatgatgattgctgtagtgagtcggtgagtcgactctagcatttttggctcaataatccaaaggaagaacacgaagacgagtcactatagtgactcgccgttggaaaggtagatgacatttgtgctctttcagtttccttccttgaagttgagagcttagacccgagttctttctttgaccgagatttggaaccctactgcgagagggatgcttcacgagtcgggcttctagagatgaggccttttggaaaagagaagatcaggcaagtgggggtctatgcgtgcggctaaagaggaatcttgatgtatgaacatgaagttgaaaggaagagtaccacaatcgacgattttggagcctgaatcttcgaggaccagtggctcgggtatgtagaaa

SEQ ID NO: 350603 - DNA, 572 bp, Cannabis indica
aaaaaaaaaacaaaaaaaagtgtaattttcaaatttcaaaaatttcaaaatatctacatataaaatgtatatcgatatttgtgggaaatgactcttaaactaaaataaaatatattctaaaaattattctaatttaagttgatctgaaattaaaaatttcaagctaaaatataattttccatttaattaaattcattaaaattgaaataattaagtatctagaataaaatcaacttaattattatttctaatttaatatctaagaaaatattataatttaagttgatccaaaattaattttcaacttaaattttctgatttaattaaatttcaagaaatagaaataaataattaagcatcttgaataaaatcaacttaattattaatttgatttaagttctaagaaagatattctaatttaagttcgtcaaaaattaattttcaacttaaatatatttttctacttaattaaatattagaaaatataaattagttactagaaatcgctatctagaatatttcattaaacttagagtgtgttttctaaattaattttaaaataatccaataaa

SEQ ID NO: 350604 - DNA, 573 bp, Cannabis indica
ttgcaatccctgtggagacgatcttacttatcactttattacttgtgtgactgcgtatacttgcgtatataattttcacaacaagtttttggcgccgttgccggggattgaaactaaaaattgtgtattatcaactattttgcaatttattttctggtttaaagttttaatcctatttggtgcgctgaatttttctttttcaggtgtaatctagtgtatgaacgagcaagaagaagaccttgaacttgctcctattgaccccgaaattgaacgcacttttagacaaaggaggaaggaacaaaaggctaaaaaacgctgcaatatggccgatgggtttgaaattgggggtgctcataatgaagccaatcctattgctttggccgatgatagagcccgagcaataagagagtatgcagcccctatgttcaatgagctaaatccgggtattgtgagacccgaaatccaagcacctcactttgagctcaagcccgtcatgtttcaaatgctccaaacggttggtcaatttggtgggtcgccaacggaagatcctcacctccatattcgctcattttt

SEQ ID NO: 350605 - DNA, 806 bp, Cannabis indica
tggctgaaccactataactctcttattttctctttatttttactttcattttgtcagtttagtagccaataatttgagtactcgctaatctaagtgagtgctcacacatctacagttgggtattttaattttcttcaaatactcgtataaatttggtgttgtctaaatattagaaatattttaccaggatctagatttactaacaagtatgttgaattaacatcctaaatataaattctctaaaataatgaaaataaatacatacgggtttaagaaaaccttacattgattgcagcagaacataatgactccttccgtttaagatctctagcccttgattcctttctgtagcagagcattatcaagatctgaaactggatctctttctctccttcgggtttggttaccattgtcttactcactatgattgagtacttgactttctatgtgtgggcataacactcattcactatgagtttcgaatgtgaagaacaatgaaggaggttgaaatcactaaggaaggaactctctcatctaggttgaaggcaatagttaaattgataagaagatgagatgagagcatcatgttccttatatagtgtttaaactaggacttatggctgaattatatggattaaaaaagaataaaatattgggcgaaaatcactactaggccgtacactcaatgaaccagtctctagttagatttttgccactttatttcaaccacttattattcttttcaataataccatatttttcaattcaatcctatagccaaaactattatttaataattataatta

SEQ ID NO: 350606 - DNA, 853 bp, Cannabis indica
atcataactatgccattatttacttgtatctcttgctttcaaggagttgggcatgttttttagtagattgaatgtttaacttgttttgactatatgaactttcatcttttatgcattttgaaatttttccttacctattgtgcttcattgatataagtaatatcttgtatgattaagggggagaaatatatttagtttgaccttgcttcctatgctaccccttctgatgaaatcaaaaggggtagaaatatcagaattaattattttggcattaatcatattatactttcaagtattaacaaatttattgagtatatgattaaggtggaactttgtcatgtcaagaaaaggtaacaataaatataaaaagataaacgatataaatcaatatatgcatatattaagggatagctaaactcaacatgtttcaatttacttttcttttcttttaaaataatcaaatagtttgatataatcaaaaagggagagaatgttgaccaaaagtcaatcactcacttattttgatgataaaaaaattatttgattgttacttgttactaatcttttcttgatcattttgcaagcaagttcacaaagtatcagtatttgttcggtaaaatcaaacataatcaaagaagtagatcaataagtatatcaactacttcatactttataagagcaaaagtttcatcaagagatcatgaattcaagaccctatctaaaagaggacttcaaaagctcaatgtcaaaagccaactaaaaagttaaagtcaactattagagaaaagtcaactttggatcaaaacatgcaaatcaagctaggaagctcacctacatcaaggttacacacaat

SEQ ID NO: 350607 - DNA, 808 bp, Cannabis indica
ctaataatagcataaaaatagaaataggaatctttaaaaaacacatttttaaaaaaaaaaaccagaacgaaaatgtcaaggatgtgggattctaccccgcccaaatatttcatttttccttttcaccaaaactatcattcccataaacttgaaaactgtctctctctagccacacacaatctggctcctctcatcgtaggcggtatttctaatctttaattttgattttttttttcattattttcctgagcttcacaatttaaaatctaacaatttgatttgaattttcttttttccagcttttgaagctgaacatcactgattttgcttttgattatagttgtgggtcttgtggatatatttgaatttgctacacatttctacataatttagtctagaaatttctatactcttgtagaaaaattatctaagaacttaagagaattctagattagattaagtctagaatatactagtcatgttgaactctagaagcatttagatttggttggatataattccttctagtaaaagaaggatctagaagaaataattctaaccataaagtgtaaggggtgagcaactataaataccccttcaatggttccaaattgtaaccaacacccaacaacaaacatctaaactatcaataaagcttactaccttctcatacaatcctctcttctaagccaaaactattctcatatactaaatcaacaactactcatcaacatcactacttcaattaccataacaaccattaaacacgtattcctcatatccacctattcaaatctaaactaataca

SEQ ID NO: 350608 - DNA, 553 bp, Cannabis indica
tactaatctttcttgatcattttgcaagcaagttcacaaagtatcagtatttgttcggtaaaatcaaacataatcaaagaagtagatcaataagtatatcaactacttcatactttataagagcaaaagtttcatcaagagatcatgaattcaagaccctatctaaaagaggacttcaaaagctcaatgtcaaaagccaactaaaaagttaaagtcaactcttagagaaaagtcaactttggatcaaaacatgcaaatcaagctaggaagctcacctacatcaaggttacacacaatcaagtggtattagtttactttagtcttgttaaagtgatttttatagtacactaggatttataagtttaaaagtttggctcactaacttgtgggacaagtttggctcactaacttgtggaataagttataattgagagtgcaattccaaatctataatggtgcaaggaggaaataagttaaggaatttacttggtaaattctagatctgcttattataagctcgattataaaggtccatagtccccatactagttga

SEQ ID NO: 350609 - DNA, 1233 bp, Cannabis indica
tcttccctgcttttatctctcctattgttcatcatgactccagttttgaatttctttatgactccattctttctttaaggaatttatttataagctgtccatcttagcatatgcattttgttcactaatttcaggttctcgactagttttaccgggtctattttaacaagaatctaaccttggaagggagttgttctggactagtgttttcttataactttagcttcggtctttgtgagatttttggttcatgaatcatgttgttttgtttgaaacttctttcacggcttcaattgttttatcagtctatttaaacaagaatcggttttagtgagatttttggttcatgtcttttgttttgggtgttcaatgaattttcaggatgctttaatcatcatgcttcaagttgtaattgtcttccgcttttccattcttatcactacgggctagatatgtttcatcacctttttagctcttggtattgcaaggctgggttatgctttgtgataagtgtctattttcacataagattgttctcccgtaaggccagataacacttgcttggcccaatttatgttatttgggttcactgattgcctttaaacttctatttggaatttacgtgtctctcgtcggaaacacagataacagttatctaaacataacttttaagattaaagggcatgtatagtactgtgttttatctaaatacgtattttaataatactaatctagtattgtgtattttaaaatggtacatatctcatcaggtgaactcaaataaaatcaatgaaaattttaataacgtataattgtgagtagtttgctcataactttaaaacatatatgtctagtttatgtctcaattcaaagtttgatttatttgcactaagacggttctaaaaactgaaactttagttgaagatgtcaactggaagttgagtgaaaccctagttgtttaggtggatttttggggtgcaagtttatgtaatttaagctctcggggcctagatttggttgctccatgtcttcatgatctagaatactgaaagatagtgagttggaaacaagttatcgaagttcaaactttcattccggagttctcgaagtcaatttttgacaattttttttttaaaaaaaccaacttgaagacaattcctaacacgaacaaatacaaaaaaatgtaaacagttttgtacataacatctttagatatgattattataaatttta

SEQ ID NO: 350610 - DNA, 689 bp, Cannabis indica
aggagaagaagaaagaaaagaaaatggggaagatgtaggcttagatgtattatacgaggattttactggacgtaggttctaattaaaactattattttaatataataaattcatactagagtggacataactaaagccatagttttttgtacggacagtaaagctatattaaaaacttattacaaagaagagaaaaagattaccttgaaagccaaaaaaagttgtttctttctttttccttccttaaaggcttcacctttgacctgattctttttatttatttttttatttttcgattaaatgggagtaaggagaagaaaggagaagtcttcactgttacagtaaagaaaaggagaaaaaagaagaacaagtgaagaaaaagagaaaaagaagaaaaagaaaagggggggaaaatgtagacttagacgtattatcagaggatttttgagtaggttctaataaaaactatatttttaatatatatttatataaattcataatagagtagacataagaaaaactatatttttttgaatgaaaattaaagctataataaaaacttattacaaagaagagagaaaagattaccttgaaagcttaaaaaaattgtttctttccttttacttccttaaaggtttcagctttgagcagattccttttttttatcagaagggagtaaggagaagaaa

SEQ ID NO: 350611 - DNA, 515 bp, Cannabis indica
gctcctacagtggatctatacaactgaacatcttcaacagggtcactgccatatgcagacagtctgaggccactggtcattggagccgatgatgatttggcctcttgcatttgagttttgacaagtaaatctctaatgtacttgctttgtgatagatgtagaccatcagtagtgtacttgacttcgattcccagaaaataactcagatcaccaaggtctttaagtgaaaactcagtgttcaaattggatatcagttgagtcaccaaggcagggtcacttcctgtgacaatgatatcatcaacatacaccaaaacatatattgtacctcgaggagaatgttgtatgaacaaggaatggtctgacttagaagacacaaaaccaaacttgcagagagagagatgtagtctgtcaaaccaagctctaggtgcttgcttaagcccatacaaagctttatgaagtctgcacacaagattaggttctgttgtgacttcaaaaccagggggctgagtcatata

SEQ ID NO: 350612 - DNA, 507 bp, Cannabis indica
accatcgagtcacaacaaatacatattagtaatctcgatcaagatcgagtcacaataaatacatattgggatgtcgatcataatcgagaccataacaatcatatcgttaaccataaatagtgcttaatacttttcttaccgcaagttctgttttaggtatgttggccgacctgcttggataacgatcgatcatcctgggccctatgtcataacggtgataaaccaataagtgtttatcccaaaacactgcttaataattgtaaaggaacacctatggtttcctaccaaaccttgggataaaagttcactaaaatgaaacttatattttagctctaaaatatacaccatatcatagagctcgtcacaagcttcgaaacagtatatagaacgtccaaaacggacacccgagtgaaaagttatggccaaatacgaaattcgactttccgaaaactaaccaaatggaattccggttctgaactgccacgaacacgattttcctcaacttta

SEQ ID NO: 350613 - DNA, 775 bp, Cannabis indica
ttgatcctgttgttgctgaggcgctgtccatgaaggaggctttgagttggattaagtcctgttgggaagatagcaggactgttgagggcttgtgtcctacagcggtattattggagtcagattgtcttgtgttggttaatgctattaatagcaagagccatattctgtctcctcttggtcttattgtttcggattgtatttctcttatacgatccttttctagttttgatatttcagttcagtttgttaaacgatctgggaaccaagcggctaactggttagctcgttcttctggttcatgtcctgatcgtatttccagtagggggtctgtcccttctggtttggaagctattttgttagctgatttgctttaatgaaagttgcaatctttgtttcaaaaaaaaaaagacacaactacatacaattggtcatgagtaaatacttacttagaaatatataaatcaatgtattgaagtgaaatatctttctttttcagttattattagtagaacgttataagaaatagaatgtgattatttatcttttttgtgatatctgactataattaattattattttttattaataagataaaatgggaagaaagggattacttatttcactatcaaaaatcttactcttagtcacaatagaacttctgactaaaagtaaaaaagttgtgaacaattataaattattattcttatgttgtgactaaaaggtccgtgactaaaagtattagtcacaaaaattacaatttgttgtgactaaatgt

SEQ ID NO: 350614 - DNA, 573 bp, Cannabis indica
ctggctatattttcacttttgttggtgctactattttttgaaaaagtgttaaatagactttaatcacatcatctactatatatgttcagtttgtcgtatgttatggggcatctttgcaagctttatggttaaagaatttgattttagagatacgactagttgattctatttcctctcctatactaatctattgtgataataatattgttattttcttttcatagaataatgagattagtagtgcttccaaacattgtgatagaatattgaaagaccaagttgatgtttgcagatcctctaaccaaaggattaagtgccatattgtttgataaacatgttgttgatatgagcattttataatcttttgttcctttgggttagtgggagtttcttgttttatcttttgagattacatttatatgtaatttacttgttgatgttatgaactactttgtgggccaatacttttttgattattggatgtttatgctttcagttaggctttgttatattctcgagaataattgaattgaaagcatgtagttcatatcttgttgtgatcattgtatttta

SEQ ID NO: 350615 - DNA, 528 bp, Cannabis indica
taaatgattaggttactttcaggttacaagttatttattatttatttttatttaatttccaaaataatcacaaccatttaatagtaatccaatggcttaaaaaaatgtaaccatgatggttacaataaaaatgtaaccattgaaacctcttccaattacccatatatataatattttatttacatacatataatattttatttataaatatattatttaaatgaaatagaaaagaaaaataaagaagttgctgtataatgtaatgtaaaaatttgagattaaataaaaaaaaagtaaaagttttgatgatatattttaaaggataaagtagaaaagctgttctcagtgctcttatcgcaacacaatttactttttacatcaaaataaaaaacacaatctactttttttttctttttaatttctttactcgcaaaaaataatataataaacagttacgaaaatctaaagatagattattcttttaatttgccaatatgagaagaattaaggaaatttacaaaaatactg

SEQ ID NO: 350616 - DNA, 690 bp, Cannabis indica
taggtgttgtatttaattatcattctattagtataaattattttgaataacctttgatttttataatacttattgatattaattggacacataatttctcttttacaaacttaattaagttattattgttactattactaatctataaattattatgatgtaattgaatggaaaagtaatttaaaaactaaataaaagtgaaaaatggagataacaaagaattagaaagaaacttcatataagatgccacctagaatgctttgtgcattcctttatatttatatatagatgttacaccgttaaatgtcaatatgtgaaagataactaattttgtaataaaatgtaagatgtaatttaatattgattgattttttattttataaaatgtatatacatttttttggatcatgaattaattttctttaaatcatcaaaatgaataattaatttctaaaacttgcttaatcttaatctgatttttatagacgactactaaaaatttctccagcatcatagtacagtataataccatttgaatatttatgcctaatgagaaaataaaaataaaattattgttaaatttatgttttctaagactattcttaattattgctaaattctttaggcctaatagacattcgacacaacatttaatttgaatttaatattttatttttgttattttttaat

SEQ ID NO: 350617 - DNA, 648 bp, Cannabis indica
ggttgttcagtttcctcatgaccatccacatccttgactgtgatttgatcttcaataatttcatcattgaggatggatgtttcttcattcaccaaattgagatcatcatttgttgagcaagcatccaatgtacccaaattttcaaccacttcaaaggattctttctcttcaattctaggctcagtctcttctatgtattcatctaatggtgcttctactatattcaaacaactctcataactttcgttatttgagttattatccttaaaactccccgaatcatgcgccattaaattatcacatagagatcttaccatgtctgtcaagtggttaatttcttctggaagtgatagtatatttttcacttcttcaattggttggggtgagtttggacaataaggagggtattggtgactccaaccttgaagtgatggatcccaatgccaatcgtaatcaaaatctgccatatcattcaacaaattcattgcttcatgacctctccttaacaaaggctctccagtaacctctgctccaaaatccacccaactttttgtttcatcatcaagtccattatagaagaacagagtaaaacacccatttgagaaattaggatagcatctcttcccgagctccttaaatctcccccaa

SEQ ID NO: 350618 - DNA, 831 bp, Cannabis indica
actttattttttggtatattctgctaaatacacaagaatctgttaattgcacaacaaaataagttagatagccattttatatattaggtaagatatatttgtcctttaagacaatatgatttattttaagagtaattagccacaaaatcattttatattttattttttatacatttaatttaatcatttatcatttttttttttggcaaaacttaatcaagtttacttttttttataaatttgaggcagtcaattaaataatcgttaaatactaactggatgaccactgtatatacttgtgtatacgtgatagtaaaatttcgaaaccaatacagtgataattcaattgatatttaaccgtgatatttaactggcccctcaaatttgtaatgaaaaatataaaaagtcttgcaataaaaaaaaaaataaggcgcttaaatgtataaaatcaaaatataaagaagttttgatgccaataatccttttttaaaattagtgtttctgttgttattgttttgtttaatacaaattgataattatttaatttatgcatttaaataactagttgggtctaacgtaatttaaatattttttcaaaaaaaattgtagcgtatctattttttatcttagtcttaaatgttttttataaattataagggtcaaaattatttatttattttatagctcttaaaaatatttagaatattttacacttttttctaaataaaatatttttagatttttctttaagagtaaaaataattaatactataaaaatacttaatttaaatgtcataaagtaaataataatttttattaattttatttttt

SEQ ID NO: 350619 - DNA, 825 bp, Cannabis indica
taagtgactgcatgatcatatataaacattgggggcaaacatctgttatggtgaaaatagttattcctttgagtccacaccatccaaagaaaacaaaagaaaatgcttaacatttgcttgtcaaaaatctcaaaggccttagaaatataggcatttacgttcaaagacctgttttctgcaaaaaaaaaaaaactaagaaaaggaagaatttttccaggcagttttaactctagaacactcaagaaaaacatgtgttactgtttcttgtgctgcatggcagaggggacaaaagggcaatggaatgatgtgtctgtgatataggttagaagcaacagggatggaattaagaagaatacgccaaacacaacgcttaaccttcgaaggaatagatgaagaccagagcttagaccaaaaacgtttgtttcccagaaaataagaagaagaagggatatctctagaactaacagcaagatgataagcagatttgacactgaatatccctgaactttctctcccccagataaggacatcaggacacatatgaccagctataggaatgtctaaaatattatcaataatgaagtcatgaaagtaacctcacagcttattcaagtcccaagaacctgaaggagaaataaaaaaagacagtgagggggaaggcagagtggctatcaaatcagagcttttaagagcaaaattgggcagccaacgatcctcaagtgtgttaatagtatgcccattcccaaccttccaaagaagccctctcttaagaagatctctaccccacatgatacttctccaggagaaagaaggactatgaccttg

SEQ ID NO: 350620 - DNA, 213 bp, Cannabis indica
tatatattttactcgatacaaacttttttttaaagatctgttgtaataataataaaaaaataacatctacgtacaaatcgattcataatatcaaaatctgatggctaactctctagtatatataggggtttttacaaaagtattaaatttttagaaaaattttataattttattatcacacgaatttttttataaaacatcaaaacaaaacaa

SEQ ID NO: 350621 - DNA, 1291 bp, Cannabis indica
actaattttttttaagaaaaaatagataatcttagcactactcaagtccaataagtaggataagtcgagcaaaattacataaaatattattttttgtaaattttttatatttttagagtattttataaaaatacaataaaaaaatcgcatgaaagtaacaagaaaaaaaaatatatcaaaataacttaaaaattaatatacaaataacaaaaaatcaacaacaaataacaaatatacagcataaaaatacaataaaaaaaaaacatatttcatgtaaataaaattaaaaatcataaaaaaaaaatgaaattctgtacatactgtatttttgtaatttttttattatttttatatatatattttaaattattcgaaaaaaaaatattacctaacccacctatacttagttcgggtctgaagttggaaggttatctttattattcattctagattattagtgccaccaatcatgcttaatatactactatatttagattagtaaaatttaatagcggggcacatatattttattgtaaattaaaataaataaaattgtaaggaacaaaaataagaatatttttccttaaaaaaaataagaatatttatatatacaaaattatgttgcacttgaaccctctaaaatccttgacaaattaatagcaattcctcattggagtcagtcaacacagtcatcatctgcccaagggacaaggcccacactgtaatagaaatttcaaagaaatggtttgtttgttgtagtatatataccagccttttttttttaaatattatttatttttttatattttgttggattaataattacaaatatataagaatgggcaaagaaatgtagatagataatatagaccaaagtttacatacaatgtattgtgtataaaaaatagtattttaaaaacttttgtttcgtaaaagttaccaattgaattttttattttgttaaataataatatataccttatatttttaaaatagtaaaaatagacttatgagctcaatttttaataattttattttttaatataactaactttaagataattttaacacgaacagatataagaaatgtaaccagttttgtcatatatctctagatcagattattttttgataataataataatctgatttaaatgtgttataacaaaactgtttatattttttgtatctgtttagttgttataaattatcttcaagttagttatataaaaaaaaaatagtcgaaaattaaacttaaagtacctatttttaccattttaaaaatactata

SEQ ID NO: 350622 - DNA, 1119 bp, Cannabis indica
ttaagaaattcctcctatgcttcatcaagcaagtccaatggatgatcatcgaaataatttccctcaacatcatctacccccacttccctaatggatatggatcatcagctaaatattcgtcatgctaatatcaagtagtataacttctattgaaatctcataaatacacatgatctttaatcattgtaatatttcctttggatctatgacaataatttacacatggacaatgaatacgttcaggtttcttagaattctttaggaaaaactctataaataaatcaaactctacttgaaatcatagtgtgtctctctcctcacgcatccatgatttatccatgttatacccgaaattcggccatcatttcaaaggatgacacgtgtcaaattagggaggatatgaattaatgaatgtaacggtaattacatttataaatggaataactcattaaatgcgaaattaaccgagtatatttataacttgctgactataaggtcttacgtgagatgaagatatacaaactattgcctcgtggattaacgttaaaccatatgacattggatgtgcaaggggaggcatcaacctcgttacgcatgagtagacgtatgcaagttataatgactgttaagacacttagcatataatacacagtatacaaactaagtataacaggctggtaaacccaaacaaccaagagcgatgcacccatctcgccataggaaggcacgctcgtggtaccttcactaatcagctccaaacatctttcaatgagattcacagatccgtcgagtcaattctttagaaagaagttggcattcaaatgatgttgattgttgaagttcaccttgttaccaagaactgcgattgtcagatggagcgttatgtcttcagcacaagaatgacgggatttacattatcaacctcgaaaagatgtggaataagctctagctcgctatcagagttaatgttgctatgttcccaccgagacgtcccataacgctacgggttgcaacgtatttaatacacgtttacattgacccagtaaaagtggaccaatcaaagctaagtgatattcaaatattaacctcatttattttacgtggtatgtaatcaaatcc

SEQ ID NO: 350623 - DNA, 605 bp, Cannabis indica
aaattttttaattaaaattattttttggaccaattaaaaattgacacgtatcatttgatttgggtttaacggatcagttaacttagggaccaacggacttacagaaaatgtcaccttgaggactattaccgccaatttttgaggttagggattaatctgcatcaaccctaagtttttgaggacttttgccgcaattatcccttttcatttttatttgggtagtcattctccattttcattttcattttcttcatttttgtcctttgtgaagtctcctctgttcataaaaaaaaaatttttgtgtccgttatccacttgtgttcttctctctgagaaagaaaactcttcttttttttttgttgatcaagaaagataagatcttcattaatcaacaagtaaaatagctaatttacaaataggggtgagcaacggtcggtttggtcagttttttacacaaaaaaatccaaaattcggttttcgatttttatggttctaatccgaaaaccgaccgaccattataaaaatataaaaaaaccgaccattttaatccacggtttggtcggtttaaaccgaccaaaccgaacttcattttttttttaaaaaaa

SEQ ID NO: 350624 - DNA, 1029 bp, Cannabis indica
tggattaaagattcaagttacctacatatgtgtgattgggataaattatagtattaatacagagctgagcgatttttacttcagtttcttgtcataccccttgttggaatagagctaccgttgtgattgggataaaatgatttcaatatcacatatagttattcacaattacagtgatgttaatacagtagaaggtaattttgattttatgcttcaaaagataatgtcacatgattcatcagtgtactggatttacactgatgtgatagtcagtgataaagcttacttacacattggataagtgttatgttctttccagaacattcacagagtatgctagtattggatgtatggagtatacattagaatgagagcgatattaatcttggtaaaaatattataatcttaccgttgtatctttctaagtcaatatcactggttgatcttaggtcaaaagatcttaatcctgacatggttaggttcgatctcaagactcaagagtgttatttgtgctcttagagttgttagtcaaaacctactatttggttcgagtaacacgtacagcttgggaacatgatagtacaatcgagtgggagcgctagtcatagatatataatctatagcttctatttggacatagaagtgaaatgatgatttccttcgagcttggcttaatagagatcattggaagagctcttatttcagtagtcatattagtttattgaaatatcgtttataggaaagtgttttaaggataataaacattgaggggtgaaatggtaaatttgtccctactcgatgtaaatcatctataaaggatctttgattattgggattagaacgatggttaaattttcatagcgtatctatatcgtggaacatatagagcattctatataattgagagtgcaatttcaaatctatagtggtgcaaggaagaattaataagttagggaatttacttggtaaattctagatctgcttattggaagctccattatataggctcatggtccccatactagttga

SEQ ID NO: 350625 - DNA, 598 bp, Cannabis indica
tccaacattgctgcttgggtccccaagtcgaggatcaacatcttcatccccgccttgggaaattccctacttgggaatgttttttcctttgtctgtgctctggctggaggatacttccttcttagccttagccactggaaggttataacattcccgagcagactgttggtttcctcttagacaccctactccattctttgttggaaacttcaggcacgagtggaatattgacgttacagcatttaattcatacaaagcttgtcggtctagcattacgttaaaagctgaaggaacatctaatatcaggaactgtgccatgatagccatgctcgtcagagcttatccaacagtgaggggtaggcgaatttttcctagaggtgcaactccttgacgagagaaaccacaaataggctggaggcatggggttggatccttgggttggagtcccatcttttcataagcagttttgaacaagatattggaagaggctccattatcgattatggttctggcaaccattttattagctatctggacttccacgaccagtgtcgttgtgcgaaaatttaatttttataacgtcttcatcgttgaaggt

SEQ ID NO: 350626 - DNA, 805 bp, Cannabis indica
tctctctatatatataaacttattatttaatgttatctacatataaaaatattttaaactatatataatataaagtattgtatttaataattttttaattgcagatacttggtgtctatgaatgggaaggatgcaacccaatgcctccggaattttggttttatccatctgtggttccacttcatccatgtaataattcgactatcataatatatttctttattattattttcaaaataaatatattttttaatatatatttatatcaaaaaaatatcaggtaataatgtgattatttttcattattatagttagagaaggtagtgttaaatatagttagagaagatcgatctctcacaatttttttcagataatttaggatagcaaattataattaatattcaaatgtctaatttacacgtacacttattttgacatttatacataggtgcaataagttttatatcataatattgcatcctaagttactttaaatttcttaaaaacttatgaaaatcttgtgtatatacattatttatattatataaaataataaagttgcaacttatttatgtactcaatatatgaatgaaatatttatagctagtgatttaaaacaataactacttactatagcaccatatagatcattcttttttttttttcttaccaaaataatttaccactcttaaacatgttttgtatactcttgacaattttagaaaattactaattaacacacatttaatattgtatggacagccaaaatgttttcttattgtcggttaaccttcatgcctatgtc

SEQ ID NO: 350627 - DNA, 650 bp, Cannabis indica
aattatttctttctaattcgtatacatttaattaaatagaaaattaaatatttaagttaataattttattcaagacacttaaatattagttgttttcaaaaaatttatttagatagaaaattatatttaagttggaaattctattttgaggacaacttaaatttgaataattttcaaaatatgtttttattttattttattaataatttcccattaagttttgaaatgcattatttaaatgcagatattttgaaatttttaaaaaaatacattaaagttagaaattaaatattttaattaattttagatcaactttaatcaagtaaattttcattaatgattaattaaaatgaaacacttcttaatgcacctatatatatatatatatatatatatatgaaaaagaaaccgtctgtcccaaatttttcctgtcccttccctcgtccctccaataaatagatgtcagatgttaactttctgctctctcactcatttgttaactttttaaactctccgtcacgttctttacctatctttattccccaaaatcacttcccactattaatactttcacctttacatcaaataaataaataaataaaaaaataaagacttttacctcattaaatttagggaaattaccccatata

SEQ ID NO: 350628 - DNA, 857 bp, Cannabis indica
ttacaatttgaacatagaagaatatgactatcaattgtacttgaagaagcagctttgttagaagcttcatgcttaatccttttcctctgattaaagtttgcaaaactgggaggtggcattgcaatcaaattccgttcatgagctcgcaattctgcttcgagcttatccatgtcggaagagttaaaattgttgatcatataagatacaacaaatccattatactctggaggaagactattaagtatgaactgtacccattgttcctttgataattcaattccaagtagatttgctttttggaacttcagattcatcatcaataggtgcgagttaatgcaactaccagggtgcattttcacactatagagttcatttgcaaaggcattgactaggagtgggtcggggtgtgggttattcattttggcactacaaatatcaataaacagaagtaaatcacttggttcaataaattcatacacaaaattcagaaaataacaagtaaacaaatatgtttataaaaataccaaaattctaacatatttttattttccaaggttttcaacaaactgatacagtgtcccgtttaggagagagtcaaagcatcatccattgaacagagttgtcaattcatccaaaatgataagaattctagcaaccttttattcgatcgaaaagagaatccgacgttgtcccgtttaggcgagagtcaaggtcattcctatttcatgagcccccaccattgtttcatacttttgtaagtcttactaatagtagccaccattagggtgatctatactaaaaataaacacttacaaaaatacttatctttcgagattctacggcgttaaattgctaat

SEQ ID NO: 350629 - DNA, 445 bp, Cannabis indica
caaaatactattacaagtttttttgccactagccgacctaagcaataaaatagagtcacaaaattcatcactggtagaccccaacccgcttggtctagtgtggcccgaacatgtcatacaccgtccagctcccatactcatgggtgataagaaacagatttactctttcctgcacagtagagcacctgtgagccaagcctagcaagacagtataaaatatcaataaacataattatcacactatataaacattaatgccattctcatatgcatgtgtgacatagacctacatgtgactctcacatgcctagttatgttgggttttatgccctaaaaaaaactctatttcaatgtaatccaattttattcaatatcaataaagaaacagaagtatttttcattcatttgtatgttttggttcaagttatcaattgcttgtctattt

SEQ ID NO: 350630 - DNA, 646 bp, Cannabis indica
ttcagttcttaccttctttccagattcaagtgtgctggccgacctgaacggaaagtctcgtgctagatggatgccctaatcacattatgaaaccgtgtaagttacatgaccaaaaccctaattccgggaaactcggacccttaaccctaggttctgttatacttcctaagggctacaaaaattctggaaatagggaagcacccaaccatggcactgaaatggacaaaaattgagaaaacgaagcattcggggaccctcccaaaaccggctagccggttttagaggtctggtaaaatcggctagccggtttgcgttagttcaccccaaattttttgtttcttgctcaatcttccaccaaacacaaccaaaccttccagagtacctaattaggttatacacaacatgttgcagccaataaaccaaagaaaaacacactgaatcaaaacattccattagagatcaaagttaaggtttatatgctcaaacttgcacaaaacttaaattaaacatcaaaactagctggtaggacctaaaaccaactcaaattaagcctaaaatttgaattgcattaacacctaacccctacagcacccaattcacaaaatcacacattcaacctaaagaaaaagcttcaaaaacatgctca

SEQ ID NO: 350631 - DNA, 526 bp, Cannabis indica
attgaagcaaaccctaaaaaaaatcaaggcttcgatagatatgtcgtcactaaaaaagcctaaagaagtacaagtcctaacaggaaggatggttgcacttaatagattcatttcaaagtcaactgataagtgtttgcaattcttcaatgtatgacgaggcaacaagaaatttgagtggacagaagagtgtgaagaagcctttcagaacatcaaaaggcatttagtgacgcctctagttttggcgaaaccaataactcgagaaatgttactcctctatctggctatcttgaaaaatgcaatgagtgaagctatagtgcgagaagaggataagcaccaacaacctatttactatgtcagtaaaaggttactaagggcagagtcgaggtacccccctctagaaaaacttgtttatgcctaatccaagtgtctcgtaagttacggccttacttccaggtgtacccaataaaagtgttaaccgatcaactcttgagacaagttttattaaaaccagacgcttctggaagat

SEQ ID NO: 350632 - DNA, 603 bp, Cannabis indica
atcccaaaacactgcttaatattcacataagacaatctagggttttctatcgaatcccgcggtataaattttatacactaaaataaaacttatattttggctctaaaacatacatcatattttagagctcatcgcaagcttcgaaacggtatatagaatgtgcaaaacgaacactcgagtcaaaagttatgacaaaaatacgatttctgatctcttaagaatttttaaaaactataaaactcgaaaattcgaattttcgcactcaccgaaacactaccaaaacttatccaaatcactccacatctcacagggcacatatataccataaatattaccatccttgcataacaaaaattaaaattgagcccttaaatgaaaaacgccattaacgttcggactaagctttaaaatatttaaaactcgatttctaactcaaactcaccttaaattcaacaagtaaacatcgatactagtcccataggtaccaaagaacaattctatgaagtcaaaatctcattaactattctaattcacaaaactcctatacgaaatcaattgttgttttaacttaaaacgaaattaaaccataccttaagcttttcc

SEQ ID NO: 350633 - DNA, 806 bp, Cannabis indica
gcttcgattagcgaaagtcaaagtaaccttattgaacagcccatgggttcccaagcccatggcaattccatgataagattttcataatggacggtgggactggataccagcacccaccgagcatgtgtttgttgaaccctcctcaacttggttcatatccacctcttcccccacttccttcggcccatctattaagcccaactctattctccttctctttgaatcaaccaccaataaacaatcctcctcattttgaggatttatttcataatttaactcagtcaacatatccctctccacgtttatagggatatgtctagtaagcactgatctatctaactgtccacatttatctccttgttgagccatgttctcatccacaaccatagggattgttatgccgccacctgtagccgattcttccctcgcctttgaacgatgaaccaatccaacaaccatggcagcatcattaccagtatcatcttccatagccaccatgaattgcctcagccacttagctccaattgtatgattcttacgcattggcttcaccctcatccattccccatatggtttaacaatccttccatctgggacatcaaagcgtctagggcaaaatttatatgaatggcccattatcccacatatgaaacagaatgtaggaagatgttcatacttgaagtttacccaaaattggatactgttgcgaaaattattaattactacgcaagtgcacgcaatcaagtagtatactcgcgcatgtgaggttgaaccacagtgaattggattaattactactaaactat

SEQ ID NO: 350634 - DNA, 556 bp, Cannabis indica
aaaattaagaaattttgtttttacggaactcgattccgataaaaattgaaagagttatgaattttggaaaaatcggggttctattgtgtcgagggtggtgctcatgcgcaccagaccctcggagcagccccccttgcgcgcgcgtgtgacaagcctcatgcccatgacgaccctgcatccgccgagtttttccgcacatcccaccctgcaacgtccctagtccgcgcgcggaaggctcatttacagcctcctggggctccacgtgcagcccctcctggtcagccaactccaaattgcaatttttgtggttttttccccaaaaatccaaattttcatggattgttttccaaaattcgatttttccaattttaaatttttccaattttaaatatttccttttttgaaatatttccaattttgaatatttccaattatggtaagatttaaaaatttgttaacttctttaatatttatatattatttaattataagattacatattttgatatttaacatattttaatttaaaagataaccttgtctttttatttaaaat

SEQ ID NO: 350635 - DNA, 634 bp, Cannabis indica
gaatcttattttggttccttctgcccttgatactcaagtggaaagttgctgtgttgtcatctccatcacgaatccaagtgagtttggctttttgatgaagaaaggatagatagctagtatgagcatcagaataattttgcctcaagccagtgcctatattattgtcattgagaatatcaataaaatatcaaaagtataatctagttagataataaatatgcatacgtaaaataaatattatgatattacacttaaattatggaaatcaaaataaaatataacaaactaaaattaccatcttcgagcaatgcttgtgtttgaagtatttcttcttcatccatgtactctcgcacaacaatgggttgatgtgatctgctccactaattcttgagataaattaatgcttcaaccatccttgggctaagtgaactcctaaaaggatctaaaatctgacccccaacagagaatgtcgcctcaaaagcaacagtagtaaccggtatatctaacacatcacgtgccatgagtgacaatatcttgtatttgcacccactactagcccaccatcctaaaacatcaaattgttgagttggttccttagcttcctcttcaaaatacttatcaagttcatttttca

SEQ ID NO: 350636 - DNA, 579 bp, Cannabis indica
aaaaaaaaaaaaatcataccatcccctaataaataaataccaaatttagatttgaaaatttaccctttttttaaaaaaaaaaataataagaataaataataatgaaaatgaaatatcaaataataataatggtacatacatacatacataccttgaggtggtgtgatagtgaaatagtaaggtttgtagtgaaatcttggagagtgattttgtggttaaggccagttagaaagtagttgaatgagtaatcgttggagccacttcccaccacaaataggtaatccttcaaatttttcttgcctttgcacccgatctcgccctcgagatcgggcaaagttactttctcgaagtttcggatttgtttccttaggcttattacgttgccctgcataaaaactagttaattacacggtttaatcattttattaaggtggcgtttgataatacttttttaatcagttttttgtttttaaaattgaaaaagtgaaaatatttttcaaaaacatgttctatgaaactgtttttattttttaattttttaattgagaatcaaaattttaaaaacaaaagaaaatcact

SEQ ID NO: 350637 - DNA, 549 bp, Cannabis indica
ttattgtttcttctgttcttattattttaattctgttattaaaaatctcgagaaataaaagaaaataaatatcatactactatccctgaagagattgttcctaagacttattggtacatacaatgtgttcatatatattttttctcttatcatattattaagaactaatagaaaactaatttcttctctcttttttttatgtataatttttattatatttaaaattaaaattatgtgtgttcgattttataaaacactcaagaaatatatatcacagatatctaaacatattcctaaaagtgctttaatataggaaatcataaatctatagaacctttgctaaattaaagaagaagaaaatgataaaagatgagcgaaagaactaacctgaagccattgttggagatttcagagaaggttatgatcttccaagaatacactatttcttaggtattttctctgatggggaaggagagaatgcagaaacccacccctagtggttcttgggcaccgctacctatttataggctcattatataatgagttttg

SEQ ID NO: 350638 - DNA, 1303 bp, Cannabis indica
tcttaacgtctgtaatactattgtcaagtgttcagcacgatcctcacgtatcttagaatacaccaagatatcatcaatgaataccaccacaaacttatccaaaaaaggtgtaaagactctattcatgagatccataaatgcagcacgtgcattcgttaacccaaatggcatcactaaaaactcaaagtgtccataacgtgtcgtgaaagtagtcttagggatatcttcttccctaatcctcaagggatggtagcctgaccttaagtcaatctttaaaaagaatgttgaaccaccaagttgatcaaataattcatcaatcctcagtagaggatatttgtttttaattgtcatctaattcaagtttctatagtcgacacaaagttgcaaagttcaatcagcattcttggcaaacaagatttgagctccccatagagaagtaccatgtctgatgtaacccttatccattaactcccataattgttttttcaattcagctaactctgcaggtgccatgtggtaaggcgcaatagaaactggttgagctccaggaatcaaatcaatgcaaaactcgatctccctatcagttggtaaccttagtaaatcctctagaaacacatctagaaacccactaaccactgatacccaagggaactagtctaaatccctagacttatcctcgatcgtaaatagattcccataacactctaagtttctctttcgatctaagcatgcccttaagatagaatattgtctcacagcacttgtgttggctcggtaaataataaaattaccactatgtttaaaagagtcactcttttgcgtgaacaatccacaatagctaggtatttagacaaccagtccataccaagaattacatcaaattgtcccatgagcaacactaataagtttccaaacaacttgtgtccctcaaacacaatacaaactgacctacatatggtagatacctcaccgtgtcctcccataggtacactgaaatacaacgcaagactaaaagtttcccaactcaaacccaacatactagcaaacatcaaagatataaaggaatgtgatgcactagtatcaaataacacatgaaaccaagagtgtgagataagaaccataccattgacaactccctggtctacactgccctatacatcatcaaacccaagagcataggcttgagctaatgactttgcttttgcttttccgtttccttgactatgatggcttgtacttgcaccaaaccctccaccttgattgtaccctctttgactaccactaggagtaggagtttggaaac

SEQ ID NO: 350639 - DNA, 687 bp, Cannabis indica
atttaggtttaactaactacatacatggatgctaaccctctacgtggcaacatctaataatttgttttttaaaaaagtcacctaataatttctcataaatcaaaaatactattaaatagctacattttatatagaatatatatatatcaagagagataaaattaaaatttgaaaatattcaaaacttattttttttttccaaacatgagtacttatctatccaatctcacccacttatctcatgcaccaaatatggttaatagttttcatattgggggtctaattttcactcaacaaaaagaactttcaaatctgcacgatgcctgagaaataattcgtattatcattagggtaaattgcaccataaatactttatattttcgattttatacacttaaatacctaatgtttattttttgtggtaaaaatacttaatgttacaattttcttacaccattactaccacttccgttattaactcataaatatagacacgtggagggcccaaatacattatatttatttattttattttaaatttaatattcttaatataaaaaactaaatattacttgtttttttaaaaaaaataagagagatgcaatactaaattaccatagttgagtgaaccagtgtaatatatgaaacatgattatcgaattgaagtgtcaatatcatgtgaaaatt

SEQ ID NO: 350640 - DNA, 904 bp, Cannabis indica
aagtaattctggtaacttctttgagattgtttaacaggggtagcatcttttgatactgccaacctgtgcacagcaacctttcggttcaaccccggcatgtctcggtataaccaagcaaatacatctttgttctcgcgaaggacttgtatgtactgtggtaactcttcttcagataataaagcactgacaaacacaggctttggatcatcctcggtcccgaggttgatctctattaagtcatccacagttgcttgtcctccatcttcgaattcctgaggtgctggttgaaagatgtctataaaatcttctgaagggtttgagcttgagccttcatcttctacggtcaagctttcttcaaaagagaggtaattgacttgagcaaaattttctccatcttcttgtgtttcatgcccctgaatagtaattctcaaagatttcttctgttttggcatccactgtttttgctttttggttccctttgactgtggagcacttgggaaaacaagcctttcgaatgctgacactcgtggggtggatgtgcttgcttcaagtctatcaaatactgagacccgcggggaaggtgtaggaacatcgtcgctgtgaaacattttttggtcctcctctgttaactcatctggttcaaaagaagcttttaaacaatcactattttgatggattgtgactcctttttgcttcttgaaatgaacctttttcttcgctgttttgaaggtttttcggagttacagaagtggaggacgttttattgagagtaatgactcttttatttttcttgctatctttaccaaaggaaactgaaaatttgtcattttacccttgggtagtgactgatcgattttccttattggtaaaggtaaatcttgtcatcagggctgtcatcgaatct

SEQ ID NO: 350641 - DNA, 512 bp, Cannabis indica
actttgagtctccttaatccaagtaaaagggtaccccagtaaaacggcaattcactgagattacacacatccaaaacagttctgaaatcatccatctgagattcacaacgcctgttacctccctttttattgtggtaatatagaatctcattaaaatccccaatgacaacccaaggaagcaatggggcaacatctttcaatcttttgagaagagtccaagtgtgtacacgatgagcaacattaggggcaccatagaaagcagtaaagtgagaactaggaccattgtgaaaagccaaataacaatcaaaaacatttgcattaaaactattcaaagttacatcaacatcatccttccataacaacattaaaccaccacctaagccaactctagggacttctagaccattactaaaatgtaaaagactacaaaaacgagaaattgaattacaaggtaatttagtttctataataaaaagtacagtgggggtttgctctttaacaagcaaacgaag

SEQ ID NO: 350642 - DNA, 696 bp, Cannabis indica
ccagaacccagacgaagaaccaaacctgaacccagacctacacctgggacccaaaattagaacctgaataagaattgtcgaactaggaccctaaaacaagactaggaccgtgtctaggacccggacccagacctagcctcaaacccaaactgagactggaactcgagccccgacacggtcgtgtacccgtaaggaaattaagacctgaacctggttcttaatttaggacccgatcccaaacacagactcggacaaagacctagactgggatcaaaatgctgtacctagatttggaccgacatcctgacccagacccaaacatggacccgcactcgagaccttaacttggttccctagtctaggtctgagtttgggtttggttcttcgtcatggttttagtcctagtgtgagtcctagatctaaacatcgactactggtctgttccaagccccgttacccgaataccgagttaagatctggatcactgtcacgggtctcagtctggttctggttcaggtcccatttcttattttggatttgggatcgagactggggtgcagttctaggtcctgacccaggttttgtgtccctagtcttgttccatgtttgggtctgagttcaggttcatgttcaagtcccgagtcaaggtttgggttcgggttcgggttcgggtccggctcccaatttgggtctagg

SEQ ID NO: 350643 - DNA, 931 bp, Cannabis indica
gggaagctcaggcggaggcgaaacaccgggaggtcctgaaggcggagggtgaggctacggccaaggctaagcgcgagctgcgggaagccaatggccgccaagttaaaatccctggaggagctgcaccaggcgaactttctgtcgacaaccaacttgaccgtggaagtgaaggagctgagggactttaaggaccaagccttgaagaaggctaaaagggatgagctccttactcccgtcgtctacaaacactgcgtcaagcgttttgacgatggcatctacatggcctggcagtcgaatggccagagcatcaagcttgacttttatcccaaccctgaggaagctcttgttcgcttccgggagaagaagaaaaggcttgacactttacttgaagaatgccagggccctcgtcttcctccctgcatcaattaggctgaccagttcaaccaattcaccacttcaactatatatttttttttctttacatttacagtctattttcctttctttcaaacaatttaattactatcttctaaggggagacagttttaaggccccgccccaagcccctaaaaatttttttaggacctgcttttgggtcaggatatcttttacattttaaatatatattttttgccttagatatatattctacttgatttttgcttttacttttggtttgttttacatttgtccgtgtggtatgccttagtaccccctgagtggcgtgaaaacattatttttaaggcactcagccttattcataactttagaggttgctatacactttttcagtacaaattctcttaacaaagtcctaagtttactatcttttgtactattggtaatactttcggagatgatcagtgttccaggcccttggcacaatggttccgtccattctttttagcttgtaggtcccggagccgatctc

SEQ ID NO: 350644 - DNA, 532 bp, Cannabis indica
ctctccgtgaactggctttgataatggaggcttcgacatgtgttcctttagttttttgaatgccttctcacattcttctgtccactcaaatttcgaacacttcattaaaatatttaagaagggaatacacttgtctgttgatcgggaaataaatcggcttagggtagcaacttttctagtcaagctttgcacgtctttgtgcttcttgggagaaggcatgttcagtaaagcttgtattttttctgggttcgcctctattccccttttactgacgatgaatcccaaaattttctctgacttgaccccgaaagtgcacttcttcgggttaagtttcatttcatacctccggaccacttcgaagcattctgcgaggtcatctgcatgacttccacacgcttttgatttgaccaacatgtcatccacgtaaacttccatattttgtcccagaaggcctttgaagttgaccattctctgatatgttgcaccaacattttttttagcccgatgggcatgaccaagtagcagtatatcc

SEQ ID NO: 350645 - DNA, 744 bp, Cannabis indica
ataatgtgtaatatgaatatgtataggtatagtgtgtattgctaaagagtacattacagtgataccaacacaagtacgaaaaagtatagggtgtctgtggtatatcactcagtggtactcagggtacaaaacaaacccttccaacactcgtacattgaggtacgtagtgtatgttgtatagtggttgtaccctagtatagaacgttcttactcatctattaagcgttataaataggtgtatgggcgcctagatacaagtcagtattatatgatatgctatatgcttttcttactaagtctgtcgactcacagttaggaaaggcaaaagctgaacaggagtgagccttgctgacatgaggttttacatgtcgtggcagtgcgacctagttatgtattttggtatattttttataaaaatttaaaaacaggatcccaataattgtaaatagttttataaatcataaagttaggtatttaatataaaacttttaatttgacacgtttttcgagagaattctttgataatcaaagatagcactgtaattcaaaaaagtacagtagcgtgccttagcattaaggcgttacaattttggtatcaaagccaggtttgtttaccgaagttgccaagacatgtacaatcttcatcatggaaagctcagctcacggttcagtaagcccatacttgtttagtatttatttgaatattaaagtatgataggaagcatattagattatgattattta

SEQ ID NO: 350646 - DNA, 1228 bp, Cannabis indica
ttctgttatatagacacattttatatagaatagatatatttttaaagagagttataattatatggtatttttgaaaagagtatatatttttttcaatttgcttaatactgtttcatattaattaaatataaaaatattgagtgatttatttaacgataataattttgagatggaattttataatttttgccattgtatccctaattggcattagatttaaacttagacagtaagccaaaaaagaagagtacgccacatgaaatctgtatagtgcaaaatgatacacttagggcttgtttggtatgctgtaaataataaataacactatgtttggataaagtaatatattgtattaatgattacgaccaaaatttttaatacaacgtatgttgtattatttttattttttattttttttgaataaaaaaggagctttattaattaataaactcgttcaaaataatagaacgtacttcagatcctccaactaaagcacacaacctgtagagaaacaagagtctcttgccaagcaatgagccaacttgtttgcagatcgtttaacaaaacataactcaacaaaagataaagccaaaagtaaattcctaacatcttgaacaataagaccaaactgtgaggacataaaaatattactttggactgcttggacacacaccaaactatccgtttctaacactacattgtcccaaggatgagttgcaatccaactcaaagcttctttgatgcctatgatctcagcaatttcgggttggacatacccaatctttcccttcttgaaagcttctaccatggttccatgatgatctcgagctacacaacccactccaaaccgcccctcttgttcaaataaagcccatcaacattaattgtaatcttatttaacacatgtgcaatccaatgtatgttgtattatttaatacataacaaatggttcgtattagcttgtattataatatttacaaaagatttcgggtcaacaccaatctcctacccgaactcggacttgggacccggatccggacttgggactcagacccagatccggactcggacccagacccggactcggacccagacccgaattcgaaccccgaccccgaacccagacttaagactcgagaccccaacacgtagttggtgttggggtcgagtgtattgaaaatatattataactttacacgatcaagtaatacaagtcaatattaaacat

SEQ ID NO: 350647 - DNA, 1320 bp, Cannabis indica
aatgataaagttatatgtgaaatagtttaacattataaagttatatatgtaataattgtaataatttaagtgaaaaataattaattgctaaaataatttcatttggtaaaaaattgattaataattattattaatttaattttaaaataaaattagtcttaattaaaattttataaaaaaataaattatcaggttataaattatttattatttatttttatttaatttttaaatcaatcaacattatttaatagtgatctaataattaaaaataaatataatcaccatagttacatatttgatatacttattgagacctctttatatatttatatatatatatatttatatttatatatatatagactagaaaaaagctacgtacaagacacacatacttagttttatattaggtgctatataatttaattataaataatataagaaataattatatataatttaatttatcattatggtctaattgaatttttttaatatgaagtgattaagataataaaaaataatataattattttgtgaagttatttttatttatattcaatacatgtaaaataattaaattcttggataaaaaagcaaatataaatattttattattctttataaaaaatgtaatcttctaatgcatataaatatgttgtttgtccaagtaattaaatatttactctagtatagtaatgtcttaaatgttctgtctaaaaagaaacacacagtattttataatttgcgcatatacatatatatttgatataaaagttttttattcctaaactttacgaaaatatggtgtgtgaatcggtttaccataactaaaatagaaagtaatcaattccttagtacagccatttcaatttaaaatataaaatagaaaataataaagttaaaaaatatgattaaaaatattttaaatattttaaatttaaatttctttatataaatatttacataatttttttttattttaattaaaagttaaaccaataaatttaaaaatatcaataaaaatatctataatattttaagtattttaaatttaaatttgaatttctttacataaaatatctatataatttttatttttaaatatacataatattataaaattagggatatgattttgtcccgtgattgtactttcacggaatgcattccgtgatgtacgacagccgtcagatgagggacttatttgatatgacggctgagattgatctaggggtaattagggttaaaatgtagaaacgtacccttacactcatttaatgtaccccgagacccatctaatataccacggaatac

SEQ ID NO: 350648 - DNA, 902 bp, Cannabis indica
agcatcgagtgatgtcgaggtccgccgagcggacccaagttagggtctcacaaaccaccctaccagaagaaatcgacgtcctcgtcgatacacttttgatatagctccgcaccttgtcttcaaactgccacaaagtcagctttttcccatgtagcatctactacgtcttcactatcccattgaaacaagtactcgattctctggttgtttttgctggctccaagagtacgatgatccaagatctttgacaacttcttctcaaattgtttcctcacagtaggcggagccctcaccacctgctgccttccttcctctttatcctcatgaaatttattcaagaaactgacatgaaaatttggatgtagcttgaagcgttcctgtaccttcagtttgtatgctacaacccccaccttctggacaatctcgaagggcccatcatatttctggaccaagcccttgtgataccgtttatcagttatttttttccaaatctgtggagtgaatttcagcaatactcgatctccgacaaaaaattccaagtctctcctatgcttgtctgcatacttcttcatcctccgtgaagcttttcccaggctgtccttggccaattctagcaactcagtcctatgcctcgcgaaccaatatactgctgggcagacaccttgagacttctattgagccacctcgtgtggtgtcagcagttgtctccctaagataatctccgctggactcattcatgttgtagaagattgttgaatgttatagcaaaattgggccacatcaagcaattcaacccagttcctctgacttgcaatcacataatgtcacaagtactcttccagcaactgattcattctctccgtctcaccatcagtttggggatggtttgctgttgaaaactt

SEQ ID NO: 350649 - DNA, 778 bp, Cannabis indica
ccatagaacatttctaaagcatcaaaaccatccagaaaacacagattcgaaaatcacaattaaagctccaagctttgagttcaaaactcaaacttggttaaatctcactaacatgcatcaaaacttgattaaaaccacataatcatgcataataaaactgcagaaaatgaactcaagcaccaacaatctctacagcaactaatttcacattttcactttgaaaaaccatagttttgagtaaaagtttctaagcttgaatcaaagcaacaaacatgcatcataatcagctctaatctactcaaataatcatgaataaacttctgtaaacatcataaaatcacagtaacaatatcaacccaaactaagcatgcaaaccactttcttttcataattttcaacaaattccagagagaaagattaggagctaacctagcttgattagaacaccaaaaaggagatgaattcacaagaaaaaatccaatgatccttgctgctcaaggaggccgaacaagagagaaagagagagctttgagagaaaattggtttttcttttaacttttctaatttttgaaaataaaggataaatgcaatacgaactatatattcagccaataatagacataataaacatttaatttccaattactaagtccataaaaggacaaaacattaatggggcaaaatgaccattttgcccctccacactaaaataacataaagggtactaaaaggatattttgggaaattctaaattcccgaccactcccaacattcccaa

SEQ ID NO: 350650 - DNA, 626 bp, Cannabis indica
ttataacctcagaaaacaaactcaagcaccattaacaatcacaccaactatttccacattctatcaaaaatcatagtttttgagctaaaatccaaaactttgaataaacaccacaagcatgcatcacaaccaacttcattcaactcagataaacaagtttaaactaatgaagacaacaacaacaattaacagcagcaagacaaccaaattaagcatgcaaattatcatctttttccttaaaaactcaagaaaaccaaagaaaaagctacaagaaattacctagagtttaagcacctcaaaatcaagaagattcttgctggaaatgtagaaaaaataactcaaactccagctgctcaaggaatggccgaaagagagaggaagagagaaaagcaattcttgaattttctaactttttccaattttgtaaaatgaaaataaaaaggtttcatttactcatttcagccaatataacaataataagccaaatattttcacaacactaagtccactaaaggacaaaacatcaatggggcaaaatgaccattttgcccctccacacaaaaataacataaaggggtactaaaggggtatttttgggaaattctaaattcccgaccactcccgac

SEQ ID NO: 350651 - DNA, 517 bp, Cannabis indica
taataagtatgtattgatcaagattgtctccgcactcttccatgttatatacataaaatttaaattaagaaaattaattaattgatgatgtgtgagagtagtgtattataattagtctaaaatgttttataataaggactattttaaaaaaatgtgaaaaattattaaggttatgataaatatggcataaaaagtaaatgctactaaatatggcattatctaaccaatcaaattaaaaatataaaaaaaacatataaaacattaaaaaaaatctgaatttaaaatttataaaaaataaatacttaattgaattaccataaaaaaaaatattaaaattcccttcatatttattatttaaaaaaaataaaacaaatgaaactatagtgatagccagaggtgtcactcacgccggaaaagtcactggagtttgctgccagcaccggaaaagtcatcggagtagctgttggtaccgaaaaagtcgacggagttgccgtcggcgctgaaaaaatcgtcggaa

SEQ ID NO: 350652 - DNA, 474 bp, Cannabis indica
ggaagtctttgatggactggtgacttagttgaggagactcaaacttgtaaagacctttgtcaagctttttagacaacaagatcttcttggttacttgatctttgacagaacaattaaaggggtgaaactcaaagaaaacaccattgttaagggcaaatttagacacactaagtaagttcttggtaatagatggaacatggagtaaattattgagatgtagagtatcagaagaaaatggggataagaaggatgcattaccagtgtgttcgctatttaggcatgtaccattgcctatatagatttgttcttggccattgtaggctaaactagtgccaagattggtgttatctggggtaaggtggtgtgtttctcctgaatcagggtaccaactctcatcaccaacagtttcacatgtggcacaataggcctgcatttcagcaacatgtgctgtaggaggatgttggaaattatttt

SEQ ID NO: 350653 - DNA, 779 bp, Cannabis indica
gggtattagaattagcctggccctacttaatttttggcccatttgtttcatgggcttccttctctttttccctacatatacttctctttgtaatagcctaatttacttttgacatttctgctgtgtgaacatagcagtaaaataaaagagctttcatctctatcatattgttattaggattgttatatacattcgatattaatgttttatatgcatcaaaaaattatttatatatatgggcatgctcttaatgggtattacatatgaatgggtattatattattagtcattggatcaaatctaatggttgatatttatcattattaattaaatttttacattaaatagtttttattttaacatactacctgatgacatggaagtcattttttatatccattctttctattttttttcctcattccatatatatattaatacattgataccttacaatttaattatggtaatttaaaaacttcaataaccgttaattacacctttaaacctcactacaacaaatatttccattttaaaatatattgttgacctcgcttttaaccaatgacaacgagtctgatttagtgagcgataagtgatttatagcaatcgatatataataaagtaatataaagacacaagaattttatagaggttcagccccgagaagttcggtaatagcctaatcctcgttacttgtattaacttaagaacaaggagaaaggttccttttcttatagctcttacaacagaatctctgaatatgtattcttagataa

SEQ ID NO: 350654 - DNA, 541 bp, Cannabis indica
cacatatttaataaaatatgttcaattaaaatctcaatatatttttccgggatattacaactatcccgtccttatagaaattttgtcctcgaaatttatttaatccactcaggacaccgcccccgcaactgggactttaacttccaaatcgcttttcaatcttattgttccttcacaatattataataagcgatatagtcttttgttccgtagcactttctctttctgttcaagaatctgtatcaattgctcctaatataacaagtctgtttaaaatttaatattctcctaactctgcacatggattgcttccactttgcatttctaaaaccttgaagcatatgttgtaaactccagataaaatagattagcatagctcttccatccagtatagaagcaatacacaaacctgaatctttaaactacatcagtattacattaacagtactctaataactgttattacatgaatactcatttagaaccttccattcagtatccttattggactaatacaccaatctggtttatatcataaaat

SEQ ID NO: 350655 - DNA, 648 bp, Cannabis indica
ttcatcgttttagaaaattcatatttagggtgttaaattattacaagttttattttcattccgtttattacaaaagtttaaattatgcgctattttgattagtaatcccatttaggggattaggatttcgtaagtaacttgggtagcggtcctaattatttagagcgttacacactgtaatttcaagtaggattcaatgcatttatagggtttgcaataaaaaattctagaaataccaaacgtattcattgttcatgtgtagattattgtaatttatcaaaaagaaatattacgatgattaaggattatgcgtatttaagagatttcaatagaagttatactactttgtattagcatggcgaacgttgaactgatgatctatatctattagagaagcggacggtagatgatattgcgggtaataatttcgatgattatccaatggacttgcttgacgaagcagaggaatttcttaatgatcctgaaaaatttgataattttctaagtgatgcagataatgttgggttttgtgtcctaaataaaactcatttcaatataatcagatttactaattataaagatcagaaatcattttatgttgcatggttcacatgatttatttcatgattatgtttaatgtataaattc

SEQ ID NO: 350656 - DNA, 1517 bp, Cannabis indica
atattgatcttactggtgcaatttacctttcattttgaagctatttcagtgatctatcaagtcatgtcttacacccacattgcaattccaaatattttgggatcaaaatttatcctcaacaaagttttgatttttccaacacataacccgaaatcccggtggatgagattcaatgttcgaaaattgaaaattttcaccaatggtcaattttctccattggatcatcatgaatcatcatcaatggcaaagatcagccctacataatttcttttctatatttttgtattttttattttattattttagtaggatctcctttcctataaaattagagctcttctagcttatttttcacattcttctaagtccataaaaggtcaaagtatctctctcgattttctctctttagaattttgagccccacacttatccaatcctttgtaattatcatgagcaataaactcgaagtagacgcaactctattaccgtcgtgttatagtgagtgaattactataaatttattgtgtctctcttcttaactatcattacattctcgtcaatctaacgatggattgtgactagatatctgtatctaaatttttgcttcaacgttttaattataaaattataatatcattattttatttaagtttcatatatattattttattaacttatttataattgataaataattatctattatttttattattaattttatatggttttttaatgttttgtgctgtgctatttaggcttctttcgtgtcgtgttttttgatttagtctatttatgtttacgtgtcgtctcattcgtgcatgtcatgtcgtgcttaagcacatatttttttatgacgtgtggtgccaatgtgtagcatcatattatatcgtatcaaaactcatattttttttgtgtctaatcgtgctcgtaccaatttcgtatcttgtaaaaaaaatttaactggtatttacaccacttgatggatagggtagaagtacaaacttttcttgtaagaattgatcgagtgtaaatgtaattaaattttgttatatattattatttttattaattattaaaaaaagtgaaaacatgagtgtctgattgtgaaacggattggctaccagctgctgataacgcttgcaccggaagtggcgtcgctttctatctcccaatttacatacccatcaatcagatgagctcccaaaaaccaatggcctttcaaaacattttaactctgcctaaacccaatcatgggcccatattgttattggatatatctcctgagatgggccccattcagggaacagaaccagagaaacttgatttgccacgtggccacatccaacttatgcaccttctccattctgcattgtttccatccccaaaagttgaaaacttataataatcacaataataacacacaccgaagcccacactatatatatcacctccacacccatattatcctttgaaagaaatataatatatatataaatatataattaaataaaata

SEQ ID NO: 350657 - DNA, 729 bp, Cannabis indica
gcatactttgtccttgtcttcatcaaagccctctggcatcttcatgtagatggtttcatctaattttccattgagaaaagcagtcttcacatccatttgctcgatttctagatcttcagatgcagccttggccattattgctctaattgaggcttgtttcacaacaggtgagaaaatttcattgaagtctaccccttctctttgagtaaacccctttgccacaagtctagccttatatctcttgcaatcagcacttgatagaccctccttttccctaaaaatccatttgcaactaaccagtttgcatccttctggttttctaacaacagtccatgttttattctttaacagggattgtttttcttcatcaatggcctgcaaccatttgtctttgttcttgcagtttatggcttcatcataggttgcaggttcagcattttctatttcactagctatggttaaagcatatgcagtgtaatctgcaaatccaaacctagctggtgctcttgattcccttctaattctgtctctggcaagttgatagttgtcaagtgagctatcttgtggctgatcagtttcttcttcaacttcctgatcagcattttcactggttcttgcatctgatctgacttcaacatgaacctgtctagcctcagtgctagtctcagctttgtcttctggtttcatggccattgccttctcattaaaaaccacatccctgctcactat

SEQ ID NO: 350658 - DNA, 790 bp, Cannabis indica
aattctaaattattctacaattaaagtttagagtattttttacaaatgtgtagaaaattctagacttaattgagtattgtagaaatgtgtatcaatttctaatactcctccttggtacacatttctgtaactccaatcatgtctcgtagtagctcgaacttgcctcttggtagtgcctttgtgaatatgtctgctacctgctcttcagtcttgcagtgcttgagctcgatttctttgtttgcttctgcttccctgatgaaatggtacttgatgcttatatgtttagttctattgtgaaataccggatttttcgccattgctatagctgatttgctgtcgcaatagatgtttgtagcttcttcttgtaattctcccatgtcttcaaatattcttttgagccatatagcttggcttgtagtcattgctgctgcaatgtactctgcttctgctgatgattgcgcaacagttgcttgcttctttgatacccatgaaaatattcctgatccaagtttgaaggcatatcctgacgtgctcttcatgtcgtccatggatcctgcccagtcactatctgtgtagcccacaagttttgagtcacttgtaactccgtaccatattccgtagaattttgttccttgcaagtatctgaggattcgcttggctgctccgtagtgaacttgacttggatcatgcatgaatcttgatgggagactaactgcgtacattatgtctggtcttgtagcagttagatatagtaggctgccaattagacttcgaaattttgattcatcag

SEQ ID NO: 350659 - DNA, 1003 bp, Cannabis indica
aaggaagctcttcccattgcatccagggagggtagcctttctaactgggacatcgtacagttcagatcaagagagaaattgttcaattaaagaaaactcacacaacatcaacaaaatgctagaaggactgatgcacaaaaattcagatggtgcaaacaccaatacattttctgagatgtgtaaatgagcgtgcatctaaagctttagtaaaaagatctgctagttgagcatcagtgggaacatgagaaatagttaaaagttttgactcaactagttgtctaatgaaatgataacgtatgtcaatgtgtttggtccgagaatgttggacggggtttttggacatgttaatggcacttgtactgtcacagaaaagtacaagagactcttggggaaaaccatagtcggttaacattttgttcaaccaaattagctgagtgcagcagctccctgcagctatatattctgcctcagccgtggatagggagatagagttttgtttcttactcagccaggacacaagattgttcccaatgtagaaacaaccaccagatgtactcttcctatcatctagactaccagcccagtcagaatcactgtacccgacaagagatgtgtttgtatctcttgagtaccataggccaaagtcaacagtcccagacaggtatttgaaaatgcgcttaacagcagtgagatgagactgtttaggaaggtcctgatatctagcacacagatctacactgaaagaaatatcaggacgacttgctgtgagatacaataggctcccaatcatccctctatacaacgtgggatcgacattttcaccagactcatctttactcagcttagttgacagactcaagggagtaggggcatgcttagttttgtctaacccatatttgtcaagcattttctttatatattttgattgtgaaatgaaaataccttgatcagtttgtttgatctgtaaccctagaaagaagctaagatcccctattagactcat

SEQ ID NO: 350660 - DNA, 798 bp, Cannabis indica
ttcatggtatctaatcctttgtgttcaccacctcccaccagatacgagcatctttcctcagcatgtatgatgcacacttcactcggtcattcccatcgacccttagaatctgcaaaatgctttctctgcgacttatccactcttcagccaccactgggtctatgcctccttcaaactcaggtggatgttgtttttgaaatctctctgctaacatctcatgtctagcctctgtagcaggatataccactgcagctggtgggtctctattttttgcatcctgccttatttggactggcggctccggttgacgtctcaactgacgaagttcttcatcctgcctatgaatgattccttccagtgcgggaaggctctcttcccatccctgaggtgcttgaggtggttcagtgatccctcaataatcttggtctctatctcggccttggccttggcctcgacctcaacctcgaccccgacccaatctaactgaccttctaggaggcatttctaatctcctaaaccacacagaccaaaacacatctagaagaatcatttttatcatcaattttacatgaaaagaatgttacactcccgcatgcagaaatttaaggcaacttaattataagtaataaccacttacagtacagtgagtcgagttcgtctcatggcgttgaactttacatgttagggctaaccacattctttaggatcgtattgctctgataccatattgtaacaccctgatttcccgagatgtcacatagaatagtccatataaaacaatttaataagataaagaca

SEQ ID NO: 350661 - DNA, 764 bp, Cannabis indica
tgcattggatcaaacacgtactttcttagcatggaaacatgaaatacattatgcaccactgacaatgatggaggtatggctaacaggtaagcaacttgtccgattttctccagtatttcaaaaggtcctataaatctaggacttaacttgcctttcttcccaaagcgcctgatccctttcattggggacactcgtagaaagacatggtctccaggttggaatgtaacatcccgtcgcttgggatctgcataacttttctgcctgctttgagaagcaagcattcgagctttaatcttgtctattgcctcatttgtcctctggaccagcttgtggcctaggtgtttccgtgctccagtttcgtcccaatgaattggggaacgacattttctgccatagagcagctcataaggagccattcctatggtactttgataacggttattataggaaaattcaatcagaggcaagtacttactccacgatcccccaaaatccataacacaagctcataacaaatcgtcaagtatttgaatagttcgctcagattgcccatctgtttgaggatgaaaggccgtgttgaattttagactagttcccatggccttctgcaaactcacccaaaactttaaggtaaatttagggtctctatctgaaacgatagacttcggtaccccatgaagacgaacaatctcctttacatataaatcagcatactgatccactgtataggttaccttaacaggcaagaaatgtgccgattttgt

SEQ ID NO: 350662 - DNA, 546 bp, Cannabis indica
gaagaataagtggttgaaataaagtggcaaaattgtaactagaaactggtccacttaagtgtacgaccatgaaatattttttcccaatattttattcttttttaatctatataattcagccttaagccctagtttaaacactataaaaggaacatgatactctcactcatccacttgatgccttcaaccaaatcaaacttagttttctatgtcagacaactagtagattagacagttccctccttagtcatttcacctccttcattgttctccacattcgaaaccttgattgaatgagtgtcatgcccacacatagcaagttaagtactcaatcatagtgagtaagatggtggtagccaaactcgaaggagagaaagagatccaagttcagatcttgataatgctctgctacagaaatgaatcaagggctagagatcttaaacagaatgagtcattatattccgctacaatcaatgtaaggttttcttaaacccttatgtgtttattccctgttttaaagaattcatatttaggatgttaattcaa

SEQ ID NO: 350663 - DNA, 752 bp, Cannabis indica
ccgcgaaaaccgcaccgcaccgcaccattttttgcggtgcgatttttttaggtttcgcgatacggggtgacgggtttggaaaaattagaaaaaatcacatgtgcgggttaggtttgaaaaaaatggtcaaaaaccttaccacccgcaccacgaacacccctaatctctgccatctaaaaaatagaattcaaaaaaaaatacttacatgtcaatattatacatgaattacaaaattataatataatttaaaaaaataaagcaatattactccaaaaaaaaattgtgtaattatgcaagtacttcattccttctctcgacaacattaaagattgtaaacaacctgcaagagagaattaagaggttagagacatgaaaaataaatggaagaaaaatgaacataaaaatatagtacatacaaatctatttataaatattttaaattttggattagttatatatattttgcgggctaattagaatttttaccccctagactttaacatgtaccaaataatgctcccctgaacttttatgaccgttaaaaattccccctgaactattgagattgttagatttaaggacttttatctaatttcattcaattttattatttcagtaattgtttatgtactaaattatgctccccagactttgatatctatcaaatcatgtcccttgaactttgacatgtactaaatcatgtcccctgaactttcatccatgttagactttttatactaaaattggacaaa

SEQ ID NO: 350664 - DNA, 467 bp, Cannabis indica
aaaaaaattaattattttttatcaatttttttatgcattttaaattttattcctttccattcatattgctattcccattcccattcatattcctatattttcattcctcccaaccaaacgccttctaagtgttttcacagtcattatgcatcgctttcgtcttccttggcgtaacgaagttgatgtctcgccttgtgcatccaaggtcttatggtttctcgtttatatataaggcaacaatttgtatatttttatctcgcataggaccttataatcagcaagttgcaaatatactctgtcactttcgcatttaataattattccattaaatgtaattaccgttacacgcatcgatctatattctcttgacacgtgtcttctattgaaatggtagccgaatttcgggtataacaatataaattagtcaaacttaaaagtgtcatatttaacataaaaacttttaaaat

SEQ ID NO: 350665 - DNA, 689 bp, Cannabis indica
atcataaaataacagaaattagtacaaattgccttttatcaatccaaattactaaagcggtcattacatgattaatggaggggtctagattaatcaatttcaaaaataagtttttaatagatacaaatatttaatattgagaatattaaatgattaatcaaacaaagtgagcctgaaggaaataaaagtatgaataaactaaatatactagaacctaattctgtatattgatctaataataatgtggtggtttctgggatctggtgctacattatgtggtggtgctacattatgtggagggtctcgttcatatgatttagcttgagcattcgaatgagatagaacgtttgtaagagttataaaatgagctacacttacttttagtgcaagtgggagattgttgggatttatgccctaaaaataagtaattaatggataatatattagagaatatatgaaataaaattataagataagtgatatattaatgatacgagtataattattaaatatctaaaaattccttattcatatggagaaggtataatcttgtaaggatgtagaagataattaagattatatgatatgaataaaacaagttggtagtgtattaaagtattaaaaatctttaatatagaactgctaagtacgatttaatatacaacatctagtgtgtgtgattttaattt

SEQ ID NO: 350666 - DNA, 435 bp, Cannabis indica
ggatgttaacaaaacatacttggtagtaaatctagatcctggtaaaatatttccaacaagattatctcataaggtatgactttagatgaataattgcaagttgttgtactaattgatagattacccccttcttgaaaggattttaaaagtactcttaggcataatactaaagaattttcctcaaaaaatttaatcacccgccttcgtatagaggaggaagcaagaaaacaagacccaaaagatgaagtgcttgtcgtttcaaacaacaacactaagaagtctacactagcgattctgaagcctaatgacaaaaattataagaattagaactgcaactcgaattccaattctaatcgcaataaccctcctcaaaataataaccagagttggaaccataataggaaccaacatagaaggtgttggaattattttacc

SEQ ID NO: 350667 - DNA, 877 bp, Cannabis indica
ggttactttgcttaaaaccactaaaatttagctaacatttcttcaatttacaccagaaatatcccaggtcttggctggttcttgtggtggtcgagcaaggacgtaagagaaagggaaattcttgatttttttctattttcttccaaaatgaataaagcttaattgattaatctcgtgttgaaataaaattggctaggtgtcaagccctaaaacagacacctatcccctttaccaaattactaaaatacccttggtgcaaaagcataagccaaattaagcctaggggtaaaatggtcaaaaaccataacccgctcaaacccggtattctaactatcttaaatatttatcccactaaaaaaaagcttctagacttacccatgttactcaaatggccatccatcgcattttctgttgttgctaagcaaaaattttaaaaatagcataattcatatataactcaaataacacctctagagtttaataaaatctccaaaattgagaaattataattctagtacccacttttaataatgggatccacaattatataaattcataattattataaaaataaaattaataattaacgataatttattttactaatccgtattctaaaatgcggtcattacaattatcccttcgttaaaagaattttgtcctcaaaatctaacttgaatagctctggatattgagtcttcatgtcagactctaactctcaggtggcttcctccaccttgttgttcctccagggaactttgaccaaggctatggtcttgtttcgaagaaccttctccttcctatcgaggatctaaactagttgttcctcgtaggacaagtctgactgcagttcaagggcttcataactcaagacatg

SEQ ID NO: 350668 - DNA, 713 bp, Cannabis indica
acttaatctcaagcaagtattttgcattaatgctaatactagattgctatgttgatgacttagtcgagaaagaagttactgtttcagactaaaacaatatgtcacaactagatatccctcaaaacaatagtaagagtttaaatatacttctatgtatgaatttaaccagactcctactgttgagtgggagccttctgagatgtaatcaaacaaggaacatcaagggacagtcaacaaggatttatgaaagtgacctatattttagataatagggatgtatatattaaaagtccttatatctacaccaactcataaagagtccgagatggtggttactctggtggtggaggagttattctagaagagtgtaaaaacccatctataataattctaggtccatcagtaaagatatataactttgtaaattcatattactagaaagttattcaactgaagaaaattctacactgtattatctctatttcattatttaaaagaatgagagacatgtcttcggtttattcagatgtacttaatgagcagtgaggatttcagtatcccttaatgagtaatgcatatagtaaaggatgttgcatagtgttttatgaacatacttccaaaaatttgggtttagtcaaatatattacacttgatctgaagatcaagacaatagattgattgaaatacacaacttgttttatgttagtgcaagt

SEQ ID NO: 350669 - DNA, 818 bp, Cannabis indica
gatacaaccgatgaggtcaatactattatatgttcctagatagaaaatcacggtaccttgttgtagtgggagggttttaagaaaccaacactattatgacttggaagacaccagtattaaaaatccattgttagtttaaacaagtaatggatagtcaaaataaggaaccaagaagcaaagctaagagaactatggttaaaaccattcatatggagtaagcaaaagtattctattacaaggacaagaagggaaattttgaaaataagtctattcaatggacttaacaaaacttcccgatcctagtattataggtttgagattatctaaacctgtgacttgtgatatacttggtaatttacttactctagttcatgcaacttactttagtaagatgctggagcattattctaatggctaattctaaaagaagtctttggactcctagatatagattttattatttaaggaacagtttcaattattccagaaaagataaaagtcatgaaaagaattccctaagaatcaacagtgagaggtctcatgtatgctttgcaatgcattaggctaggcacctactgttgagtgggagtttatagtaggtatcagtttaatctaggaaaggaacattggaagataatcaagtaaatcttaagatcaaagaagaactatatgttcgatgataagggtggtagtttaatactcttagactacaccaattaaaatttctagacttgcgttaatgctagaaagtctacttatgagatggagattactttggggtggagcagtgatttttggagaagtgtaaaaaaccgtat

SEQ ID NO: 350670 - DNA, 403 bp, Cannabis indica
agaaatacttgggtccagaatcagtgcaacggactaatgaagcaattgagaagattaaagccagaatgcttgcctctcagagcaggcaaaagagttatgtggacccaaaccgcaggaatgaggagtttcaagtaggagatccatgtgttccttcgagtgtctccaatgaaggggatcaagcgtttcgagaaaagaggcaagttatgtcctagatttacaggaccttttgagattcttaagaaggttggacaagtggcatatcgattagctatgcctccagctccttcagcagttcacaacatattccatgtctttatgctaaggaaatacgtttcagaccctggtcatgtagttagctatgaaaatcttgagatgcaactagaaattgttggaattattttac

SEQ ID NO: 350671 - DNA, 566 bp, Cannabis indica
tttttaaaaacaactaaccaacatgacttgtgttttaaaaactttaaaaactattttttgttctcatttctaaaaacaattttttaaaacaaaaacagaaaacaataccaaacatgctccctagcatttagtattattttagatgttgatataggtattgatttaattaaatattaaattatatatattttaatataataatttttaaaaaatattactaataaattataaaataatatgtttaaaagtactagacactataaatattcaatattaataaatttacatgaaatcaaaatcataaatgctaaaaagaattagtggtacttagcactttaattagtaaaatttagcattatgtcttaatataatttatataataactttttattaaaaatatccctcgctaattataaagtaataagtcgagaaaaatactaagcagtatcacctaaggggtgggtatccgatctaatcaaatattttttcctctattcgtatccaatccaattagtaattggatttgaaaaatcatcatccgatctaatccaattagacctcaaaat

SEQ ID NO: 350672 - DNA, 800 bp, Cannabis indica
gtcaccagttctcagagatgttaatttgcaaaaatgagactcaaaactcttcatttatgagtgagtttcccatgttggaaatgaaaagttatgaatttgacttctctaaattcatggatcttatttatttgaaaaattagatggatgatcgaaattgaatcaaaattggataagcagaacccatcgtaccaggccatttgtcaacctggacactgggtatcctatttctgagttccagggatctcattttgatactttcaaggttcttgaacttcaggacgaggtctcctaccccattttttatcattctggaatcattggtcaaattagatttggtatttgaggaatcgaaagtagcaccccaggttgattgtcaactttggcgttgggcctagcattaggttgacctaggggctgggccctgtttccaagggctcgagtttgtggttttttccttgagtttacttgaatcttcattacttctgatgacaaaaaaaatgcctagaataatttttagtgtacttgattagaaacagtccaggttgacaatatgtcaacctaggtgctgggcctagtgccaagtgtcaacctgggcactgggtcccccttatggacctttaaaagttctgtttgatccccaagaatagttgaatcttaatattttctaaaaatagagaagatactcaaaagagttcgtagaaaacatcatcgaaattggcccatgacagccctagaatatgtcaacctaatctcaggtttcatcctgggcactagtgttggatattattttaccaggatct

SEQ ID NO: 350673 - DNA, 601 bp, Cannabis indica
gacctgaacccagtcccaaacccaaaagtttacccgaacccgtaccctgtgaccctaaatttgaaccacaacaagaagttgaccgggattggaactaggacttggactttgaatcataactgaaattggacatagatcccaaaccgtaacgagacccgaagtagaccgtaatcgggagctggaactggatcccaacccaaacttggactaaggacccgaacccgaacctgaacttaaacccaaacatggaaccagactaggtacacagaaccagggtcgggacccagaaccgcaccccagtctcgatcctaaacccaaacttaaaaatgggaccttggacctaaactagaataacatccagacccgtgacagtgatccaaatctagactccagattcggaaaacggggtctggaatagaccagtagtcggtgtctagatctgggactcagactaggaccagaaccaagacgatgaaccaaacccgaacccagacctagacttgggaccaaaaattagaacctgaacaagaatcggccgaaccatgaccctagaaagagactaggaccgtgacgaggacccggacccagacctagaaccgaa

SEQ ID NO: 350674 - DNA, 555 bp, Cannabis indica
taagagccattcattccgtgggtgtaagggcccaatggaggcttgaagcggggacgttacagttaatgattgcgcaacagttgcttacttctgctaatgatgagcaacagttgcaatagttgcttgtttaatttcatttaattttactatttcagtgattgtttataaaccatgctccctagttttttatatctaccaaatcatgtacctcgaattttgacatgtgtacttaattatgccactgaactttcatccatagtaatcttttttactaaaattagacaaaaatccttaaatccaacaatctcaatagtccagggggcatttttaacgaccttaaaagcttaggaggcatgatttggtacatgtcaaagttcagggggcaaaaattctaattagctttatttttattttctctaaccagtactgttaatattttgggattatttcacaaaaacataaaaacaacaaaaaaaaattacagaaatacagttttacggaattttaaacatttttacgtatttttttgattttattaatagaaaatacggtctt

SEQ ID NO: 350675 - DNA, 726 bp, Cannabis indica
gcttctctttacttcctttgcatatcgctcctgcgacttccgggagtctcctgcgatatagggtccacctatgatggtcaatatattgcgaggtgtcctcgaaccactcgcgctctgattttcctctttgtcatccgctcggggatgaccttcctcgttccttttatatttgtcgaattttcccctctggatcagctcttcgatttcatcctgcaagacccaacattccagagtagtgtgaccaatatctttatggtacttacagaattttttggggtctctcttgtcgcgatttcccctaatcgggggaggcctcttgaacaccccgttctttttctcgatggcgtagatatggtctcgtggtactgcgagctcagtataattcacgaaatgcggtctgccttttcttttcagcgaggactccttctttggaggggacttggccaattttgggcttcgctgtctacgtggacaacatcttcttgggcttcgacctctggaatttttccctcggggactgcgggatcgtgaccgcaacacttgtgacttacgcttgtctttgcttttctccaattctgccagagaattctcaattctcttatgcggtttggccatggcaaagaactcgactaacgattcaggtctccgagcctgtaactccctccaaaaatcgattcttggcaggacacttgttattaacatgcaaacaaacgaagactcgggagc

SEQ ID NO: 350676 - DNA, 1101 bp, Cannabis indica
agtctgcaagcagtattatctcaaatagtgaggggaccatgggcctattttaaccaagctttcaataagtagatctagaattcaccagtaaattctcaacttattaattctgtcttgctccactatagatttggaattgaatacactctcagttatatagaacgctctatatgtaccacgatatagatacattatgattatccattgttacaatcctaatagtcaaggatcctctataaatgattgataaaggctcaaattgatacagtctctatttgtgcacatataattaatataaattaaatatttcttatttttaatagtaaatttattcgatatttaatttactttaattttgtgttacttttcagatttatagtacaaatgataagtgatgagaagacatgaaagcccaattcaatggcccaagcccaacatgttcccaccatatcattcttcaccatcaattttctaattccaagctatgaagccacgtccaaggcacaggttattgttaggggtgggctcattactcaacaatttcatttcaatctttatgaatcaacaaaggcccaagttagaccaagtcaagctaaactatgacgtctccttctcttctctaataacttgccacgtgttggaatccttcagcttcatattatgtgtgtatggcctgttaagccacttcctttcagcaactaaagcctgacgcaacttcagctaatgagcttatcaccaaacgccatataacccacaggttcctttagttctccaacaaagttgatgcatggacccattttctatctcttcatcagtttttcatgcaactaaatccactttattgtatacgaaaatacatgtaatgggatcattttagctctataaatagatcaatttggaaagtaaaaaacaatccaaaattttatctttttctttctctcttctttattttactttattaattttagtgtaaaacaatatcttttctaagctaatttctttggcaagacttaagtgtaagttcatgcaatttttatttttctaatatattgattctctttattctttatttccatatttgttatattaaatttctcttct

SEQ ID NO: 350677 - DNA, 785 bp, Cannabis indica
gatatcgtttgcggtcatattcacaattgccagggatggtaggtgggccctatctcgcttacgtcactcttacctcaaaaaaatcctcttatcatacaggtaatataataaattatataattgagtgtacaattcactcccatccatccatttcttaacaaaatcttttaatccaattttattcattattctttaatatattggtttgtatcacctacaaactcatcttttttaaacacatccaacaatgaattaattcagactaatttataatataaaaagtatagtatttaaatagcgtattttataggtatataaaataaaaaagtcacgtgtgtaactgattatttgaactctattttcagtatgttaaattttttttttttgaattttttaaaatttcacaagatattttaaataactacaacgtgcacgatcatttaaaaaaaataaactaaaaaattctcttagatgtcgaaacaaataaaaagtgcaccatacaattttcttataaaattttaatttattttcttttattttaaaagattgtaaattctataacataaactataaacttttgggtgcttttatggtgcacctccacaacttggtgcattgatacattcttttcatgtttttaatttttgaatagttgtgatcttaatttttttttttatatcatgatgtgtatatcataattatttaagataacttacaaagttttgggaaaattagaatagattcaaacagtctattttacaagtatatgaaatgaaaaaaaaaaa

SEQ ID NO: 350678 - DNA, 601 bp, Cannabis indica
caaaagattaacgtatagtttttgttgtctttgtttgtttcaaagacttattttgttatgtttatatatcttttttgatgtatttagtaagaaaaattgttcaaccttaaatagtttatgtctctcactttttctatttataattagttgtttttcagttttaatttagttattatatggttcttattatagggttcttaaaaaaactatatcattgggttaagccttacatttattagtttatttgagttttatagttgaagctgttttagtttcatatttattaaattttacaattacgttattttttagttgttatattgttgtttttatgttgttcaatacatgatatacttacaattatgtttaactattaatcgtattttaatggttcattattttattaattttgtcatcttaatatttacaggtgcgtgataagacctttgatggtgtttaaaagttgaaccttctaaagaaaatattacaaggtttataacttatttttttgatttgtcttgtttgaatcgttctctgcttgtagttcattcatttgaagaaaaaaatcatagtagaacaacgatataaaaacataaagaca

SEQ ID NO: 350679 - DNA, 1028 bp, Cannabis indica
gaagcaaagccaaccacggtaactctacaattggcggatcgatcactagctcatcctagaggagtcattgaggaagtgttagtcaaagttgacaaattcatctttccagctgactttattgttctggatatggaagaagatagcaatgtcccaatcatacttgggagaccattcttggcaactggccaagctttgatcgatgttcagaagggtgaattaaagctgagagtccaaggagaagaagtggtttttaatgtgttaaaggcgatgacttacctgaaggcaagtgataattgttactttgtttatttgattgatacaattgtgagtgagaagaagttgatagatgaccctttagaactaagtttaattgaagatgatttgacggagctagaggaaaaagaagcaatgggttatgttaaatggcttgattcctatgggccattaaacagaaagtactatgaagagttgggagtagaaccaagagagcttgcgccatctactgaaaaacctccagagcttgagttgaaggtgctccctagtcacttgcggtatgagttcttgggataagataagaagcttccagttatagtgtcagtctcactttctgatgtggaaacagatagattgctcagagtactacgggcgcacaacaaggctattgcatggacacttggtgatgttaagggaagcagtccctcaactgtgatgcatcgaattctaatggaagaaaatgctaaaccaacaattgatgctcaacgcagactcaatccacccatgaaggaagttgtcagaaaggaagtggtcaagtggttagatgcttgagtggcttacccaatctcagatagtaaatgggttagtctggtacaagtagttccaaagaaaggtgggatgacagtaatcaagaatgagaagaatgagttgattcccacaagaacagtcactggttggaggatttgtattgactatataaaactcaacaaagcaacccgcaaagatactttcccttgccattcattgattagatg

SEQ ID NO: 350680 - DNA, 972 bp, Cannabis indica
cctatgaagtttagagtgatttggataagtttaggtagtgtttcggtgagtgcgaaaattagacttttcgagttttatagtttttaaaaattcctaagagattagaaatcgtatttgtgtcataacttttgactcgagtctccgttttagacattctataaaccgtttcaaagcttgcgatgagctctataatatggtgtatgttttagagccaaaatataagttttattttagtgtatttataccgtggggtttggtagaaaaccctaaattgtcttatgtgaatattaagtagtgttttgggttaaatacttattggtttaccgttgttgtgacataggaccaagattatcagggatagttctccacttgggttggccgaaatgtatgaacctggattaaaagtaagaaaagtatattgtactgtatagtacgttgtatgtaatacaattagtattgttatgaatcgattaatattgagatattgttaatatttttatataatgaaaagactgattggttgagtattgataatgtgataatattatccatgtgatatatgggctcacttgattaggtgatgcaattttcttggagacatactgggcgtaagtacgggtgtcagtgatatatgatgagtaccgagcataggtacgagctcacctgattaggtgatgcaatttttcctggtgatgtactggggcgtaagtacgggcttcagtgatatatgatgagtaccaagcgtaggtacgagctcacctgattaggtgatgcgattttcctggcgacgtactgggcgtaagtacgggcgtcagtgatatatgatgagtaccgagtgtaggtactggctcacctgattatgtgatgcgattttcctggcgacttactaggtgtaagtacgggcattagtgacatatgataagtaccgggcgtaggtacgggctcgtctaattagacaattcgatatattgg

SEQ ID NO: 350681 - DNA, 513 bp, Cannabis indica
ctgtcccatgtgtagccctggctgctgcggtttctctttccaactcagtgtttcgtcagtttgattcagccaatcgttgtcaaagtggtttgttctctaattctaccaataatacaaatctagtaggatcataggcgtcctcactccttctttctaggatttgatcaccatcagcattgaaattaccatcgctcctccctaaacgtggtgttttagatgtgttaggtctttgagatcccataggttctttgccaggatgatgggttgtttactcaagacgattatcgttatgttgatcattatcaaccatttaatataggtggattgtgtttataaggagggatttttctgagtctttatcaccaaggctctcaatgaaagcaccaaactgtttacgcagattttcattaactaaataaatagcattttttgcaataaatgcactacagaaataaatgataattaataataccagatattttacgtggttttatagttaaaatttacatactc

SEQ ID NO: 350682 - DNA, 1294 bp, Cannabis indica
tattcatttacaaaatatttgtcaccaagcgactaaacagcaaaagcccttatgtcccgaggatcgatcgctctaggcctaacagccctgacatgtaaaccttcacgtgctcgctctcacggctcctcagctttagccttgcccttacctacacatgaagatagcactgtgagttgacagacccagaaagaaaagcataacataaaaatatactaatatcccgaattataatcaggcgcccatacacctaaccataaccctaactgaatcaggatcgatcttgaaaaagtatgactaaccgcgaatccagcctatgctcagtactctaatcatactgatgtggcagcagttaatccatactatctgatagcctagcatatatttgttggcatctcggtgcatctctatgtacacctcactgatgccctgatatgctaatctgagggctatagatttgcctattctgacggcaactatcatgtatgctaaacatgtataaacatatgcataatattttactaatcttaccttgattccgaattcatgtgtgcccgccaacctgagtggaacaactgctaggcgaattacaggttcctaaatcacatcattcataacataggtaagtgacacgctaaataactttctggggacttaaacttgaaactaaaagtttccctatcaatgaataacatgaaaataccctaaacatctcaaaaataggaaaaactaggattcccaaaactgccccaaccggtagattagttcccaactagaattccagttctgatgggtttcctggagaccgaccgaaattccggttcctacaggtccccctgaaccagaattttgattcagtgcaggaaaccaacaaaaattcataacttaaccaaatcaaccccaattcacatgaaaccttccagacctgctatatagaccacaaggaacataatcaaagcaacaaaacacttatacaagctcagaatcaagatttgccattaaagctccaagtttgagttctaaactcaaaacttgattatatctactgacagccaacaaattaagcttaaaacaacataatctcacctaattaaacctctgaaagcaacaaaaaacaacaacagcaaccacagtagctaataactcaactcatgcaaaatttcattttcttaaaactcaagaaacttaagaggatatagtcaagagcttacctagagcttggattcacttaaaatctgctgtactctgcttgaaatgctgaagaacaaatgaattccctagctagtttctagggttc

SEQ ID NO: 350683 - DNA, 706 bp, Cannabis indica
atctccctcttcaaattttgacaatcattggtgtcattatgatattggcattactttgacatgtctctcttgcccatctcctttcttataggcaagagcttttggtatgggattgttctctgagtggccatgaagatggcctcaggcttctctattaggagggtgaagcaagtatacttctcctccttattcttctatggcgtgggagaattgttaaacttcccctttttgccattatttctgctagagctattggtgtcgcgcttgtttctagtgtttttaccactaggagtctgagcagaattgttggtgtctgcctatgcgcctagtgggtcatgaggctgttgggtgccacgtgactgcttgttgctgacatgcccagcctggacctgtcgtatagcttcttcaagtttgttaaagctgccagctctatcaaggaactccttcatgttgttggtggagattctccagatatcctactagaaatcactgagtgggagtatggcccccagtatggccgtatatcggctttcttctataaggcctttgactttagtagcctgggccataaatctctgaatgtaatccttcagaggttccccttgttgatgtttgacttcaacaaggtcttccagctatgatggtacaagtctcaaggacgagaattatgtgtagaattcttttgagaactcagcccaagagttga

SEQ ID NO: 350684 - DNA, 648 bp, Cannabis indica
aattattaactaataattaaaatcaccagaccagtcatgagctaatttaattaaaatgatataattaataattgatgttttttttttaaaaaaaaaaaaaaaaagtgatgatatataactctaggtaacgtataatagatatatttggaaaggaaaattaactatatatattatatatagatatatttaaagcaatatctataagccttaaataatggtttgattttttggacaacctgaattaaatgctgtccagacgaaagaaaaaattaattaaatgctttcaatttagtcatataaaagttaattgttcgtatgtaatatagaaagtccaagtcaaaatgataggtataattttcttaaataatcaatgataatattgaaaagttacatatatatctagttaataaaattcatatataattttattcttttgtttgatttgaaaagaagtagaaaattaagtaaaatgattgatttttattctttgttgaattaagttgttgcaggtcttctggaaataaatacaaattctagtaagttaggtttgttatttggtctctttcatattaatttctcatgtaatatttaaataatgacatacaagtaattaaggttgcgtttggtaacacttttgctttttaattt

SEQ ID NO: 350685 - DNA, 514 bp, Cannabis indica
tgggttcgcgtcctgggtcttggtctaggttgggtccgagtcccaagttccctcctaatttgagtctgtatttagtttttggtctaagtcatttgttctgatcctgatatgggttcgagtttgcgtccgggtccgggtctagccttgggtcttattctaggtgtgggtttgagttcgggtccgagtctgtttgcgggtttgtgtctagttttggacctcgatctcggtctaggtttgggtcaaggtccaagtttgtgtcaaggtctggacctcgatctcggtctaggttcttatctggatccctatctaggtccatgtttatgtttgggattgagtcccacatttaggtccatgtccgggtttaagttctggtctgggtacacgaccttgtctgggctcgagttccagtctcactttgggtttgaggctaggtctgtgttcggttctaggtctgggtcaggctcgtgatcacggtcctagtctttttctagggtcctggttcgcgattcttgtt

SEQ ID NO: 350686 - DNA, 566 bp, Cannabis indica
agatcctggtaaaataaattccaacatgattaagctcccaattaccttgggaaccgcccttgtagtagccaaattaatggctgatttcgcggtaatcgaccaatattcggcgtacaatgccgtgattgctcggccaatcctgaaagagatgaagatcgtgacttcgatctatcatctcacaatgaagttccctactcccactagagtaggctctgtgcgaggattccagtcagactcgggagaatgctacaatgcagcagtccagctcgcagagaagaagtcagtaaatgtaatctatctgttagaggcaccacctcctcgccaggaggtccttaggatcgaagaagtgccgcacaaagatggacaagatttggatccgagaacctggattatgccgcaaccgcccaagccgcggaagacactattgaggtacctattgatcccgtagataatagtaaagttttcaaaattggctctaaattgacttttcagcagccagaaaaactaacgacttttctcaaacaaaatcttgatgtttttgcttgaaaacattcagatatggtcgg

SEQ ID NO: 350687 - DNA, 648 bp, Cannabis indica
gtatttcgatccttaaattatagtgcatgtatgatttattaattccgcactttattcataatcatgtatgttttagtttatacaaataaatgtctaacagtttgtgctctctaagatatcttacttttgtaataatttataatctttgttaaaaaaatattactatccaatttcactaagacatctgtaatatatgtctatttttaatcagaataattgcttacgaaataattgtgcatgttataggattgatagcaaattattttaaatggataattttctattattttttatacatgatgtatataacttaaattattattttcaatgaagtgctcattgtttaaaatagaataaatgcatatagaaaaagtaaaggattatttcacaattatacaaaagtaaaattacggttgtataaaatttaaatatttttataatttttatgattttatttatagaaaatatattttttttgatgtattttatggtgtatgtgccattgttaatttgttgttgattttttattgttatttatatgttatttttaggaaaattttatttacaccccaaaaatttataagtacacctcattttaataatttttattttatataaatttatatctttaattttactaagtatttt

SEQ ID NO: 350688 - DNA, 567 bp, Cannabis indica
tgcagagtgttgttatgaccctggatgagtccgagcgcgtcacggagattttgcaattcggttgcatctctgatggttgtctgggcgttggttccaggcggaatggtcgtattatggatgccctggttgggtgcggaactgttattccctgtctcttgcacaccatgcgcaattccagtaataggagctgttccaccattcaccacgcttcctgtcttttcgggattaacagcaggcagaacccttgaacttcctgtgtcctgtaatgtaggatccagcgtctgtgaatttgctgggtcagactgacctctacgaatttgctccatcgtgttggcggttgaatgtcgaatagagagtgatttgtgatccttctctcaatgaaagcagcaaaatgttgacttcgcttttagccaacgacaatgagtctattttataagcgataaacgatatgtagtaatagatatatgataaagcaataataagacacaggaattttatagaggttcagccccgagcagttcggtaatagcctaatcctcgttatttgtatggacttaagatcaagga

SEQ ID NO: 350689 - DNA, 944 bp, Cannabis indica
tagttagttattccaactgtcttggaagctttattttttctggtatttacttcttgccaagttgcctaaatctgttacattatgtcgttgtactaaagcctacatataggtctgtaatttcagctcaagattaataagaaatcattctcttctcctttctctgttttagtcttaaacctctcatatggtattagaagttaacctgcccaattcaatggcaaggccttccactatatcccaagatggaatccttcctcaccctcctgaaaatactagatcagatctcccaactgatgttacttctgcccctacagtagctcagccaacaggaccaaatcttagaacctactgatgttcacgaagatcaatctccaagaaccgaagatcaccagattcctcaaaggcggtctcactctcttctcgatcgtcatgccaatgaagatgcatccagccccttcttcctcagctccggtcaccatcaaggtattgttctggtgtcaaccgtactcactggagtcaattactagtcatggaaaaggggaatcaccatggctttggcagcgaagaagaaaatcgcttttagtgatggctctctcccaaagcctaaatctggtaactctcctctcccttcttggctttgttgtaacaatatggtcatgtcttggcttgtgaattccgtctctgttgaaatcgcccaaagtataatgtactttgacctagctacagatatgtggcatgatttagctgaaagatttaatgagggtaatgctcctcgaatctttcaacttcaaacgcaactcactcagttgcaacaaggtgataatttcgtcactgcatattttaccaaattgaaatccctatgggatgagctgaaagagtttcagccgaatactattaggttttatgccctaaataaaactccatttcaatgtaatctattttat

SEQ ID NO: 350690 - DNA, 920 bp, Cannabis indica
agttatgacaaaaatacaatttctgatcacctaggaatttccaaaaactatgaaactcgaaaatcccaatttttgcactcaccaaacacaccaaaacttatccaaatcattccaaacttcacaaggcgcatatatactataaatattaccatcctggcgtaacagaaattaaaatcgagcccttaaatgaaaaacgtcgttagtgttcggactaagctttaaaaaatttcaaactcgatttctaactcaaaatcacctcaaattcaacaagtaaatatataaactagtcccatagtaaccaaagaaaaattctacgaagtcagaattccataacctttttaaatcataatgcccctatataaaaccaatcgtctttagcttaaaatgtaattaaactatatttcaaaaaaaaatgtaattaaactataccttaagctttctctctttaaggatttgctatcccactactaccagaacttagatcgctaggtttcaggttgaaaattgaagaaaatgaatacaaagagaaaaaattttgttgaaggagaaagaagagggtttcgtactatttttttttatttaatataaacatataacatataatatatatatacatataacataaatttatcagtacgtattgtacgaactgataaattttaataatctattacaataatattataataatataatattaataaattttttattattaatagttatcttattatttcttagtcactaagaaatttctatttttagggtatttagccaacttagagtaccctgaaatactccggcatttctaaaataaatttatcccaataatcccatctatatttctatctaaaactgttgtgagatttatagcctccaatcgggtctccagggtcgccgaacttaaaaatatttttatt

SEQ ID NO: 350691 - DNA, 539 bp, Cannabis indica
acttcatggctttccttgctccattgtgtctgaccgggacaagatttttttgagcttgttttagaaggagctatttcgtttacaaggcacgattttgaagcatagtaccgcctatcaccctcaatcagatggccaaacggaggtggtcaatcgctgtctcgaaacttatctccgttgttttgtcagtttcaaacgcactcagtgggtcaaatggtttccttgggccaaatattggtacaacacttcccaccacacctccaccgggatgacccctttccgtgctttgtatcaccgtgatccactacccatcatctggttcgagccatctagctctcgtgtttctgcagtcgaagctcaggtcgtactgccagaggaccctcgccaaacgacccaatgaaaagctgtctccacagttctttgggccctttcctgtcttagcttgcatttgaccagctgcttaccgccttcagctccctcccgactccttgatccatctcgtgtttcatgtgtccttgctgcgtgcggctttgaggccccaa

SEQ ID NO: 350692 - DNA, 884 bp, Cannabis indica
tttcgacctagaaggaaacaaaagggggattcaaacttttagcatatttcagcaccaattccagctagaaaaccaatcctagtggtgtccaattcttgaggtaagcttcttaccatgttattcttattttcttaaggtttagactaggttttggatagggttttaggtttgtaagggctgtgaagttaaattaaggttacggtaagttaggattgtttttatgcttgtttgagtttgaattgagtagaagcatgggctgtttagtttgatttgaattaagtgatgcctaaaatttagttttctttacttgaatatgtcattttgattcaatgatggaattgttgtgttttggagtttgtaatatattgtattcatgatatagaactgttatgtgaagtttgggaaaaattggtaaggttgggagcaagttttgggactttgaagatcttaaattttcgagtttttgctgtagtgaaccggaattccggatggtacagggctgcaccaactggaatttcggatggtcaatttttaggaatcatcgattttcgtattttagccataagttttcacccgggtgtcctttttagaaattctatatactattttgaaggttatgaagagctctacaatatgagatatagtttagagccaaaaaaatgtattttctttttgggtgctttcaacataagattcggttgcaaaccttacgttattttatgcgagttttagacagtgttttggagtagaccgttattgatttacctttgtcgtgacataggatccgagatcatcgagcatcgttccacttgatataggtcagccgcacatttgacattatacttgaggtaagaaaagtgttatgcaccgtttatggttaatga

SEQ ID NO: 350693 - DNA, 971 bp, Cannabis indica
agaccacagggcgagcaagtagagcctggggttgcccaaaccgatccatcggcaccgcctccacctccacagaatctaggggataatgcgggggttggcaatgctaatcctcctactgactggcagcagattttccatgaaatgcgaggtattatacttcatcaagaagaaaatttgtgacgattaaggaaaccggcaccggttgcccctattgatcaaatgttaccacctgtacttgtgcctgtggtgggtaatcaggggttcataatgccgcatagggattctgtttttgagcgatttatgaagttgcaacctccgacttttctgggaggtactgatataactaaggccgagcagtggatgagtactattactcattatcctcgataacaagggggtgacgaaaactgagagagtgaactgtgcagccttcatgctacaagatcatgcccgcgtgtggtgggacattgtgggtcagacccgggatgtcagtgtaatgacctgggaaaaatttaaaaatctttttgaagaaagttttaaaatattgttgtgacaacttcacacatggaggactttgtgaagcttactcagggaaagatgtcagtggctgaatacactttggagtttgatcgactgtctaagtttgctggggatctggtgcccacaaatttcaccaagaaatagaaatatgtgagaggactgaacgccacgatcagtcaggacttgaaaattaccacttcacgtgaaactttgtacaagaaagtggtagagctagccttgattgctgaggaggctgagcaacatgtagctaaagagtagaccgcaaaggatgcagtcacaacatcgaattcgcctgctagtggtaatgtcagtaaggggaccgacagtggcaaccctgataacaaacggactgctgaggcttccggagcatcagggggtaatagaaagttctggggaaacaaaggtggccg

SEQ ID NO: 350694 - DNA, 700 bp, Cannabis indica
tttacaaaaataatttttttttgcctaacatattatattttatatttttgcttacatactcggatcctagacccgaaactatacccgaacattaacctagatggtttcatgtcatggtatggtgttaaaatattaatttttttagtaagaaaaaatctaaaaatagttttaaaaagtttgtgccaaactgttggaatatgttttaccaggatctagatttactaccatatatgttatttaacatcctaaatataaaactctaaaacaatgtaaataaatacatataaagtttcagaaaccttacagtgggtgcagtggaattataatgactccttccactcagatctctaaccctggtatcctgtctgtagcagagtatcactaagatctgagcccgaatctccttctcttgaaactgattcttcatagccttacacactatgattgagtaccacttgatgtgtgtgggcacttactctatcactatagggtttgaaaatatgaagagaagaagagagaggagtggttcgaatatggtatagaatagatggctcaaacttttcactgaaggcaagtgttcatcatcttttgatattaggcatcactatctatttataggcaaccacctaggtttaggttagaattatttggcattaaaatattgaaaaaattaaatggtaaatttccttcaagtggccgg

SEQ ID NO: 350695 - DNA, 641 bp, Cannabis indica
ttatttttaacagaaaatgacacacataaaacttaaacttgaaaagatttgaatggttcactgttaatttaactagacatgattaaagattggaagaaatgaaacagaagaaagacagagaaagagagagagagagagagaaaggaagagaaataaagacaatctcttattttttgatgaatgagtacaatacaatttatatacacaattgaaagagactaattagctaaaaccaactggagctaactgttacaatatatatgcacttgttacaaatgaattagaatatagacaccagtggcatttgcacgtgctctaacacaatagtgaaaataaaattcaaaaaatagttcgagtccaaagttgataaaattaattgtaaacataagcttattgaaatgaatcaactaaaaaaataaaatacgaaataatttttttgtatttatatgtgactcttagtcacaacaaaaaattatttgtgattaaaacattacatttaaatacaagttgtcactaattaaaacagtattgtgattaaaactgtgacttttttgactaatacttttagttatggattttttagtcacaatataagaataataatttatgagtaattataatttttattatttttagtcaca

SEQ ID NO: 350696 - DNA, 1060 bp, Cannabis indica
ttttcttaccttcaatccaggttcatatatttcagccaacccaagtggagaactatcctcgatgatctcggccctatgtcacaacaatgataaaccaataagtgtttatcccaaaacactgcttaatattcacataagacaatctagggttttctaccaaatcccgcggtgtaaataaactaaaataaaacttatattttggctctaaaacataaaacatattttagagctcgttgcaagcttcgaaacggtatatagaacgtccaaaacggataccgaagtcaacagttaggacaaaaatacgatttctgatctcctaggaatttttaaaaacaatgaaactcgaaaatccaaattttcgcactcaccgaaacactaccaatacttatccaaatcactccaaacttcacagggcgcatatataccataaatattacaatccttgcataacagaaattaaaattgaccccttaaatgaaaaacgtcattaacgttcgaactaagttttgaaaagttccgaactcgatttctaactcaaaatcacctcaaattcaacaagtaaacatataaactagtcccaaagttaccaaagaacaattctacgaagtcaaaatctccataacctatttaaatcataaagctcctatataaagccaatcgtttttagcttaaaacgtaattaaaccataccttaagcttttcctcttcaaggatttgctattccgctactactagagcttagatcgctaggtttcgggttgaaaatcaaagaaaataaatataaaaggagaaaattttatcgaaagagagagaacaagagttcattcttcttcttctgttatgtttttaaaaacatataatatatatctgatacgttagtttatatatataatataataataatataatattaataaattttttattatgaatagttatcttattattttttagtcactaagaaatctatatttctagggtatttagcaaattccgagtattccaaaatacctcggtatttctaaaatcaacttatctcaataattcaattaatattttt

SEQ ID NO: 350697 - DNA, 1144 bp, Cannabis indica
aagtaataaagtatactcgaatggaaaagaaagaatgaagataagggaattagtgcagaagataagcattttactatgagttcaaagtacaatcaatacaccattcaagcagctgaaccaatggaagagtagggagaagtttcactatactctttttagtttttcaaataatattccatatattaagacttttttaataattttttcttctattttaagatcgaacattttctttaattttagttacataatgtttgttttaaattttgcaaaacttatatcttgttcctctaaattctctataagtaaataataagtattattttgttatgacttaaatatacccaattatattttactaaccaaatatgatagcacacatattactttaataaaacaaatcattcgcatgatcatacatttagatacaatctaaataaaacaacaaagaactaaactctaaataaaactaatatttacgtgcctcggcacgtaacttctaactagtatatatatatatatgcatttttcaaaaaaaaaaaaaatcatcaagaattacatttcccatttggacttattaattatgatgttatatacatatataaggggttttttacattatatattaaaatttttaattttttcttttttattgtggggtgaattttttttttaaaaatactgtgtttttttttcttagaaaaaatactgggtaagtttcatactgtgtactgtgttaagtttccattgttgttctacggttgttttttagttgttctattgttgtgttcttaattgttctgtttcggtggttttaaatatttataaaaagatagcatttttgtaaaaaaattcgtgtaacagtaaaattataaacttttatctaaaatcactattttttttttataaaaactcctatataaaggacacaaatgacaacttgagatctaattcttacattatgattataatttaataatttattgattaaacatgttttgcatcccattgaattaatcgtgtggtaggcattgtaagactagtcaaaaatattgtaaaattattgttcgaaagctttgcagtaattggtcatagtaacaaacttttttgtaaatattttcattcttttgttagtaaattttga

SEQ ID NO: 350698 - DNA, 959 bp, Cannabis indica
ttttttttttaaaaattaatttgaaccaatatagtaccaccaccactaccacactactacaacccaacaataacaacaatagctaattaataccaacacatgttcttacaataaggatgtaccatgtcatatagatagtgatgacatggggcgataagttacatgatacattggtgtgccctatcttctaacattatgaatatctgaatagtaaattcatgaaacttatatatagactgaagaggagtgctaaggaaactctctatcccactctctttttgcactctttctttaatctaatgacaaatgtcaaattttgagtaaggtttgtttttctttaatatttagttatgattttctaatgttattacaattatgccattccaaccaaaataatttaaaaataactagttatttattataatctaattactttattaactttttatttttacttaattattaaaaaatatatatatttgtaagaaaaaaataacaacattaaaaaattaaaaaaagtaacatatttaaattatacatagattaatcccaaatttttattttaaaaaaataataaaaactataataagtttaatgtatactgttgctcctaaaatcgcccaatatacgtggaccagtcaagaggggacacgtggatcaaattacttgggaagaactgctaagtctttttatgacaccaggaagcgttattcgcatgggtcccggaggatatacccggagtacaaggtactcccggaagcgagcatagcttgaaggcactccgggatgtgtcaggtctctcccgagaaatcaagtcgcatttaatgctgcatgggaggaagcgtgttgggactgtaacacgcaataaagtctgacggcacaacccccaaacagcagcgctacagtaatgatcatttaagtctagcgacggctactctgcgaagagtcacgtcaatcat

SEQ ID NO: 350699 - DNA, 726 bp, Cannabis indica
aaacaacatacttgtgagtagatctaagatcctggtaaaataaattccaacacaaacacccttacaaaaataaatagttcggctctaacttatattccatatggtagagcttgtaacaagctttcacacagtatatagaacgtccgaaacggacatctaagtgaaaagttttagccaaaatacaaaaaatgatttccttggtaaagtcccattctggaagctcctccgatcatggaagcttccccgatcatggaagctcctctgaacatggaagttcctccgatcatggaagcttctcttatcattgaagttcctccgatcatggaagcttatctgatcatggaagctcctcagatcattgaagcttctccgatcatggaagctcctccgatcatggaagctcctctaatcataaaagctcctccaatcatggaagctctcccatcccgaaagctctcccatgatggaaaatctcccatctcggaagctctcccatctcggaagctctcccatcccagaagctttcccatcccgaatgctttttcctaggccgcaagggcacaaaattcccaacttttaggccctcaaaactagctcccaacctaaccaaaaactaccaaactttccaaaatatcaatttgggataatttaaacataacccataactcaaaagcatctaaaacaacatgcaatgaaattcaccatgaatgagcaaagcttgagttc

SEQ ID NO: 350700 - DNA, 1651 bp, Cannabis indica
aaggaaaatcaaaagttatgattcgtggataaggctgaatactaacggctcgcgctaagggaaagtattaaacgagacatcaaaatgtcttgaaaaaatacttaaacccaacacctgggtagaaaatttaactactcatgtaagcattgaaaatatatacaagatgacgagatcattaaagatatatttgaatttgctgaaaataagttcaaatctgatgatcgcgtggtggaatcgatgatgactcgtaaattgaggaacgagcaaataagctactcacacgtaaagtaggaaattaactacttaatgtcggaggaaaggacaagcaatggaaacccctaataaactttatgcatgtgatagtttatactgtgagtaaaacgcaagcaaacatccgcatattaaagtttaaatttaaaagtgcaaggcattaaaaaacaaagttggccatccaaccttgtaaatctgtctttaaaaaaaaaagggggtgccgctaggggcaaaccattgtctcggccgaagggccattttctaaaagagaataaggagataaacaaaaaccaagtctacatgctaggagacttggacagatcttcttcttcttcttcctcgacctcgccattttcttcctcaatcttggtcttcttgcaaagagctaaagtttcctcttcctactcctccaaaaagctagtatccatattagggttccaaagccagggccgatatacagtgcaaaaaccaactttatcacgccgttctacggtctcgacttctttctcaggaagttttttagcaagcttcatctcaaacttatcggcttgggctttgatggtcttttcagcctcctccttggccttctcaacttcctcttttgccttctcggcttcgttctttgccttctcggcttcctcctttgctttctcagcttcttgcttgaggcgggtattttcctgttgggagtcgtcccagtgcttactcacaaccttccattatgatagtaacttgtggacctcgccctccaagtactcaagccactcagagagtaattgattggaagcaaaagaggcctggagaattgcaaacgaatgaatatggaagaggtgtaaaaaagaataatataattataataacaaagccaacgtaccatgaagtgacagtccaagctccttgaaagcatctcttttggactcctaagattgagaaaatcccaatcaaagggaaaaagagtttcaagtttacaccaacaggcaactccatatgtttggcaaaattcagacccagcttccccaactgtgaccgacaggatctcaatggccttgctcgaagaagcagtagcagaggtcgcctcaggacgatgagcattggtatcgggaacagctagaggaggaacttgctcttggaattcattgtctgaaaactcaagatcgataggctcgaccagtgatttcttcttatgggcggtggttttcctttgactcttgggaggaaccacttcgacagcaacagggactccaagattggatgtccttttcttccccttacagtccatgatgccttcataaacgatgtctgcaaaacaagacaatgcattacaatcattataaaggccgattaaaaatggggaggagtataatttccacctaagggattt

SEQ ID NO: 350701 - DNA, 927 bp, Cannabis indica
agcaccaaactgttaatgcagattttcattaacgataataagcctattttcgtgataagttttgcacagaaataatagaaagtaaaagaagaaaatatagtacaaagctttttatgttgttttgcagttaaaattgtgcatagtccacgagtcaatcttatttagattattctaatacaaactagggttcttttctctcaaggattttccgtccatttttcggtacattctgcccctatttatagtgacatagggttgcaattaattacaatttgatatgaatcccacaacaatatttccatgaaatcgtgggccttaattacgcaccacataaataaatgcagttattatttgaaaataatacatctgtgatttatccacttttacaaggtcaatgctgacgtggatttagatatgctgcaaagtgtatctagctggggcatctcgctgggaacatgaatagcaacgataatcccggtagcgagctggagcttttcccatgtctttctgtggttgataatgtaaatctcgtcacttctgtgattaaatacataacgcttcatctatcaatcgcagttcttggtgacaaggtaaactccagtagccaacatcatttgaatgtcagcttctatctgagagagctgacttgacggagtagtggatcttattgaaagatttcttgagctgattaatgaaggtaccaggagtatgccttccaatagcaaggtggatgcctcactatccgtcactcatatttttccaactgttatacttagttagtacaatgcatattatacgctaagtgttttgactaccaactcatcccgtcaacactcttttatacgtagcgaggttgatgccttgctatgcactattgatgtcatccttatgatcgtgtcttctgacgcgaaatagtttctcatcaat

SEQ ID NO: 350702 - DNA, 1904 bp, Cannabis indica
atcgacgacatccttgtgtactctcaatcagaagaggtgcacgaacaacatctcctgattgttctacagcgacttcgagaacataagttgtatgccaaatttaagaagtgagagctttgactatctcaggtgtcttttgttggacacaatgtcagtaaagatggaattaaggtggatcaggggaagattaaatctgtcagggattgactgagatcgaaaatagttacagaggttagaaatttcttgggtctagctagttattaccgttggtttgtagaggagttctttaagatttctatgcccttaaccgagcttactaaaaagaattagcagtttgtgtggacagaccagtgtgaagtaagctttcaggagctgaaacagagattgattaccactccggtattagccctaccgttagataaagaaaagtttgtagtctactgtgatgcatccagacagggtctggggtgtgtactgatgcatgctaatcgggttatcgtctatgcctccgatcagttgaaagaatatgaacaacgactcatgatttagaacttgtcgcggtggtgtttgctttgaagatttggcggcattatctctatggagagaaatgtgaaatttatactgaccataagagcctcaaatatttcgttacttagacagatttgaatatgagatagaagcgttggttagagttggttaaggattatgactgtgaaatcctttaccatcttgggaaggccaatgtagtggttgatgccctgagccgaaagggtcctgggcagataactagtatgattatgatttcacctcagttagcagaagacatggtcaaatcaagcatcgagtttgttgtaggaaaacttcataacttgacattgtaatctgatctgttggaacgaattaaagttgctcagttaattgatccagagttagtgaaaattcgagaagaggtttcctttggtcaagccaaagaatttacagtatcagatagtgggatgctgttgtttaagaccaaggtttgtgttccaagtagtgcaaaacttagaaataagattcttgaggaggcccataccactccatattcattgcatcttggcattaccaagatgtaccaagatcttaaaccctacttctggtggagcaggatgaagaagagtgtggtagaatttgtatcctagtgctgcctaacttgtcaatagatcaaggctgaacatcagagaccggtaggttaattgccgccattgacacttcctgagtgaaagtggaagggtatcaccatggactttgtggttggattacctagaaccacaggattgcatgattcgatttgggttttggtatatcgattcacaaagtctgcacattttctaccagtaaaaacaaccttttcagtagatcaatatgcagaattgtacgtgaaaaagatagtgagaatacatggtgttccaaagtccattatatcggatagagatcaaaagtttacttctaaattcaagcaaagtcttcagcgggctatgggtactaaattgaaattcagtacaactttccatcctcagagtgatggacagtctgaaaggacaattcagattctggaagacatgttacgagcctatgttatggatttcgagggcttctggaacaagtacttgccactaatagaattctcgtataatatcagctaccagagtacaatagggatggctccctatgagtcgttatatggaaggaagtgtaaatctcccattgactaggatgaaacaggagaaaagaaatatctgggtccggaatcagtgcaacgaactaatgaggctatagaaaagattaaggccagcatgcttgcctctcaaagtaagcaaaagagttatgcagatccgaagcgcaaaaatgtagagtttcaggtagga

SEQ ID NO: 350703 - DNA, 542 bp, Cannabis indica
cgtcttgattgggctattatctctgattcttggagtgaaatttttcctgatgctatttgcatcatcttccttttttggtctgatcatcgggctttgaagcttattcttaaggatgatagctgtaattcttcttctaagcgtaatagacgatttctttttgagaatgtttggctggagaatccagcttttttctctttagtcaaggacacctgggattgtggcctttcttgccagagttctggaaatccttttcaaaattttttgtctaaacaggatttgtgtatttctgctcttcagagctggcataaaaacttgaatctttctctcaagtctcgtatttctgatctccagcacgaaattgctcgtattcaagatcttccttttactgatcaggataaccggtttcgacttcaatgtcttcaatctcagcttgatgctctcctttataaggaagagatttattggaagcagagatctagaaccctttggttgaaagcgggagataaaaatactaagttttttcatcgttttgcttctaaacg

SEQ ID NO: 350704 - DNA, 770 bp, Cannabis indica
gacaaaacttgataggatataagtagtcatgtcatttatttttttttttgccacgtatcacaaaacttgatagaaaaggcaatttacaaaactatgaatagtttagggaccatttataacaagttaaaaaatttaaggatacaataatacatatgtcatacaaaaattttaaatatataaatatccatatatatatatatcaaccatatacatagatttttttagttactaattataaaatattttataattaacaactgagctcatctccttaactaactccatcattaaaaaaataaaaaaattgtacaatctataactatatataaatataaagaaaaatacaaaaggactctagcatcctagatttttttcattatattactaaaattttgtgaaatttttcataatttgtttagaaagaaactactacacataccatctgaaagttctacacataccatctgaaagttctacatagtttacaaattattaaggtgttatccatgtaggttataaataacacttttgttatgctactttcctttatttaagaaacatttatctttgaagggtgattgatttatgtcttacccaattacttttaagtttttgtttaatatataaaaataaataatttatcactcttgataaataattatatatctttaataattatgtttcctacaaataacatacatttttgggtaaataccatttaaaaactctgtgttttgtaaaaagttaccaattggatcctctgttttgtt

SEQ ID NO: 350705 - DNA, 650 bp, Cannabis indica
agcaagtccattggatgatcatcaaaattattaccctcaatattatctaccctctgcttccttaatggatatgaatcattagttaaatgttcgacatgccaatatcaagtagtataacttctattaaatcttcttaaatacacatgatcctcaatcgtcataatattttcttttgatctactaaaataatctacacatgcattatgaatacgtttgggattttagaattctttaggaaaaactttataaatccatcgaatcctacttaaaattatagtgtctctctttcctcacgcatccatgatttatccataatgaaaatcctaacaaaaatacacagtatttagtgactaattataactagttactagtaacataatataactaactagaattttcactaactatttaatatttttatattactttaattagttgttttagtttaaatcatattattatattactcatttcaaatattgacatgataactagtaactcattgtaaatagttactagttatatatgttgtaattaactaactagtttcttacaactagtaattaattatttgtgttatgcgtaatacttttcctttaatagttatacatttttagtaaaatttatcctaattctatcgaaatttcggc

SEQ ID NO: 350706 - DNA, 540 bp, Cannabis indica
gtaaaggcaattaacattaattattaatatttctataaatatttattaatttatttaattttaagtcccatttttagaaatgggcattagagttataatttctcaattcgggagattttataaactttagaggtattatttgagttatatatgaattatgttatttttacaatttttgctcagcgacgacgaaaaatgcgatggatggctatttaaatcacatgagttagtctacaacctttttcttagtgggataaatattagagataaatagaataccaagtttaagtggggttatgatttttgaccattttacccctaggcttgaattagcttaagattaagcaccattgcattttggtaatttggcaagtgggggataggtggctgtcttagagcttgacacctagccaattttattccagcatatgattaatgcaataggccttttacattttggaaaaaaaacaaagaattaaaggaaaaataaaaaattaagagaatttccatttctctttctctctctttgctcgaccacca

SEQ ID NO: 350707 - DNA, 705 bp, Cannabis indica
tttaaaaatactataaacataaaacaattacacattctaataatggcaattttgtcaaattaaatatttcgattaccttttctagttatgtaaacaaataatataattctgtttttctttctggatagtttagtaaacaacataatataatattatttctgattattttctattttaaaccaattcatttctcacattgattatttcgattccagttacaatttaataaatgcgccataaatgataaaagaaagcaagtaaaatgtataactaatattaaaagagagaaagacttaagaatcatccatttagttatttaatgcctttcaaatgatgtaacattcaagcttattatatttttgagtatacaagttttttaaaataataaaaaaaataataattttatgtagaacataaaaatgacaatatacatcaagcaataatacaataaaagattaaacataaagctagacttcaatattttttttactaattagaagcatgactaatcctatataatattagggaaaataaaaacaaagagatagagatggtggtgataatgatagtgaagaaaataaatattaatattacttttataaattttaaacatataggaagagcatgattaaacttataaattatttaacttattaattcctcctaactccactatagattcaaaattgcactcttaattatata

SEQ ID NO: 350708 - DNA, 690 bp, Cannabis indica
taattttaatactataaatatttgtaacaaaaatttaagtttgacatttaaatttagtacaatttaaaacttaaaaattatagaatacaaattttattattgtaaattaactttttaaaaatgtatatatatctcattatgttacacttaacactttagtagtatcaatgtaattatatattgttgtaaagggcaaaagtggtatggtaattaggtgtgttcatcaaaccgctcaaaccgtttgcaccgcaaaaaaaaaatatggtttgaaattctttgcggtgctgtcgcggtttgaatttttcttacaccgcgcggtgcggttttcggttccgaattattaatatgcggttcaaaccacaccacaccgaacattataaaaatatcaatttttatatttatttaggtccaatatgtgaatgtctaacccaaagcccactaattattgtattattaaaacgtaattttttttatatttattttcaatccttatggtacttttgacaagtgttgctcaaactttgttgtatatgtgatagtccaaactgcaaaaactactgcaccgcactattttttgtagtgcggttctgcgattttttagtttcgcggtgcaattgtagtttagaaaattagaaaaccgcatgtgcgggttggtttgaaaaaatggtcaaaaaccgcaccctgcaaaca

SEQ ID NO: 350709 - DNA, 592 bp, Cannabis indica
tattaaatagactacactatagagtatatgtgttcaagtaatagtgttttcattttttcttgtattaactgtgatcatgtttacttatcaaattaataatatattgtatggatcatggtaacccataaataataagggaaattattttatatattctttttatttttttttttaaatttacgatttgagttgtttggtagtttctatgggttgctataccgattttgcgatttaagttgttccgttggttaatatgtgagtttctatgtggatttttgtaaaaaatgaaaaacaatcctattttatagtgtaaaaatgaaaaaaaaaaatcttaaataataataagttttttctttaataaacttattagacttaggtggcgtttggtaatacttttttaatcagttttttgtttttaaaagtagaaaagtgttttttttttcaaaaacatgctctatcaaactgtttttacttttcaattttataattagaaatcaaaattttaaaaacaaaaaaaattactttcaatatttttttaaacagttttttttttcttaatcaatcttttggattacgacaagacccggaccca

SEQ ID NO: 350710 - DNA, 608 bp, Cannabis indica
tgtatattaaagaaagataaaaaactataagacattaaaaataagataataaaaactcatagggtaagaaattaatcaaccacccataaacaaaaatacttttggatgaattaatatgacataaaaagaataatatttataacctacatggatgatgcctacatcatttataaacaatgtgggacatttagttccatgtatttttgtagttgttttctaaataaaatagaaaaaattcacaaaattttaaaaatagaataaaaaaaatctaagatgccacataaacttattttgtgctttcctttatattatatatagattgtgcgaggcgaagccactaaggctagcttagtggtgagggagggatgggaaaaaaaggagaggtcatgggttcgaacataggaccttgaagctattaagatattaaatgattgtaaaataccattacgctacactcaaaaaaaaaaattacaattgtgcgaggcgtgattattgatttataattaattaatagaaaataaattaaattggttaaatgatatttaaaactactaatatattattttttattttttattttttgaaaattttcactgttattaaagatt

SEQ ID NO: 350711 - DNA, 1192 bp, Cannabis indica
aggaaaaggaaataaacaacttttcttgacttttaaggtaatcatttctctctactttgtaacaagttttttaatatagctttaatgtccaattcaaaaaaaaatatagttttacttatgtccactttgttatgaatttatatatattaaatatatagtttttaatagaacctacatccacaaaaaccctctgataataaatctaagtctacattcttcccctttttctttttcttctttcttctcttgtttttcctttgttcttctttcttctccttttctttactgtaacagtgaagccttctcttttcttctctttactgccttcagaataaaaaaaatgaattagctcaaagttgaaacctttaagaaagaaaaaggaaagaaacaatttttttttggctttcaatgtaatattttctctcttttttgtaataagtttttaatataattttactgtccattcaaaaaaaaaaatagctttacttatgtccactatgttatgaatttatatatattaaatatataattttttatagaacctacgtccacaaaaatcctctgataaaacgtctaagtctacattcttccccccttttctttttcttctttcttctcctgttcttcccatgttcttctttcttctccttttctttactataacagtgaagctttctcctttattctccttactccattttgataaaaaaaaaaaaaggaatcagctcaaaggtgaaacatttaattaaggaaaagaaaagaaacaactttacttggcttctaaggtaatcttttctctcttctttgtaataagttttcaatatacctttactgtcaatttaaaaaaatatagctttacatatgtccactatgttatgaatttatatacattaaaaatatagtttttaatagaacctatgtccacaaaaatcctctgataatacatttaagtctacattcttccccattttcttttcttcttttttctcctgttcttcccctattcttctttcttctccttttctttactgtaatagtgaagtcttctcctttcttctccttacacccttctgaataaaaaaataaaggaattagctcaaaggtgaaacctttagggaaggaaaaggaaagaaacaactttttttggctttcaaggaaatcttttctcacttctttgtaataagttttgtaa

SEQ ID NO: 350712 - DNA, 537 bp, Cannabis indica
ctctctctctcttcttctctctctctctctctctctctctctctctctctctctctcgtgtgtgtgcaggatcttggtgacgacagtctttgaagctcgtccctcgtcgacggcgtttgaagctcgtccctcgtcaatggcgtttgaagttcatctgtggttcgggtctggttcgtggtcgatcgcgattgaagctcgtccctagttggcggtgtttgaagctcatctgtggttccggttcgtggttgcaattgaagctctatgaatctgacttttttttttaagttcttgtttcagctttagtctagccaaaagctatgaacatgagtagtattatgttagtaatagtttatcttatacagtatataacttaaaataataataaaaaaatggtatgccttttgtctggcagctctatccaaataaatgtaatattattattattttttttttaatttttttggtttaaatttatgtttatgcccattgtgaattactatccttttgaggatattatgtatggaatttaattttaaa

SEQ ID NO: 350713 - DNA, 1685 bp, Cannabis indica
acacacacaagacaatttatttcaataatagcatttgaccacttattcctatcaacccaacttaatgcttccttgactccaaagatttcagcaattaagggatcgtctctaccagccttgccacaagaaaacacctctatgaccttcccactgttgtcccgagccaccaaccccaccccaaaatgaccctctgcagcaaagagagccccatccacattgattttcacctggtttgttgctggtttttccaacgctcatctcttatagttgcaggtgcaacaagcaaggcatcatgcctttctaattgagcaagcatccattgttcaagtgaaattctagcagacaacaccaatgttgctacattagatgatttgtcattctagaccttctcattgcgggcactccaaattcctaaagcaaccacaacagcttcttcaaccacaccaatacttgaatgagacatcaaattggctcaccaatctccaaaacttgaagtaacaatacccagagaaactgaagatcgaagccagcaagatcttgcaaaagtgcatccaacaagaacatgaaaaatagatttagcataggcattacacattggacacaaattaacaagctccacatgcttaattctcagttgagcccaaggcaattagaaatggcatgctaaagaaagtttcgagcttttgggagaattttcaaattccaaattttgcttcaaaagcctaaattattctttaaagaccacgacccttttaactcctaaataaaatggtaggcactcctaactgaatagatacctgaaatttccttcttccaataccactcatcatgtacaacagtagagctcaactgaatgtttaaaataagctcacgatctcggacatcaaacaaatcatgaagtatatcagtatcccaaactcgctcattaatctaaaataaacttgagacaaccttgtttatatcaagcttgggtgattggaaatcacatatgggtgctcattatctggtaaccaaggctcattcaaaatgagagtttcatgacccctactaatggatctacgaataccagctcgaagaagttgttgtgactcaaagatgctcctccaaatgagactcagattatcaccaagtgtagctgaaaggaacaagccatgtggataatatctagccttaaaaacattaccagctagagaattaccttgagtcaatgaacgccagccttgtttaactaaaagagccaaatcaaaatcatgtagattacaaaagcccaaccctccagcatgttagcgacgactcaagtgcgaccaagtcatccaatgtacacctttatgttgagaagaagcagattgccaccaaaaccttgccatgagatgttccaaatctttacaagtgtccaatggtaagaggaaaacgctcatattataatttagaagagattgggcaaaagtctttagaaggacttctttagaagctcatattataattgcaggtactttgtgtaaaaattattttgttcatctaaagtgccaaagggggagattgtaaagtccttttttggcaagttagttgacaaaataatttttactgttttggtaagattcttgtgcattcataaccgatttcttaccttgtttattcggtttgtagttgcttttttccttgttaggaaagttgcacttttcagc

SEQ ID NO: 350714 - DNA, 605 bp, Cannabis indica
ctagtacccgacccagacccgaacttcaagattgggacccgatattgggatccgaatctggacccagggcttggacaaaacccatagtcggtgtttggatttgggactgagccaggacctgaacactgacaaggacccgaaccacacccggacctaaaccatgtcccaaacccaaaagtggacccaaaccctttaactgtgacccaaaattggaaccaataccggaagttgaccgggcgtggaactaggacttggacttggaatcataactaaaatttgaccttggtccagaaccgtaacttgaacaggacacggactccaaatctgacctagacccgaattgggaggcggagccggatcctaaccaaaacctgaactcaggttccgaacccgaacatgaactcagatccaaaaatggaaccagactagcgacacagaaccatgtcgggagatagaactgcaccccagtctcgatcctaaacccaaactcagaaatgggacttggacctgaaccataaccagaacgagacccgtgacagtgatctagatcttgacttgggattccggtaaacggggcctggaacaccagtagttggtgtctagat

SEQ ID NO: 350715 - DNA, 711 bp, Cannabis indica
cataccttgtgacccaaaattggaaccgaaatcggaagttgaccttgacccagaatgggaccagaacccggacttggacctagaaccataaccgaacctggacctagacccaaaactataaccggacaaagacccagactcaaacttagaactagacccaaaccaggactcggacccggattcccacccagacctggacttgggacccgaacccagacccaaactcagacccaaacatggaaccagactcgggacacacaaccggggctgggacctagaatcgcacccggtctcaatcccgaacccaaacttggaccttgaacccaggaccagaaccagacctagacccgtgacagggatccagatattgacaatccagtaaatggggcttggaacatacccgtagtcggtgtatgaatctgggactcagacaaggacccgaacccagactaggacccaaacccgaacccagacctagacccaggacccgaaactagcacctaaacaagaactgtcggaccatgaccgtgtaacaagactaggaccctgaccaggacccagacccatacctagaaccgaactcggaccaagcccaagacccaaaccgagaccgaaactcaggcttagacatggtcgtgtacccagatcggaaccgagaattggattagacctaaatatgggacctaatcccaaacaaagactcggacctaa

SEQ ID NO: 350716 - DNA, 560 bp, Cannabis indica
ttggaatattatgtgtgatcccatgggaatgtccaaattgtaataggaaaaggaatacaataaataattaaagaaaacccaatcgtagatgtacaatagcaaaaactcgatcgtattttttttggatttattttatttattttattatatataaataaaaagtgattcatgaatttctcataaactattttatttttaataataaatcattttatttttaacataaataaaaagtcacccatgaatttctcataaactaaaaattctgttatataggcacactttatatagaatagatatatatatatatatgacaatataagtgatttatattatactcgtagctactaaaacttaagtccagacgagattttggtaatggaattaatgttatatatgtgttttacttatgttgctggtgtgtgtgggtgatttgtgagatttatattgagaaatttaagttaatatttatgcatttggacaaaattgtagatttaagaatattttattcaagaataatctcgaatttgttataaaaaaaatcaagtcccaatttggac

SEQ ID NO: 350717 - DNA, 492 bp, Cannabis indica
tttttgatgaagacaaagaagatacaaaattcggatctcctatctgatacttggaaggtgcccaaattgacagattgccaacttgggcactgggtgccggggctccagatgctcaaaaataacttgctctgattctaattttgatgcctcaaatatgtccgtgatatatctagttgatgtcccaatataaattttcccttttgcactaagacggtccccaagactgaaattctagttgaatatgtcaacttgcgcaccgggtgaaaccctaggtgcctaagttggcttctgggttgcatgttcgtgtaatttcagctctcaagccttggattaagtttttccatgtcttcatgctacaaaatacttaaagatagttagttatattcaagttattaaagtactagggtccccttccaggtctacttctatgactcgggcctattcaactttgtgacgtcatccttcatgccacgtgtcaaacatgtctacgtc

SEQ ID NO: 350718 - DNA, 697 bp, Cannabis indica
gggacggtttattagacattgggaatgtctggagtggtcgggaatttagaatttcccaaaaataccctttagtgccctttatgttattttagtgtggaggggcaaaatggtcattttgccccatttattatttgtcctttagtggacttagaaattggaaatgtgatattatgctatgtttcttttggctgaaataaatgtttattatatgaatttactctcatttggaaaattgcttttctctcttcctctctctttcagccctccatgagtagcaaggaattggaggttttcttggtgtttcaagctcattttgatcaaatttagtgatctctaattgttggtaaagtttcttcatctttcttttatgtctcttgaaatttttgaagagaaatggtaggttgcatgaatgtttggttggttttaaattggtttagagttttggttcaaaagctttggtttttcaaagtgaaattatcaaatttgttgctgtggagatggtttgtgtttgaattcggtttctgcagtttttgtatgcatggttgagtagatttaagcttgttttgatgcttgtaggtgagctttagccaagtttgagttttgaactcaaagcttggagctcacatggcatttttcgtatctgtacttgctgggttgttttgatgctttagaaatgttctatggggtatttagaaca

SEQ ID NO: 350719 - DNA, 522 bp, Cannabis indica
tgtacgagtgttggtagggtgtgttttatatactgagtaccactgagtgatataccacacacactcagtactttcctgtacttgtgctgatatcactgtaatgtactctcaaataataatcactataccaatgcactttataccttaattgtacaagtgttggtagtgcaactaacattttaagcatgcatatacacataacatatacatacactcagatactgatatcacatattatatacagttcttaccttctttccagatttaagtgtgttggctgacctgaacggaaagtctcgtgctagatggatgccctaatcacattatgaagttgggtaagttacatgctcaaaaccctaatcccgggaaactcgaacccacaacactaggttctattattctttctaggggttactctaactttggaaacagggaaacacccaattacggtactggaatgcacgagaattgagaaaagaaatgtttgggaccctgccaaaaccggctagccagttttagagg

SEQ ID NO: 350720 - DNA, 700 bp, Cannabis indica
ggcttaaggcatctatctgccacaacatttgcctttccaagatgatacaggatttcacaatcatagtccttgaccagctctaaccatctccgacgtctcatattgaaatccttctgagtgaaaaagtacttgagacttttatggtcagtatagatctcacacctttcgccatataagtagtgtcgccaaatttgtagggcaaacaccactgctgcaagttccaaatcgtgagttggataacggtgttcataatccttcaattgtcgagaagcataagctatgaccttatccgcttgcattagcacacagcccaaccctgcattgatgcatcacaatacaccacaaacttctcttgatcagatgacagggctaaaacaggagctgtaatcagtcgttgcttcagctcttgaaaactcttctcacacttatctgaccatatgaaccgttggtttttcctagttaactcagataacgacattgcaatcttggaaaaaccctccacaaaacgctgataataactcgctaaaccgaggaaactttgaacttcagtgactgttttgggtctaggacaattcttcactgcttcaatcttctgtgggtctaccataatcccgtctttttcgacaatatgccccaaaaaagatacttgtaacaaccaaatcacactttttgaactttgcatagagtttatgatctctga

SEQ ID NO: 350721 - DNA, 506 bp, Cannabis indica
acaactaagttgaacctaaccatataatgattaagatccatagacctaagatcaacgattgatatttacttagaaatatataatggtaagtttatgatattataaatgacagtttattaattaatggcaatgtatataatggcaaattttcactaagatccatataccagtatcagtcccttccaatgtatactccatacatctgatactggtaaagtttgccaatatcctggaaaggacattacacttaaaaaaggtgtaagtatagcttattgctgataatcatgtcagtctaaatccagtgaactgataaattataggaattaaacttttgaacatataatcatgattgtattctactgtgctaacgatactataatcatgaacaaatatatatatttatatatgctctggacttaatagaatttatacattaaatataatcatgaaataaatcatgtgagccatgcaacataaaacaattttttatcttttattaattagta

SEQ ID NO: 350722 - DNA, 510 bp, Cannabis indica
ataccaaattgaagaggctagatgatttaaaaaataattagattttgattttatagttttagatttaaaccaaaactctaatcaatagcagacaatatcaatgagtaaaaaaaatattatttctgaaatcaatgatgaagagatgatagaaaagtggaaataaaagaactgattagtggcatggcgtgcgatcattggtcgtactgatctggtggttggaagagtattttatgttggtgttttttgtggacgtggcgtgcgatcattggttcgtagtcgtattgagtgtgtcacattgtagactttccctatatataataatttttattatatatgtatattcattttattttttttttttgaattaagtatattcatttattctatatacatatatatatttgaacaaaatcataaatttgatttctatatatatagaagttttataaaactaaatttcaaaaattattcattaagaccaattagaattaaattgacattgagtattgt

SEQ ID NO: 350723 - DNA, 708 bp, Cannabis indica
cccacacctaacccaaagagtgatgatatcttcaatctgccaacttgccaatatatgactaccccctgaaaactaacttcataacttgaaaaaaaaaaaacaacttataacaataaatgtaggacaaaatatatattagagaaaaatgtttcattttaattttatattgagtgttatatatataatttctttctttaaataaccctacgttgaatgtagatgtatatggttaggattgattcaaacagtttagaagtttttgaagaaaaattaaaatcgaacttttattagaagaaaaaaattatcaatttcatgtattaattttttttttaatcataaattttaacatatatagggaataattttagaatcatgtgtattaagatcataagattttatcattttttttttgttataagtaaatatttgttcttataaatatttattatgtatactatatattatcaaaaaaatatttattatattatatattatatgcttcatataatttctcatttggttataaaataccaaatttgtataaacctaatttaccattattgctcgcttattttttcgatactaactcgtattattggaatttgtttaagacttgattaattaaaaaattgtgttattattgtgacagtcggtagtcccgtgatccgtaaggggaaataccaggtaagctgtacaatcccacaccgc

SEQ ID NO: 350724 - DNA, 538 bp, Cannabis indica
tcccatcacccgtgttggagctaaagaaaacagaagacttacttagattaaccttctgacccgaagcctgttcaaacttgttaagaagctccaggacacgttgagcctcctccaaagtagcagaacaatagagaaaactatcatccgcaaataacatatgagtcacataaggagcctgccgagccacccgacacccatggatccactttctttcttcataaagccggataagagccaaaaatccttcagcacaaatgatgaagagataaggggaaattggatcccccggtcggattcctctcgtaggaataatcggcccaagaaccttccctccatgaataatattgtaagaaatagtccgcagacattccattatcatcataacccaatcaagagaaaagcccatgcgaagcataattgattgtagaaaaggccactccattatatcatacaccttactcatatccaatttgagagccatgcaaccatttcttccttgttgtttacgctttaggtaatgaagaatttcaaaagaaac

SEQ ID NO: 350725 - DNA, 584 bp, Cannabis indica
catgtgtctttggttgaacatttgattgtaagacctttttggttgcatattcttgtaaaaaaaattattttgaaaacacatattttctaaggctctcatcaccatttggaatattctccaaaacttgtgttctgcggcgtcctgttgtttgctgaaaggaatctgaatgtttcttctcctaacaattctgggatggacaccaagaatgcttgtttgaagtttggatcgtcgacactaccgattagataaaactgcttagtcattctttgaaagtgtaatttcaaatcttcttttttcattgaacaacacttcatcttgaaaaatttggccttgaaacattcgactacttaagagtcttgaccacaaaatttgacgtacaagtgatttagtgttgcttcaatggattctgcttgaagctacctgtattctccaaggctttgccaccaatcttataggattctagtgaatcttgatactagttaaagtaagatgtctcgtatttctaccctcaatttttgtgcttctaaaagggtccatgctctgaattcttggaggcaagatctccattgatttgggggaagatc

SEQ ID NO: 350726 - DNA, 772 bp, Cannabis indica
tgactatcagatcagtataaatccagtgcactcatgaatcatgagacatttatctttttgaagcatgtaatcataattaccttctactgtgtgaacatcattgttattgtgaataactatatgttgtgtatttaacaaaaattgtatatattagaccataacataaaagctacatgtaaacataaataatttctaatcttctattgataataaataagattgtcttggaatgggttttatttaaggcataaaatcccaatatacaagtgtaaagactaagagtgtaatatcaaatatttacatttattaaggacataaatttgaaaatttatttcttatatagcacgacttattttgcgcatgagaaaaaatttatagtcttttatttatgtatttattgttttattattatttttaccttatttaatttttcactattttatttattttattatttcgattaaattatgatttcaacatcttaaactatctatttcttttctttttgtatgtaaactctaaatatttaataattacattttatatttttcatgttaaaaaattattgtacaaaagttactaatagtaaaaaataatgataaaaccaattattataatgatactctttatttatttgatgatgaagcatacattttaaattttaattattataacaacaacatttcaaatctggtcccccactaaggttgtgtacacattttcctccatttttaaataatttctcaatacatatcttattgcaggtggaatc

SEQ ID NO: 350727 - DNA, 163 bp, Cannabis indica
gttttccacaactcaaaatatactttaaaaattgctagaaaaaataggtaacttcaaggtatcttaaataataaaataacatataatacagtctaaaaatatcacagttttaaagttatttgattaaaataagtaactaaatgtatatgagaaaaatattgtc

SEQ ID NO: 350728 - DNA, 794 bp, Cannabis indica
cgcttagtcgaagagagactagagttggaagacagttggtgagagccctccaaagcaaattcttaacttttggaggaagattcaaatactaaaattttctccaaaaaccagaattatcctgcatattccatcttccatgacgcacttgtaaagtacgataggcactccttactgaatattcagcaaaagtttcaaaagtccaataccatgtatccaatttcagcaatgcaggcagcagtattttacaaatgagatccacatctcggggctcaaataaatcttctaacagctcctcattccaacacattcgattagtctgaagaagattagagagacatgacaatccttaagagcctcatgagaagacaccacatagggattatccatggaagggagccacgactggttaagaacaaagatcgaagaactagaacccacacgccatctagcacccattttaaccacatcttgagaccctgtattacattatctctctactttagcaccaactttttaatttactacattatataactcatacatccagaagtttttaattagtggcaaagacatgcaagttatagaatctgaaatatataaatatatatatatactagtaaaatactacgtgcgaggtacgtatactaaattttatgctagtcttttttatgttatttgaaagtgatacaattaaaaattaaagaaaaaatattattagttattaagttagattattattatgtgtatctaaatattatagtttataatgttgtcaattaaaagtgaataccgaa

SEQ ID NO: 350729 - DNA, 912 bp, Cannabis indica
acaggggcagtcggtgccggttgactgaattgatggaactctttctcttgacaaagtatgatacctcgcatttcttgaaacatttgctggcagtcaacaggtgaattagcatttccaacctccacattatcccctggattctgcaaaggcgcaggtggtgccagtggattggtcaggtctaccccaggctctacttgcttgccttgtggtctagatgattgcagagggtccattttaacaagtgcccctgtaatcaacaacccgagcgaattaagcaccaataccacgcttatgcaattattgccttaaaccctaactcaactatttattctatctaaataaacacttatcatataacattttaagcatggcatcatatatcacataaatactctcgatgctcgcatactgcctgaaatggaaagcggacaataaatgatcatacaagtagtaaagcatttactctcaacacttactgccccatgagttgagcttgtctttgatgatgattgtacatgttcagacgatctacaggaagtttaaaaacgttggcgctctgatacaaaactgtaacgccctaacaaaataagcacgctacccaatgtgattaagaaaccctaatcccctaaatgggattactaaaaagataagcatgggtagtttaaactttaatcgaaaacaaaatgaaaataaaagttgtaataaacttaactttacaataaaaaattacatgtttcgggatccaaaaaattatttacaaaatattacaagccttttcacgagcagacataggtggcaacattagactttcaaaagtacatcactggtagacaccaacctgcttggctgagtgtggcccgaacatgtacatactgttgggttttgtgccctcaataaaacccatttcaatat

SEQ ID NO: 350730 - DNA, 1568 bp, Cannabis indica
ttttgacaagatcattctctacaaagagaaaatatgcctatatcaacttgaaagtaggatcatctgtatttgcacatatggatgtacattcaggggtggatatgagttatcgttaaattcttagacgatcagtctagattttaccttatgcaaagaagtatgaaatgtttgagaaatttcatgaatttctaaaaattttaaaaaacattaaggtaagtggttaaacatcttatgaattgataaggtggagaaatttttggtggatatgcagttcaaagatcattgagttgaattttgaattgtatccaaacttacctccctagaaatttgaattgcatattgatgaagatgtaaggtctatgattagttactaacagctacctaagtccttctagggaataccctagtgattaaggaaaatttcagaatgatggaatggctatgtacttagtgtagaccattactagaatcatagatgtcctaatcgtgaccttaaggaaagctagaactgttaactaaggttttcatgtgtgatacctattctaagtgattaggggtggaccatcctattgtcattaagataagaaagtgtttgttttcaacaaatactacttttctaagaatatgactaaatctgaaaataaattagcaaagtagaggagctaatgtttttcctgattccaaattgttctatcatcttattcgatataagatggtcccactacctttgttgaattaacacaactgaagaggataataccatttatgttcttagatagaaattcacagtactttgtcatagtggaagagcttctaggaactcaccctgttatgacttggaagacacttgtgattgaaaatctattatttgtttaaataagtaatggattgtaaaaataaggaactaagaagtaaaaccaagagaactatggtcaaaaccattaatatggagtagctaaaagttttgtattacaaggacaagaaaggaaattttgaaaataagtctattcaatggacttagcatacttcctgttcctagtgttaaaggtttgatattatctaaacatgtggcttgtggtatgcctgataacttacttactctagtgcacgcaacttactttagtaagatgctgaagcatttttatggctaaatctataggaagctttccgacttttagacatagattttatttatctaaggaaaagttttaactattccgaaaaagataaaggccaatgaaagaatttcttaggatcaacagtgagaggtctcagatatgctttgctatgcattagaccagacacctgctgttgagtgggagtaacaattaggtattagattaatctaggaaaggaacattggaagacaatcaagtaaatcttaacatcaagaagatgaactacatgttagaataagggttgtattttaatactcttagactacaccaaatcaaatttctagacttgcttgattctagaaagtctattgatgagatggtgattactctgaggatggagcagtaattttggagaagtgtaaaaaactgatcaaaagtctctaactctac

SEQ ID NO: 350731 - DNA, 805 bp, Cannabis indica
gattgcccatccgtctgaggatgaaatgctgtgctgaactttaattgagtaccatagcttggtggagactctcccagaatctcgatgtaaacttcggatctctatccgaaataatagactttaggacaccattaagacgaacaatttctctgacatataactcagcatactggtcaatggagaaatttgtccgaacaggaaaaaagtgcgctgactttgtaagcctgtccactacgatccacacagagtcaaactgtctcatggttctaggcaaacctaccacgaagtccatagcaatatcttcccatttccactctggtatgttcaatggctgcagtaaccctgcaggtttctgattctcagccttaacgtgctgacatgtaagacatcttgcaacatactcagcaatgtcattcttcatgcctggccaccagaacatggcctttaggtcttgatacattttcgttgaccctggatgaactgaattaggagtcgtacgagactcatttattatctctcctttgataccatcatccataggcacacaaacacgatttctgaatcgcaacattcccgtttcatccattgaaaaatcactagtctttccagccgaaaccctatctcgggtttttaccaattctggatcttgcatgtgcacttctttaattcgctctaaaagagtagattgcagagtaatattagctaactgccctacaaccaactcaatcatagctcggttctataagaatatttttatttaaggaaatatatttctatttaaagaaataaatttctatttaaggaa

SEQ ID NO: 350732 - DNA, 707 bp, Cannabis indica
tccgctcataaggagggatcctaacccactccgtgagaagctctggatgttccacagccaggaacccggaggagaagaagaagcggtgacggtactccttgatgtgtttttgctggttgaaagggaccgtgccctcattcaaagggttggcccagaagccataaaagtcgtccttaagtttgcccccttcttagggacagagacgagttcataaaaacacaatatttctgccggactgggagagccccagccccgggcagcataaaaaataaataagcctgaaagcaggcggtaagcttgtggaataagttggtatggcgcaaggccgacaaatacaaggaaattaatgaaataatcctgaaggggaagcatagccctggttatcaaatgcgtctggctctaagctccgaagcctccgtaattgtgcttgggcgtctccgcgtcgcggggcggccggtggtacgtcccggaggtcgcaggcttgatgccggccaccaccacaatgtgctccagctgatgagggcaagttaaggtggagtgaagctcggccgcttcccaccccgtggcacgaggcttatacccccctgggcgacgggacccaacatcaagtcctcctgggtggccaggcgttttcctcccttcttggaagatttggaactggatgtagacattttggttctgaaaaagatttaaaattccagcagtca

SEQ ID NO: 350733 - DNA, 511 bp, Cannabis indica
atatgtttgaaaaaaaaaaagattcagtgatgctggaagaataatagaggtaccttctatcaatcttggtaaatttgggaacattatgggattctagagaaagaaaagtaaaaagcttgtggattctgtttgtgtgcttatgatatcttgagccaaaaattgtcttttgcttatccctgaatatctgagtcattatacctgccttgaaaagacctaatattccgaagaatactgtcaacattagtggagaaaggtaagcatgcaagcttatgagttatagggttgtggaactgttggaaagagtaaaacttttataacaatgtttcacatttgaataaatttttgcagttgtacatagtgttattaattgagcatccgagttaattgttagagttagtaggatcaaaattctagtttatgcaaggaagaaaacagagcatgagtcagcagcatagtaattatctgatagcgtagttagtttttttttctatcttactcgggggcgagtaag

SEQ ID NO: 350734 - DNA, 848 bp, Cannabis indica
gagatcatctttccggggttggattcaccgaagtggacgataggcaagagaagactcaggagtggacctgacaagcataagatacattcaatagccaagccgaagagtctgcatacactccgaagtactaataactaagttgaagagagagagcggggcaagccatagatgaaagtgaactattaagagattggggtttttacaaaaatactggattttgagtaaaagtttacgattttactgtcacactgaattttttacaaaaatactatctttttttagaaaacaaccgtaaagcaacaagacagaaaaatttaaaacaacagtagaacaactaaaaaacaaccgtgaacaacaatgaaaacttaacacagtatacagtataaaacttacacagtattttttgaaaaaaaaaactacagtatttttgaaaaaaattccaccccacagtaaaaaaaaagttaaaaattttacctatatggtataaaaattcctaagagatttcactctcatcatcatgggtgtatgtatttttaactttaatgttgcagtattgccctttaaagtcatattttagtagaactcttatttatttggtatttaaacaaaaaaaaaaaaaaaaagaaaagaaagaaagattgattattttttttatcgcgtatattgtagttatgtaggatcactcgtaaatttttagaaaactccaagtagtttatagtttaaaaaatatggttttaacagttacttaccacgcgtataaaaaaaaataaatttacatataacaaaatatttaaactttatttttagcattgtaaattacttaaaattttctaaaaatttattaaaaa

SEQ ID NO: 350735 - DNA, 609 bp, Cannabis indica
acagcaataaaaacaaacaatgtaaacaaaaacacatataacaacaacaacaacaacaacaacaacaacaacaacaacaacaacacataactaacaatatttaaactaaacaaccagaactatcacacatatttacagtaatcaaataggttaaggaaagaagaaaactccctcaagaatcagactcttcaccaacaaagcccctctcttcaccatcaatcggatgccaaggcgcaagaatctaatctggaaaatttggatatcacaggaaaactttgcgcacgttggtctgcagcgcatgcttcacccacatgtctcttttcctttcatactcccagtttatagatatatttttttaacccaatactaccagttgttgtagcattgcttcagcaattcattcttttatgcatccctgtttcaaaatgctaaggcaatgctataactcctgggacctgctgcttcagacaataaatcctgcttttcagcctattgcaacaactccattttctgccttgcacctgcaataagatcaccacaccacaacaaaatcattagtaactgtaagaaattgaaagttatatatatgtaattatataagtatgtata

SEQ ID NO: 350736 - DNA, 548 bp, Cannabis indica
atatttaattttcaatttaattgaatgtattaaataaaagaatcatataattaagtttaaaatcaacttaattattaattctaatttaatactaagaaaaatattctaatttaagttggtccaaaattaattcataaataattaattttaacttaaatatatttttctaattaattaaatattagaaaatataattagttactagaaataactatctagaacatataggaagaaggctttgaatttttatctgaagcaatgagatacatcatctttttcctaaagccatcactacctatttaagggaaactacctagtgttaggttagtattatttggcattaaaataatgaaaaaaaataaatggtaaattgaactataagtggtcgcccatgatgtgaataatgggccccactttgcaattttgccattttgtcatttctccatctcattttctcataaaccctaattttccaatttaacaatttaaatgtcaatactaattatttaataactaaaaattaattattaaataatattagtcattta

SEQ ID NO: 350737 - DNA, 1187 bp, Cannabis indica
ttcctttacctacacaaggtagcaaactaatgagtcaacagactcagtaagatatgcaagatatatttaaaaataatgcgatgccgcctttatgatcaagccgccctgagctcaataattaagctcaccaaatggttaagaacgttcttaagggaagtacgaccactgtaccagatgcactaaagtaccaaccctgtacttgtgttggtagagccataactgtactcccgggaattactaagtgttgtaccacatgcacgacgtacccctggtactcgtgttggtaacaccgtaaccacatttataaacaacactatactaacactctataaaccacattcatactagtgctagtagtgcaaacatccaaaacaaacatatattcatatatatattcttatgctatcttaccttgttccatgctcaagtgtgccggtcagcctgagtggaaaatgcagctcgacgctttacagggccctaaatcataatattgagaactcaatgagagacacgctaaaacacttatcgggaatgtaaaatccaaactaagattaaccctatcgataattaggatgccaataccctaaattacgcaaaaacaagaaaaactaaggctcgggaaaaagccccaactggaagtccggttcctgggaccaaccggtcgaccggttgctacaggctcccaggaaccggaattccggttctggattgggaaccaaaaatccgaccgccacacctcaaatcattcccaaacttcccaaaaaccttcagaacacctgtatacactataatagcctcaaaccaacaaaaagaacacaacaataaacacagaaactcaaaccaccattagagctttaacctagagctcataaaccccaatttgacataaacaacaaaacaaccacctaacctaaaccataccagcagtaaaaatcataacaaaacatcaaaatacagtttagaacaatctttaaacaagcagccacaaaaatcattcaattccaccatcaacacacaacttagacttgagaaaacataagaaaagatagctaggaattgataccttaagttgaaaccttagaattcaactagaattctggataaacaattgaagactcaaaaattccttgctgcctttttacaaaaatcgaaagagagagagagaagcttgagagaatggcaaagtt

SEQ ID NO: 350738 - DNA, 841 bp, Cannabis indica
atctaaaaacaaaatcatcaaagctttggcccaaaatattaatgttgagatagattgtgtccaatatcctaacatcatacaccatttttttgacataattattgaacgggtgttgttcaaatcgaaaatatgtgtaattcataggtgtccacacgacaaatacgcattaaacacacattgacacaatgacacccctagatgttcgttttggtattcatgaccatggatagttgtctactactactactatatgtagctctagccatctatatagcaagccttttaaatttccttttgtttcttttttttttttaatttttttcttttaaggtatctataaacaagtcaagttgcagtttttttaaccgttctatatacaagtacttgaactaggctagctataccattgtattagtggaggtatgtataataataataataagttacacataaggctggctaagcatgcatgcaagagggcacgtgtgcaccacaactactcattcttccatattatttaactagctttttcataatttggatagatctatagggcaagtattcctctttatatttttgtaaaaagtcttttattgttcacatgcaaatttaaagcttattcccttgaaagggaacaaaactttctttgcgattaattgttctttatgaatccaccactatttctatgtgtacatcactaagctttcaaatcaaaaatcatctttttaaacaaataatttataagtgaggggttatagatagacttatagtactaaaatgtactcttaatatttagccaagcatgatgaattaagctttaatatacataaagtttactttt

SEQ ID NO: 350739 - DNA, 554 bp, Cannabis indica
ttttcaagaaatttaattagatagattttttttttaagttggaaacttttattacatatcaacttaaattagattaatgtttaaaatatattctattttattttattaatcatttttcccattaatatttcgaaatgcattattaaaatgcagatattttttgaatttttttaaaaaacaaaataaagttgaaaattaataagtattattgtaagtcttttattctgagtaacgatcaccccaatagtggttgcttagagtagagcttacaaagtatgaaacaatggttgaagctcataagataaaatggccttgactctcgcctaaatgggaaaacgccgaattttcatcttgatcaaataaaaggttgctaaaatgatgtccattttagatgagctgacaactctatttactattgatacatttgactctcacctaaacaggacaactaaaacaatgaagggaaaaaccttagaaattatttaggatatgtttgtttttgtattttcacatttctttcctacttgctaaatgcttaataatttttgaatgtg

SEQ ID NO: 350740 - DNA, 811 bp, Cannabis indica
tatatacaaagggcccggggcaggtcaaaatataaattatcttggtaaagtgggctagattcaatcggcctagtcaatgcgaggaggaaggcgaggaccaatacgcgcctcaagcatggcatcaagtttcttcttcttctcccgaaatttagtaataacctcctcacgcttgggattgaagtcgagcttgatactttggccatttgtcgaccaggccatgtagatgccgtcgtcgaaatgcttgacgcagcgcttgcaggagacagggggacaggagctcatctcttttagccttcttcaaggcctggtctctaaagtcctttcgctccttcatctctacggccaagttagccttggctggaagttcgcctggtgcatgcctcgcctccagctcagcctccctccgttgaacttcctctcggagcctcgcctccacctgggcttccctttgtttggcctcctcctcgagcttcgccatagcaagggcctcccttcgctcggcctcctcctggatcgcccgcctttcagcagacaagtctcgcaggatcctcacggcctcgtcaatgcccccaaatttggacatgacgaagccatgattgactatggtcttggacaggcggctggtctccgcaataatctggaaaaggtgataagagtgagaataaaagccttagacaaaataccgaggaaagaaataaatcacaagtacttaccgcagccatggcgttgctgatgtcttgaacctggtagacggagttcaaggatgcacaagcagcgtaccgtttgggcgggaattgagtcaggtgggaga

SEQ ID NO: 350741 - DNA, 662 bp, Cannabis indica
atgttatttaacatcctaaacatgaacttctaaaacaatatgaaataaacacatataaagtataagaaacctcacagtggttgcagcagaatataatgtctccttccactcagatatctaacccttgtatcctttctgtcgcagagtatcaccaagatctgagaccgaatgtccttctgttgaatctggattcttcacgatcttacacactatgattgaggtaccacttgatgtgtgtgggcactactctatcactcaagggtttcaaatttcaatggtgaacaagaagacttaaagtggcggctaggttagggagagaaggcactcagtttttctgaaaaaagatcattatttttctgaacccatcgctacctatttatagcaaaccactagggtagggttagaattatttggcattaaaataataaaaaaataaatgataaaaccctataagagtggccgaccatgtaagtggataatgggccccacttttacaatttgctgttttatcatttttgtatctcattttctcaaaaacgccaatttttcaatttaaccatttaaatgctaattccaattatttaatagctaaaaattaattattaaataataatgtcatttaatatatttatcaattagactaatcaaaatctcttaattaa

SEQ ID NO: 350742 - DNA, 1209 bp, Cannabis indica
tcactgctgctcagccttagccttgcccttacctacacatggaaataacaaatgtgagtcaacaaactcagtaagaaaagcataacataaaacataataatatctcgagttataatcaggcgcccatacacccaactgtaaccctatgcccgtgtcccacacggtactgagtctagaacgttcatacgacaatactatcgaccgtaatgtctgcctatactcaatatgccagtcatactctagccatattgatgtgacatcatcgattagtatttcagccaacatacatttatcagtaatcaatacaattctatgtatactattactgctatcagtgtactctaacaagcataaacaacatgtatgctaaacatgtaaatacatatacataacattatactaatcttacctccttaccgaattcaggtgtgccggccaacctgagtggaactgctgctcggcgaattataggcccctaaatcacattattcgtaaaactggtgagtgacatgctaaatcactttttggggacttaaacttgatactaaaagtttccctatcgacaaataatagggcaataccctaaatattgcaaaaacaggaaaaactagggttcctaaaactgccccaactagtagaccggttccccaactggaaatctggtactgtggggtttcctggggaccaactagaattccggttcctacatgtcccactaaaccggcgaccggttcagtgcaggaaaattttgaaaaattcccaactcactcaaatcaaccccaaatcaaaccaaaccttctagacctgttatttaaaccataaagaacatattcaaggcaacaaaacactacaacatgcacagaaacaaaatccaccattaaagagccaagcttgagttctaaaactcaaagcttgctcaaacctaataacagcgcaaaaaaccagcacaaatcaacatttctaaccataattaaaccttagaaacacaattcaaacaatagcaacaactatagaacttaagcactcaactccatgcaaaatttcttacttaaagtttaagaaactaaagaggatgatgctaagaactgtcctagagcttgagatcacttaaaccttgctgtaaaatacttgaattgatgaagaacaccaaatcctagtttcctagggatttcaagagagagagagagagagagagagtagtttaagaga

SEQ ID NO: 350743 - DNA, 932 bp, Cannabis indica
tcaaaaaactcttcaagagtctatcacaacgtataatttacgtatttatactgcatagacaaccatacgtatttttcaaacaataatttacttacatgtctttatttcatacaaagatctttgtcatatagtgcgcgcgacttagaatttatatcacttaagacatgtattaaattcttctagaatttttagataaggcttatttcaaattctcactatattaggagctccaaataaataaccttttgttgcaacatttatgtgacgcttataaatcctcataaaatatattccaggctataatcaaatcatgattatattttctcaatatttaagccttacttcaatcaatctcatgtctatgcaaactttgtacaacaattcattatgtacaaatacatatatgcaaatttctcattagaaatatttatttgcacaccctacaggtcttacttcacaatcttagacaagtgtacccacggtaaagaaccaaataagatttccattcaatccagtaaatatagatcatttaagaatattttcccgccaacatgagccacctaaaatgaattaataggcacacacacacattataagcacagttgttcaaagaatatacaacacagaatatcaagaaatataagttaattaaaaaacagtaaactctgcaatgtagtaagtgagctgctacaatcattgaaaaactgtaaacaacaacatccataaaccatattaaaattagggatgttcatccaattcaatccgcacttttttggtcaaacaacatcgaatccacactaagtgcggatttcattttttggatccaatccaatccgcacaatagctcaaatccaatccaatccaatccgcaaaagtgcggattggattggttactttttaattattaaattatttaatatttatgaaaataa

SEQ ID NO: 350744 - DNA, 510 bp, Cannabis indica
tttttcattgtatacactatacaatgcaaaacaaatcatggactacttatttttaaaaagaaaacaaatttacgaagaaacaaatcatctaataatataaatataaacttgtaagaataacaatcttactcaaaattggaattagatcaaaatgagagattatcattaaactactgcgaatgacttcaattgccgctaaataatttgttgaaggaatgccaataacttcaactaactcatatgccacatcaccacatcaatcggacctatcggaccccatgatccgaccatcggacctggggggaaatttttttttttttttctgcgatttcagagagaagaagagagagtgggctgagggggtgcgacttttgggtggtccgagagagtggggctgggtcgagggtgttggtgcgggtggtcggaggtggtggtgagggtcggaggtcggaggatggaggtcggaggtggtggtgagggtgggcggttgggatgtgagatagagagaga

SEQ ID NO: 350745 - DNA, 1166 bp, Cannabis indica
tgggggcaagcagccgccctatgtgggccttgacaaagccaacacttaaggggcttcttctccattacagcatcacttttagaggaggagctagattcaggagtcctcttgtcccctcccccacttttactcggccatggctttcctgacttcttactcgcagcattgttggtgctggtctggggattcgtcttcttcggctgcgaattctcagaggtgtaatcagtcagccactcggctgcagcttgagccgtggcgagatctgacacccgctgcctttgcagctcttgtttaacccacggcttgagtccttcaacgaagtagaaaagtctgtcgacttcgttcatatccttaatgtcgagcatcaatccggagaacttctttacatagtctcggactgtcccaacttgcttcaactctcttagctggcgtcgagccaggtaggcgacattttctggcagcaattgggcattcaattctttcttgaggtcttcccaagtgtcaatggtgcatttgccactctgaatgtcttcatacttcgtcctccaccacaacttggcatccccggacaaatacatggtagctgttgctgcctttgcttcttcagagtcggtccgcacgaccctaaagttatattactgtgtgtctgaaactaaaaagaaaaaaaaaattaataatatttattaaaagagatatgatgttaataatgtcaaataattaaaaataatagatatttaaaattttttaaaattaataacattttatatttgaatattaaatatttttttgaaaataaaacataatttaataatttgcttaatattatataattaaaaacacttaaaaaattaatacattcatgtgtataaaaaacaaacagtctaaatatttaaatattcagattttagagatggaatcttattattcaaatatgcattcagattcagaggtctggatcttaaaaaaatcgaatgcaccctaaatagtttgaaacatataatcatacttatttttcactatgtagacaacactataattatgagtaactatatgttcgggattttatagaatttatatattaaacatacaatcatgaatgtaatcatgtgaactaaacaatgtaaaattatttctgatattttattaattagtaaataaaattatat

SEQ ID NO: 350746 - DNA, 511 bp, Cannabis indica
agttaaaagtaattttttgaaaatattgtaataaaaaaatgtttagaaagcaatcaaaaaataactttttgaaagtttttttagagaaattacagctaaaagttagagctgtttcaactcaacttttagaaaaaactaatttgattaaaagactaataaatttttttgtactgaaaaccatatttatttaaatattatatattaaaaaaagaaaaaaattaaaataaactaattataataaaataaataattattaaatttttattttttttaaaaatataattaatattttattttaatattaacaaacaatatcaacgagtttctaattttttttttacattttataaacataataaaaaaattctataaattatttttatcaaatgcatataaatgaatatttgaaaaaaatttaaaatatataaaaaataaaatattatataaaataaatttttacatatttgtgattataataaactagattataacattatcattatcattataa

SEQ ID NO: 350747 - DNA, 788 bp, Cannabis indica
tgattttgaggaggtgttagctggatccaagtggtgtaaattaaaggtaaccctagagttttaatctctgtgtagcttaaagctttaattttgatttgattatgcaattttgagatgtagtggctactagggttataatggtttatggttcagtttctaggttcatttaacgttgaaattgagttcttttagttggttttaatgtgttgtatggtgaatgaacaagtttgagtttaactcaaacttgggtgattaatggcatgtttggattgtgtgtttttcttgcttctattgcttgaaaattgttgtttgaggttgttacaggtgtttcgaaaggtttggcttggtttggacacgaatttgagaactttcaaacttgtttgggttacctggtgcaaaccgattaaccagttttacaagacctgtaaaatcggttaaccggatcaggagcaggtttcccgaattgttcgatttgttggttcgtgttatttcagagccttagttagttaattccttgatacttagggtattgttatattagttagaagaacccttagttgggagtttgggtttcccggattagggttttggcgtgttatttacctgtttatgtaaatgtgactaaggcatccatccagcacgaggtttttcattcaagtcagccaactcacttgaattcacaaacgaggtaagaatagcatagaacatgttatatatgcgattatgtgtatgtgtaatatatgcatggtgtgtataggatttgcgtaaagttatgaattgatatcaca

SEQ ID NO: 350748 - DNA, 749 bp, Cannabis indica
atatgctattataaagtgtgatacaaaatgaagaccaattaggttatgggtatcaaaagagtattaaattgtcatggaaataatgtaatgctcgtttttaaaaattgactaattcagaattaaacttattttattatatttataaaacctcgtaaatcgggatcccgagtttaaaactgttgttgaaatacatgtattatatatgaagttacataatattttttacaaactacagggcaaccacaaaaagaaacccaaaatgtaataagatcaaaaccctccaggttgcactaccgcgatatgtacaatccttgccaagctcatctcattgctcctccagcttagctttacccttacctacacaaaggtagaaaactgatgagtcgacagacttagtaagatacgcataaaacatatatagacaatgtaataccggctttatgcttaagctgtcgtgagcccaaatgctagactcaccgaatggttaagaacattctcaatggaagtacgaccattgtaccatatgcactagagtaccgactccgtactcgtgttggtaaggcctttattgtacttctgagagttactgagtgttgtaccacttgcacttcgtaccccctggtactcatgttagtaacattgtaactactataaaaccttacactacactaacacccttaaaactacatttttgtcaatgttagtagtgttgggttttgtgccctaaataaaacccattacaatctgat

SEQ ID NO: 350749 - DNA, 643 bp, Cannabis indica
gttcgccctaaatccaggggtacgtcctcttttgagctcgccttaaagaacgatctcagatctgcactataaatggagaatattacatcaggtgagtatttcagttctttctctcttctctcttttctgtgtacttttctttgtttctcactgactctctttcttttctttgcatgtacacactgaaacaatcaacacgagagctcctctctcacaaagtgggtcttcacacttggattctctcgactgagtggtacgctcacacgcctatttatgtctatggggcatagacccacgtgttactgttaggttataattaacctatatttcgggtctttaaaagttagcattatctcgtctattggtgtcttttggagcagttttacgcttgattttcattatttcaggttcccggggtgttaaagttcgaattcagtcaaatggcgaaaaactgggacaaacttgaaaaaattggaaaattcggctccagatgcatcagtagtcgcgacctctgatgagcctagtcgcgaccctttttcctggtcgcgaccatggtcgcgacttcgtaagataggcagaaactcggtttttcgagttttgcctgtagtcgcgacttgcttaaatgctagtcgcgactaggtac

SEQ ID NO: 350750 - DNA, 648 bp, Cannabis indica
gcaccatcggcttccccaaggcccagaaatctcgatcccatctcttccccttgattagtcgtccttcgccgtcctctgccgccagctgccagtcacctgcgaagaagagggagagtagaagaaagaagagtgaagattgaaatttagattttagggttatatttatttatttagtttttttaaatttaaaatatttatttagggttatatatattttttatcatttaaatatttgtgaaaatagattgaaataattaaaaaatttggtaccaataagaatatacaatgtgtacatagatgtacatggtggcaatcttagttggcttcctaattggcacttaactggaaaatttaactgttattttaagtttgcaaacagaactaaactaaagggggtttcaccactaaaaaagaaaagaaaaagggttatgtgtatacaaattaaaacataaaggggtttagccgcaaatttctcttttatttttaatataaataaaaagtcacccatgaatttctcataaaccaagaattctgttatataggtacacttttatagaaatatatgtgttttgtttttgtttttttactaattattaatatttttttatccttttctggtctctttttttaatctctcaactttttttt

SEQ ID NO: 350751 - DNA, 739 bp, Cannabis indica
cccgagaaaaacttttgcacctccatcactcttcttggcctcagccaactttttaactgactcgctttttccctgatcaaccatgattctatctttccgactatgtgccgtaaaaaaggatacttccgacaccatttgaagatgttgctaatgttcattttttgcaaagaatacacaaggatgtcgtcgataagcactataacacagttatcaaggaaatccttaattactctgttcatgaggcccataaaggtcgctggtgtatttgtcaatccgaatgacattaccaaaaactcgtaatggccatattgtatttggaatgtagtgttcagaatattcttcaccccccccaaattctcaactgatgatgaccagaccgcaagtcaatttttgaaaatacagtcttctcctgaagctgtgcgagcaaaccatcaatcctggggaatggatacttattttttgtttgtaagcttgcttaattcctaataatcatttcatattcaaagggaaccatcctttttttttcacaaataaaactggagctccttaagggaatacacttggtcgggtaaaccctaaatccagcatcccatataattctatttttacattcttgaattctgttggagccatcctttatggcactttcggtacgagttctgccccaggtgccaggtcaattataaaatatatctctcgttgtggcagcaatcccgacaattcctcggggaaaacatca

SEQ ID NO: 350752 - DNA, 502 bp, Cannabis indica
tttctatagcttttactttttctttgtggaattattaccatgagtctaaaatttggttaacgaaaatctgcgtcaacagattaaattttggttccctttatttttaattctagtacttaaaagttgcacacaaattcagatcaaatcttgaattatacttccactagtgaattaatggaactaaatgataaagaagtaattagaagggtaaaattatattttgaccaaaaataattacgaaccaacacatgagggctaatcactgaaattgattatatcaatggacactgaagttaaactcagtaaatataattctataattactaagagtgcaattccatatttatagtagagtaattatggaattaataaacatgggattatttaattgatgagacttaataaataatttaatttagaattttttacatgaaaaatcctttttagacactttattacaaaattaccctcacacgcctattactacatttatacttacaaa

SEQ ID NO: 350753 - DNA, 1127 bp, Cannabis indica
aagctcattaaagaggggtcgagaattctgggttgcacaagtgctagaagagtaaaaactcaccaagaacattctctgtattaaatactatcataaatacacagactcgtggactaaggctcattaacgccccaaccacgtaaaaaatatccttcttaatttcttacagctctctaaattattattattttattggttgccgaaaaccttggtcaacattttggtgctttcattgagagctcaagaaagcgtctgtaaacacacactacattacaacaacacaacaatggtggagactcgaagcacacgtcaacctcgccctcttcaagatgctcaggacccaaatgaggaagacgtggccttaagagcaactgagggttccgaggaagaagaaggaattcctgatgacgattacaagggaaatctcgacgagtacgcctatgatgaaggcatctactcagaattggtactcttaaggaaaaaggatgtcgatcatgaggctcgaatcgcagcccaaaaagcgcaaaaccaaaagatgcaagaggtgatgttggccatgcaaaaagccatggaggcagcaggaatccacgtgcatcctaaagccatctctgctgggcttggaaaggaaccggaggaatcttcgccaagtacccaaaagcagaaatctagagaaccaagtcccataaggtatcccactgaagggaaccaaaagaaaaaccctacttctacccctccgctcaatttctcgaaagggaaaggtccgtagaggggcaaactccaaaaagggagtcttggccctcaggatcgagaggaccgaaaaagcgtttccgtgcaccaagagcccggagggagaggaagaagaggacagaaatgtcctcccattcatttgagaaatcagatcaatgggaaccaaggtgacctccgggatgaccttgaccaaaagaaatatggaaccgcggtctccacggaacgttaaacgaagaaatcatggcaaaactcgccatacttcgaaaagacatcgcccgagtcttccaaagacagaaaggcgatgactccgactcagactgtgaggaccgggagccatgtgccaagcacatcctggaagcagagctccccaaaaactttaa

SEQ ID NO: 350754 - DNA, 676 bp, Cannabis indica
atagaaaggcgagattgagtaacggagagagagccaaggagttgtgctacgactttggaaggatgtgcttatcaataatcaataaaataaaataaagaaaaaaagactctttggaaggatgaagagaattatgtctgaaacacaccttcggttttgtaactgggcctcgtatggactaactcaattaaatacgaggggaacctattttcatggtttttaagttataagtttgtaaaaatatgtctttctttttcaaaagagttatgttattttatagcaaaatttaaaaagaaattataaaatatgagaaaaatattataaagtaattggttataaatatacaagtagagtctcttattcaatacctctaatgtttcagaaccagaaaactatatgtgaatcgccaagtaggtatgaagagctcaaatctaagaccttgagagcacatactgatagacttttcttagattagaaagaattcatacacaaatattgaaatcccaaccgaatgcttttattaatcaccaaagaattacacgaaatagctcttcgataggctttctctcctattctaacatttcaagaggtgtagatatctctcccaagagatttctctcaattctaaactctttcaacatgactgaaaccaagttctaattcgctatatatatatata

SEQ ID NO: 350755 - DNA, 660 bp, Cannabis indica
agaaatacaagatttgtatcaaagatgaggcaatgaaggttcaaatatagaaaactaagaatgtgaaacacaaaagccactaaagctagcttagtggtgagggagggatgggaaaaatagagaggtcatgggttccaactcaagacccttaagctattaagttaatatatgatggtaaaataccattacgctacactcaaaaaaaaaaaaaatgtgaaacacaattgctctacaacatttccttattagttcctgttgtcgagcaaatttcgcaacaccaattgtatatgatattatcaataacagtaagaaaactgtgtgaagaacaactgtgagtattcaacctagagtgacgagtactcaaactgggaatgagaaatgattaacagaaaactagaaataacaatgagacagaggattatagtggttcagtcagatcacggtctgcttagtccactgtagcaagagttttcgtaggtgccatttcacggtggatcacccctttatatacaaagcaggtgtccgatcagttatacaaggattgcattcattgtcaatccgttttttacacattgaattacaataattaaaactaaaactaacgttaacattaataaataaaacgaaagttctaaagctcatcaacgtatgcgtcttccg

SEQ ID NO: 350756 - DNA, 994 bp, Cannabis indica
aaacagggacttggagggaaaatattatcctaaattttgtctacctgatgtggcatgtccacatagtcaaaactgaggacacgtggaatacaacttataattaacaagacaatgtcaccttacacgatatgtcaactatcaaggcatctgttttaggaatctaataaggtggatggctaggaacatgatctacaattatgaaatcatgactttcctaacggattgaatattggtttcctttatgtgttaattctggtactggaaagttgcacgcaaacttagatgggatcttgaattatacttccactagcgaattaatggtactaaaggataaagaaataattagaagggtaaaacgatattttgaccgaaactaattatgaaacaacacatggagggctagtcactagaattgattatatcaatcgacactgaagttaaactcagtaaatattattctataattacttataagagttcaattccatatttatagtacaacaatcatggaattaatagacaagagattatttggttgatgagactcaataaataatctagtttattggagcttagaattgtaggtccatggtccccgaatcgctaccttgaaacaatgtcaagggtagggataaagatttgcataaagatgttcgaaaaaaaatctattttgaattagcaaaataataattatttatttttgtaataaataaataatttttttaaattaactaaataaagaaaaagacaaaaaattgttaaagacaaaaatttgtaaaagacaagattttacaagaaaaaaagttatcaaggacaaaaagacacgaaacctttgtcctaaaagacaaatggtaaggcacctaagctaatgtcctgtcccctatagagttttgcttttttgagttaatttaattatttaattaagttaattaggtaaaatatactaattttaaaaaaagtgttttatagtatatttcaaaggttgttgagtata

SEQ ID NO: 350757 - DNA, 527 bp, Cannabis indica
cttctgagaaagagctgagaaattctttgtttggtgtcatgtggaatgaacaacctgagtcaagcacccattctccacctgaatctgagcttgatgcaaccagaacatccattgtctcacaaccatgtgcaagatctgcttccccatgatttctggttcttgattgttgactgtctctgtttagtttagctttcaaggctagacattcatctctaaaatgtccttctttcttgcaatagaaacattgctttccagtgttgctccttgaatttgatccccatgcagagctctttgtaccagttttaaactggtttgacttatgatggctctgatttcccttgtgattctttgtaaatttcccttcgaaaatcaacaacccttctccattgctatctcctccctcatcacccttcttttgaatttccttttgagtttagtgctgccttcacttcagtcatggtgagagtgtccttaccatacaagatggtttcaacaaaatgttcatacattttgggaagagaactaag

SEQ ID NO: 350758 - DNA, 588 bp, Cannabis indica
ttgaaatttatgggtgcctactttcctcattcactgcaaagagatccgaatctttcttttttatttttgatctatttgtaacttacaatggatcaagttctgaaaacatgtcaacgaacaacggcaatccgacactggaattttcaagtaatgtcattttttgacgtaagttattaatggacaatggagcgttgtggctaaagataaacttgacgagatgcttcgacgtgtccatctccttccttcattgtttaatatatctgatacaatcattaagtacgcggaagaaaaatgggttgatgcgagtcgcaatttcgcgataaaagtttacaccaacgctattggttatattggaaacacagagtacgatggtgaaactgaatatgatcaatatgatatcgatgattacaaaattaatttcgtcccagccactgaagagtctatggaaaggttggaaaaagcagaaataaaagatgatcaaattgtatgttcaatttgttttgagaatgttaatgattgtctaaaatctaggatgctaccttgcacaaacatatatcatgatcactgtattattaagtggcttcaaac

SEQ ID NO: 350759 - DNA, 529 bp, Cannabis indica
aacttaggtaaaaaaaaataaagtctagttaatgttaatgtaataagtttaattttacttagtttaatttaataatttaattaattatttattgttaattttgtgtaggtgttaatttgtggtaatattgtttgaaaaagattgagacgctatggctttgtaatctctttaaacttttttattcaacattttaaaatcttagaaaaaattgaaaagttattgttaattttaattatgtttaggtaatagtgtgatgttgttcaagtaagcttttaatttaatattttaaatattttataggtatcgagttttttgtgttgattgtagagtgcacaagtagctatttttattggagaaaggtataatcactaaaactttaaaattctttatttagtggagtttgaatatattagatattcattcgtattgaagaatatactgcgattaattaaacttcggtcgaatgggtggaatatgcatgttagataagtttgaatatcttaaatattcatccgtagtgaagtaggtt

SEQ ID NO: 350760 - DNA, 654 bp, Cannabis indica
aattgtttctattttgagcttatttctttccatgttcaatttgtgttgtttctattttcaatatgagttatttctattttttatgatattttttccatttcaaactaaagttttcatttcaaggttaaattgtttctattttcaatgctatatgtttctattatcaatgctatatatttctatttctattacccattaacatatatatatgtatatatatatatatatgttaatgggtatatatatatgttaagaagtgttctatatatatatatatatatgtgtttatacgagtaaaaatgctacttgtttccaattcgaggttatgtttcaatgtgagtttctatttttttaggttaaattatttttattttgagcttatattctttccattttcaatgtgtgttgtttctgttttttatgatattttttccatttcgaggttaaattgtttccatttcgagcttatgttgtttctattttcaatttgtgttgtttctattttcaatctgagttgtttccattttgaggttaaattgtttctatttccaatgttatatgtttctatttcacacacacatatacatatatgctacttgtttctatttcgaggttatgttatttttattttttgaggttaaattgtttctattt

SEQ ID NO: 350761 - DNA, 801 bp, Cannabis indica
agtttttgaaaactgtgagagaaggaaagaaaagaaaatatatatattattgaaaagacaacaacaagaaggtttaggtttagtttaggagaaaaataaaataaaaattgttatggttgagactgttaaaatgtcaggagtgcttggctttgcatagtaaaaaggagggtttgattttttgaatggatgacagagcagaacttggagattgtgttgtgtgtgtatcttgtatttttcattatttaaaaaccacagtgaaaagttggaatcattctgttgttggaaaacatttattattattagtctgcaaaatatttaaaaaaaaaacaatttcttttgtgagtagatttaggaaaaaaaaggtacttagtttaggtctctggtgtatgatgatgggtagtataattctaaaatgattagctctgtgattaatattatcatcagtgcactctctctcaaagtctcaaaaaactcttataatatatgtataagatatataaatattgtttcttgggagatgaggaagtaagaatctaaaaattagtttctttttatggattcatttattacttttgttataatctatgacatggggaaataaaatttctctgaatatgtataatttttctaactttttatgctaacaagtaatatttttattccaattgagaaaaagggaacaaatagatttgtcaatggtatgaactacaaatgtaaagcttaatatccttataagaacttttttatgtcataacaaaaactttaagatataattaaacattagtatgtgtcttttaattg

SEQ ID NO: 350762 - DNA, 889 bp, Cannabis indica
ttatatgaccatgagaaaaaatttgactaaaagattattccagatactaaaacagataaagatgtatcggtatattctttctaagagggtacattatagaatttttccaaaaatatattatgtgtcctatttttataatttttattttagataaaatcgctatcgggaggcttcttgaaaacttcagatatcttctcagtgaggcctacaatcttgacgagtcagaagctaacattcaaacgagcctcgaagaactctttgtatgtaagaactgcaatcatcacaagacaagcatcatcaacctcagaaggaaaaatggccccagctcgctattatgatcactgctaccaagcttctgtcgaggcatccccagatacaataattaaatacgtgtataaatatacaatcattttgacccgacaaaagtggaaaaatcacagctatatgattttcaaatcataactgcatttacactacgtgatgtgtaatcaaaccccatgattttaggggatgattgttgtaaacggattacagtcaactttgtaatttactgcccactatgtaattataaatagtggcaagcaatatcaaaaaattgatgaaaaaactcatacaaaagaggccctgagaaaacaataagaaatatgaataagattgactcgtggattatgcagaattttaactgcaaaatcacgtaaaacccttgtatgttcatactttttattttatagcttttattttttctgtgtgagattgtcacggttaggctcaaatttggttaacgaaaatctgcattaacgcagatgttgcagagaaaatcaattttgatcaatgtcattgaaggggggaatagttgtaaagaccgcttagtttaatttggaaattagca

SEQ ID NO: 350763 - DNA, 523 bp, Cannabis indica
aatcacgtaatacgcctatgctagttagggtgttacaccggatttcttttttcaagaacatatggatacctgccggtagtaaacgttgtaacaacacatgacaatcatgtgatttgagcccagaaatcttgcccgtatccaaatttacatttttgtctaagtttgctgcaaaaccgtccgaaaatcatacagactttatgaagtctgcaaattcaatctgttcttgaacactaagtgtgtaactagttggaggctttttccacttcccttttcggtcttcatacaaccacaactcacgtcgtatttgcaagtcttgcaaatccattctcgcctcgtcggtatcctgtgacttctcgtcgatacttagaagagtacctactaagctgtcacacacatttttctcaatgtgcattacatcaagattatgtcgtaaggacaaatgcttccagtactcaagctaaaaaaaaatacttttttttagaccaatttagctcttcactaaaacgcttccgtttcacacccc

SEQ ID NO: 350764 - DNA, 722 bp, Cannabis indica
aataataagttttttttgtacatattttgtaattaattaaaataatgtatacgaaattgtaaaatgtccttacatgaaacatacaaaccattcatatataaatgaaaagaaagataaaatgattatagaattatgagaaggagacgaagatggagacgaaaagattgagaaaagaaggaggaatctgaataaaagagagagaataaaaaataattaaattggaggagattaaaaataattaattatttatttaaataattattatttaatttaaaataatattaaaaaataattttaggaataatactaatacattctaagtgttaactatttatatgcactcatcaatttatgatccttagattaaatatctatgactttaaaaatatgtctaccataagaacaaaaataaagtaattaccataaacatgtcctatatttaggagaaatctagtgtacgccactttcttttaaactcatggcatggggaagccaaatacaccaataagaccctttcttttaaactcatggcatggggaagccaaatacaccaattataaaaccctttctttaaactcatggcatggagaagccaaatacaccaataagaattagacaaataaattgtaacaccaaatactaggttactattctacagctaatttttctttaagaaaaaaaaataaaaataaataatgatttatcaaagacatctataatgc

SEQ ID NO: 350765 - DNA, 948 bp, Cannabis indica
cgataggatgtcgattgggggttaagtttatttttttgcccttaattgtcgacaacttgtcgacagtatgtcgatatgttgtcgataatattaggatattgcttttaagtctgtattgtcgactaaatatcgacaggatgtcgatattttgttgacatgttgtgtaataattgtctgcttgaaattgtcgacaacatatcgacaggttgtcgacatgttttaaaatgtgtttactgtttgataatgtcgacagaatatcgacatgatgtcgatgtgatgtcgaccattcttaaattttttgacagtaatatttatttgttatttatttttcagatgactcccagactcataattccagcatccgagcattttactggccgcgttacttacagagacaccggaacttttgcaaaaatcaaggctcggtttgaggagttcaacttgaataacacggcgaaggaaagccgtttcggcaacttttggaatgtcgttcccctgacattctcctcggtgttatttcaccagatgatgttgcacaagatgaaggttgatgctcaggaggagttaaagatgtggttttacattggtcggaaggagcttagattcggagtgcttaagtttgcactcattacaggcctggacttctccacggggccaacagaagaggagaaggctgcgcaggctgctcgcttaaggtcagaccgattgatcaacaaatatttcaaccggtctggtagtgtgaagacataagcactccaagataggttcacaaactgtcaaaacccgaaagacttgtacaagcttggcttgtgcttgttcgttgagtcagtgcttctgggtcgtgaggctaacgcgctgattacgcctgacatacttagatatgtcgaagatctcgagttcttcttccggattccttgggggaagcagctgagtttggatgttcagcat

SEQ ID NO: 350766 - DNA, 1374 bp, Cannabis indica
taatattttcattattttaatgccaaataattactaacctaaacctagtagttgcctataaatagaaagtgatggctcagtcaaattaatgctttttgtcagaaaatcaatttttcagaaaactgagccttccctctctctctatagccgaaccaaccctctctcttttcctcttcataaatttcgaaaccctcagtgatagagtagtgcccacacacagcaagtggtacctcaatcatagattggaagactgtgaaggatcacacacaaagagaaggacattcgggctcagatcttgataatactctgcgacagaaaggatacaagggttagagatctgagtggaaggagacattattccgctgccaccaatgtaaggttttcttaactttatatgtgtttatttatcgttttagaaagttcatatttagggtgttaaacaacatacttgtgagtagatctaagatcctggtaaaataaattccaacaaaaatatgtttccaacataatgaaacctttcttagaggaagatgttaggatttaatgaccctaaataaaatccaattttattgtaatcttaattactgtcaataaagatcaaaaaatcatgtcatgactcagtcataaactttgtttacatattttacacatgattataggtttaatatataagttatattatatcctaaacatatagttatacacagttgttgtgatgtcatcacgatagaaagtaattatgattatatactttaaattatttagtctcatgatttattagtacactagatttacactgacatgatatcaacaatagggtttacttacacttggataagtggaatgtcttttccacgacattagtaaagtaaattagcatcagatatatcggctatacatcagactgtatcgatatatacagcggaagagttatcataaacttactgtaatatcttttctagataaagctctaatagttgatcttagatcaataatcttaatcctgagatgattaggttctgccttaacagtattattcttgttctgtcaataatagtgtaataaagggaaccattaggtagctcgtcgcgcccatgatttcctgctaaaaaaattttgtcacctaattagtattgtgatcatacattcttcaatacaactcaaaattagacgattcaagatgttccaaaaagctaagaacgagatataaaaatttcatgttgagctccaagtctagttctgcttttaaggttgtcaaaatttccaattaagttctgtcttgtaaaattaagctcgtcgacttccactattttcaacaaaaatatgctaaaatccctctaaaattatccaaatgcatgattagtctttaaaata

SEQ ID NO: 350767 - DNA, 579 bp, Cannabis indica
tcagtttgtcttcaatattacttagctgtggtattggctcgagattgctttcctgtatgttttctttttttctcgtgcattctaccacaaagtcggccaaggcttggcctttaatagttgttcggggttggaagttgatttcgtactgttccaattccaccgcccacttgagtaatcgtccagaggaatctggcttttgcaatatttgtcgtaatggttggtcggtatacacccgaacaggatgagcttgaaataaggcctcagcttccttgttgctagaatgaggcaataaacgagtttttctatcaacggatatcggccttcagcttcgatgagtcttttattgatgtaatagactagctgctgcatgttgttctcttctttgatcaggacggcacttacgacatgctccgtgtctgctaggtatattcccagttcctcatcgtctacaggtttagaaaggacgagaggttttgcgagctgcgcctttaaatcttgaaaagctctttcacttcttctgtccagtcgatctttttgtttcctcacaggatgttgaagaatggaacacatttgtctgtt

SEQ ID NO: 350768 - DNA, 696 bp, Cannabis indica
ataacagtcctgtttttcctttcagatacgccgttttgttctggtgcgtatccaacagtgagttggtgctccatcccttcatcttcacagaacttgttgaattcattagaagtgtattctttgcctctatcacttctaattgtcttgatgtagtgaccgctttgttttcgacacgggatttgaactttttgaaaatatcgaagacttgcgacttttgttgcataaaataaacccatgtcattctagtaaagtcatcaatgaagagaatgaagtacctgttttggtcatttgatggagtgcgcattgccccgcagacgtcagtatggactagctccagtggctttttggctctccaagctttgccagatgggaaaggttgtcgatgttgtttcccgagcatgcatccttcgcagactgtgttgatctccttaattgctgggaggtctcgcatcatattcttctgcttgaggatctttagcccatggaagttaaagtgaccaaaccttctatgccatagccatgattcatctgtttgtgcttgcattgccacattgcttgcatatctccattgtatgggaaagcatctgttttctttcatttttacctttgcaatttgaaaggatttatcttgcttatcatatattgtgcaagaatttccttcaaaatgcaaaagtaccctttttcaatcatttgacc

SEQ ID NO: 350769 - DNA, 507 bp, Cannabis indica
actagaaccgaactaggactaggacaaggacaaggacctaaacccaaacccgaacctagatcaaaacacagatagagacctaaacccgaacctagactaggactcgaacacgaacctagactgggacccaaacccacatagtaaccgggaccttgacctagtatcaggatagggacctgtgaaacagaactaggactgggacctagtacaagacccagacccgaacttgaacctaggactcagctcgtgacccggtacaacaaatggaacccgaataggacccgagattgtgatccaaatctagacccaaggcttggacaaaacacgaagtcagtgtctggatttgggacccagccctggacccgaaccctgacaaggacccgtacccacacccggaactgaacccagtcccaaactgaaaagtggacccaaacccgtaccctgtgacccaaaatttgaacaaaaaccggaagttgaccgggactggaactaggacttggacttgga

SEQ ID NO: 350770 - DNA, 638 bp, Cannabis indica
ttcattaaaggagattcagaggccagatgagattaggagtgactttgcacacttcttaagggcgaatgagcaatgtaacattgacgttaagcaaggtaaatcctctattccccgtgttcttcgttctggttcactgaggaagaatctggatagttcttttaagagtgaagaacagaaagcaaatgtgaaaattacattagaggatattgaagatgaggtgttgttttggcaaccttcaattgtctgctatgtgttgggttcaaaccctccattgcagataattgaggggtttgctaagagaatttggggtgataaagtagacaaggttaagatgctttcttatggtatattcataatcagatttgcaatatggagtatagagatctggtgctgaatgggagttttatcttctttaatcgacgcccggttgttatgaaaccttgggatcctaatactaatttcagcaaagaagatgtacatagtgttctgaaaaaccgtgtttttgcaaaatgtcagttatatatgagaaaatataaaactgtaagcgtttgtagaagcagaaagtaattctgctacagcaaaataaaacaggcagaatataaaatattagtagaaaaataaataacttgacacaagag

SEQ ID NO: 350771 - DNA, 1312 bp, Cannabis indica
agctatttgatctaatctgatcttttagcttaacatgaaataaaacaaattgcagaagttagaaattgtactttagatggtggtcacccggcctgattacttttcaattttgtccgagcctttgggtgtggtccgcccagaaggccattcacttaagagtaaatgttcttttagtacttaatatagtcatccgacgtggtacttctattggtagtattttcttaaatgttgcccattccaataccttggtaccaaaacgagttgcattttttcatcatacttacccaatttgtatgctcttgattcgagaacttcgaccacctgatatggtccttcctagttaggtccgagtacacctaccgtactgtctttggtgtttagaaatactcttcttaggaccatatcttccacaaagaattcctgagccttcacttgtttgttgaaataccgagctacttttcgttgatgggccatcaactttaagtttgccgtggttctcttctcttcgatttcatcaagtgatttggtaaggggtacatgaatttcttcttggttgtacgtcaatcttctatgggatgatggctcaagtcttacgggtagcattgcttcgtatccatatgccatcgcaaatggagtttgtccggttgtcgtttcctcagttcttcgctacgaccatagaacttcaaaaagctcctccgaccaatttcctttagcatcctcgagtcttttctttagtgtatccttcagggtcttgttgctgcttcaacttgaccattttcttagggatgcgccactgcggagaaacttttgatgataccattgttcacacagaaatcagtgaaggactggctgtcaaactgtttgccattgtccaaaactattttgtatggcaatctgaactggaagattatgttcttcacaacgaagtcttgaactttttttggatgtaatggttgccagtggttcagctttcatccacttagtgaagtaatcaattgtaaccactgcatactgcactccacctttgcctttgggtaattgtctgattaggtcaatcccttaaattgcaaaagtgttgggctttgttccctaaataaaactctatttcaatgtaatctctactgtttaattatcaataaagagacagaagtattttcatctcttatttagtgtgtcatttggttcatgttgtcatttatatgtttatttgatttataaattcatccaaacccttatcacattaatattattgtttattatgtcgtcgacacagtggaaagtaatcaggattatgtgattaaatatatattcc

SEQ ID NO: 350772 - DNA, 613 bp, Cannabis indica
aaaagctcagaaaaatccctcctttcttttgaagaagaaacatctccttcatggctgaaaacccaaaagatgttaatacacaacatgaggaaactcatcaccgtttggggaaatagcccatgggcatcagaaggtcttcgatccacagtttagatggaccacccgctccaagaggactcaacctgagggtggccctagcacttataccacgtgttcctggaggaccgaaccagacgttggtcccggtacgagaacaacacgctcgaggagaacttagagtgagaatggctaaaatcctagcactagagatgaggagcccattcgtggagatactcagcctatgggagaaggcacttatgaaacggaaaaccgccgccttagatgtcgcctagaggaggcacagcggcagaacactaagttagaacgtgatgcagctgcagctagggcggcgcaggggactaacactcaaaattaacctgaacttggagtgagaagactacgaggcagacctcatggctaatgaaccaagagacaagaaaattcacacgaagaacaacctagggaaaatgagattccccatgaaaattaaaatgaccagccagaaccctctcac

SEQ ID NO: 350773 - DNA, 631 bp, Cannabis indica
tgtttctttattgatgttcaataaaatggattacattgaaatggagttttatttagggcataaaacccaatagaaactaccaagacaattgaacagcttgaaaatataatgatcacaagggaatatatgttggggattatttacctggatctagatttactaccatgtatgttatttaacaccctaaatatgaatttctaaaacaatgtaatttaaacacatataaagtttaagaaaccatacattagttacaaaagaattaaatgactccttgcactcagatctctaacccttgtatcatttctgtagcagagtatcaccaagatctgagcccgattctccttcagttgagttggattcttcacagtcttacacattatgattgagtaccaacttgctatgtgtggggatgtactctatcactatagctcgaatttaatggcgaagaaagactagaatttcgaaatagagaagataaaagaagaagaagaagtctcaaactctctagttgtgaaaactaggtcaagagtcattcgttggattatgagtgtaaagaccgcttagtttaatttggaaattagcagttaatcacgtttaattatggaaacttatttatagctatttaaataat

SEQ ID NO: 350774 - DNA, 615 bp, Cannabis indica
ttattattattatcctgctttttaatttttcgttatttaattattcaaccttattattgattctgccaaatagaaacaagaattcaattgattggtacttagctacagtcctcatgggaacgatctcacttacctgagtattacttgtggaaaaaaaatccatcccaagcatgatatcaaattctgctaattccatctctactaagtcaacattcaagtccctatctttggctctaactagcatagacataattctccttttggagataattaattccccgctaagtagtaggattctaaaccctttttcaataaagtcacaaggcctacccaattgattaattacctgtgttaccacatatgagagtgtagcctcagagtcaaataacgcagtaaaataggagttgattataagaagctgacctgtcaccacggaagggctggttgcagcatcagcttgagtgatagcaaacacctgagcaggttcgggttttgcctcctgcttttgctcttctttctttgcctgagggcaatctttcttaaaatttccaaccatgccacactgaaagcatgtcttctagttgcactctcacagatgatgtttcttacaacgtg

SEQ ID NO: 350775 - DNA, 724 bp, Cannabis indica
tgtttggatgcgtcacaataaaaaacaaacttttctcgatctaatggcaaagctaacaccagtgctgttatctatcgttgttttaattcctgaaaacttacctcacacttgtctgaccatatgaactgttgattcttcttggttaactcggttaatggcatagaaatcttaaagaatccttcgacaaaacgttgacaataccctgcgaaaccgagaaaacttcgcacttctatcacagactttggcctcggccaatttttcactgattcaatctttctcgggtcaaccataattcaatctttttcgacaaaatgcccaagaaaagatacctctgacaaccagaattcacactttttgaattttgcatacaatttatgctccttgagttgctgtaataccattcgtagatgatgctcatgctcctcttctgatggagagtatacgaggatgtcaacgataaacactataatgcaattatcgaggaaatccttgaatagtctattcatgagatccataaaggttactggagcatttgtcaattcgaatgacattaccaaaaactcatagtgtccatatctggttcgaaatgcattctttggtatgtcttcttcccgaattctgagctgatgataaccggatcacatatcaatcttcaaaaacaaaatctttccctgaagctgatcaacaaatcatcaatctggcaacgggtacttgttcttaatcg

SEQ ID NO: 350776 - DNA, 587 bp, Cannabis indica
tattttggtgtgattaaatttatataaaaaaatagaattgggagaaaaatataacgattgataagtatattggaaactcgttaattttaaaattattgtcattatcgtatcccactcgttactacatttaaagtcgatgccatcaccgtatctcacctgtaatcgtcactatcttgaaaataaaaaatataacaattgataaatttatataaaaaaaaaaataatgatatcgaataaagagtgctatatcatcgcctacttaactttatattatatatatacatagatttggattgaaaatttcactcaacttttcccataaaattatatttagtgtgatcgaactatatgtaaaaaataacaaaacttaactataagtaaaaataaataaataaataaaataagatattttaaaaaaattgcaatacttactaattatttgttataactttgatgtatgtttttataatacctccaacaatctcaatatcactaataacacataagcattaaataacacaaagatattagaatattataaagatgaatagttaaataattttttttaaatatgaataaaagttaat

SEQ ID NO: 350777 - DNA, 176 bp, Cannabis indica
gtggccactcactcacttactatagagcttcgagtttagaagagaggaagagagagagaaggtggcggctagggtataggaagaaggctttgaatttttctctgaaggaatgagatgcatcatctttttcctgaagccatcactacctatttataggaaaccacctagggttaggt

SEQ ID NO: 350778 - DNA, 596 bp, Cannabis indica
ttttcaacaaaggaaagttcagctgaaagtgcaactttcctaacaaggaaaaggacaaatacaatccgaatttataaggcaagaaatcgaatatgaatgcacaacaatcttaccataaaaggaaaaattattttgtcaactaacttgccaaaaaaggactttacaacatattagttatacattacatattatattatattgcattttgaaatcataagattttattatttctattattaatgtaattattgatctaacttttaaaaattaaattatcattttaactgctactaactcaataaaaaaaagagagaacaaaaaaacttgaaaatatgaaattgtaacaacaaattccatgaaaaaataatgtagttgtgcaaaaagataaatgaagttgtcaaatgtaagtaaacaaatattcgtaatacaaatatatattgaggggttgatataattttgcatattgcaattacgtcattgttttgttatttttcgttgctttgtagttatctttttgttattttatagttgtttctatattgtttgtaagttgttttagagttgtttttagtctttttttattattttattgtaaa

SEQ ID NO: 350779 - DNA, 538 bp, Cannabis indica
aaattggtggatcatctttgctttttctttcttttgagtcaatccctctttgtggcttcttttcaaagttcttgaattttataaactttttgtatttcttttttgagaagagtgctaagtcctccatgtcactacacaagctatcctcatcatcatcactaatggtatgggaggaggaagacttcaatgcaatagtcttgtttttcttctgaacttcctcttcttcttgagcactcatgaaaattttatagttcataagtgaagcaattaattctttcaaaggaggtgttgagagatccttggcttcttggatgacaaccacttttccttgataagctttggtgagacttctcaaaatcttggtcaccatatctttttgagtaagtaccttgccaagagagttcaaactattagtaattgtgctaaaatgaatatacatgtgagtaatggtttcctccgctttcattttaaagttctcatatcgagtggaataaatttaaattttagtttctttcatagcactagttccttgatgagt

SEQ ID NO: 350780 - DNA, 481 bp, Cannabis indica
gcactagttccttgatgagtaacttcaagtattttccacatatcaaaaactgtagaagcttgttcaatattcttaaatacatctctatccaaaccacatataagtccatatttagttctagcatttttaaaaagaattttcttatcattcttatcatatgcctcataagtcttaataacttttacactatttataacatgtttgggaatgggaatgtaaagaccattagatactatttgccacaaatcataatccatagattgaaagtaaatttcaatctaattttcaataagaaaaatatactttattgaagtacgatgctctatttgtgcttaaacttctaacatgtcattttgtgaattacttggaaacgtcatgctctattgtgaaatataatcaaatatatgaacccttgctctaatacaaattgttaacccaagatatgttcttaagaggggagtgaatgttggaaattatttta

SEQ ID NO: 350781 - DNA, 532 bp, Cannabis indica
cctcgtatcttgccttttgagttaaatatgcttgtttattgtgttttatttcataatcaaacatttacatttcgatttagcttaagatactttgggttgaatgcatttcaactgtcattttctttgagatatacaagtagttattaatctatcatgttttttgcaagtagttctaatcttccttgttatatgcgagcaattctaatctgctactcattattattttttagagaaaactaaaatatttttaataattcatctcaggaagtattttgactatattttgattgcccatatgaatagttaatcatctattcatattttagcttaagtattatttttcaaggctcatttgtgccacgtttataatacatgccagagtaatgcgagttgttaagtattcagcttgcatatagctttttgttgttttatgagttaatctcacttacatctactattttgattttccttcttaaagaaaaggtttcttaatttcttgactttatattgtcaatagacaattttaatcaat

SEQ ID NO: 350782 - DNA, 797 bp, Cannabis indica
aagcctaaagagcgacttcgaacgattcggcgtcattggaaaagattgatgtgtggcagttctgaaggtgagcttacgcttgtgcaaaactctgaagttaacaatattggaggtcaatttttcgtcattcggtaggagggctctattggatgcaaggggtggacttgatccaatttgaatcattattgaggtccaaccccttctgacgggggtgcaggtaagtctccctttccttgttttgcatgacacattgcggacaatgtgtattctatgtctcggggaggggcttaaaaaaattaattgttttagttattctgttctttttagttattttgctttagtttagtctttttgtttggttgttagtcgattaaataaacttaatatagttgtgtgcatttgttaattgtgatatgtcttgaaattttgaaactatgtgcttaattcttttaactcttcggattagtttggatgcttgtaaagcctgtgtatggatgcaattgacgatctgtgaaatatgttataattgttttactgtggtttgtggtaagactggttggatagcttagaacttgcatgccttattctcttgaggcaaaatccttgacagcatttaataggaacatgatttaggcagcttgtttggatagtttgagcctttcaagcctaccataaaatgaatatccttagtgaaccctttgagcctaaaactgtttcgtttcttcacccattgagctaaaatatgtatccacactgttgtttttgtcctcatgatattttgaatggtatcataagcc

SEQ ID NO: 350783 - DNA, 612 bp, Cannabis indica
ggtctaggtctgatttggagtccgggtcctggtccgattacagttcttgatctagatccaatttcagttatgattccaagtctatgtcctagttccagtccaggtcaagttccagtttatgtttcaattttgggtcactaggtacgggttcgggtccacttttaggtttgggactggcttcaagtctggttgtggattcaggtccggggctgggtcccaaatccagacaccgactacgggttttgtccaagcgctggatccagatctggatcccaatctcgggtccctgtcttgttcaatttctggtgttgcgtcacgagctagctcctaggttcaagttcaggttgcgtcacgagctgggtcccaaatcaagacaccgactacgagttttgtccagatcgggatcccaatctcgagtcctagtctagttccatttcagttgccttgtcatgtgttgggtcccaggttcatgtttgggtctgggtcgggtactaggtcccaatcctagttgtgtttcccaggtccttatgctaattcttggtccaggtcccggttattgtgtgggtttgggtctcggtctaggttcaggttcgagtcctagtctcggttcgg

SEQ ID NO: 350784 - DNA, 1345 bp, Cannabis indica
tacattgaaatggagttttatttagggcataaaacccaacagtaacatgatagggctcatccaaattatttatctatgtgagcttatatgtttgtaattgggcttagatgaatataggaagtccatttattttagatatttaaatagactaggttgctaaaaataaaatatcaccttgataattttatttaggcccaattagcattagacttattcaattaataataattatataattaggggttaaatttctctcttttgggccttgtgtgagagatagggggccaatagtagttggtatgacatactgaatccaaccctccctcacatgaactacccaactgtaaaagtccatttgccttattttaaataattgtattaggctaattatattagtttaacctaattaaaattgattaggaacataattaattttaaaataaatgtaaactaattttgtgttagattatttttaaattaattttaaaaaaacacacttagtttgatgaaataaattatagatagtaatttctagtaactaatttatatttttctaatatttaattaagtagaaaaatatatttaagttgaaaattaattttagatcaacttgaattagaatatttttcttagatattaaattagaattaacaattaagttgatttttattcaagatacttaattatttatttctattttaatgcatttaatgaaatgaaaaattatatttaagttagaaatttttaatttcagatcaacttaaattagaataattttcaaaatatattttatttcatttaaataataatttttcatgtaattgtctaaatgcatttatttttttaatatcgttagtttgaaaattttatggttaccaaaccctaaaatttctattcaaaacaaaattaacaaacttttcaaaatttcatgttattttgcaaaaaataaaaatttaattaaaataaatatctgataagataaaatgtcaaaaactaacatttttctaatcttataatttaatttaataaaatatatttcaaaaataataaattttgaaaatctgacatggttagaaaatttgaaactttaactagattatttctaaattttactaatattttaatatcaaaataagatcatgtcaaattttaataataaaataagtaatatctgatcttataattaaactaaacaaaaataataaaaaattagccataagactaatttgtcgaaaaatgaaattttcaaatttaaaggctactaaaactaattttaattaattaagaaattaataaaaattaattttattatgataattagatttttaattgaaaatttagattc

SEQ ID NO: 350785 - DNA, 504 bp, Cannabis indica
aatgccctattttgctgatggccttgtcattcgtgccgctcaaccacttgaagcctggctgagagaagtagaagtaacccgacctgccttgcttgggggtagacttcaggtcgaagaaccaggaaacctcgtgggggaaggagcatcccatctttggcaaacgtagacgacgaagagagtggacaaatacttaatgccctttggagtaattttggccgggcagaggccaaagaagtctgccacattcatgaagtacttgtgcaacgggattagcgccccttgctgttggtttttgggccctaaataaaacccatttcaatataatcagatatacttattaataaagatcagaaataacatttcatgttgcatggttcacatgatttatttcattattatatacatataatgtatgaattctatttaagtcctagaacatatgaattcgttaatgattatagtgttgtcagcacagtggaatataatcttaattatatgttcgaa

SEQ ID NO: 350786 - DNA, 1471 bp, Cannabis indica
taaatgtcaaagctatttatttaattattaaaattgattatcaaataaaatttccatttaatttatttattaattagacttaacaaagtttcttaattaacaaataaaccctaaaatctattttcttcacaattaagccctagcttagtgaaaaatcatacatcatagtctaattatagaattataattgattatttaaaatcaattaactgagtgttacaagaagaattgtttcaacttgtatggagaccatgggcctatatttagaattgcactctcaattatgtagaacgctctatatgttccacgatatagatatgaaatgaaaattttaaccatcgttctaatccaaataatcaaagatcctctatagatgatttacatcgagtagggataaatttactgtttcacccctcaatgtattttatccttaaaacagttaggttcctataaatgatatttcagaaaaataatataatcactgaaataagaactcttccatttatctctattaagccaagcttgaaggaaatcatcatttcacttctatgtctagatagaagttatagattccatatctatgactagcgctcccattcaatgactatcatgttccaaagctacgtgtgacctgaactaaatggtaggttcttactaacaactctaagaacacaaataacactcttgagatcgaacctaacaatgccaggattaagatcttttgacctaagatgaactagtgatattgactagaaagatacaacactaagattataatatctttaccaagatcaatatcggtccgagtccaatgtatactccatacatccgatactagcatacttttccaatgtcctggaaagaacataacacttatccaaggtataagtaatctttattgctgactatcacgtcagtgtaaatccactgcactgatgaatcatgggacattatcttttgaagcatataatcacaattaccttccactgtgttgactcactgtaattgtgaaaactatatgttgtagatttaacagaaattatatatattaaaccataaacatgaaaactacatgtaaacataaatgacttctaattctctattgataacaaatcaaattatattgaaaatgagttttatttagggcatgaaatcctaacaaactcccacttgcactaatataaaacaagaagtgtatttcaatcaatccattatcttgatattaagatcaagtgtagtgtatacgactaaacccaaattacaggaactgtaaggctgtggtaagcaactactttctccaccattacttcctttgtgttcataaaatattatggaacatcatttttatatacattactcctttagggaaactgaattctttattgcatattaagtgcatctgaataaacagaagacatatctctaattctatctgttgacttcgcttatagccaacgacaatgagtctatt

SEQ ID NO: 350787 - DNA, 637 bp, Cannabis indica
aagcaccaaaatgttgacctcgcttttggtcaatgacaatgagtcttgattgtaaattacaagtagtatagtatatatgtaatataatgaaataaataaagacacaagagttttatagaggttcggccccgagcaattcagtaatagcctacttcccttagtttgtattgacttaagaacaaagaatataattattccttttcctagagctcttgcaataatatctctgaatatgaattcttagataagtttttctaccccctgcctagtgagagtagatcactatttatagggctataagttttgagggaagagtttcccttctgattacaatagatataattgcaagatcgcatattaaatgcagaatacactgatcaagggatttggacagcttgccatatctctatgatatgatcccaaaattatagggatttcttctgtgactcacgatgtgagtgttgaaactgctaagtgttggcgtgctgtttggattgctcactacccagccaagaagactttgtctgggcgactatatgcgatgctctgtttggcatatctcgtgcgaacagatatataaagtttattccacgtgtcaccatcatgtgatgccttgtcagagtgcaaaatttgggat

SEQ ID NO: 350788 - DNA, 728 bp, Cannabis indica
aacaaattagtaaaatatggccattgtgcgttagataaaaacttgaaaccaagtttttaagaaaagaaatactcatgtatgatttgaaatttggttgtattgatgggaaagacacctgaagtccaaaagaagccatccttgaatttcattttgttgggtagccttacaatgatcttatgatcattggtatgggtactaaggtagtaaaaaccacctactccttgcttccttacgggataggccttcacggaataaaaatataaaatttcaagtcaggtcgggcactcccacttcaggatccatggtataatgactttagataggccaacatcctgtatgagttgggcatcaattggagtggaacgatgccaaggtaattacagaaatctttaaagtagtctccaagagggagaactactccaactctgatatgttcaaggctctaagcgccaattcgagagggctcactggtgctacagccttcttctcgagttatttgtttgggggtataacaactgaattccccctcagcaacggacctaatgcggcatccttgttcaattttgatgtcgcgtgatcttaggacttccctaacatacgatcctatggatctaacttcatattcaatcaactcagcctcaaatgtaacagtgggatcctaaggagtctttgacttgcaagctttctaagccattatttcaaaatctaagtcacctggtgaaaagcaa

SEQ ID NO: 350789 - DNA, 745 bp, Cannabis indica
ttgtagctaaatattatgttttagtcacaagttaagtttttgttgtgaactaaaagtcacatttagtcaacaaaaaaattatgttgtgaactaaaaagttgtcaactaaaataacattttttgtagtgattttttggttaatataagaattatattagaatttatcaaattgtaattacattagatttcatatttcatttgtgacaaataatatgcattatttgatttaataatttcattctagaaatgttaattaaaataaaatacaaaaattaacattaacaaagtgttatcattaagaaattgtaacattaataaatagttattgttaagaaattatagtaatattaaatacaatattttttagtgagaacataataataatgtaattaaaaattataattacatttcaaaaatgttattaaaatgaatataacataaggaatcataacatacaaaaaatattattattaagaaattataacaacattaaaatataatatttcttcatatataacataataataatgtaattaaaacctatacgattacattttgaaagtgttattaatgaatgtaacataaaaaaccataacattaaattaatgttaactatttataatatataaccctaaaataatgttataatatgctatttaataacatgtaaaaaatgtaattaaatgtcaatacttttaatttacatgggttgtcttaacaattgctaaagtgttataaaatacat

SEQ ID NO: 350790 - DNA, 839 bp, Cannabis indica
ataactattctaattcacaaaacccctatacaaaactaatagtttttaaacttaaaaagaaattaaaccataccttaagcttttcctcttcaatgatttgctatcctgctactaccggagcttagatcgctaatttttagattgaaaatcaaagaaaatagatataggagaagaaagttttatcgaaggaaggagaacgagggttcgttccatccttccttcgttcttctctactgttaacttaaagcttaatatatctctatatattttaaacaaagcgaatgaagttttgttttttatatatatactaggcatcgagaacgtgccataggcacgtaaccccatttaaatctgtatgatataattatatatatcttactttgattaattacatttaaacaattgttaaaaataaagttatgtttaaacaacatagtgtggtgtaggttctttttgaaactaattagatcattaatcgtcctgtctaaatgtaagtgtatatgatttgttctattattatatagtaataagcaaagtttagaagaaaaataaaataataattaacaaaaatctatgaaaaaaaataaaaataacagcataaaaaatgattaatatcatttgtatgttcgcatactcttctacactgttgtatatttactaataaataaataaaaagaagaatacaaaaaagaagtaataaaattgaaaaaacaaacaggagaacaaaatgataaaaaaaatataaaaaatattttaaaaacaaaaatagagtaaaaaattttgggaaaaaggaaagaaaattgagattttaaaaaaatgacaaaaatattaataattag

SEQ ID NO: 350791 - DNA, 929 bp, Cannabis indica
ctcctccagtgtcgaacaaaaagttcctaagaatagaaccatcacgataggcaaaggctctgcctcccattttatcctccttagaaagaataacattcaaatctcccgtaagtgcccaagggccgttgcattgacttatggaactagccaaatccgtccagaattcccttctattttccatgtacggggtgccataaattgcaaagagatgccacgggtgattaaccgcatgatccattacctcacaagaaaatcttgtttcaaatttctccaccactttaagatcaatatatctgctatgcccaccgaatctatataactcccatgttaaaactgcaatcttctacaaattctccgcatatcaacttccccaaccttcgtttccatcagaaacacaacatccaccttccatttattaacccaagctacaagagcttggattgccgcaggtctcgcgagacctcggtaattccacgagagggctttcatggggcagtggggggcttcgtaagggccgcctcctcgcccacttgaaaattttgatcaatgttaacttcaatgaacatattccccagctcagagataggacaagtgatgttacctggattcggagaatcatggtttttgttgccttgcccccctctgcttctagtgcaagattttttccaattcccaggtctcttagaattgttagtcttcggctatggagaagaaactcccacagagaaaacttgattagattctttaccacccgatttatttccttggttctggataattaagggagaaacattcccagcagctttccttttcctcgaactggaactagatcccacaataggggataaatcattggtatggaaccaattgccttacacccaaaagcccactataaaagtaagtttcagaaagaatctagtgagttaaaa

SEQ ID NO: 350792 - DNA, 994 bp, Cannabis indica
atttatgagtaactatagttactaactagttactaatgagaactagttagtaataaaaaatacatgaatatagaatgaaaattagtaacttgctaagtagtgtaacttaatatttactagctaactaaaaaaataaaaacacatgaatacaattgaaaatagaaaaaacaattgatacaaaatatagttaatttctaatttcttttttctaaactaattttatagaaattaatttctaaacttttattttaatactctcctatctcattctcatcacaatatttaacaaattattagtttaaaatactcaatatatacatatacaatatataaaatactctcctatatcacatttttcattcaccataaatatacacacatattcaatacaatagaaaatacatacatatatactctcctatatcacatttctcatcacaatatatacacacaatacatatttaataatatagaaaaatcctaaaaaaatttataaaatacaaaataaagcaatgtacattactaaaattagatttataccttaatagacgttgagatacaatgttttctccattaaaaatggtggccggaggtatagccaccacaaccactacctctaccttcagtttaccctaaaaaatgatgaaaaatatgatctttttaggtatataattttaggtatgaaaaatagaaggtttagaaacaaaaatgagataaaatgatgaaaaaaatggtgaaatgggggtgattttccgtggtggttggcggagaggttttggagtttctctggtttgggggtttctgagttggctgatcaaatgaggaagataaagggctgggctagggttataaacccttttggcgtcagttatttggaaataaccgacgccataagcggcgtaaaatttccgtctaaaaaatttcaaccctatgccgtcggttatttattattatgctgaaaaaagtgcctctaaaagcttattttgtagtagtg

SEQ ID NO: 350793 - DNA, 538 bp, Cannabis indica
taatgtcatcttgtaccatttttgattcgtgccttagtcgaattagtaatcttgatccaattaaaatgctcccttcaagtatttgatggattaatttttgtttcaatttaatattattattttgttttaactatgaaaggttaacttaaacttacccaatgtatggttggaccacgccagtattttgcaacacaagctggtgcgtttcttcatgatcaggtcggcttacaccagaaagaaaaaaaaccctactccctctacttatttcactattgacctgagtagggcaagagccaatggtagtaacctcttacaagtagtttgagcataatttaattgtctcttcaatgatgtatgattcaacaatacaaccccaaggcctacttctatttctcacataacccttcaagattttaatgtatcgttcaaatgggcacatccatctcaagtacacaggtctacacaacttcacctctctcacgaaatgcattattaggtgaatcattatgtcaaaaaaggaaggcgggaaaaattattc

SEQ ID NO: 350794 - DNA, 587 bp, Cannabis indica
ttgaatggggggaaaaattgggattttatagaaaattcgtgagctagtcgcgacttgcccaaaggctggtcgcgactagcttacattcaaaatcgtagggtttctggaaaatggcttagtcgcgactggggtcgcaacttggaaaataggtcgcgacttcctatgaccctagttgcgactactgggaatgaaatttttccttgtttttgtaaaaacccaggtcccgaccagggtcgggacaaccaaaaaaggtcgcgacccaggaacctagtggtcgcgaccactaagttcccggtcccaaaatttttttttcacgtttttcacgattcaactggaaaaatttaatgtcaggtactcaactaaaaatttaaaatactaaaaatactaaaacataaactaaaaacataatcaaaaagtctgaaaaattaaagaaaacacttgggttgcctcccaagagcgctgtctttatcgttatatagtcggacgctgagctgtgtctagagaggcgccagaataatggcagacttggcttggtcaaattgacctcgcaagtagagctttaaacgctgtccattaactttgaaagt

SEQ ID NO: 350795 - DNA, 576 bp, Cannabis indica
tgtaagtttatttttcttctccacgatccaatcttccacaacacttttgtagtctgatgtttgttttgatctaatctttctggaaacctgccccctttcttgtttttttgtatttgttgttgtagaaatagcaatctcttttatagtggccagttttgccacaatagaaacaacctgtagtgtcaccagaatttcttgatggtgacctactctttcccttgtttgagtctctgtgatgattagagctattactccttcctctgttttgataagttttcttgtgagatggccttcccctactcagattcatttcaccattcccagaattagtcttctcactcttcatctctagatccttagattttagggcagatatgacttcatcaagtgtgatagaagtccttccatacttaatagcaatctttacttctctgtatgattcaggcaatgaattcagaataattattgcctgattttcatcacttagtgcctcattctctcctgaatttgccaattcaatgtgcatccttagaaattcatctaagttttgatctagggtttttgtatgactcatct

SEQ ID NO: 350796 - DNA, 1580 bp, Cannabis indica
agtaaatcaaattatattgaaataggttttattacgcagaaaaacccaataaaactcacttggtcgactccttataatcttgataatcttcaaagtaatacaaataaaaaggggagctggctaaaaccataatcacggagccgaacctacatataattccttatattcttattgctcattattattattctattattcttcttcataaattcctcactttaaagactcaatgttattggttaaaagtgaggtcaacattttggtgttttgattgagagaaatcaaacacaatctatgcgaagctttgatccttgaatgatagttttgacaagaagatctcaatctactgaaccaattgatccaatggtgacgtatcccattgtccagattcccactgattagagagatctaatgattacatatactaatcaaaacacttggctgcctccacgagctccccaaccagcgagatctggaatgacaatcccacttgatgggtttactcttggcacacaagaaacaagaaatatcagcaaggtatatattgaagaaaatggtatatattggagaaaatggactgggcatcaataggtcagtagtgggagaacccctagtcaatttagtggagaacactaatttggagaccctaatagaagttgtacaataggtctagactcatactaatgtcctttaccatcattaggaagaaacacgctatgtgattaaccatgtctttgaacaacagagacgtcaattccaagagtgggtggatgctaaggccatgcgtttccaacccgaagaaattaaccactgatcaagggagaataccaacttgatatgatagttccaccaacagattgggggtagatattggagactccaccacataggaaagaacctactagagggaaggatccttacgtcccctctagagaacaacaacatggcctacaggagagtctgaccaactacatgcaaacagcctgacttgacagaccttccaattccatgcctcaaaattaaactattggtggcctagaagacgatcaagtcttattcggtcattatcttggaaggaatgatcatcaaaatttttgtacccaatttaaaagcaggaaaataatatgcttcaaggccaccgaaaaatagccttggcaggaacgatcaaggtcacatagtgggcagtcttttctgaacagtaatgacaacggagcttgtaacaccctaatctatagagacgccacgtgtgtggtttgataaactagtttactactaacagatttaattaattataaaatccgtgataatattaaaaactttattcaaataaaacactaaaaataggcatcataacgacactaaaattgtgttccggagatccctattgtaaaatttttacaaaagactatatacaatgagaagtcaaaatatgaaattaaaatacacagcaaatatccaaaataactcctggcaactcaggacatatgctggtagggtcaatatgtacattgctggagtagattgtcaccccatggctactctagcttttctttgcctttacctacaccacagaacacccg

SEQ ID NO: 350797 - DNA, 897 bp, Cannabis indica
tattggattggattggatccataccaataccaaaaaaaagtagtaaaaattttaatgttaatttttatatatacatatataaaatctaattactcatctaaactaaatgaaaatactaattagtttgattagatgttagatgtattagattttttggacaccccatccaatattcgatccgatccaattggatattcaaaaataacatccaatccgatccgatcataattggatatccgatatttgacggtcggttgtaattggatcggtcggttgtcattggattggataatttatgcacacccctacttttcacttcaatcctgcgtactaaacgggtcccaaaagaaaatatttcttttaacttacaatgtttctttttaaaaatcagtgttttataaatagaagcaccaaaagttagacctcgtggtcattacaaaggataaagtctggtatagaaaagagatcaaccataccggtaacattgttagcagacgcccacttagctacattatgggccgcaaaattacaaactctaagaataaaagaaaaattacagcctaacataaaagtaaagagatgtttacaatgatgcacatagttatcgattccccaaatggaacaagttcccttttgagtcttcataactatctcagagtcactctcaaccatcacaaatgggtgttgaaacgaaacgaccgtctccatagctaaaagacaggctgcagcttctctaataagaggatcagagaagttaagcatatttttagccacccacaaaattgactccgtgtggtccctagccaaagccacaacacacatggaattgcacccaactctcacatcacaattgattttgacccaatcatcaggtagaggggaccaaacaggagactc

SEQ ID NO: 350798 - DNA, 1144 bp, Cannabis indica
attgttgtatttaagaatttttttaaaaattttagtaagaaaactctaacatgtatgaaagttcaggaagcataatttggcacatgtcaaagttcaagggatatgatttggtagatatcaaaattcgaaaagcatgatttagtacgtgtacaacatcgaattagtaaaattaaataaaattagacaaaagtctttaaatctagcaatctaaatagttcaaggggaatttttaacggccaaaaaagttcaagaatatgattactcatgtcaaagtttaggagacaaaaatctcaattaacctaaattattcaaattgtagcaaatatatttctagtaataagaatttattttcataaatataatgtatttattagaaaagtgttttggtatattttttatttgttccgccattcattagagttttttaatttaatgtttttcatgattatgtacgttgtagttgatagtattgtgcttatcattcatataagaaaaaattgtaactcgtataataaaatatttgaactttatttttaatattataaattatttaaaattttctaaaaatttataaatgtgtataaataacacaacgtaggtgatcataaaataataataaaaaaaagggccaaaaagtataccacaacactatttttagtaggtgtagtataaattttggagttttttcatttttacacttcaaaacagtttgcctttttacggaattctatgtagaaacccttattgcaactagtgctgcaacataaattgcaacaaaaaatcgtatagaatcccctattgcaactagtgctgcaactattttagaaactcaaaccgtaaatttgaaaaaaaaaattattaaaaaaatagtatattagacaattccccataaatttttcctaatattgtttgttctcattgtcataaaatatgggaaacttacaaaaatactagaattttggttaacttttacaaaaatactgtcacacggaaattttttcaaaaatactgtgttttataaaacaccagtaaaacacaaagcagtataactcaaaacaatagtagaacactagtaaaacaccagtagaacaccagtgaaacttaacacagtatactgcagtatgaaacttataaaaaaatacag

SEQ ID NO: 350799 - DNA, 520 bp, Cannabis indica
cttactaacacacacacttccatatattgcaaagacacaacaaactaaacacaattacataatatggacactaattactctattatttaacttaaaattcaagtttaaagatattaaaataactctaaatcttagagttatcaacactccaaacttagaatcttgctcgtcctcgagcaattgcaacacaaaaataaaacacaacaacaaattttacacaaagactcaacacacaagacaaatgagagatttcataggaattcaagttggcctagcgaacattgatgctctcagaaaaaatggaattaaatggaataggaaaatgtgtttgtcgtagctttatatgctgcccctttaaagttttctcattggataacattaatacctccccaaagtcacctactcaacaatttatacaagtatgccccaccaaaactttgaactatcctacaactaccttaacttcttttttttttcattcatttcagctccataagttggattagtgcactcctctcca

SEQ ID NO: 350800 - DNA, 679 bp, Cannabis indica
tttatttaaacccatatggctgagtcccttagtgggcctattgggtttcaatttcgtcattttatttgaaacttatctttcttttctcaaatgccataatttaattctaactctataaatgtcaattctatctatttaataattataattaattatgaaataaaattgtcatttaacttatttattaattagaccttacaaagtctcttaattaataaacaaactctaaaatctgttttcttctgaaataaacccttgcttaaagaaaattcacaaacaagacatagtcttatatagaattctaattgattaattaaaatcaattaattgagattaaaaaacaatattatctcagttagtgcggggaccatgggcctatataaccaagctcccaataagtagattcgaaatttaccgagtaaattttctaacttattaattcctcctcactccactatagatttgaaattgtactcctgattacatagaacgctctacatactgagtatagatacgctatgaattatccattgtttcaatccagataatcaaagattctctatagatgatctacatcgagttgggacaaatttatagttctacccttcaatgtattttatccttaaaatacttagctacttgtaaatgatattttggtgaactaatataattactgaaa

SEQ ID NO: 350801 - DNA, 628 bp, Cannabis indica
gatcctgaactggtttgatatgtacattggctgcgaagactcgttcgactcatggtttattaagtgctaattattcactgattagtgaattgtttattgattatttgaattgtctgcttatttgaaatgtgtaaattgttagaaaagcatgataagttttgatatgatataaagttgctgagtatatttatgcgtgtgcggtaatgcttattagcattagttttagttataaagattctaactttgagcaaggaatggttgcgagtgtactagaaggtgtacatgaagcgatctagtaagaataattgcgagcctgctaagctcggggtaggtggtgtgggtatgaatttttccactaccataagaccgagagtaaatgcatgctatgaagtaagagattacttgagtaataaggtagtagaacctgtgcggttaattctgggcagcatagtgatggagaatgacactaggctgaaccaattggcaaagttttgataaaatgtagcggctactaaggccgctaggaaggctttaaggtggaacgggtatattgttcagaatttagatattatgactaaataactaggagttttctagttttatgctcaagtgattgagctaaccctta

SEQ ID NO: 350802 - DNA, 575 bp, Cannabis indica
gcctgcacaaagaaaaaacttcagcattcgagctaagtacagaagattaaagggaagtatcaagaaagacttaccctacttaactccttcaagactttgcccactagcaatttcaaagaagagtcattgtcagcaccagccagttgcccactgacctcaggaaccagccgattcaagtaatgggcctgcatctccttgcccttcttagcctctggaagcatcggcaaaggtggagtatgtgcccgcacccgttcaggttcactcctgactagctcagacccaaccttcggtggtccaaacctgtccaagcttcctccccgagactccttcgacttagcagcttttggggtagaggggttagcagctgttagctcctcagaaagatcaatgacctcctcagcagacttcttttctttagaagaggacccgtcaccgcctttagacttcttggccagaggagaggtgctagagcttccgcccattctcttcttcagagtgtcaagcatctgccgagacatgtccgtacagaacaaaaaataacatggttagaaaaaacagacatcagaaacataagg

SEQ ID NO: 350803 - DNA, 1049 bp, Cannabis indica
ttcatctcggcccaataaaaacgggatactcttagttgtgtggattctaaataaaaatcgcatttacttagcataatttgtaatcgaatcccatgatttgagggaataattgctgtaaaaattacagtcaacttttgtaatttactacccactatgttaatataaatagtggcagacaatatcaaaaaggggacaaaaaaactcatacgggagaggccctgaaaacaatcagaaatctgaataagattgactcgtggactatgcagaattttaactagaaaactacgtaaaaaaccctgtgttcatatttttatttctatagcttttattttttctgtgtgaaatcactaccgtgaggttcaaatttagttaacgaaaatctgcgttaacaatttggtgctttcatttagagcctctgtgaaaaagcttagaaaaagcctcctaacataaaagtaatggatgacgtcaaagataataatcctcaagaaggaatcagtcatcacgatggaaaagaaccattgagtcctcaaggatctattgagtcctcaaatgaacagactgcaagccccaggaaaacctggaattagggtccctggcttgatgaaccttgggtaaacaacaacctgtcacttcttaaccaggttgatgaggatggcgcctacgacccaaccaggtacataccaatcatggaattagaaaatttccatcttagacgtcgattggaggaagaaaatcagcataatgacgagttagagcgtgaaatagccgcagtaagggcaacgcatgagaatggtacccaaaatcaacctgaccttgggagaagagattcacgaggcaaacctcacagctcgcacaccaagggccaggagacaacccagagatatacttagaactgtcaggagatgcaacctgaaaaaactgaggaaaatttggggacacggcctaggatatgtggaacatcggacgaaaattgccaaccctctcttcaggttcatcagaaacaaacttgtgcaaacccttatagggagaataaggtgaatcaaacctta

SEQ ID NO: 350804 - DNA, 1179 bp, Cannabis indica
gagaccctttcagaaagggttgggtggcggcggctgatcatacgaataaaaccgaggaggtggcaccaagtaattcgggtcatcaatcccgatgttcattctgttgatgagagagttgagttggtgaacttgtccctcatcatgtatactcctctccaccatatagttttgcatgtggttgttctgctgaattatataactcagctgtgcatgagtatactgcatcgccggatcgattggcccaagaagttgtgggggctcttcctcctcttcttcgacactaggctctctttgccgccttcggccttgcggtgcatcaggtggaggttgtccataaggatgtggctcttttagcctgttgacaaaggtgatgtccatctttcgtagtggcaccagagtgttatgatactccagttgtggcacatcatacgccccattgagttcagttattacacccgccaaaccaagaccaccacccgtggctccttgaacaatttgctcaatgctgcttctgatgacttgtccaatattaatgttgcaccccttcataatggcgtacacatatttgagacgatccatttggaaatctgaaaaatgtttactcggcaccaaccgagcactcacaaagtacagccagatctttgccactgggtttatctcacacatatgtagaatgtttggcaacccatcttggccatcattgtcgtggaacctcaaccccggaaatcccactgttttagccacatccaccaaatcaaactgctcttcctcctcaataattcggaggcgttgttcctcgctagaataatccgggacagagagcataacattgaatgcatcagcagtggcgggaaccttctttcctcgcaccttcaccgccccatttctgcgctcgggccaattggcgagaaattcacatgccatagtcacattagcccggccccgagcatccacaaaactaccccatttcaacctttcaatttgagctcgaattgcttcaaacctaggttgacgcctcaaggggttctcagggaactcaataccctgatcttcaatgtagggcctaattttgagccgcatgaagcgattttgagcctcctcacttacaaattgggttctatcgaaacccgtagctggcgggtttgacgacgaaccttcttcaacatgccttgttctttt

SEQ ID NO: 350805 - DNA, 500 bp, Cannabis indica
gtggagcctaatctcccactcacttggggcaacaccctacgttttcggttataacataataacttaagatataaaatatttatgtcttcgattattatgtaataactgaagaggtaggtctatctttttttttaaattttgtattattatttaattctagatattatttttatttttaattattatcacattaatttttgttagtgattatatattattttttgttgaaataattataaattaattataataataaagacttaaattgaaataaaaatacaatttaattatattaacaaagctaacaaaattttaaaggtaacaaagttaaagttatataatgataagtacttaaaagttagagtttatatatctattctatataaagtgtgcctatataactgaattcttgcatttatgagaaattcatggataacatttttttaaaataattttctattaaaaaataatatatttttttattaagatgtattttaata

SEQ ID NO: 350806 - DNA, 996 bp, Cannabis indica
tttttaaattattataaattttaatcataagaaataactcaaatttaatcaaattaatataataaaagacaatataacttaaataaaataaaaggaaacatccatgaatatattttaattatgtcctattaaacttgcagcaatcagatctctaatattatccatttaacttaaatttgaagctctagttgtctcatcttcatcttcaatattagttagatcacttgcacaacaatttggattatctcttattttctcaaaatgtcaatcacgttttgcatgccttcgaatgtaattatgcaaggtcattgatgcaatcactatttttacttgcttctggtatggataactaggcatatctcttaatatttttcatcttttcttccatactccaaaagttctttcaataacacttcgaagagaagaatgtgcctggttgaatacctctttataaccagtaggtttgctacctcgttgaaattgtggaagatggtatctttggcctttatatggtcctaaaaaacctgtaatttgtgggtatcccgcatccactaaataatattttcctgtcaaataaaatataaaaacataattaaaaaattataaagactttaataatttacaaatgtgtttagatggcaaccttggggtggttttggaaaatttgaagttgaatcacgtaaagctgaatagaaaattcttgtatcatgagcagaaccttcccacccagcatatgcatatataaattgcatatcaaaattacatattgccataacattttgagttggtaccccttttctaccaacaaatggtacttgatcttcaggtggaattacgacatttacatgtacaccgtctattgcaccaatacagttctagaaaaagaataccagattataaaattatactctagcttgagaaaaaaattataaaaaaatatataattttaaagtatgacttaccttaaaatgaggcatatatctagaatctttcaat

SEQ ID NO: 350807 - DNA, 629 bp, Cannabis indica
taattggttaattaaaaccaattaactgagtctacaagctaatattatcttaactagtgctgggaccatgggcctatataatcaagcttccaataagtagttctagaatttaccgagtaaattctatatcttattaatttctccttactccactataaattcacaattgcactcttaattatataaaacattctacatgttccaaatatagatacactattaattaactattatttcaatcaaaataatcaatgatcctctatagatgatccacatcgagtaaggacaaattttccgttctacccttcaatgtattttatccttaaaatacttagctctgtgtaaatgatattttagtaaactaacataattacagaaatgagtactccaccatttgatctcgtttagctaagctcgaaggaaatcaccgtttcacttctatgcatttatagaaactatgatttcatatctatgattagcgctcccactcaattgtactaccatgatcccaagatgtaagtatgaagatccaatagggcactcttaacgaacaagtcaaagaacacaataatacattgaaccagacctaaaccatctcagaattgagatcattgatcttagatcaacta

SEQ ID NO: 350808 - DNA, 1022 bp, Cannabis indica
ttatttatttattgtccgattgtgtccgatatatggtttgatgatggcccgatatatgtgttcgattgtgcttttttagtttattatttgttttttttccgatggtgtccgatatacggtctgattgtgcccgatatatgtgtgatattgtgtatatactgttttttggttttgtttattttattgggtccgatgctaggacgatagtggtccgatgtgtgatgacgaatgctttttgtttgtctgatatgggtccaattaaggtccaatgttgtgttcgattctttaattgctaaccttcaatttcttggtttttttttttttttgtcagagacctccacagctaataattctactcttggagcattacacaggtcgtgtcacttggtgtggcagaagttattactactcaaagattaaggccgaatttgaggaattcagattatgggatagggtgagggaatcccctttcaaaatgttcttcgagagagatccattacaattttgaggagcattgatccatcaattaatgttgcacaaaatcaaatctgacaagccagacgaggtacaattttacttggtgaagaagagatgcagattcggtagggtggagtttggtttggtgactgagtgttgtgtaccaaaagtggtacgttttacatttatcaactcgcaagcgcacgaatctttattgtagtatggagattgtgaagaacgaggtcgaacccatggaaattgtgtgagatcgaagaaaatacttatttaagctaagctcttacaactctaacctagtcccaaaaatagtgaggtttttggtaataaaataaaatattcaaacggtaaaaatgacagtaacagatattttcagtgatatttggggatattgttaaatattcagaatccacttaagtgtatataaaaatatttatgtttatattgatttccataatttaaccagtaatcaaactaattattttctaataaaaaataaattttccttcgctttaaaattataacttcta

SEQ ID NO: 350809 - DNA, 953 bp, Cannabis indica
gacctcgccctccaagtattcgagccgctcagagagttgtcgattggaagcaaaagaagcaaaaaaagcctggagaattacaaatagatgaatatgaaagaggtataaaaagaataatataattataataacaaggccaacttaccatgaagttatagtccaagctccttgaaagcatctcttttggactcccaaaattgagaaaatctgaatcagggggaacaagagtttgaagtttgcgccagcaggcaactccatatgcttggacaaattcagacccagcttctcttgttgcgaacgacaaggtctcaatggcctttctcgaagaaacaatagcgtgggttgcctcaggacgaggagcattagcatcagaaacgaccagaggaggaacttgttcttggatctctttgtcagaaacctcgagatcgatgggctcggccagtgacttcttcttgtgggcaatggttttcctttgcctcttgagaggaaccacttcggtagctgtagggaccctagggttggttaccctcttcttccccttccggtccatgatatcttcataactcatgtctgcaaaacaagccaaagtgttacaattattaaaaaggccgatgaaagagggaggaatacaattttccacctaagggatttaccaaagtcactagaaggcgagctatcactagacgaaggggtagaaggaccataatatccactaaaatccctacaacctataatcttgaatatatcaaaaggctcaattggttctaaatcccagcttgcatctatatgacctaccctatcttccatagtatcgtattgctcagttataccataatatgtcttatgacagttaacctggacgtggaatctaggataccagctgtcaaacttatgagcaatgcggtccatgagaagggaattccaattataaaaattaaggcaggagtcttgga

SEQ ID NO: 350810 - DNA, 1063 bp, Cannabis indica
tctaatttggttccccttcccatcccaattccattactttattacttcaacttgtttaattacgtgtgtgaccatcccatccaggttgatgcgcgcacatgtccatcgttttggtttattgggaaattgtatatatttatatattaataattaatcctaaaaagaataatatatataatatgattatcaaaatttagttattaaaacaatactaaaagaaaagagattccaaaagaagcaaaatgaaccatgcaataattcaattggcgaacattaatttataaatacatgatatgtatagttttggaagaaatatcatcataaccagaatcgattccccccattagctagattgatcaatgatcaatgcaatgtgtgagaatagaatatcattataaacagcaaaagaagtataaaaaacataacaatctaaactaaaaatatagttaacaatctaaatataacgtagtcaatttcatagtaaacatgttcctgtggatttatattgtatattgtgcaattgtggggaagagtcaatattacatgttttggttcaatgctcctttgctcattcgtgttggctcagatctgcgttaggtattggttattctgcagaaaccaatttttttgattggtttatggaagtgttggcagtaggcaatatggggttggttaaagaagttgtcatagttggttggacaatttagaaggctcaaaatgatatgttttggaatggtaaaaattgtagtgctgctgaggttatttggctggctcgaaccactcttcgacaatggcagtgtgctcagtctaagcggctggactcggtctctctagcttccaatcgcgctgacacaagagaccactggtccaaaccggatgctggacagttaaaaattaatgtggatggggcggtttttgaagacacaaatgagattggtactgggtttgtagcacgcggctgtgatggtcgaatagttgaggcgttttcaactatttcttctgtcagttgccaacccgagattgcagaaattctaagtatatcaaagaggcacttagttagata

SEQ ID NO: 350811 - DNA, 578 bp, Cannabis indica
gagttagcaatcgtcaatttgctaaaactaattagtagattttgaaagtttgtagtttaaacgaaacaaaaaagaagaatcaaatgaacagaataatccctcacacaaatatttaccagcctgaataggtatgtatacttgaacaaaacttttgattttctccaagaagcgaagtctccaaaatcagaatatcgaagaatgggtatatgggtcagttgttatcgatgagttattgtaacacaaaataggccaatttgagagtgagcttaagaatttgagacttcgttcccagaaggaaccacaatatagtttcgcctaaaaaggctctgcttttctcgattgttttagaaaagttttgtgcgtagtaagaggttgtaacaatggtggcttttaaccctcgtgaagcgaagagcttggccatgtccatggttggcattgtgtggccttgagcatggtgcttcttctcaccgtcggatacacgtggttttgctctctttccatcatcatcctcgtcgctgtcgatatctttatattttccttttttttaaattgtttgataaattaggtcgcccattctt

SEQ ID NO: 350812 - DNA, 529 bp, Cannabis indica
aatataaatagaacattatgtatgaactgaatcttaatgctctttttccattttatttaaagaaaatatttttataattagtcttttgtttttgaaattacaaaattaaaaaatattttttgaaatcatgttttataatattatttttactttttaattttttaattaagaataaaaattttcaaaaaaatcactttctaatttttttcaaacaatttttttcttaattaatatttatttagactctgactccaacctaaattttagaaccaagtccagaccttggcccctaccccggactcggactcaactcccaatcccaatttcgaacccgaactcaacttaaataaaatcaataaatacaaaaataaaatttacttaacactttgtttttaaaattaaaaaacaaaaataaacaaaagtaattataggaggtatttttgtttttcaagattaaaattttaaaaaacaaaaattttaactttatttttataattaaaaaattcaaaataaaagtattaccaaatgc

SEQ ID NO: 350813 - DNA, 519 bp, Cannabis indica
ttccgtcccaacacagctaagaatgcacataaatcggatccaaaacataggctaaaaatagcctaacactaagcggagcattaatgaagacacagagcatatcttgatgaacgaaaatattccatcatggatgatcctgattgcacaatacttagagcaaggcattcttccaattgatcatagcaaagctaagagattgatgagaaaagtagctcgcttcatcatcatggacaaagtaatgtataaaagaagcttttcaatgcctcttctaaggtgtgtcatgaaagaagaagccaaactcctcatggtcgaggtacatgagggatttttgggaattcatgctaaggggtgaataatggtgaaaaatatacatttagcttaaagtttaaaataaattaaatataaattaatatttaagttcaaactcacttgagttttctgatctataatagctccatgattctcagcttcctagaagtaacttgccatttggagcaggtgatcacgcacgttttgatg

SEQ ID NO: 350814 - DNA, 509 bp, Cannabis indica
atgaggaagattgggaaaaagcatgatttcatttttcatgagaggtgtgggggcctggagttgaatcatttaagcttcactaataatgttctcttgttctgcaatggagatttcaagagcatctattatatgttacaaggattaaagcttttctctcatacatcaggcttgttacctaatccttctaaattggctgtatattgtagtaatatgtctgatgtagatgtgcaaagaatccttgatgtatttggttttcaaaaacaagaatttccattcaagtacttgggagttcctatctgtccaaagagaatctcctcagctgactgcaaggtgttggtggaaaaaatgatggcttgaatcaaaacttggagtacaagaaatctttcttttgctgggcgtattgtgcttattaactcagtactcatggctatacactcttattggtgccaagtgatgttgctgccaaaaaaaaattgtaagtgaaagagaaggcatttgtcgtagttttt

SEQ ID NO: 350815 - DNA, 938 bp, Cannabis indica
aagtcatttatgtttacatgtgttattgatgtttatggtttaatatacaatttctgttaaatttagaacatatagttattcacaattacagtgatgtcagcacagtgaaaggtaattgtgattatatgcttcaaaagtttatgcctcatgattcatcagtgcagttgatttacactgatgtgatagtcagcaataagtgttatgttctttctaggacattggcaaagtatgctagtataggatgtatggagtatacattggactggggccgatattgaacttggtaaggatattataaacctatcgttgtatttttcaagttaatatcattggttgatcttagatcaaaagatcttaatcctgacatggttaggtttgatcttaagagtgttatttatattcttagaactgttcgttaaagcctaccaattgttctgggtgacacatacatcttaggaacatgatagtacaattgagtgggagcgctaatcatagatatggaatctatagcttctatgtggacatagaagtgaaatgatgatttccttcaagcttggcttaatagagataaatagaagagctcttattccaataattatataagtttactgaaatatcatttatagaaagctaagtcttttaaagataaaatacattgaggggtaaaacggtaaatttgtccctacttgatgtaaatcatctatagaggatctttgattatttcaattagaacgatggataatttataccgtatctatatcgtggaacatatagagcgttctatataattaagagtgcaattccaaatctttagtggcactaggaggaattaataagtttaagaatttacttagtaaattctagacctgcttattagaaacttgattatataggcacatgatccccacactagttgagataatactgcttgtaagact

SEQ ID NO: 350816 - DNA, 996 bp, Cannabis indica
ctacatatctatatgtaaactaaactgatgctatgattaaattttatatataataagtttcttcttcacatcattcttattttactattttctccttttattcagatgcttagtcacggtctatattatattttacgaattattatttatttttgtttgtttcactttctcaaatcagaaagagaaagcctccacactaaatgcaagtacctcatcaacacctgttatcattaaatatttattcattaggtattagttttttatttacaaaatgattattatttaattcgcagttattctttttttttttttttttttttttttttttttctaccagcttaattatctatgcttcactatttaagggttagttttatttctaactttactaatttcaaataaattagatattgtaaaaaaaattatatgatataaattatctaagaaaaattatatgatatcgatttttgttttgtttaagtcaaattttttattttacttttattttatttatcttctgaagtaaattttcttacgcacaatatcataggcttgatttgatagttaattattaattatttttatttaagtaaaaattacatgaaatatgcgatttcataaaaaaattacaaaaatatgatatttataggtttgtcactattttatggtattttttcacatttaaaatttttatgatatttgatatgccatatttttgtaaaccttttatccaaacccatatttcatgtttttgtttcaagcttaattagttttatttttttttaatttattttacatttatattttagggtttctttctatttggaaaatttatactaaatactacatttttttttcaaacattacatttataatttggcaaagaaatgtttacttacttttcttaattttttttttctttttcaatgttttttacttattaaagcttgaaaaggtttttttttaatcttttttatatatattttagtcaatttt

SEQ ID NO: 350817 - DNA, 541 bp, Cannabis indica
aaataacataattctttttatgtcgttgataggctattattatttagttgatgctgggtacaccaatggtcaaggttttcttgcaccttttagagggacacgatatcatctttatgattggaatgatggataccttccaaacacaacagaagagttctttaatatgaagcactcaagtgctaggaatgtaattgagcgttgttttgtattattaaaaatgcgatgtgctattctcagaagtccatccttttatgacacgaaaacacaacgacgtatgatttttgtttgttgtatgctgcataattttattcgaagagaaataaacattgatccagtggagaatgagatgaacagtgtattgggaaatcatcccataacagataataattatattaataatatcgagtcttcatatttatggactatttggagacaaaatttggcagaaaaaatgcataatacgtggctagcaaatagatgattagaatactagtatttatattttaacaattctaataatgatttgatgtatgaaagacat

SEQ ID NO: 350818 - DNA, 500 bp, Cannabis indica
ctcatcggtcctgaagctagtgcactcttgatctgctacgtgcatttttatctggttgtaaccggcgtacgcatccatgaaggacattagtttgaatccagaggtggcgtctatcatctggtcgatcctgggcagagggaaacaatccttggggcaagctttgtttagatcagtgaagtctatacaaactcaccaggtcccatcaggcttcggcaccaggaccggattggctatccattctgggtagtagacatctcaaatcatgccgctcattaacaatttgtccacctctttctctaaggcttcggccttcactcagtcgaggggacgacatttttgctggaccggcggcatatccgggttgacattgaggacatgggtgataacgtggggacttatgccagtcatgtcttcttggcaccatgcaaaaacgtcaatggcacccttcagtgtctttattatcttttccttttcctccgggtctaggctctttcctagcc

SEQ ID NO: 350819 - DNA, 687 bp, Cannabis indica
gaaactttagttcaaaatactgtggtaatatgggcatcccctgctaataaaattcttttacaaccaatcatagaaccgttaatacaagagtaggttatacatccaatcatagaaaaaggggtgatcctgcttccaggaagccaagacaacacggttgatatgtacattgctgggagacctctgactcgtggccaaacagaaccgctaatcttcctacctgcatcatgaagcacccgtgagtcatagtgactcagcaagaaaagctattagacaaaagataattatggaaagtgatagtagatttcatttcaacagattattcataccagtagattgcactctttcaacgtatatttacaattcaacgtctatacgagcaaactcattacaaaattaagggtatttatagctatgcataatcaacaatctcagcatttcataaaacaccttaatcatgcattatcataaacattcattttcaatgcttcataaagcaccctagttcacacattagcatatccacacaatttcagtgcttcataaagcactccaatcatacatcattacaaacctgttttcttacatccctaagccactgagactgtaaggaaaatgaccaatttcataagctatataacatttattcaatcataccttaacaaaaagtattcaattacaactcatcac

SEQ ID NO: 350820 - DNA, 927 bp, Cannabis indica
cagctgctagcatctaatcaagcatttcatttatatatatacataatattttggatgtttcactatcaaattttgaaaaaatttctttgctctattattgttatatttttatgtttattttcatatatatactaagtaataattaggaattataaaacatttaattatactttcccacaataaataaatagtcttagctactatatcgtgtgaaagtgaaacgatgaaagattgattaattgctagattatagactaatttttcctcttaaatgaaacattacattaagtagtcatggcacatttagcacccaagtttatccaaaaaaaaaagtaattaatgtaatatttactattaagcaagtgaatcaagggcatgtttacgtttactatctttatccttcagatcgattcaatgaaaaagattaagttgagaattgatcttaaggttttattttgtcggtggattattccagtaagttcagcatggagaaagtggaatttccaatgactaggccaatttaaaagctaaatttatttcagataaagtggtgtttaacttttattaatcagttttctgatttttaaattagaaaactaaaaatatttttcaaaaatatgttttataaaaatattttctcttttttattttttaattgagaataaaattttaaaagaaaaaaaaaatcactttcaataactttttaaacagtttttcttaatcaatattttgcggattccaaccaaatctgacatctgacccgaacccgaattctatcctggacttacacccgacttaaataaaatcaaaaaataaaaataaactttcggaacacacttttattttttaaaaaaaaaaaattaaaaaacaaaagtagttaaagaatacatttttatttttcaaaaataaaatttttaaaaacaaaaa

SEQ ID NO: 350821 - DNA, 631 bp, Cannabis indica
tttctaatggctaactctatggaaagttttttgattcctagacatagattttaattatcaaaggaataaattcaactattccagagaagataaaagtcatgaaaacaattccttaaggattaacagtgagggctctcaggtatgctttgcaatgcattaggccagacacctactgttgagtgggagttttgagtaagtatcaatttaatctaggaaaggaacattggaaaacaaacaaatgaatcttaagatgaaaaagaggaactatatgttagtcgactaaaatcagttttgtagactacaccaaatcagttttctagacttgcgttaatgctagaaagtctactgatgagatggtgattactctaggggtgaagtagtgattttggaaaagtgtaaaatactatctgaattctccaactctaccagtgagactaaatgttaaagttgcaggaaagatacttattcaacctatagaaaggtctatatagtttttagtgttgtactaataatgaattaactactagtgttacttcctgactaacacatatgtagttgccaaaaaataaagaatccagtatccctagatgagtagacatatagagaggaattttacaatatcaaggattct

SEQ ID NO: 350822 - DNA, 544 bp, Cannabis indica
tatataaataaacttaagttaatacattaacttatatatatataagtaatattatattaatatatttataataataatataatatcaataaaaatttcattattaatagttatcttattatttcttagccactaagaaatctcaatttctaaggtatttggccaacttcgagtaccttaaaataccccgatatttctaaaatcaacttatcctaataatcccatcaatagttttaactaaaactgttgtgatatttttttgcctccaatcgagtctctagggtcgccgaacatgaaaatatttttatttcacaaataactcatattatatccacatattttaaataaatctccgtaattaacaaattacgtttttatatccacttattgtcttcagggtccccgaacctgaaaaatatttttattccacatatagctcatattacattcacacatgctatataaatttccataattaacaaattacgtttatttactcacttatagcaaaatttaaatttcatactgaaatagattagtaagat

SEQ ID NO: 350823 - DNA, 568 bp, Cannabis indica
agaaattaaggggaggtgctgccgaatttttttgagaaaattttttttggtggtaattttgaagtttgtcatgggttccaagcgtactagaactgggcaatcgggtgcttcatcgtcaaaatcgccaacaccggcgtcaaagtccacttttgaaaaagatagatttgtcagtttgaaagcacaagaaagatactttgaattgcaaaagagagctttcattatggatcgaggtatcgaatatgatgacaatcccatcccgaataaccaattattcaagaccatgaggcaacaaattcagaaccgccactgggagaagtttgtgcatgttccagaaagaatcaatcaaactctggctcttgaatttctagccaataggcctgaggaacaaaacggaagggtaagggtctgcaaaacaaatgtgcatgtaaacattgacaccatccataaaatgtttggcatacgactagtgaatgaagaacactacaaaatgtttatggaagagaagtttgaccctgtggacttggctgaaacagttggtttccggggttaagattgcatgaagtggatg

SEQ ID NO: 350824 - DNA, 575 bp, Cannabis indica
tatttagaaaatacagggtctattttgtcatttaacaaaacacagggtccaattagtaagttttgtaaaatagagggtctaaaatggtatttacccaataacaaaataaggataaacaaatactatcagataatgtcactctcttttatgtaaaaaaaaaaaagggaaaagaaatcaaatgcatatgtgtcggcaaacacgaaatggtggcaagtttttcatatataattatttaaactgttcaaattcaagatatttattggttatccatcaggtttcttttctgttcatgtatgaaaatcagatcaattaaactctaaataagaaaagtatagatatatgtacgagaagtattaaaaagtattatatcagatcttatatcactgactaactaatcttcgctacttataaaatatactggattaatagcaatactcatatatctatatatatttgggaaaatattattttattctttatattttgcaaaaattattaattaaatattctattttgttaaatgacaaaatagactctgtattttctaaaatcgtaagaataggaccctgagctta

SEQ ID NO: 350825 - DNA, 484 bp, Cannabis indica
gatattgggggagctggacagtatcccaacagagggagctttttgctggctaggcttttgctcaacttctgcccgctgaatggcttcttcaagcataatgaaaccttctacgcaatcaaggaagtaactcatagaatctactggtccgttcttcctaatgtccttctaaagttctccaagaacttcaatggcccccagtatcgcggacaactttccgtcttcagtcacccgtgcaaccttagttgcctccgtcataaatctactgatgtaggctcggagaggttctcttggcctttgcttcacttcgactagatctcctaagtgcaacggtagttagcgagaagaggagaattgtgcatggatttctgaggagaaagccttccatgagttgaactttccgggtgccaacttgaaataccattgttgggcggcctctgagagggtggcaggaaaaactctgcaacttactgttggaaatatttta

SEQ ID NO: 350826 - DNA, 635 bp, Cannabis indica
ctttgaaaagtagcaggggcgttgcacaagccgaatgacattcttctgaaagcaaaggtaccgtagggacatgtgaaagtagtcttctcctgatcttcaggtgctatagctatctggtggtagccaaaatatccatcaagaaagcagtaatattcttgccccgccaatctgtctagcatttgatcaatgaagggcaaagagaagtgatcctttcgtgttgctttgttgagtttcctgtaatcgatgcagatcctccaaccagtgactgttcttgtaggaatcaattcattcttttcattcttgatcacagtcattccacctttctttggaaccacttgcaccgggctaacccacttactatctgaaataggataagcaactccaccatccaaccacttaactacttctttcctgacaacttctttcacgggtggattgagtcttcgttgagcgccaattgtcggtttggcattgtcttccatgagaattcgatgcatcactgttgaaggactgattcctttgacatcacctagtgtccaagcgatggccttattatgagctcggagtaccctcagaagtctatcagtttccacatcagagagagaagctgaaacaataactggcagctttttatc

SEQ ID NO: 350827 - DNA, 607 bp, Cannabis indica
ttttcatatgtaatgtgtagataatgacaaaatagatttacaatagtcaaagaatttattagagtttatgaatataggagttggaatgaaaaacctgaacagagctttgaacacgatcgtaagtaccctttgattgatggctacataattcttcccggccgacacagaagactaagccgcacacgatcaatactccgactttgctttcaccgtcgaccgtggaaaacatactacctatccatgacgcgcgttaaccgcctctttctcttctatcttcacaaatctcaaacttcttctctctctttctctcaatcgcaaggggcacgagaactgggacgggatgaattcgggatagaattccaaagagaaatattcttaaccctctttctcttctatcttcacaaatctcaaacttcttatacatgtaattttattttatttgttaattttattgtctttttacatatttgaaaaataataaattaatttcttatttcaaaactgtaaaaaaaggtaaatactattttaaattctgtgttttgtaaattgtttacctattctgtatctgtttgtattaggaattgtctttaaattggttatattaaaa

SEQ ID NO: 350828 - DNA, 664 bp, Cannabis indica
aacgactatatttttatcaaatgaattatcatttatttaaactatttcatttcaacaaccacattttgactgttaatggcttattttaacggctatattataacgactatattttaacagttctattttaatggctatattttaacggctatattttaatgattatattttaacggctatattttaatgattatattttaacggttaaattaacgattatattttaccggctatattataacgactatattttaacagctatattttaacggctatattttaacggttatattttaacggctatattataatagctatattttaacggctctattttaatggctatattttaacacatcaaagtactcaccaagtttacatataccaagttctattcttcctttcacttacttctccattttatacattactttacactctcattcatctaacgttctcaattataatctactataaattaggcaatggattcaacaagttcttcagatccttttgagaatatgagtgttactgataacataattttggaatgtaatgataattccgatgaattttacctaaatgaatacttagctgcgggtagctcaagaaggagaggaagaaaaagagcccatattgatagaggtcgtgtagaaggacacga

SEQ ID NO: 350829 - DNA, 1145 bp, Cannabis indica
aaagagttttatttagggcataaaacccaacagactcctcgagtgatttcctttgagctgagatattgtgaaatcatgctgacattagaacgtcaacatttactctaatccttggttgttgtcttagcattgaatctcttatcacattgtgtgattatgtgaatattgatgtagacttgaagttctttagcattctctcgactatgttttagagaaggtggtcttgttcatctctttggttttatagtagaggaggcctttgttaactccttagctttgcaacggaggaggcattcaacatccccttggctttgcagcggaggaggccttcatcatctcatcagctttacagcaaaggaggtcttcatcatctccttagctttacagcaaatgaggtcttcgtcatctcctcagcttcacaacagaggaggtcttcatcatctcctcaacttcacagtagaggaggtcttcttaacgaatgtcaatgatgtattgtagcagtcgctggttgttctatggtaaattgagtaagtgaccaactcccgaattaatatactcaagataggggtgatgtcttccccgacttgtgtgcaccttagagtgattacgggtgcggtctctattttttccttggtctttaaccttagaattcttcatcgtctgttctgttgtattcacaacggaagaggcctttttcgtccccttagatgtcatgacagtgaaggaggtcttccacttcccctcggctgttatcacagcaaagatcttcttggaaaatatcaatgatgtgttgtaacatttgcatcctactctttggttaccaaggagatagtcgataccaactgctgtcaagaacttgacaaacaagtgatagatgagtgagatggcttggaggtcaatgggtgttgaccttataaggagactctgtgttgatcactatgaaagtagttatagtgatgttttccacgagatagtttcgactgtgagtggctttcttattttaccacaaggagcgatgtcgactcacatgcaatcatacatgagatgcttgcgtggctccggatatcttagggagtggcccactcttttcatggtctgttttgattagaatatttcgtgatgcttgattattaaccatcacattt

SEQ ID NO: 350830 - DNA, 1334 bp, Cannabis indica
ggttgtcgatctgccattagcctacaacatactgccgggtcgaccatcattaattggactaggggcagttagttcaattaagcacttatctctgaagtttcagacaccgacaggtgtgggagtgtgccccactatatcccaccaaatgtaggtatgatctagtaacataaaagtggcacaactcactttctctgttcccgtcacccccatattatctagaatgcggttgatattattcatcctgttcagctttaattatatcagtaccctccgaaaacattagaggttgcagcttaacaaagcgctcaaatactgaatctctgtgcgacaacatgaaccccaagttagccaccattggcatagaagctggtggtaacacttgttctacaagagctaccgatgtcgattgcctcaaccaccataattcatcttcttgacaaagtataatactccgcatttcgtgaaacatttgttaccattcagtaggcgattagcatgcaaacccccgcattatcccccatattcggtagaggcacaggcggtgccagtggattggtttggtctataccaggctctacttgctcgccctgtggtctagatgattatgtatggtccattttcaccaataaccccgtaatcaacaaccctggcaagtcaggcacattaccatacttattgcatttaaatcctagctcgactattccatttcatataaataaagatttatgaattaatattctaagcatggaatcatatcacataaatagactaagtgcttacatactgcctaaaatggaaagcggtaaataaatattacataagcagttaagcgtttactctcaacacttactgcgccacgagttgagcttgtctctaacaatgattgtacatgttcggttggtctacaggaagtttaaaaatcttggcactctgataccaaactgtaatgccctgacaataaagcacgctacgctaaccgattatgaaaccataatcccctaagtcaggattactagaaggataagtgtaggaaatttaaacttaatttgaaatagatgaaaataaaacttgtaataattttaaactttacaaataaccaaaagatacatgttttggcatccttttaatattttcacaaaatattacaagtctatttcacaagccgacctaagcagaaaaattagagttacacaatacatcacttgtagaccccaacccgcttggtctagtgtggctcgaacatgacacacatcaccaaactctcgctctcatggctgatcaccgactagtttaccctttcctacacagtagagcacccgtgagccaagcccagc

SEQ ID NO: 350831 - DNA, 757 bp, Cannabis indica
taaaagcaacaaaacaaccctacacgcacagaatcaaaatccaccattaaagctccaagctttgagttcaaaacacaaactttgtttaaatctaataaatatgcatcaaaacttgatttaatatactcaaacaagcataagaaacatccagaaatcaaacttaagcacacacaaagatcacagcagcaaaaataccatttcaccattaaaaatcaaagttttgggtttaaaagcttcacacatgcataaaaccaacaactaacaacataattagttcaaatccattcaattagacataaataagcttctgaatgcaacaacaaaaaactacagcaatcacaacaccaaaaccaccaagcatgcaaccattttctttcattaacttcaagaaactaaaagagaagcttgaacaaaggttacctccacttgaattactctaagaattgctgaaaaatgtttgaatttgcaagaaaattcccagccctagcagccccaatccaaaccgaaagagagagagagagcttgagggaagaacttccttattttccaaattttccaattttttgaataagtgatgaaaatgcataaactatgctttatttcagccaaataacattacataaatcactttatcactcaaatactaagtccacaaaaggacaaaggtgtatggggcaaaatgactattttgccgctcccacactaaaaaggttaaaaagcagttaagggtattttaggaaaactctaaattcccgac

SEQ ID NO: 350832 - DNA, 695 bp, Cannabis indica
aggttgatgcctcgcttatgcatcatcgatgttaccctttcgatcatgtcttttgacgtgaaataatttctcgtcaatacgtgaattaatagttcgtacatccttgtctcgcttaagactatacagtcagcgagttatagatttgctctattaactctgcattaaataagttatttcatttagtatctcttaatataattgccattatttttgttgattcatattgttcaaggttgatacgtgtcatcctcttaagtgccagttgaatttcgggtataacaaaaatatatacactaacaataataataataaaaatatattactaatatatatgtatactctactaactaaattatataccacaattaaaatatatataccatgacaataaaatttgtattcccattatatataataaattcgaaactaattaaatattatttaaaataaataatatatcatacaattaaaatatagaaaaataataattaaatatatgtagcttgccactaaaattatatacatgcattaacatatttgtgttatgctaacaaaattatatactactattatacatagtaaaacataaaataaatattatctaagaataataatatgccatacaacaaaacataaatatactgtaggacaaaatctatataccaacaacctacaacaacaaaaaaaaaaaaaaa

SEQ ID NO: 350833 - DNA, 676 bp, Cannabis indica
tccagccattatgaaaatgtagcctgatgtggatttcttatcatccacacatcctgcataatcagcgtcactaaacccaacgatatcaagagtgtcagctcgccaataagtcaacatatgatccttggtaccctgaagataccgcatgaccttcttagccgctttccaatggctaagtccaggatcactcaagtatctatccaacacgccaacaacaaaagcgatatcagggcgtgtgcatacttgaacgtacatcaggctacccataaatgacgcataaggaaccactttcattttatctctctctttatcgtttttgtggacattggccctttgagaatttatcaccttttactattggtgcctttccaagtgaacaagtatgcatatttaatcttttcaaaatccaatcaatgtaagttctttgagacaaacaaagaatacctttagttctatcccgaaggatctgtatcccaagtacatacgaagcctcaccaaggtctttcatatcaaaatggtcaaataacaattgctttgtctcggacaatagatttttatcattagaagcaaacaaaatatcatcaacatacagtaccaggaacatgaagttgctctactgaccttctctatatatacattgatcaactttattctcgatgaaacctattgtagtgac

SEQ ID NO: 350834 - DNA, 653 bp, Cannabis indica
ggttaggtttctaacttatcgtttgcttcaccgggcaacgatagtgacatattcaactcgtaattaacggtggtaaaaaggggtactttataaagtaccagaatcgtgtgattatgataatatgtaaatatgttagcatgttgatatgatatttaaattgatgggtattattagttattatttatttcacttttcttgctgagtctctgtgactcataagtttatggtgcaggtaaagggaaggctaaaattgagcagccatgagtggggggtcatagcagcaaagtacatatcagccgcgatggcatagcccagtaaacaggatgctctattttgaatgtattttggaattacaaagtttatgttgcaaaaaaacactatataaccagtttgtaaatattttgaaaacagggggaccccgtagttaatatcacttatcttttatcaaatagttttatatgtcgaatttttaattatcaaaaatttaattactcacacttttagtataattatatagtatggaaaatacgaattttattaaaacacacacacgtggcgtccctgttggacagggcgttacagtttatgttcttgtagccgttgtagaaccatccaaagatgtagctcattctcctcttctgaccgagagtata

SEQ ID NO: 350835 - DNA, 1066 bp, Cannabis indica
atatatgaaaaaaataaaattagattttaaataaaaattatgtcatgtacacaaaattctaaaggtgaaaaatatcataggatgcccctatggcgtcggttatttcataatatctgacaccataggattcctatatctacaagtatttcataataatcgatgtcataggatccctatatcgttggttatttttttttacttgcggtgtcgccaggaatcacgtcggtagtgaatttttccaaaatcgacgctataagccccaaaaaaccacctctaaagtctatttttttaatagtaacgggacattgtgtatcatttagttaaagatcttgaataatatgttagatatgtttgttttatatttttttcatatcttcattacttattaaatatatataaatattctgaaaaatatgcatgaatttatattcgaactagtattgatttttgttattgataaagtagtatcaattttgatctttattgttggtctaacttagtggttgtttttaatgggaccttgtagcgcatgacatcgccctaatagatggtcatctattagactaggggtgagcaacggtcggtttggtcggttttttacacaaagaaattcgaaattcagttttcgatttttatggttctaatccgaaaaccgaccgaccattataaaaatgtaaaagaaaaattggccgttttaatccacggtttggtcggttaaccgaccaaaccgaacttcattttttttagaaaaaaaaagtttttaaattttttataattatttgaaagctaaaaaattagagtattgtatcaaatatcatgtaatttaaaaataaaactttcttagttaaataagtaaaataaaataaactttttaaatttgttcaaattatttgtactactaatatggtaatgagttatattaaaaaattcgtattattttatgaatgtgtgtatataatacgtaaatgcatcaacttataataaaataaagcaatgaataattgagattttaaataaaaaaatatataagtaaaattagtttaataaatgtgacagtcagtagtcc

SEQ ID NO: 350836 - DNA, 758 bp, Cannabis indica
tgaaaaatttcatgaatttttaggaatgtgaaaaatattaaggtaagtggttaaagatcttgtgagctgataagggtaaagaaatatttgattatgcagttcaaagatcattaagttgaactttgaattgtatccaaacttacttcccagaaatttggtttgcatactaatgatagtataaggtctatgattagtgactagcagctgcctaagtccttctagggaaataccctagtgataggaaaatttcaaaatgattgaatggttgtatactaagtgtacaccattactagattcagggatgtcctgatcgtgaacttaataaaagctagaactgttaactaaggcttacatctttgatagctaatctaaagtgattaggggttgaccatcctatggtcattaatataagaaatggtttgtttaaacaaatattacttttctaagaataaatctgatagcaaagtagatgcggtatttttttcttgattccaaaagtattttatcatcttattctatataagatggtcccactgcctctattgtataccatttattttcctagatagaaagttacagtaccttgtcgtagtgggaagattttaaggtacccaccctgctatgacttttatacatttatttacaaaagttgggatcccgtatttaaacttttacaacattatcaaaatatatttagcctagtcatacagcgactacaaaatataactccagatgtcccgagaccgaacactccaggt

SEQ ID NO: 350837 - DNA, 854 bp, Cannabis indica
taaaaaccctttagcgtcgccctgatcagcgtcgatagcgaattttgccaaaactgacgctgaaatggcttaaaagctgcctctaaaggagattttgtagtagtgtaaccatattaagattaagatctattgacataagatcaactaagtgatactcatgacttagaatggtatagcaataagtttatgatatcttttccactatgaatatcggtctactccaatgttacccaatacatccgatactagtatactttgctaatgccctgaaaaggacattccacatgttattgtgtaagtaaactttatcgatgattatcaagttagtgtaaatctaatgtagtgataaatcataagactaaatactttgaagtatataatcatgattattttctactgtgtagacaacactataattataaataattatatgttcaggatttaacagaaattatatattaaacatataatcatgaaagtaatcatgtgaaattatattaaaattaattttatttaaggcatagaatctaaataatatcaataacaccacattcttgtacttttttatatatatacattaacacatagcagctaagtgatggttccacactatcattttataatgaaatctaataaaataattagaaaaattttacaatgcactcctttaaaaggggtccaccaatgcactatttatctctttcgacatttaggagaaatttttagtctaatttttcttatggtcgtctacgttttagttattagtacatcctgcaaaattttaggaaatttagaaaaattccatacgccaaaaatagagttcaaacagtatatttcatacgcatataaaataa

SEQ ID NO: 350838 - DNA, 346 bp, Cannabis indica
cttgacctcatcctccaacctgcaaagacgagtcaggagaccctctctctcgtcttagagactggcaatttcctgagacaaagaaacattatcttcctcatgctgctcgatcgatgacatgtcctacagctccttggtcaactcggtaaccctagtctcagtagcaaggagtttcttatttacctctccaagtttcgtcctcacgacctcaagctgggtccgtgcatcctcaacttcctttttggacaagtccactccccttcgcattgtgttagaggtggtaagattcttgacagcggccgactttgctcgagagtatgcataagctgtaggaaattattttacc

SEQ ID NO: 350839 - DNA, 521 bp, Cannabis indica
ttgactcattgcttggcaagagattcttgtttctctacaggtcgtgtgcttcagttggaggattgtgcctctgaagtgcgttctattgttttgaacgaatttattaattaatagatttaggatttttataaaaaaaaaaaactcaatacttcattatcctttaatgcccatttatttcaatatttttaaataataaaataaacaaaatattcccaattcactattaatgtccccacctcccattgattttaaaatctccacatttataatttatacactaaataatattatggtatctatcataaaactcatatttattgtcacttgtaattttttgaaattgaagtaaaatgaatctactaatataatcaccattcaatttgagtattatagtttactttttccttatttttttgattatataactaatattagagccctccaaattatttatgctactctatttacttaataaatttcatattatatccttagagactgattactcataatttttacaa

SEQ ID NO: 350840 - DNA, 512 bp, Cannabis indica
taattttgcttatttaattaaaacgtaaagtattacatgtataacacttcaggatcccgtttacaaaagactttataaaattttgctatacatttacaaaatatttgtcgcccagcgacgaaacaacaaaagccctgatgtcttgagaatcgtatggtccaggcctaaccaccccgacatgtacaatcttcacctactcgtactcacggttcctcagctttagccttgccctttcctacacatgaagataggactgtgagtcaacagactcagtaagaaaagcataacataaacatacaaataacccgggttataacctagcgcccatacacctgatcataaccctaatcctcgtgtcccacacggtactgagtctagaacgttcgtaagacaatactatcgactataatgtcagcctatactcaatatgctagtcatactctagccataatgatgtgacagcatcgatcagtatttcagccaacatacatttatcagtaatcagtacaact

SEQ ID NO: 350841 - DNA, 1564 bp, Cannabis indica
agttttattcagggcataaaacccaacacggtggccaatcccaatctcacatttctaggcttaagtgcaaaagagggatgacgtctgtcaaactgcttccactcgtctgcatctgcagggtgtctaagcacgccatcctctttaggtctcttagagtagtgccaccgcatgtctttagccgagtgtcttgaactgtataacctctttagtctcgaaattaaaggaaagtaccacaaaacgtttctagcaactttttttccgtctccctttctctttttccaacgactctcaccacaaataggacatagttctttttttcattctctttccaaaataaggcacaattatacttgcacacatcaatggtttcataacccaaaccaaggttacgcagtttcatcttcaactcgtaatgggacttgggtaattttgtaccctctggaaataactcaatcaatatggcgagtaacatatcaaaagaatggttactccacttattgagaactttgcagtgcatcagcttcaccaaagcgttgagcgctgattttttgcaacccgggtacaattcagtttccatatccttgaacaaatcgtcgtacttaccaccaccattcacagggggctcattaaaggaagcagtggtagaacttggatcgtcaaaactaggatcttctcttaaaatatccgccattacatctgccatttcttcttcttcttcgttgtctaatatttctacagccggttgcgtgaacgactccccatgaaaataccaggtcgtgtacgatcgttggatgccgtgcacaaacagatgtaccctaatattatcgggagtttcaaagttcacattcagacatctcatgcaagggcatcgtgtaactccgacagaatttatttgcattcgagcaactccaacaaactcatccacacccctacgaaactctacagatcgtctgtttgaagtcatccagcttctgtcgctcaccatattgctacacaatatgaaaacacacaatttaaattaaagttgaaaatgtgtcctactccaccttgtcactccatttctaaaagggtaaagaacctatcccattcaggtttgtaatatacatatagtgcaatctattctcttaagattgcttcttttttttccaaaatttcggcagcacctccctacagttctcataagtaagcaaactattaccaagtatgccaacttacaagaacatgcaacgagatggtgtaccgaaatctttaacaaagaaacaatcaaatgagcaatagatcacactataggtataaaacaagcccaaactatccatgtggacataaaagtcctggataatttggagaagcgtatttaagagtccttactgactcagcctctccaaacgggtctaaggaaaaatgtgtgtgtgaaataaattatcactatgtgataatacaaacaaaattgttctatcctatctttggtttataaccaaagaaatcaattcaggataagaatttcattttatgctatattaaaatgtcttatggtatcttataatgtcttatgctattttatgta

SEQ ID NO: 350842 - DNA, 650 bp, Cannabis indica
agcaaagcaatttattgctttttccactcgaagtactacatctatattataatgcaaactggtaatatagtggctctttgggcgactattattaatttttttttgtataataacatacaataatgattaattaatataataaataataactcaaccttaaaaaaattattttaatatataataatattgtaattacattgtgtaattacttattattagtagtaattttatttatttggaaaaaaaataaaataaattatttttacattttaatgcagtttttatttttttatttttacagaaatttacatagcgactaatgaaattacaatccaaattcatatagcaacccacatagaaattaccggagcaatccaaactataaataaaaaaaaataaaaaaataatatatggagtgattttttaaaaataaatgaataaagttacttttaatgtaataagtaattacacaatgtaattttatttattaaaaattaaaatatttatttaattctattaaataaattattaattattattaggatgattgaaaagttttattattttttattaagaagtttgaaaatttataggaatatgtatatatatagaattttaaattgctttcttaaaaaaatattaataaaaaa

SEQ ID NO: 350843 - DNA, 1126 bp, Cannabis indica
tcatagtaatgccaatacagaaaatgcataagcaaataatgtgtaatatagataaaaataatgatggaaaagaaaaaaaatggaattaacaacaaatgatagatatgtaccttcatcacaattgatgaatacacgtgacggcacgtggttgactttggggaaatcgtctcctccttcttccatcctttctttgaatttcttaggcatatgttgtatgaccatctcattgagtgtctctatgttttttagtccatctgggactctcctcaatctcctgcacattgtaatacgcaaataggcaagtgtaggcaatgcactctcctccactttccactctttcaactcaaatagaaactcaagctcaagagattcaagtcgagggaaacctcctcttgagcacaccatctcatcccctataaagctatcatagtcaattctaaggactcttaattttggtagcttttctaatgttggcattggatcatccttaagtttgagtttagtcaatgttaacttgatgagatttggggagaattggttggcttgtggtaatcttactatagacaagtttactctaagcttataaatgtgaggacagcttaatatcaaaggaacaatatctatcttggtgccaaagccaaaacgattattcacttgtaaagacagaagacgagtgaatgtgagagattggggattgtgtaagaatctctcaaaatttccatccacataaattcctaatttcttcagactctccaactgtagaagatcagtcagtagaatatccttggtacgaatacctaccaatgtttgtaaatttctagacttagttgacctcaacaaattaccaaattttgtgccaccatctacagtgataagatatagatgcctcagttgctccaacttgcacactgaacttggtattatgatatcactctggatccttactctcaaagtctggaggcatattaaattcccaaaagaagatggaatcgtttcgaatttccaatgaggaatacttaataaccttagatggattagattcccaatttctttaggcaaattcaaagtagatgtggcatattgatgaccaataatcaaaactctaagcttcaaaaagtgattgcat

SEQ ID NO: 350844 - DNA, 537 bp, Cannabis indica
tagttaaacgaaaaagaaaagaatggaaaataataataagtgtaatattaatataataagattaataaaataaattatatgttagcacaattgtcacaaacaaggtagacatgaaaaaaaattctttaatttttttccatatatagtggcgcacccatcataatcgtaacatggccttaatttattttttatttatttttatcttttttataaaggatgtgacttttttttttggaggagataagtctaaaaaagtattggtttgaaataaagatccaaatgttcaaataaagtaagtgtatgttgttttcattaatataagcatggaatttttatttattattatcattaaaataaatataaaacaggcaattaagcttttttttttaattaaagttgaaaaataattttgtgtcctaaaacaatttatggcagcacggatatgaccgaactacagccagaacattatataagaatcattttcaaaaatcaatttaattttttttttttaaaaaaaaaaaagaaaaaaaaagtcaa

SEQ ID NO: 350845 - DNA, 752 bp, Cannabis indica
ttgtggggtagactcgcgatgtcagtgtgatgacttggaatgagttgaagagtttgtctaaggaaaaattttataacatcgatgtgaggacctcacatatggaggactttgtgaaactgactcaagggaaaatgattgtggccgaatacactggaatttaatcggttgtccaaatttgctggtgatctggtgcctatagatttcaccaggaaacaaaaatatgtgacacgactgaatgccacaatcagtcggaacttgagaattaccactactcatgaaaatttgtaagaaagtggttgagctagccttaattgctgaggagggtgagcaacatgtaataaaggagcaaactacaaaggatgctgtcacaacatcgaatcctcctataagtggtaatatcagtaaggggaccgacggtggtaaccctgatcccaaacgaaaagatgatgcttgcgaaatatcaaggggtaataggaagtttcgaagaaacagaggtggttgtcagggccgcagatcttcatttcgatcttatcctcggtgtccgaaatgtaagaaacaccattagggtgaatgtgttggattatattttaccaggatctagatttactaccatgtatattatttaatatcctaaatatgaatttctaaaataatgtaatttaaacacatctaaagtttgagaaaccttacagtggttgcagtggaattaaatgactcctttcgctcagatctctaacaattgtatcctttct

SEQ ID NO: 350846 - DNA, 862 bp, Cannabis indica
ttcctttaaattttacaaaaaaaaaaaaataataccctacatatgatgttaatatgatattttgtgatgttattaccctttttttttaaaaaaattattagtaaataatagtaaaaagaattatataagcttaacttacaaaaaaaaaaaaaaaaaaaacaaacattttgtttaaacttttttttttgatttaagcgtttatatattacaacatgttttacctgggactcgaacccaggacctccaacactcacacacccacatatggccacttgagctagcctcaagtggttaattaaattttgtgtggctgctgggaaaaaataagatatatttgatccacagattttaacggaagttacgaggtacatgttcttatgcaatgacctttataataattagtatttttttttttcgacataatgctgttattggtatagttaagtaacgagtgtcatataatttaagaaaataattgtagagcaccacctatcgaaggtgctaggtaccactagtactcaataacaatactcatatataaatattgagaattgctatgtttaacactctcatcagtattatattgttattagtataattaagtatatcgggtttcaaataacttatgaaaataatttttaaaaaatattactgtgtgtttggaagtaactgtgtaattactaggtagtgtaattactagggtagtaattacacaatttagtaattacactatattttaaaatgcacggtgtgtttggatatgaggtggtaattacatatgaattactaatatcttgtttgacaaaatagttagtaattacatgagaaaataatatttttaatagctaatgtttaatatgga

SEQ ID NO: 350847 - DNA, 574 bp, Cannabis indica
attttgaaattggtgaatgttcagtccaagttgaaggatcataatattcctcttcctaactcttacatcattcatcgagcttgtcatgcacttcctacctcatttagccttcttaagatagcctacaacacttacaataaaacatgaactatcaacgacctaatttctcatgtgtagctgaagaaagcaagctaaaagggaaaaagaatgaatttactcactatgtttctcacctcaagcccaacagaggaaaaggaaagttcaagaataaaaattatggtgctaataaacataatggtaatggcaaggaacataagaatacacagaagaataatagtgggaagtccaaacactctaatgtgaagtgttacttttgtgaaaaaaatgggacatcagagaacggactgtcgcaaatttaagacttggttagaaaagaagaaagcacaatcaagtaacacattagcttgtgtttgttttgaatctaatctagttgatgttcctattgattcttggtggttagatagtggtgctactgttcatgtttcttcttccttacacgggctaagggatatca

SEQ ID NO: 350848 - DNA, 501 bp, Cannabis indica
atatcctaaccatcaaatatctttttttaaaaaattgtttattttgttatatttgatttattaaattataagattagaaatataatattaaaaatatctaaatttttaaattaagatattatattatattatcttattaaatatttaattaatgtaaattatttaaataaactaataattttataattggttagttatttgaatttcaattagaatttaagatatttagtagatttgttcgattttaaatattttttttaaatattttcgagcaacctaaatttaaaattctagttaagatatattttaaatattttatttttagacagaaatatcttagcctacttttcaattatctgttacatgttttttatgtttgtttatttattaattaattatttttttttacaaacctattatttatttaatctaaatcgctacgactaacttgttgacagatccaatgatcagattttaatcatagtccaattgtcaatagat

SEQ ID NO: 350849 - DNA, 726 bp, Cannabis indica
aaggcgaaggtgaagaggaagagaggatatcaggggggaggtggaagaaaggctaagatggtaacccgttttgacagaatagacgcctgattgagaaggctcctaaatctgctcatcggggcaaaggtggaaggggaatggagaggacttgctcaaccacatgcggaaaacacaactttgcaagctatttaagtcccaagacaaagaaggtcagatgaatgaggcaactttatcagggacaagggaaagggtaggaacctgatggagacccgagatccaatgatcgcgggtcgtggatgtgttctgcccattacctatttttgaaataattcctttgtgcagcaactcttttccccagcagatgctacgccagacgaatgaaggtgagtgccctatcgagctattaagaaaggatgagtgaggaaaatacctagcggacaaaatttttgacaccgttgagtttggctgtttcaggatgcgccaggcttgcttaacaagtaagtggttgaaatggaccagggaacgaaagcctaaaccgccctcctttttggagcgacaaagttttttccaactttgccagtgagttttagaacggttgttatcattaacgccccaccagaaattggccataacagattcgagagaatgacaagtggccaccggaaggcgaaagcacgccatagagtaagtggggatggcctgaatgacagatttaagcagagtttc

SEQ ID NO: 350850 - DNA, 652 bp, Cannabis indica
tgttatcacaaaagatagttaaatcacccaattcaaatccataatcaatcaacatttgtttataaccataaccattgagtacaacaactaccagcaacaatgtactcagcctcggttgtggacaaggatatcaaatttgtttcttactatgccacgaaaccaaattgtttccaagaaagaaacaacctccacttgtactttttctatcatcagcattgcctgcccaaactgcatcactaaaacaagctaagttagaattagtatctttcgagtaccaaattccataatcaagagtgctattaacatatcgaataatcctttttacagctgatacatgagattccataggattactttgatatctagcacaaactcccacactgtaacaaatatcaggacgactagcagttaaatacaaaagacttccaatcatgctacgatagagtgtagtgtctacctttactccattctcatcttttgtcaatttcaatgtggtgctcattggagtacttacctgcttagccgactcaagaccaaaattcttaataaggttcttagcatacttactttgagatataaatgtacctccttccatttgtctgacttcaagacccaaaaagaaagtaagctgaccaaccatgctcatttcaaa

SEQ ID NO: 350851 - DNA, 902 bp, Cannabis indica
gtcgtcggcgtccaccggaatcgtctctgataccaattgataagacccgagatcttccgctcaagaacacaacaaaacagtagcaataataggagtagaacaatagcaaaacaatagaaaatgtgtattgaaagtatgagaaactcaattacgaagtaagggagcccttaggcccctttgaagcaactagagatttactcaatacattgcataccactcacttccccttaatattctatatatactattctattctctccaaaacactaccctcaatacaaggattcaattacccttttatttaatgtatgctagcccaccatactaatcccaaggcctaacacacccctctcagttttccttccattgtagattcaaatacacccccttaatgttgtggagaatttctcaaatttgttacgaattaggtactctttgccgctatttcgtctgaggacggccattgctatccaggtgagaactgcagttatataaactatttggaattgatcaatttttaataacaatttaccacattcttgtcttcataaaccatttttatataaccaatgatccaaagttgttcgaaaactaactcggtgtacaacctaatccatgaaccatttttaccattgtcattgttttccattgacattccttcaatgaactaaaataatagattgttgtatttaggtaaacactaggccaaaggttgaaattggtatcttatggaataaataaataaaaggtaaatattattttccaccttatgttttgtaaaaactaccaattagaccctctattttgttaaatgacaaaataaaccttgtattttctaaaatggtacaaatagaactttgaattaattttttgtcaaaataaaatttacattttttatatct

SEQ ID NO: 350852 - DNA, 1015 bp, Cannabis indica
gtgcttttgttatccttaatgaatttcattctctgtttataatcgtcgtgcaattgtgattgttttatttttaccaaaagctttgtacaggtataggtgcccccaagtgaccgagcagacgtacgactcttggtcacttgtcttttacaaatatattgtttatcttttttgtgttttgtatttgaccaaaccttttgtacgcagtgtatggtaaattagagacatgcttataattttgactcaatctgaattttgaaataactatctttatttatttattgatggaaaagtgaaatttgttactgtagtaacttacatcagagctatttgatccaatctgatctttcatcttaacatgagataaaacaaattctagacataagaaactgtactttatatggtggtcacctgacttgagtactttgtttcttttatcggaacctttaagcgtagtcccctcagaaggccattcacttaaaagcaaatgttcattcagtacttagtgtggtcatccgacctggtactttattggtagtattttcttaaatgttccccattccaataccgtggtactagaacgagttcctttttttcatcatacttacctaatttgtatgctccgtaattgagaacttcgaccacctgatacggtccttcccagttaggtccaagtacacctgccgtactgtctttgatgtttaggaatacccttctcagggccatatctcccacgaagaaattccgtgccttcacttgtttgttgaaatatcgagctactttttgttgatgggctatcaactttaagtttggaatggctcttttttcttcgatttcatcaagtgattctgctaggattatgtgattggtactttgattgtacgtcaatctcctgtgggatggtggctcgagttcgatgggcagcatagcttcatatccttacgccattgcgaatggtgtctgttcggttgccgttttcttggttgtacgatatgaccattgaactttaagaagctat

SEQ ID NO: 350853 - DNA, 509 bp, Cannabis indica
gtattctttttgctatttatatagatatatagtttaataattagatgtataatcctatcttttatttaattatggaaatctattagctagaccaattttttttttttggcacaaaataaaaaaaaaaaaaaaaaaaaaaaaaaaaaaaaaaaaattacaaaaatacagtctatacgaaatttttaatatttttaagattttttaaattttatttacataaaataagatttcttttatgtatttttatgttatagttttgttattttgttgttgattttttgttatttgtgtattatttttatattgttttgatgttgttttactgttatttttatgcaattttttttatatttttataaaataccgtaaaaatatatataaaaaataactttaaatgtaaaaaagtaaaaaatttataaatattagtattttatgtaattattctaattttttttagagctaatttgcggcgaaaccccccttatgtttttgatttttatacacttaac

SEQ ID NO: 350854 - DNA, 511 bp, Cannabis indica
taaaggttggggagattttttttattttttaattttttaaaaaagtagagtaagattaatatgaaatagtaatgactaatgtactgtatatatatatatatttatgtatacaatatggtgatcgattttatactattttgaagattttatttacttttaaataataacaaagtatttttattagataaggtcattcgaaaaattataaatgtaaataacgctagatactataaacacgatgagtcttaccaagaaaattttacgttgaattatgcgcgtaatcttattagcagatagtttaacaatcttaaacgaaattatatgtaaattaactactaaagtgttacaatcaaaaatacataatattattaattataaggagaagtcaatgtgccatttggtaacacttttgttttctaattttttaatcacaaaatgaaagtaaaatttttgtttttaaaaattttatttttgaaaaacaaaaatacaatctgtaaccactttgtttttc

SEQ ID NO: 350855 - DNA, 304 bp, Cannabis indica
aagtgtttttctaaaatttgaaacagaaactaatataagttgttatagaaaaaatcttaaatatccaacttaaatattttttcaaataaaatttaattaattagtaattactaattcataacttaaataagaatatttaatgaaataataaaataagtttcagaaagaatctagttagttaaaattctttatttaattaaatacaagaaaaatacaaatagtttatccagaaatgaaattcattaaactaattaggttaaactaatttaattaacctagcacagttattcaaatcaggcaaatg

SEQ ID NO: 350856 - DNA, 589 bp, Cannabis indica
ataatttaggaattaagcctaaattactcatatcttaattatgtgtttgttaacgggacaaagtctagcatgacaagtattaaatgatcacaacaagtaaacataaatattcactttattaacttcaacattcaatttaaacattctttcagtagcataccctttcccccacaaaaatctcattcttagttaaagtaaacaaatctgcccctatagtctgtgtgaaccccgccttattgaggagattactcgagactagattctttcgcatctctggagtatgcatgaattctttgagaatcatgatttttttacaggtaaactttaattccacatcaccagtatctgcaacaattgtaatgtgagagtcagctaacaacactttcttatcctcagtcgcagcagtgtatgtcttaaacatagcacgatcatatcaaaaacggcgagaagcgccaatgtctacccactatccttatgatccgccaattaggttgatctcgaaaatcgtaactagataaggtaattcttcactcatgttagccagtggagcataactagacctatttcgacacttgcgtgccatatgacc

SEQ ID NO: 350857 - DNA, 227 bp, Cannabis indica
cttgagatcgaacctaatcattttagaattaagatcatttgatcatggatcaactaggtgacattgaattgaatagatattatggtaaatttatcatatctaatcaatgttcaatatctgtcccttccaatgtatactccatacatccaatactggaaaactttgctgccctggaaaggacataacacttatccaaggtgtaagtatacctatcgctgaatatcatg

SEQ ID NO: 350858 - DNA, 511 bp, Cannabis indica
ttttggatttcttttaatttgatttctttcagtttcaggtcgctgttcccttcgcttcagtcgtcggagaaagggtccactccactcgctgctgttgtctggtgagtacttttcttttttgcttattatacttttcttgaatgtttattaataatctctctttctaattcttataactaaataataaacatgtacttttcgcttataaaatcctttataaaaattcttattatacacagaattatcatctaaatagatgcaagtctatatgttaattgtagtgtttggattgggtggatggtcccctttatagcggttccctatatcagattatatgtcaaatgtttcatcaacaaaagaaatattaacttttttctttctttcattcatttttatattaaaattagatttggttttcttcataggctttaattttctctactttttttttctttctccaggggctctgctgaaactgatataatggatattctatcgtttcttatgtatt

SEQ ID NO: 350859 - DNA, 643 bp, Cannabis indica
aaaaatttagtttctaagtaagtttaaaaagctattgagtgaaaaaattttgtactgtctgtaaaatttgaaaattatggcaaccacaggtaagtaaagatcactttcaaatgactataaaattttatttttggttacaacttcagtagagagactaaaggagaaatactagttaacattctcactaatgagtttcaattcataactccaaatttaactcatttacatgttaatgttgacggtgagtgttgacgcggtttttcgtcaacggatctaagaagatcgtaaaacgagcaagatgaacacaagcaatagttaatcaaagtaaaccggtttgcaaaaggaaattcaccaaaaacaaacacaagaattttatagtggttcaccccctttcaacggtaataggctagtccacttggagtgttattgatctcaatgcttgaggagagttctccaaagttatgttctacaagagttcattcctcaagtgagtttttagaatttgagagagggagctcaagagtatgatctcgtgagtatcaatttcagggtccctttacaagtgatttcacccccttatatagatattcatctaggatttaaaatcccttaaacgtaggtatgccctcccgtaactatagtt

SEQ ID NO: 350860 - DNA, 557 bp, Cannabis indica
tataattactaaaatgaggccttaatcatttttctattaatctaagctcgaaagaaatcacatttcactattaaatacttatagaacgtatagattctatatctatgattagcgttttcactcaattatactactatgtgcctaagatgtaagtattgagccaatctaattagtcagttttaacgaataacttaaagaacacaaataattcattcaagccagaacttaaccatctcaagattgagatctattgacctaagatcaactaagtgatattaacttagatagatataatggtaaatttatgatatcttatattgtcaatatcagtccagtccgatatatactccatacatatgatcctagcatactttaccaatatcttggaaaggacataacacttatccaaggtgtaagtaaactttatcgctaattatcatgttagtgtaaatccagtgtactgacaaatcatgggacataaactttgaaacatataatcatgattatattccactgtgttgacaacactataatcatgaataactatatgttctgaa

SEQ ID NO: 350861 - DNA, 848 bp, Cannabis indica
ttatcaaatgaaggtgtcaaggcttaaattcttgtcacttaacaagagatagtataatgtgcattaactctttccaacgatatatgtgtacgactagctaactagttcatgcatgatttatatagatagtgttattaaaataaataattaattcaatatttaaaaattttaaatacactgaacatttacattgaattaagttgaagaataagcttattatgatatgtattatttactatttcatgcatgattatataaataatgtaattaaagtaaataatttattttatatctaaattttttaaatacattgaacattataattttaaaaagtaaattaattaataaaatatgataaaattttaaaattattaaattaattgaaatcttaaattaaatataaataaagaaaaataaaaaaaaaatattacttctaaaggattgaactcatgacgttttgattgttttaagaatgattatattgattattatagattgaacatgttataattttctaaaagtataattactattttaaaataaatttaattaaaatatatttttatgtaaatttaaaatttaaaaaatatataattaaaattaaatttttaatagatgtaaaataaaaagtaaaaaaacttatggtttggagttaggtttgaagttttgttacttaaatctataataaataatattcaggattaattataaataaataaatatattaattatggcgtagtttttaagaattaatttgagtcattagattaaatcaaaggttataaattattatctctattgatatgtattttacccaatacctacagtaatagtccccatatataaaa

SEQ ID NO: 350862 - DNA, 666 bp, Cannabis indica
ttcctatatcatttggtagtcttttaaccctttcacattcctccaacaacagtgtctccaaattatacaacttacatattgtattaggtatctcttcaatattttcacaatctaacttcaaatatcttaaatacttcaaattgcctattgaatcaggaagctttctgatatgatagtcctttatggatagtactctcaagcttgggaataacttgtccaactgctcaatctttaacgaatcatcgattgaaccctggtgccagaatatggtgcgcaaacacttagctttgaataactcctcaaattccttagggtcatcagcttcttcacaatcttgcatgaacgaaaaatgacgaaccttgtgagaacatttactgatattattcatcatataacagaactcaccagaaacaaatatcgccaaatcatgtataagatcatgcatgagaaaattcgactccatctcatcgttatttgatggttggaaaaaacgacatagaaattagatcttcaaaatactcttctccaacttcttcttttctctttccatttgtagactgtaaaagaccttcggccatccataacaggaccatctcacctttctaaaatgataatcttttggaaataaggagcagtaagcaaacattgctttaattctggcgtaga

SEQ ID NO: 350863 - DNA, 621 bp, Cannabis indica
tcctccgtgcttcgagttctcaacgcactccccctttgacaccgtcactatgagctcgccgtcaacaaagaccgtcctagcgagctttggtcgtcgtcttcgacaactgaaacctccacacgtcgagttcgagcttgtccaaggaaaactccgttgacccacttcctctaaccacaatctttgtcaacccaagatggatttcaactgtgtgagccctcacattgacaccgaaaccctttgtcttgaccatgggggagccaccgaagtttcttgcgggtcagaatggtggtggacagctagatttagggcagtgagagaagagagcacgagaagaagagagaaattttagagaattagtatttttttttttattattttttaattttatgatttattatttattttagattaatttatttttaaataaatttatttattattttaaattaaattatttttatttttcatggaattagattgatttattattttaaattaattaatttattttttaaaaaatattttttaggtgggctaataatataatgccatgtgtgcattgtgttcatgtgaaaaatactttagtgtacacatgacatgccacatgagtaactgcaaaaa

SEQ ID NO: 350864 - DNA, 540 bp, Cannabis indica
gcacggggctgtgatggccgagtaattgaggcgttttcaactatttcttctgtcagttgccgacccgaaattgcaaaggttctaagtgtcaaagaggcacttagttggataaagaggaataacaagtcacatgtcattttagagacggattgcattttagttgttcaagctatattctcttagttcggtagctatgccttctatttttggtttatttattcaagattgtcaatttattttatcttctttaagtaatgtttctattggtcatgttaaacggtctgctaacaaagccgcgcactgtatggcacgtggtgcttgttattggtcaggtcgtcgttttactgagagtgatgttccccttgctcttgatcagtccattgtattaacggatgcttctgtctaataaagatattaaacactaattaaggtggcgtttggttggaggtaatgaaatggaaatgaaacaattttcattccattcctttgtttggttgtcattttaaagtattggtaatggcattccaatggaatgctctt

SEQ ID NO: 350865 - DNA, 619 bp, Cannabis indica
tgtttaaacaacatacttgtgagtagatcttagatcgtagtaaaataaattccaacattgtcatcatcgctttcttaccttcacataaattctagggtaataaccctagaccgcattactatcaaactcaaggtactaatttaccgagtctaacttaattatgccttgtgcgcataattctttattacaatatatttagcatggcatagcatttacacattaataattactagggtaataaccctaggccattaaaccgctcactttagggtaataaccctaatctcggtttctaattatcaccaatataatattcaatataagcaccaccgtgcatatctctacgtgcaactactgtcttacctgttgtcccgcaaaggcagagattccgaatccccgggtgctcctgaccaggtgccggtaatcctagtcacacaatccgggattttcacaaatagggttaacccctgatttcacattcataaaataaattcatggcatttcaaatacagataatcacatagagctcaaaaagagctttccaacggtataaagaactcccaaaacggagtcccgagtcaaaagttatggccaaaacaaaattcagcatttcccgatg

SEQ ID NO: 350866 - DNA, 495 bp, Cannabis indica
tttattaaaagataaatgtttattatctattttagtatgaattattataaagggaattacctcatatactatttttttaacgtttttattttcaaatttacggtgtgagtttctaaattggttgcagcgctagttgcaatagatgtttctatgtagaattctgtaaaaatgcaaaaaaaaattattttgaagtgttaaaatgaaaaagccccttattataatttaataagatttaatttaataaaatacaatattaaaattataaacaatttatgtatataaatataaatcaatacttaaaattactaaaaataaacatgacacatagagtgatataataaacatatgtgaatattattattttgtttattaaattagtatgtttaataaatagaaaacaaaataaacgcatatatacaaagtattttatagggaaattactccgtatactattttttaaactttttttttttcaaatttacggtttgggtttct

SEQ ID NO: 350867 - DNA, 580 bp, Cannabis indica
aagtacccagaaaacttacacaaaggttgtgaactggaagctgatgatgatcgacggtagaacgcagattggcaactacggagaaatagtagtaaaaaatctatggtttctttaatttttctcgaaggagtttttgggacaaaatggcgaaatggtgaaagtaaccaagtgaagaaaaaaggctagcttttatagaccagaaagagtggaaggcagctgtgatcagacgctatcgtacggtgggaatcgtaatcgattcgtattctatagatccaacggttaagataaatgctcatcagggcggttggaaacgtttgagtacttttctaagacactgattaaatgcgttggtttctcaatggacgagaagcgaattgttgcctgcaaaaggaaataaatattaatgatgaccatcataaatacagcccacgcgcttgaaacatgtgccattgaatcgataagccaaacaggaggcaccaaacaagcctcatttatccttcactaaacgaggcttgggttgtaaatgttgcccttgattttttccaaaatatgtggacctagataaggatgacatgtggag

SEQ ID NO: 350868 - DNA, 874 bp, Cannabis indica
aagaatcaaccatagaaacacaaatcaccaattgtgagcaaagtttgagctctaaaactcaaaccttgctcaaccacaacaccaagcactaaatccaacacaaatcagctctataaacatcaatttaaccttagaaatcaaaaccataaccaatttgcacctacaatagctgaacctcaaaagtacatgaatttttaaacttaaaacccataaaattccaaagagaagagatagagcaagcatacattgacttagttcactaagtatttgtcaaaaccagctagaatcaacaagtaaagaggttgagaagccctagtttctgccggcttcctaggggatcgagagagagagcgagagagagaattcttggagagagaaagcttgatatttgattttctaatttcattgaatggaaaagataaatcttaataacaatctaatatatatcttaattacatcagattaactagcctattaataagtcactaaaggacaaaagaaacttgtggctaaaagaccattttgcccatgcttaagccaaaagcatccttgccacctaggggtattttggtcagttctaaaatcttgaatattcccaatatttccaatgtttaattaaatcaccacgctattactaaaatactaatatgtgattctattggccaaatgccgtgttccaatgttgccgggcataaaatatgaaaacataaagtttcatatataacgtaaatagcacacctaaaatacaaatatatctccataaattcaaaattcataactaaaagtctaatttcataattaagccctaattatttgctaatttatcatattaaaattaagcagtctttacacttatcactataggctcgagtat

SEQ ID NO: 350869 - DNA, 580 bp, Cannabis indica
tttttatcatcttgcattggaatgaccattctttccatttacaaaataaaataatcatctactaaaatgatggaaaaattgtttttttggagtgacattacaatactttaaaatacaactaaataaagaaatagaataaaaatagtttcttttccatttacaacgcaccacaacaatatagtattagacaccttaaaatacttaataccgacactctttgttcaaaaggacttgtgctaaatgatagttgcacatctaaatcccctcaagagattagtttcttgtacattttttgatagtataaatgtatagcacttcaccttcaaggaagtcaatatggtggcatactagttagttaaatttactttaaggttagattatgatttgataatggaaagaagaagatcatatcataatagtaagctaaaaaatgtagcaattattaccaaaataaatatatagggatatgattttgtctcatgatgtacttttacggaatgtattccgtggtatattatatgggtctcagggtacattaaatgagtgtcagggtacgtttctactttttaaccctaattac

SEQ ID NO: 350870 - DNA, 1416 bp, Cannabis indica
atgtccctattataccccttagattaatataaatcatgtgctacacacttaagtgtagggaagtagtatattaggcaatccactcatataagtgggtagattttaatgaaatataatattaagatatttttaattaattgatacaaaaaagaggtattcctcaacttatccctcaaaaaaattatttatgggtaggtagaaaagagaaattataataataaatagaaaattagataaagcaccatatttctttttgtaaacttttatatttgtaggtttattttttatttttataattttacggggttctatataaattatatataagtaataagaaaataatatctaaacaacaataaaaattaaaaataataacaaataaaagtatcaacaataaattaacaagagtacaacataaaaatacatcaaaagatcatattttctgtaaataaaatcataaaaatcacaaaaatatttaaaatttcgtacaaccgtgtttttgtaatttttttgttatttttatatttttgtaaaatcatccctataataaatgactccaaattatagtactatgtaagtaaatgacctcattttaaaacatgtagataaatgatcattttacactatttattacttaaattatcttttgccacatatatttcacgtttctcacatttttaatgttcaatttatatattttttttatttatatgttttaaagatttagaaacatatcacattaatattatctatatcaattttattaaaattatttttattttaaagttatatcgactttttttattttttatggattgtttggattgttggtatacatagttgagaaaattacactcactatgggattttaaaagttgtttacttaaatatgacacttttaagtttgaccaatttatatggcattttttatttttaaatatttttgtggtatttgagatgtcatatatgtgtaaattaggttttcaaatcctatatttaatgtttttatttgtttttacgcaactttatttgtcactagtgctggaaaagtcgtcgaagtttgctgcccataccgaaaaagtcgttggagtagctgtcggtgtcgaaaaagttaccagagctgctactggcatcgaaaaaatcgtcagaattggcattgtcactagaaaaatcactagaaaaatcttaaagaaattggttctcgtcaagaaaccagttccttgatgaagaaaccagtgtcttgatgaagaaaccaatttcttggtattttttcggtgatttttctagcgacaatgccaattctgacaactttttcaacgtcggcagcaactctgacgacttttctgacaccgacagctactctagctacttttttggcaccgacaacaaacatcaaaaaattcgtcgaaattggca

SEQ ID NO: 350871 - DNA, 1413 bp, Cannabis indica
tcaatagttgttagtacggttcattgatgctcattattcagtgtaaataatctcaattcggattgttgatgtagtatgacatctacgtgaaggtattgtatataatagagattatatatgacatggaccgatatgtaattaagttgtctttatcaaacatgtcatttacaataaaaatctaatttatatcataaagatgatcaatagtaaattgaccttaatcctgagtaatcatgaactcatatttatgttattagtttctttaattcactcgttaaagtttctcagagaatgtgattcttgttaggctttgtgtcttaaataaaactcaatttcaatgtaatcttttctgttcaattatcaataaattttatttttattaattaattaatgtgttatttagttcatgtgattatttatttatttattttgatttataaattcatccaaatctttatcacattgatattcttgtttattgtgttgttaaaacagtggaaagtaattaagattttgtgatgaaatgtattcctatgatttatcagtacacagggtttaattgataggatgatctacaatgtaatttacttgtaccttagattagtgttatgtcctttccaggatattggttaatgtaagcttggattggatgtatggattatacatcgaaagggaccgatattgaacgtggataagatttaataaacttatcataatatctattgaattcaatatcacttagttgatcttagatcaaatgatctcaatcctgagatggttaggttctagttcagttgcattatttgtgttcttaaatatgttcgttaaagtcgaccaatagttcttctcgtgacataaagattaaggacatggtagttcaattgagtgggagcgctaatcatagatatagaatctatcgtttccatccggacatagatttcaaacgatgatttcctttaagcttggcttgatagagataaatggttgagtgctcatttcagtgattatattagttcactgaaatatcatttaaggtagataagtgttttaaggataaaatacattgaagggtgtaacggtaaatttatccctactgatcggtgtagatcatctatagagggtcattgattattaggattataacaaatggataattgatagcgtatctatatcgtggatcatatagagcattctatataattgagagtgcaattccaatctatagtggtgcaatgaggaattaataagttggggaatttacttggtaaattctaaatctgcttattggaagcacggttatataggcccatggtccccatattaattgagacaaactgcttgtaagactcagttaattgattttaattaataaattaaaattctaaattagattgtgtcttatttatgaatttt

SEQ ID NO: 350872 - DNA, 930 bp, Cannabis indica
cgaccatggagactcgattggaggccaaaaatatcataacagtttaagttagaaatattgataggattattgggataagttgatttagaaataccaaagtattttggagtactcagagttggccaattaccctagaaatagaagtttcttagtagctaagaaataataagataactattaataataaaatttttattaatattatattattatattattaagattatattattattaatatattattataatattatttatatatatataagttaacgtaagttattaagtttatatatattaagttattagtgaacagaacgaacgaaagagcgaaggaaaccctcgttctccctccttcgagaaaaccttctttccttatatccatttttttcgattttcaattcaaaatttagcgatctaagctccggtagtagcaggatagcaaatccttgaagagggaaagcttaaggtatgatttaatttcattttaagtttaaaaataattggtttcgtataagggttttgtcaattagaacagttatgaaagttcttaccttatagaattgttcttgagtagtcatgggactagttcagatattttcttattgaatttgaggtgattttgaattataaatcgagtttggaactttttaaagcttagtccgaacattaatggcgtttttcatttaaggggccgatttttatttttgttacgtaaggattgtaatatttatggtatatatgcgccttatgaagtttggaggtatttggataagttttggtagtgttttgatgagtacaaaatttggattttcgagttttatagtttttagaaattcctaaaagatcagaaatcgtatttttgtcataactttggactcgggtgtccgttttggactattctatataccatttcgaagcttgcaa

SEQ ID NO: 350873 - DNA, 632 bp, Cannabis indica
gaattgcaaggttctttattagttcatgagcacaaactcaaccagcaggagaaggagaaagaggagcaagccttaaaagcctcatcagacaataattcaaagccaagaggagatagaggacaaggtggaagcaaaggtctaggtagaagcaaaggtggaaatgaccgtggaacccaacagcaataccaaaaccaagacaattattcatatgactctcatggaagaggacgaggaggacaaggaggccaccaatcaaatagattgaagtcagcagacaaatctaatgtggaatgctacagatatcataggtacggacattataaatatgaatgtcatactaatttaaacagacaaagtggagagagaactaattttgcagaaaaagaagaagaagtatcactcttgatggtgtgccatgtcaaagaagaaactcaacaaaacatgtggtatttcgatactggttgtagtaaccacatgtgtggagataagaaagctttttctgagatggacgaatcatttcgcaccaccgtcaagtttggcaacaactccacaatttccgtcatggaaaaaggacgggtaactatccaaactaaagaaaattctacccacactatttctaatgttctttatgt

SEQ ID NO: 350874 - DNA, 695 bp, Cannabis indica
attcatgatatcttgtaattttaaccaaattaccctaaataattaagggccagccataaatcaggcgtgaaaatcttgaaaggcaccaaagccataaacaatggcgcagctcatccatcaaatttgtacttctatttcttccatcaaaaaagctaataccactcatctagaaattctttaaaaatacaaataatataataattttggtacattcccataatattgagaacaaaccaaaattctataataatttgacttcccaaatatatctgaaccaatatattctcattagacaattagtgtttcgacctccctttattacaggatcttcatgattcttattcttcaatttacttaattaattataatattagaatctgaatactgaaattccaaacacttttattttttgctgtaaatttctaaaaaatatatattataggaattagtgtttaaagtaaaccctcttaaaccttatttcagtttaaaatattctttaaatcataccttaaccaaaataatcattttattccgactaataaaatctgtatagtgcataacttattaactttaaaatattattgtgtcaaaattttcttatacattcaataccggaaaacgtgaaaatttaaacaaactaccctaaataattaggggcccaaccatataataagtgctaaagccttgtaaggcgc

SEQ ID NO: 350875 - DNA, 718 bp, Cannabis indica
gcggtagaggccgcggtcgtgccccgagagttggccaggagaacccaccccaggctccgattgattgggaacaaagttttgctgagatgcaaactagaattgatcaacaagaagaagagatccgacgactcaaacaacgggatgctcctgttgagcttcccccgcaaccgcctgctgcggttcctgcagcccttgcggtgccagctgagcaacatgttgccggtaaccgtatggagcctttatatgagagattcaggaagcaagcacctcctatgttcttggggggtcctgatgttcttaaggctgaacagtggttgactgttattaaaagaatactgaactttatgggtgtgatcgggaatgatagggtggcatgtgccacgtttcaatttcaagaggatgccctgatttggtgggagatggtatccctcaccagggatgttgccagaatgacttgggaggaattctaggatttattcaatgccaaatattataatgaggctgtccgcagtgcaaaggggaaggaattcgttgagttggtacaaggcgagggtatgtcagtgactgaatacacaaccaagtttgatcgcctggctaagctagcctccggaattgtaccggcagactttagcaagaaggaaaagtatttggctggactgaatgccaagatcaggcatgacctggttattacaacaaatgataccacaacttacgcaga

SEQ ID NO: 350876 - DNA, 652 bp, Cannabis indica
tatataaggtactattttttgtagaaaaaattatattttgacgcttaattaaagaattttttttacatttttacggtattctataaaaacaacatgaaaacaacaaaaaaactacataaaagtaacataaaaaaaatatctacatataataaaaaatcaacaacaaattaataagagtacaacataaaaaagactgtattttttgtaaataaaatcgtaaaaagtatttaaaattccgtgaaactgtatttttgtaattttttgttgtttttgtgtatttgtaaaattatttcaaaaataaaccctaatacgtaaagaaatagaaaaggaaaaaaaaataatacactgacataattagttgtaaaaagtggcggtattaaattatctcttaattatttacggtattaaaatcgataaaattttaattatatactaaactaataaattgattccatatctaatgtgactataaacactcatatatttaccgtgacacattattacgtaatactgaaatagaatttatatcacatttttaaaattagaaacaatctgcccccataaatttcacgcgagtggttaccatttaagtttattgttgacactgcacaatgattctgacaaaaaaatgtcattgtcaacattgcaaaag

SEQ ID NO: 350877 - DNA, 991 bp, Cannabis indica
aacaattggctatcaaactgtttgccattgtctgagacgattttatgcgggagtctgaaccgatatattatattcttcaccagaaagtccgatactttcttagatgtaattattgctaaaggctcagcttccgtccacttagtaaaataatcaactgcgaccattgcatattgtaccccacccttacctttgggcgattttccgatcagatctattccctaaatagcaaaaggccaaggactctgcatctaagttagctcgttgggcggtgcaggaggtattttcgaaaatctttggcatttctcacatttccttacataggccttgaattttccatcatggtcggccagaaatatccttgccttagtattttctttgataggctttgacctactgtgtggttaccacagaatccatcatgtactttggataggagtcgtgcaacttcttcttttgttacacatctgagtaatggcatggagaatccttttctatacattacaccttccactatgatgtaccgtacaactttcctcatcatattttgagctttgtttatatcatttggaagttctccagtattgaggtaggctgttataggtgtcatcctattcagagctgtgtctatcatttcaatttcctctgcacaattgatgttgggttcttctaagaattgaatagggactagattggccttatcagttactatgttgctcacacgctgggctaaggcatcaatagttgtgttttcttctcttggaattttcctgagggtgtaacccttcaattttgcgagcagatcctgtatattgcttagataagctatcattttctctcccaaggcctcgtactctcctcaaacatgatttactactaattgcaaatcactgcagaccttaatgtattcagcatgcagctcccgagcaagtttgaagccagcaatgaacgcttcatactctgcttcgttattggaagctttgaatccaaattt

SEQ ID NO: 350878 - DNA, 233 bp, Cannabis indica
tatataccactattatacatatcataataaaaaataaatatcatctaagaataataatataccatacaacaaatagaaatataccgtacaacaaatctatataccaacaacccaaacaactcataaaaattaaaaaattgacataactttaaaataaaaagaatttaacaaaactaatatagatataccataatatttaaataatttgcttctaattactaaaaaaaaaaaaa

SEQ ID NO: 350879 - DNA, 506 bp, Cannabis indica
agaaggcctagtcgcgacgggcaatgctcccgtcgcgactactgtagctatggccttcttttgctaaatttttttttttttttttcacgattttcacggttctactttaaaacttaacaaatgcaaatcgaacctaactgcaacaaattaaaaaaaactacaaaatacttgtaaaggtcttctacaaattcaaaagaaaaataaagtaaaactaaattaaaggattgggttgcctcccaatagcgctgctttatcgtcactcagctagacgttgaccgagatcttcatagtggcgccagaatcatggcggacttggcttgatcaaattgacctcccaagtagagctttaaccgctgcccgttaactttgaaagtgttagggccttcacctttcagttccaccgctccataggaaaacactttgaccactgtaaatggccctgaccaccttgacttcaatttaccaggaaacaacttcagccttgaattgaaaagtagaacttgttg

SEQ ID NO: 350880 - DNA, 865 bp, Cannabis indica
actagaaacaaagagtgaaaactaaccgaaatatgacccgaatcttagactaattttagcctaacacctggcaaggagcatatggtttgcaagctcaataagtctatttatggacttaaacaagcatcaagacagtggtatctcaagtttgatgcagttgtcaatgcaaatggttttgtggagaataaagttgatcaatgtatatatatgaaggtcagtgggagtagcttcattttcctggtactatatgttgatgatattttgcttgcttctaatgataaaaatctgttatctgagacaaatcagttgctatctgaccattttgatatgaaagaccttagtgaggcttcatatgtacttgggatacagatcctttgggataaaactaaaggtattctacgattgtctcagattacttacattgattgatcttgaaaagattcaatatgcatgcttgttcacatggaaaggcaccaatagtaaaagttgataaattctcaaagggtcaatgtccacaaaatgataaagagaaagatgaaatgaaagtggttccttatgcgtcacttgtgggtagcctaatgtacgctcaagtatgcacacgccctgatattgcttttgttgttggcatgttgggtaggtacttgagtgatcctggacttagccattggaaagtggctaaaaaggtcatgcggtatcttcagggtaccaaggatcatatgttgacttatcggcgagctgacactcttgatatagttgggtttagtgatgctgattatgcaagatgcatggatgttaataaatccacatcaggctacattttcatgatggctagaggagctgtttcgtggaaaagtgtcaaacagac

SEQ ID NO: 350881 - DNA, 1212 bp, Cannabis indica
aaaaccctagaacctttatttaaatgttcttgaagctttaaataagtttgagtttatgtttgttgtgttttcatggctgttagggttaggatgttttatatttgttttctaagtttgatttgagttagaatgatgatctagcttctagttttgagcttcggtgatgatattgctcaagtttgagttttgaagttaaagctttgttcttcaatggcataaattgattttgtatgtttttctgtgaaatactggctggaatatattgtatataccctaattaggtactctggaaggtttggttacgtgtggtggagttttaagcaagaaatgaaatttcttgggtgaactggtgcaaaccgggtaaccggttttacacgtacatgtaaaatcggctagcatattttggcagggttccccggggctttcatttcctcaattctcatccattccgtgtcatggttgggtgtttccctatttctagagatagattaaccgctagaaagaataataaagcctagggttgtgggttgggtttcccgggattagggttttcatcttgtaacttaccctgtttcataatgtgattagggcatccatctagcgtgagactttccgttcaggtcggtcagcacacttgaattcggaaagaaggtaagaactgtatataatatgtgtgatatcaatatcttaatgtatgtatatgttatgtgtatatgcatgcttagtgtgttagttgcactacaaacacttatgcagctaaggtatagagtgcattggtatagtgaatgttatctgagagtacatttcagtgataccagcacaagtacggaaaagaacttggtgtgtgtggtatatcactcagtggtactcagggtatgaaacaaaccctaccaaaactcgtacagtgaggtacgtaatgaacgtcgtatagtggctatacccaagtacggaacgttcttactcatctgttgagccttgtagttaggtgtatgggcgcttaaatacaagtcagaaattatatgatatgttatatacttttcttactgagtttgttaactcacaattctgcttccatgtgtaggtaaagaaaaggcgaaagctgaacaggagtgaatctgagctggatgaggttgtatatgttgaggtagcatgacctggagtgttcgatctcgggacatctcgggttgtattttgtgttggatatattttacc

SEQ ID NO: 350882 - DNA, 249 bp, Cannabis indica
gctaattaagatttttgttctctaaactataatcttaacttttttgactgttaaaaatttctcctgaattattcagattgttagatttaaggacttttatctcatttcattcaatttttaattcaatgattggttatgtaataaatcatgctccacagactttaataactcttaaatcatgtccctctaactttggtatgtagtactaaattatacctcctaaactttcatttatgttagactttcctt

SEQ ID NO: 350883 - DNA, 572 bp, Cannabis indica
gtggagcatgcgttcctggggtgtgtgaatgtcaagaaatcttggaaacattctccactttttgacttttatagtaataataaaggattaagtatttatgactttattgctctagctattgatcttttggataaatatgattgtgctatatttttttgttttatctggttactttggaatcatagaaataatctctttcataataagaagttgctgccaccttggcatctttatgatcaggctgtgatttatttattggagtatgagcatgctaatctgcctggttttaagccagacaatgtcaattttagatgtaatgggcaggttcaattatcacagcatgaaggatggaaagttagtacagatgcgggtgttagtaattctgttaggaagcatagtttgggcgtggtggttacagatgaaaatgatgacattaaggctggcttcattatacctattgtcggctcagttccaccggaggttgcggaagccaaagctgtcttggctgctatttcttgggtgcaagccaccaagtgtaacaccctaactaccttaggcgtattacgtgattt

SEQ ID NO: 350884 - DNA, 673 bp, Cannabis indica
ccataatattcctgccaccaatgtaaggttttctagaacgttatatgtgtttatttcattgctttagaaaattcatgtttagggtgttagcttatagaatataatccaacatacttgttagtaattctagatccttgtaaaatatattccaacactttccagggcattggtaaagtatactagtatcagatgtatggagtaggcatcagacatgaccgatattaaacttagaaaagatatcataaacttattgttatatctttctaagtcaatatcacttagttgatcttaagatcttaatcttgagatggttaggttctagcttaactgtattatttgtgtccaataagaatttgtacacttggtcggactgtagtggacactctgggcagttggccagaatgtggtggttggccatcccctcctgggttggtcaccacgggtggcttttggacattagggcctgtggccataggatctcattattcagtcaaattttcacgtcttgtgatagccatgctgaagatgagagcttcttgaatgagaattctgggctctcaatgaaagtaccaaaatattgactgcaaatttagctagccgactcagtgtctgactaggattgtagcttatgactgccacgtgtggaacaataataaatgtaaagagacacaca

SEQ ID NO: 350885 - DNA, 721 bp, Cannabis indica
aagtctggggagcatggtttagtacataaacaatcactgaacagtaaaattgaatgaaattagacaaaagtccttaaacttaacaatctcaatagttcgagaggaagttctaacggctaaaaaagttcagagacacgatttagtacatgtcaaaatacgaggggaaaaatggctaattagccttaaaattatatatatgagcattttaactaatagtgggagagatcggttttgtattgctaaaacatatttatatatttatatatatatatatatgagctattatggtaagaatggtaaaatatctaccaataaaaatagtaatttctaacctttgatttaatctaataactcaacttaacatcgtaattaatatatttatttatttataattaatttaatttaaaatattattaattattgatttaactaacaaaactccaaatcataatttttattacttttatttttatgtctattaaaaatttcattttaattatatatttttaaatttcaaatttatatagaaaaatattttaattaaatttatttttaaaacaattattatacttatagaaaattataacatattcaacttataataatcaatataaatactcttaaaataattaaacgtcatgattttaatcctttagaagcaatattttttttctttatttatatttaattttaagattttaattaatttaataatttcaaa

SEQ ID NO: 350886 - DNA, 963 bp, Cannabis indica
aaacccggtgttcatactttatttttatatagcttttattatttctgtgttggattatcatcgtgagactcaaatttagttaacgaaaatctgcgttaacagtcgagcgactaaagatcataaccctcttccgcgagaagaatggacactttggttatctcgagagggagcgagtcgcaagagtacagaagacaattactctggtaaagcaattgtgtaaaagaattgcgacatgagtagatatcggcccactgtggttgccatatcaagctgtcgcgtggaaagcaggacgttaaccagtagcagtcgaagacaaagaactaaaaccaggattactctacctggaatcctggaatacgtcagggatcgaccttgaatattgaaacaattgtgggataatgttggggattgaccccggacatcaaaacctgttttatcaaaaccaggtgctcctagaagattgataaaataagaaattgaactgaggaagttcttttgagattaatgattgtaaatcacattactgatgaaatattttgaattccagttgtgaataaaataatcatttctttcaaacaagtaattacaaagcgtaaatcctttaaaattacttgaggggcatatatgtatgactaaccgaaattgatctggaaatacatagtacaatgcaaacccatagtttcaaaaaaaaattgaaaactttttaaaagggcctcgaccaaacctttttgacggaagaggggtcgaactgttataactccctgaccaaaccttttcgacggaagaggggtcgaatcgttataacgccttgatcaaacctttctgacgagaaagggatcaaacaactgtaatttttgatttataacctatctgacgagagaggaaaatcaaaagttatgactagcgcataaagctgaatactaatggtttgcgctaagggaaagtattaaacgagatgtcaaa

SEQ ID NO: 350887 - DNA, 843 bp, Cannabis indica
ctctctctctctctcggccttgcttgggagctgctagggctgtgatttctttgcaaaattcaagtaatttccatcaattttagagtaattctagtggaggtaatccttgttcaagcttctcttttagtttcttgaagtttaagaaaaaatgagttaatgcatgcttgtggattgtggttgtagctgctgttaattgttgttgttgttttctgtggtttaaaaatgtttaattaagtgagataagataggttttgatgcatgctagttatccttgttcaagtttgtgaattttagctcaaaaactatgattttcaaggtaaattgatgagttttgttgttgtgtttgttggggttgatttccagtgtttgcagaagtttttatatgcatatttgagtagatttaaactggttgtgatgcatgtaggtgagttttagccaagcttgagttttgaactcaaagcttggagctcacatggtgaattgtgtatttttgcttgaagcttggttttgatgctttgaaaatgtttagtggggtatttagaacaggtctgaaagttttggtgtggtttgggatcgaattgaatgagttatgtaattttgattgcttcctgcactgaaccggaattccagttcagtgaagcctgcagcatccggtctaccggatggggctttcaggaattcccaggaccggaattccggttgtagaaccggtctaccagttgggaaaaaattgggaaccctagttcttcccatttttatgttgtttagtgtattgccatgctttttatcgatagggaaacttttaatttctagtttaagtccccaggaagtgatttagcgtgt

SEQ ID NO: 350888 - DNA, 655 bp, Cannabis indica
gctatgtactggttaaaaatgaggaatgatggatgatatataatatatcagtattttattgatttattaaatctatctatttggttactacatggctgtggagatattcactataaaaaaaaaacaagtacttttagtaacagctttttagtcacaatataaattttttgtgactactagggctgcacacgggtcgggttttcgggtttttgggtggtcgggttcgggtttttggatttcaggtggtggaaatgcacaatcgaacccgatttttgggtgttcgggtatggcgggtttcgggtcgagtattgcgggttgggtgtggtcgggttcgggtgttattggactaagcccgaatgtttcatttatgaacttagatgaaatttaatttttttttatatttaacataaacatcccacaacaattctaaagaaccccatgcagttatagttctgaccttttagttttctagacaattttctattaatgggggcaaaagtttgaccaagctaattatataagagcattgctattgggcaccagtggtgcctagcaccttctaaatgtgtcgacttgcaattggctagcgatactctataaaaattattatattaaactatatgggacccgatacttaattgcaccaatagcgata

SEQ ID NO: 350889 - DNA, 467 bp, Cannabis indica
gtgaggaaccgcctcagcaagctcctcactaacgtagtcaacaccctcaaccaggacgtcctcgtcagcatcgactgaatgccaagcctcattgtactccccgaagttagggggttcaatctcttcctctccctcagcagcgggaggactgcccggacgcgcctcgtccagctcctcaacttcttggacttcagtgtccccctaacggtcctcctccattgggatcgccaaatcgtgttcggcgtcaggcagagtggcaagctgagccacttgggggtcaaaagcgtcaaccagatgcatagttttcttcgtacgagccatcatcctatggctgggtacggaattagaaagatttccttctctagaaggagagttagcacgaagacgagggtggacttcgtgcagaagttgaagcagctcctggtcgatttgatgctcgggctcccaagactcacctgggttcatct

SEQ ID NO: 350890 - DNA, 894 bp, Cannabis indica
aaattggtgaatttgagaaaaactgtgattgtgaacagattgatgcatggaagaggatttatttggtataaaggagttaatttggatacattgatagtttgaaattggggttgtaatttggaaatttttggtgtggttttgaatgcttcactgttctctgccgtgtttgtatgatggtgattattagtgaaatggtgttgaattggcagtggtagtgttagaaatattgcaagtttgaacagattagtggtgttggataaattggacattgaatgagttgcacaggggaagttatcatggccaagtactacatggagtgtgtgtaatgtgtcaaaatctgacttagtgtggtgtggtcaaagaggagtgatttttgaacaagattgggttggggacagtgaagtgcattgtaagagttattattgtgttgaggggcagcagtgagtaagaaagcaaagaagaaattcattgtgttggggtagtgtgcaagtgaaaagaaaagaaaatgcccaaagttaagaagaccgccaacaagaataaaaagaaatcactgcatgaaattcctaagtttcattgcccggcagctgagacaaagtatcacgagaaggtggacaatcgggaattttatatggagcgtggattagtagccgatattgaggatattgatgagttgcccgaatgggtcagtgcaacggttcataagcgagattggggactttttgtccagcaaagagagccggcggtcatggaagttgtcaaggaattttacgccaacttcctatcccaagaatggcccactgtagtggtggtgcgtgaagtcccagtctcattttcagctgcagcaatcaacaacctgtttgggttaaactctgtcgagtgccaatactccgcgca

SEQ ID NO: 350891 - DNA, 1341 bp, Cannabis indica
attttattcaacacttaatttttaatattaactagaaaacacataaaataaagtattaagatgtgagttcttaagatttgttttaagaaattctgtataatagaaatttttcgaaaattaataaataataaataaattaaaaagaaatttaaataatttttttatttatatgaacaaatataatatgtttatatatgtgttacatgcatgtaattagattagattggcttttaattatagattttgaaagtttctttcaaagaccgatcttattcaatttataaaatacaactactcacttccaatccaatctgtatttagatgtctaattttttgtaattggattggatttaatgtgtttattgtaattagatcggttcaatgtaattagattataaatcgaatgttaagaaataaagttttactgttaggataaattaaattaatattcaaatttacgccatatattatttgtttaactttttttccaaatttacgtttgagtttttaaagtggatacagcgctagttgcaataagggtttctatatgatttttgttgcaatttaagttgtagcgctagttgcaatagggatttctatgtagaattcgtaaaatacaaaaaaaaaaaaaaaaaaaaaaaaaaagaaactattttgaagtgtaaaaataaaaaataacaaaaaaaaaaaacccttaattatcattgtactcacggtattatcatacttaattttgagaaatattatattctaaattataatttaactaagagatgggtgaacaatttttaaatcacaaaactaaatttatgtttaatttattagataactacgaaaagggggtgggggtatacaatacattgatgttggaggaatacgtacgatgcggacgtgtgcatgggaagtggggaagaggtaaacaaaatctgtatggctaattaaatcgatcggacagcgctgcgctgcgagtgcgagacataaattaattaagtattaatttgtttctttctacatcactctctctgattccataaattttatttgaatgcacagaaatactgttattaatttgcatatatatcatgcttaaattattaagtaaaatattatataatttcaataaatgaactttaacaattatgggtggttgaagagacggattaggatagagggctagtccaaataattaattaatcagttctttggtcacaatcaccattatatatacatatatatacatatttggatgatttcttaatcggtaacactaatgggtactaaaaaattaatgatgtggcaatttagtgacttgctagagtaagttactaacaaatttttttt

SEQ ID NO: 350892 - DNA, 684 bp, Cannabis indica
ccattcaacttagcctcacgcttaacttgaataagctccttctcctgctcagaatattcctgagcatactgattggctcctgcatcacccttcaacttagcctcacgctttagttgaatgagctcctcttctttcgcggctccctcagcctggccaatagtggactttttctttctccccttaacaggttgaggtataaaatctgctagataaagcccgtactccacaaacatggctccgaggtcaacagagtgatattccgagcagcatccggcagtggacaatcctctgagctctgtccctaagagctagtgtaaggggtggacggtaatatattgggatttgttgaaaccgagtataagtggtgtccatgccttccacgaattaatactcgtcaacaaaaccctcgagcttgctaaagaccttgtccacagtgcatgtcaaccacttgaaatctagttgagagaagtagacttcaggtcaaagaaccaactgacctcgtgcggagatggcacaccccatttctgaatggtgtagaggatgaacatcgcagagaaatacttaatgcccttgggagtaaattgggttgaacaaaggcaaaaagaatatgccaccttcttgaaatatgagtgcaagggcaacattttgttgggttttatgccctatataaaactcatttcaata

SEQ ID NO: 350893 - DNA, 510 bp, Cannabis indica
ataaatagacaaaaatatattatttgaaaatagagtaattagtcagtgagagtctagatagttattttctctttgtttgaagtatttctctagtgatatttaattaaatagaaaattaatatataatttgattttaatcatgatacttaaatatatgataattttcttaatgtttaattaaataagaaaactatatttgtgttgaaaattcattttttaattaattttggaccaacataaattagaataatttttcaagatttattttattttattttaaagcatttatgaaaaatgtatttattttaaataaagtaaattttgaactttgcaatatatgtttatagaaaattaaatttgagttggaaattaattaattttggatcaacttaaattgaataatttttgaaataatttagtttattttcagaccaatctaaatataattttatgaatattaaattaaaatttatatttataaattttttttctaaattagaaattttaatt

SEQ ID NO: 350894 - DNA, 928 bp, Cannabis indica
tgcatagaaattaatattaggaaaataatcatattaggccataatcaatagaaacaattgaaatcgaagccctagtttttattaactttcaattttcttgaataattgtttcttactagtttcttatttttaattctttcttaattttcattcaaccaaatagaagtaaaggtttaattttaacgtacttaactgcactccctgtgggatcgacctcactcctggtgagttttactacttgaaacgatacgtacacttgcgtgtgcaaaatatcgcaacactggtctctgtaactatgggtaatttcttttcaaatggctcactaccccacactggaagcagactctagcttaaaatttgccctgatagcatctcttgcacctcgggcactcaggataggtttgccaatttttattttcacctcgttggaaaccttgtgaccttggaatctcttgtttggtcccgtagctgacggatcattaggcctttcttacgatcgttaggatcagcacccttaccggaatcaacattagatgtttgcttccatgaatctcttttcatactgtttctctcgaattttgatcttctacaccctcagcagcaagggctagctcaactacctgagcataagtgcagacaacccttagttgtttggtagctacaattacattttgagcaatatgttcttccaatcctcgaataaacttggcttctcaagcagcctcagtggccatttcatctaaaacaatgtttgctagccgatcaaatttagtggcatactccgtcaccgccacattaccctgggttagcagtataaattcttctaccttagcagctcgaataaattcattgtagtacttttcatggaacatgttaattccatttttggcatatttaattgacaaaaatattttattatttaatgtat

SEQ ID NO: 350895 - DNA, 644 bp, Cannabis indica
ctgaatataagtttccactgcctaaagaaggtattgtaaccaaattgaattaatattttattatttagtgatggtgcttatagaaaatgaattcttttgtaggtgaatattatgttttggattctgaattttcatgtacaaaaggttttctcccaccatatcgtggtgaaagataccatttgcaagaatacaatagtagaagtaatggactgcgtggcatgaaagaactattcaattaaagacattcttcacttagaaatgtcaatgaacgatgctttggtgtgctgaaagctcgttttcctatattaaagatgatgccaccttaaattgactcgacaaactttgatagtaattgcttattgtacacttcataattttattcgaaaactcacccaatatgatcatatgtttatagaatggaaaggaaaacaaattgagggtgaagacaacatagaaggatgtgaaatcagtgtgtcaagatatgaagttaatttgtctgatgaatctgccacggcaatggcacgtgttcgagattgtattgctcaaattatgtggacggcttataataatagaaattagttaattatatttttgaaaaaccgtgtttttgcaaatgtcagttgtatataagaaaatataaaaac

SEQ ID NO: 350896 - DNA, 610 bp, Cannabis indica
ctagagaaaacttttacagactgcattcactctctggaggactttctttgcattaatcatcagttgagcccaacaaaaatataaagacataagcactaaattgaccaacattgctcatcctggatatgaaagattccttaagcttcatactctaattctttgaaccatctattccagaataacctcacatttagtagcaagaattgtttggaatttataccctaaataaaacttatttcaatataatatgatttgttatcaataaaatattagaaataatttttgtttagatgtagtcttcatgtttatggtttgatatacaatttatgttaaatccagaacatatagtttttcacaattacagcgatgtcaatacagtggatgataattgtgattatatgcttcaaaagataatgtctcatgattcatcagtgcgctggatttacactgatgtgatagtgagtgataaagtatacttacaccttggataagtgttaagttctttccaggacataggaaaagtatgctagtatcggatgtatagagtatacattggaataatgggaccgatattaattttggtaaagatattataatcttaccgttgtat

SEQ ID NO: 350897 - DNA, 598 bp, Cannabis indica
ttcttttgtgggtttggcatttttgtttgtttattctttcttttgtttcattttgttgtgttttttgttttgtttgtgttttccagttttttagatattttgaaacttcagtttcattttagtgtctcttctcagtgggttttagtttttctctagttttttaatagtttaatccgtttatgtatgttgtgttttgggaatattattaggtatagttgtttgctgttcatttttaggtaacaattcgagttaagatctttgtagtttatatttgtagagttgtttttgtttgtcagtttgtttttagttgttttatagttttattatagtttgtatacttgtgtatttgcaatttatatttatttttaccatgtttgttatcttgcaggtctgggattacaaatttagtccctctaatttttacagatctaaatgtgtttgtactagcaattgttctgttattgataatataaaagaatactttatctgtgaaatttattgtctatgtttccgtccgacacaccaagttgggcaatttttttttaatatatctgatttttgttttcctacccccctaagttgtacatagcctactgtt

SEQ ID NO: 350898 - DNA, 577 bp, Cannabis indica
tattacctttgggcaaataattaaaatatacacatttaatattaactcacttcatggaatgtgaactaatatatataattactacctttgggcaagtaattacacatatagccaaccaaaataaatattttctataacatatgaaatttggtgataaaataatcattaaaaatttaataattttcaaccaaatttctaaaacaagatatattaattgcgatattgataataaaaaataaagtatccaccataacacattatttttacatcaaacaatcaagttttacaaattttagaacaacaaataatggaaaaatatgaaagaaagaatattggtggagattacattgtcaagataaatcaaataagagagtgactatatcaaacaaaacgagaagacactcaaaaaatttactatgatttacggatttcgaaaaatcatcaaaaattatttttaataattatttttaaaaaattttgaacagcataattatcattaaaacaataataattattaaacgaagtcaaaaaaattaattaaaaatcaccaaaaaaatcagaaattaaattctaataa

SEQ ID NO: 350899 - DNA, 570 bp, Cannabis indica
atgggatctgattacatattacattaagtaaacgtagtttttatttaaatttcacacagctgtgaatatcccacttttactaggttacagtgaatgtgtattaaatatattataagccttatcgtattggaatgcctcgctgggaatagagtcgagttattcttaagggcgagctggagctcgtcatatgtctttccaaggttgataatgcttttactttaattctgacaactgcagtttctggtgacgagatgatctttttcgcgtgcatgccttccttcgaagagatggacgcctcgctatctctccctttggttcacccatctgttatacttagtttgtatacagtatattatacgctaagtgactccattgtcattatatctcctccacgtaacgaggttagtgcatcgccttgtacacctgaagttacatagtttctcatcgaagcacaaggcaacaatttatatatttttatctcgcataagaatgttcagtcagtagagttgtaaacatactctgttaattatgcttttaacgagttattccatttcaagtgtaattatgatt

SEQ ID NO: 350900 - DNA, 1630 bp, Cannabis indica
cttggcaacatagaaaatgtacgtacaagcctgagagcagacggtaagcttgggggataagtttgtaaggtgcaaggccaataaaaactaaaatatctataaaatagtcataaaggggtaacatcgccccggacatgaggtggctttgactccaagacccaaagccaccgtagttacggttgggtgtaatcgtctctgggaagacgatggaagactccggaagcagagagcttgatcccggcaactgggacaatcttctccagttggtgggcacaagtcagagttgagtgcaactcgtccgcctcccaaccaatggatcgacaagtgtacttctccaggaccacaggtcccttcatcacctcctccaaggtggccatagtgttagatcctttgcttgaggatttcacttcggtcgtagggacagacatgccttgagattagtaagattctgaaaaaagagaaatccaacagttagccccaaaccaaaccctaacataaaaggagggaatcgggggtccctaaccgctggagagacggccccctccagatgtctgccagagatgaaaaatttagggattctcctaggcaaacatagggtgcaaatatcccaaacactctcataaataacaaagacttgtaaactaaggctcattaatgccccaaccacgtaaaaatctcatgcattaaaatttctacagcttttctcattatattagttgattggttgccgaaaacctcggtcaacaactatagacaacaaaaaccatataccatacaacaaaatatatatacctacaataaaaaataaaacaaaataatataatattattataaaaaaattgtatataccatattaacaaaattatatacaaccataaaataattataccatacctacaaaattatatttcacctttatatataataaaataaaaattaaacatgcatgatctaaaataaaatgatatagtatacaataaaacttatataccatataacaaaaaatatatactctgcaaaaaaaaaatatatatataataacaacaaataaaaataaaaatatataggatactaataaaattatataccatgtcaacaaaagtacaatagaaactagaacttaaatattattttaaaaaatgatatacagtataataaaaaatacatatacaattcaccaaaatatattactattaataataagaaaaatatatattactaatttatatatttgtatacactaactaaattatatacaataattaaaatacatataccataacaataatattatataccaccactgtatataataaaataaaaactaattaaatattatttaaaataaatatatatcatacaatcaaaatatataaaaataataattaaatatatgtagcatgtcaataaaattatatacatgcattaaaatatttgtattattgctaacaaaactatataccactattatacaaagcaaaataaaaaataaatatcatccaagaataataacatactatacaacaaaatagaaatatgatgtacaataaaatttatatagcaacaacccacagtaactcatagggcccgtttggtacgcaggactggattggattagacagactaattt

SEQ ID NO: 350901 - DNA, 2536 bp, Cannabis indica
taataataaatcaataaattaaaaaccagagtggaatttgataaaaggatattccgaagaaagcccgttaaagattctacacgtttatattttatttttcttaagaatggagtaaaactaaagtgattttgaaccgttggatgggtttttcatcatattctcatcgtttttctgtacggtatccaactgccaactggcaactgtattaaccatttcaggtttcctctatcgctttctttcctttactcggtttcattttgtaattttttttatttatttatctttgcttacacagcaacacttctacctatttatttatttatttattttatggggtttgataggagattctgttttttttcgacaataataatttctgttttccattaaaatatttatttatcattactttgccgagttcactattttctataataactaataaattaaacttatggaccaatattgaattgaacatatttaatgggtctaaaaaaaaaatagttgctcaagtgatacacttttaatttctaaaaatttatataatagataaaaaaatacaaaaaatactttagaattttttttatttttacgctttaatttttttttatttataaaaatattttttcattaaaaataatagataactaaaatgtaaaattactttaaatttaaaaactaagttagtaaatatttttttaaaaaaaaattaataaaatagctaaatataatgaattagttaataaaaattataaaaatacatttactttgtataaattttttttaaaaaattatataataattaaattaagttatataaattttttagtattgtatattgatatattgtaacaaaaatgaataaatatattagattataaatatatatatatatatcagtatttaatatattgtattaccgaaaattagtatactgtaataataaaattatataccacaaagaaatcataacaatactaaacctataatattattacacaaaaaatatatatcatgctaacaaaattatatatattgctattaaaatatgtatacaatatgaaaaaaaattatatataatcattatatataataaaatagaaactaaacatcatcttaaataaatgatatactatacacaacaaaacatatataccaatcataaaaaatttaacaaaataatatgcataacccccaatactttcattttgctagtaattaacccttaaaacctacattttgatggcaaaactcccaaaactcgtattttattatcatttagctatttccatctattttggcaattaactgccacgttgattattcatatgtacatagaatattgtccagatagatataatgtacacatattaatatattatttttttcagtgtagcgtaattgtattacaatcaattaatagcttaatagcttaaaggtcttgggttcgaacctatgacctctccttttttcccatccatccctcaccattaagctagccttagtggcttcatatcaatatattattggcacacataaataaggttaattaggatttttgctccctgaaatttgacatgtactaactcatcttctctgaaattttaaggtcattaaaaataccccatgaactattgagattgttggatttaaggacttttgtctaatttcattcaattttactatttgagtgattgtttatgtactaaatcatgctccccagactttgatatttaccaaatcatgtccctcgaactttgacatgtactaaatcatgccccctaaactttcatccatgttagacttctttactaaaattagaaaaaagtccttaaatctaacaacctcaatagcttagggggcatttttatgaccttaaaagttcagagggcatgatttagtacatgtcaaagttcagacgcaaaaatcctaattagcccataaataaatacttaaaaataaaaaatcatttttctttatttttctttcttttctggttctttactttttaggatctctgtctcctttatatctctctctatctctatgtttcttaatttcttcatttaaaaataataaataaaaaacacatttttctttcttttttttttcttcttcttttttcttctttcttcttgaaaccctaaatgtaataaccaccattacaccaccatcactgaaaccacctcaccattacaccaccaacattgaaaccaccccgaccacaaccacaccaccaccatcacaaccactgcaacaaccactaccacaaaccatatactaaaaaaataaaaaaaataaaaaaaatattctatacacaccacacctgttacaatatcagatctaatcctaccaaattaaaacaaaaacccaaaaaaaaaaatatcagtgatttatatatacctacgacccatcgcaagtttcagacctggaaggtcttcacgagaggaactcactttgaaactcatttagcctgctaaaacttggcgtggccgaactgaagtcgagaagctccagcaagtttctaaacagtgat

SEQ ID NO: 350902 - DNA, 1033 bp, Cannabis indica
atattatttattatctttgtataatatttaatattttaatgaaaatatcaacatattattttttattatattaaaaataatgtatcaaactaacattaatatatctaggaaaaaaaaaactaatattttatataatccatatatatataaaaatagataaaatataattcaatgccacgttgtcattaaaattaaaattgttgttgtagtaattaaaattaaatatttaaaataaattcaacttaataaaaatcataattcaatttaagtcattttgcaacaaaattatttaataacaaaattaatatacttaactatttgttacgatattttgttagtaaaattaatttttttaactatatatttgctactaattcaataactatatatatattttatttaaaaaaataataatttatattaatcacattttttaagaataaaatttgtagttaatatacatttaatatagtaataattaatcttatgttttaaggtaactaaatgattacttggtacatataaattatcaataattgtaaaaataaattattttaagttttatattttagttgtaaaagatcattaacttttactgactaactatttcgtcacaaatttcaaatttttagtgactaaattattagtctcccctctattataatttggcgccacagttttagtgactaaatactattttagtcactaaatataacaaacagtgactaaaaaattggtcattgatttttttagttctaattaaacattgtctcatgactaaaaatatttgcgactaaaaattagtcgtaaattctaactattagtgactaagttgatttggtcacaaaaaatctagtcgctgaaaacttattttcttgtaatattgtcatttaatatatttattaatttagacatataaagtctcttaattaataaataaacctagaatctcttttctttacaatttcgcccttgcttagtgaaaattcataaagtagacatagtctaactttagaattataattgattaatt

SEQ ID NO: 350903 - DNA, 647 bp, Cannabis indica
agctcgtacctacgtccggtacttagcataagtcactgacatccgtacttacgcctagtacgttgctaagaaaatcacatcacctaatcaggggagcctgtacccacgctcggtacttatcatatatcactgatgcccgtacttacgcctagtacgtcgcccagaaatcacatcacctaatcaggtgagctcgtgcatacgatcagtactcatcatatatcactgacgcccgtacttacgcccaatacattgccaggaaattgcatcacctaatcaagtgagcttgtacctacgctcggtactcatcatatatcactgacgcccgtactgtaacaccctaactagcatatgcatgttaagtgatttttaaacgtactgtgcaactcgttgctaatcaacgaggtttatgaaaatcgtgattaattaaaattttacttatttaattaaatacttataacatttcctacaaaatactttgggatcctatttacaaaatactttacaaaaagtttactgttcattacaaaatacttgtcgcctagcgactaactacagaagccctaatgtcccgaggatcgtaatctctaggcctaaccgccccgacatgtacaatcttcatcggttcgtcctcacggttcctcagcttt

SEQ ID NO: 350904 - DNA, 518 bp, Cannabis indica
aacataaattagaataatttctccagttttattttatatgactttcgaaaaatgtatctttatacattggatttcggattcagttatatatttatagaaaatcaaatttgacttgaaaattaattttgttaattaattttggaccaacttaaattaagtgattttcataatattgattggacaattaatactaaggatggaaaataatttatttttacttttcagatcttcctacagtataattttatgaatattaaattaaaatttatatttagagttttctaaattagtaattttaattaaataaatatatgttaaaataaatagattaaaataagtatcaaagaaaatacaatctcttacaaataatgagctttagttataaggatattcgatctccattgttggtcctacatggttaatttatttttaatataacctcgagacgctagacttcgtccccctaatggatggttattcgttgaagcatttaacaccgtaacgatctcttatgataa

SEQ ID NO: 350905 - DNA, 738 bp, Cannabis indica
ttcttcctttttcttctttcttcttgaaaccctaaatgtaataaccaccattacaccaccatcactgaaaccacctcaccattacaccaccaacattgaaaccaccccgaccacaaccacaccaccaccatcacaaccactgcaacaaccactaccacaaaccatatctaaaaaataaaaaaaataaaaaaaatattctatacacaccacacctgttacaatatcagatctaatcctaccaaattaaacaaaacccaaaaaaaaaaatatcagtgatttatatatacctacgacccatcgcaagtttcagacctggaaggtcttcacgagaggaactcacttttgaaactcatttagcctgctaaaacttggcgtggccgaactgaagtcgagaagctccagcaagtttctaaacagtgatggacgaaggggatctaaaggccttggggtttaaatagttagcgaagctcgtagtggtctctattttggtcgagtgtcacttgtttaacgcccaaatgtgacttccactagcggtggttgtagtatagatcgggcggtcgattccacagggaggtgattatggacaaaagcgttagtagaaaaataaaacaaaaggttaataataagtgatagtagtaacaaatgattttgtggtttttgttttggtaataaatattaaaggaaagcaaataaaggtgtaatcaataataaaagagagaaaggcttcaagaatcatcc

SEQ ID NO: 350906 - DNA, 848 bp, Cannabis indica
gggctaaaaatggaaaggtaaaaattcattccaaaaacatttattgtttaattttaaacctgctctagcataattatgagctattttgttatactctcttgaaacataaattataagcaggttcggactgaacaacaatgagttcttaatacatatgataatatcactaagaacataattattacaataaaagttacagattttctccacaacactcttgcaatctgattcaataatagagactgggagcttgactgcttggatcgagtaaagagcagcaaggattgctttaggttcagcgacttcaggaggaatcacacctgcaactggaataactaatccagccttaatgttgccacaatcatccttggtcacaacattatcattctctcccacacttattttcttacatccattcaactttttctcatttggacataactccttaagaatattagcacaatgaggctcttctttgatttcctcaagacatagaatttttaccccaatttttgaaagagttttagggatctccttcatgggctcctctttcttaaattttttcaatctacttggaaaaggtgaaggagtgatataagttggtacaattagtttgtatgactttttcagtgatggtggaccaactaaagtaggagattctgttagactataatatagtatatgaaatacagcatatatataaacgatatgtaatgcagaaaatactataaacatatcgaaatgtatatgctatgaaggatcgaaatacctccagccagtgatctttgagcttcaatccctgcgatagcttcgttattggagttcgagcttcctcgctctctcaactc

SEQ ID NO: 350907 - DNA, 596 bp, Cannabis indica
taaatggagaatatggataattccatttatttatttgcctttctttttatttttatttttattagtattttcctaatttgattatggtcacaatacattatacatatatctgtatctccttttatgtcatataattcatgatgtgcttttatttttttttattttagacaacaaatttggcaaaatggtgaagaacataattcgttcaaattcaaattaattgtcttttttttgttaatgtaaaaataaattcaaattaattgttgatcatatcaggaaatcttcaggtgtaaaaattaaaagtttatatattatgatttcataattttggaatcaaactaaattataaatacaaggtttttgttgtcaaataaaatcaaactaataactgtactttctataattaaaatttaggggtatgattttgtaagtatcaaagtttgggagcatgatttagtatatagacaatctacatattagtaaaattaaatgaaattaaaaaaaaaaattcttaaaatccaacaatctcaatagtcctggggaatttttaacgacctcaaaagtttaaggggcattatttagtacatgtttaagtt

SEQ ID NO: 350908 - DNA, 887 bp, Cannabis indica
gatgatgatgatggtgatgttgaaaaaaaataaataactatgttagtcatattgtatttacataatcacagtactatattttattatatgaatattatattatttttgatgtgatttgattaataaatttcggtagttatcctacatattgtttttattttgggttggaattatttggttttagaatttttttttttttaaatggttttgcttcaattcataactgaagcaaaaaacctaattgttttttacttcgactctttttttttttttgcttcggttcataaccgaggcaaaaaaacatttggcgtccgttctaaactgaagcaaaaaatatgactatttgcgtttgtggttattacgtcggtcactctaaccgacacaaatactttatgtgtcactttaaaaccgaagcaaaatgtcatttttgtagtagtgttacttaaaggcactctgccaaaaattctaagaagctccctctcaaagtataagaagataactagaataatctttactgtaatgaccttgtaatctcaaaaataaattgcccaaagaggccaatacaatggacccgtagactaacgatcattaatgcctaaacccggtaagaacctgtctgtttattaattattattcgtatttctttaagctctaaatatatttagtttccaaaaaactcagtaaatagaatggatcactcctttatatagaaagcaagtgatcattcaatttacataatcgattagtcaggattattcaaatgttaattatattcaattaagataaaaaaaaaaaaacggtactataaaataaatagtacaacaagtttgtactattcttatttaatatttatatgtaatgctgacgtcgcacatcgactatcctta

SEQ ID NO: 350909 - DNA, 502 bp, Cannabis indica
ccttctaggaggcatttctaaactcctgaaccacacaaaccaaaacacatcaagatcattttgatcatcaattttacatgaaaagaatattacactcccgcgtgcagaaattaaaggcaccttaattataagtaataaccacttacagtacagtgagtcgagctcgtctcatggcggtgaactttacatgttagggctaaccacattctttaggaccgtattgctctgataccatattgtaacaccccgatttcccgagatgtcacataggatagtccgtataaaacaatttaataagataaagacaataaaatacttctttattgaaaaatatctaagcatgagatctcactgtttaaaacaaaatacttttagtaccgtaaacttaaataaaactagttaaatcaaaataacggttccacaatgtttagcattaaaaaaaacattaaaagcaaaatactgtgccagccccctaacatgcggtccacgcctcgagctcttc

SEQ ID NO: 350910 - DNA, 1751 bp, Cannabis indica
actatactaactctctgtgtttcttgtgcatgtgagagcttcatctccttcttcttcaagcttttcaagtttggagcttaaagaatatcactcaaccgtgcctggttgagattgattgcaggtatatatagatctagggtttatatttgtacctgtaattagttagttacagaaattagtgaggtgtggattataacctaatccattctaactaatttatgttagagattttagaggccgaaggccaaaacaaggatttgtatgtatttactgttttgtccttgtaattagtccattatcagtgtaagtggaggtttacttcaacaatttccacctaaaccttcactgagctgataatctagtagtcgagtcaaatctgagggtcataggtctgtgatcccaaggatcactttatccttgatccaaccctattaagtttagacaatgtctaaacatagatagggtgattactttagtccccatgtgtgcatgattctcttctgtaggtaccttgtcaatgcttatgtgcccctgtgtcactttgtctctgataaagtgatactttatttctatatgttttgttctatcatggaacatagggttcttgcatagatgtacacaactctgactatcaaagtaaatcacaggtttagtgtctagcaaccttagctcttctaggactccttttacccagatactttctttgatagcctctgtagtaacaatatattctgattcagttatggataatgccacaactggttgcaattgcactttccaactcacacagtttcctcccataagtagtatgtaggcagaggtggattttctactgtctctgtccccagcatagtctgcatcactgaagcattctatagctgtctttccttgttgttgcttgtatttgagtcctagtttagttgtcccaattaagtatcttagtagccatttcatagcaagccaatgtgtctttccagggtttgtcatgaatctgctaagtacactaatggcataagcaaggtcaggtcttgtgcttaccattaggtacataacagatccaatggcattagcatagggtatcttgttcattttctcattttctgccttgctctcaggacattgtttctttgacaatgtgtattgagtagttataggttgactagcaattttagagcctttcattgagaatttctcaattatcttgtgtatgtaatcttcctgagttagactaagagttccttctgctctatttctcttaattgtaatccccagaatcttagttgcttcccctaggtccttcatttcaaactcagttttgagtaagccctttatggtgtttactcttgctctttctttactgattataagcatatcatctacatatagaagtagatatatgactttatttatagtgatcataatagctcatagaaaaacccagttttagcataaaaccatcaaatcttttattccattgtctacgtgactgcttcaacccatagagtgactttactagtttgtagacataggtttcctttcccttttctgtatatcctttaggtttcctcatgtagatctcctcttcaagttctccatgtagaaaagctgtagtgacatccatctggtctacttccatattatactgtgtagctagacttagcataattcttattgtcttgtattttgcaattggttaaaatacttcattaaaatcaaccccttccttccgtgtaaagcctttggccactaat

SEQ ID NO: 350911 - DNA, 715 bp, Cannabis indica
tttttgtgttttatgtgggttggcaattacaatttattggttatatatatttggtgttagtttgtaatgtaaacttattaacttgttttgttttctctgtattctttgtttagttttaggttatatacaatggataagtcccctgatacagtcgtctatgttaagaaaaggaaaatgggtgaagtaaggtatgtttttatattttcatgttttattttgtttgttgttttctgtattttactgtgttttaatgtttttgtgttgtttattatctgctactcaatgttttcaggacattattccttatgttgatcctggagttcaacagaaggattctcatcaatctgttttttttttcaaaaatttaaaggaccaggtatatacctggtttcttttgtttattggtgttaattcatgttcatttattctgttttggattgtttcgttttattcttgttgtgtttataactggtttttaaccagttttaatattgtattttttattttgttaacagattgagcctggtaatgttgcgtttgttggtgctgatgcacctaagaaaccagaggttaagaaatctcgcgctaagaagaagaaggtgagtttattaactggttctcttattgttgttgttttttaactggttttttttattatagaaatgtgttttaaatgtgtaatgtatgtaatttagtgtttagactttttataact

SEQ ID NO: 350912 - DNA, 854 bp, Cannabis indica
aaacttttgcaaatcattaatgacccttaaacaatccgactcaacaacaatctgtgaccatccattcgctttactccaagagagagcttccttgataccaatggcttcgacaatatgaggttgcaaagagccctctctagataaacttctggcccccaagaccaaccccgcagcagaccttgcaatcaagcccaatccatactgcccttgggcagaaaaaagtgcaccatccacattaactttgaccaaaggaaaatcgggagctgtccatcgctccactggtaatgtcgtcgtccaggttaagcttgcatctgtgacattaactttttgagcattaaaccactcaacataatttaactttgccattgccactacctcacttgcatcagggtgcttgaagttccaaaccaactcgttccgacgattccaaatcgaccaacagaccataccagcctcaagagcctcggccgagttccacgataccaaccccgcttctaaccaactcgagaacaacattgcatcaggcgccacaccagtaattggaaccttgctccagcaacttctagcaaaagagcaccgcaccagcacatgcagaatcgtctcaggagcagcaaggcagaacggacacgttgcagcaattggaacatgttttgtggagagagattaaaccgagttgggagactgttggtagaagctctccacagaaaattaagaacctttggagggagctgcaactgccataatagccgccaaattccagagttatctggactatctctgttgggtttcattgattgaagcagagaatatgcactcctaacagtgaaaactcctgacgcatcatgtaaccagta

SEQ ID NO: 350913 - DNA, 768 bp, Cannabis indica
gggcacaaagcccaacagatacacgtttatattgacccataaaagctccaatcacagttgtgtgattttccgatattaaccacacttattttacgtggcatgggatcaaatcccatgattttaggggaaacttgttgtataatatcagtcaatactataattaactaccctcctatgtaattataaataggggcaagtcagactgaaaaagaggatgaaaaaattcataagagaaagggccctagaattgtattagaaatcgaataagattgactcgtggactatccagaattttaactgcaaaaccacgtaaaaaaccttcaaattcgtacttttctttactgtttctcttttttgtgcaagtttattacaatttaggctcaaatatagttaacgaaaatctacgttaacaaatttgttctcatttactccttggaacatggttccgacggcctaaccttggaatttttacaacttatttttagaaaaattcttagtaagtgttactattgggaatattttaccaggatctagatttactaacaagtatgttgattaacatcctaaatatgaatatctttaaaataatgaagttaaacacataagaatttaagaaaacattacattgattgcaggggaatataatgacttcttccgctcagatctctaacccttgttccaatctgtcgtagagtattatcaagatttgagtctggatctctttctctcatttgagttttgttaccaccgtcttactcactatgattg

SEQ ID NO: 350914 - DNA, 584 bp, Cannabis indica
gtcagcccagccgtacagacctcgacgaacaagatatgtttcatggcatggccgggcagcgtaacaatgatcttgagttagaccgtgcacgcggaactcccttctcaccagagatcaatctcctgccactaccccacaagttcaacatgccaatgtcaaagatgtacacttggagagaagatcctctctcccatctcaagtattttgagatgcaaatggatttacaaggggtacgaggaacgtatgttgtagaatcttccccaccactctgtcagaagcggctcatcaatggtatttcaagttggctcctggaaagttagttcatggaaaacattctcttcgaaattccatgcaatattctcttcctcacgccggctcccattgcatctgggagatttggtcgaagtaaaacagcaaccatgcgaaccactctgggcatacatcagtagattcatgatggaagcgactaaggtatcacgggtaaccgaggatggaaagttatccacgatacttgggggtattgaagtccttggcgaactgtggaaggatatatggaaaaacagaccggtcgactcaatgagtga

SEQ ID NO: 350915 - DNA, 572 bp, Cannabis indica
ctatttttggggaccaaacaaaacttccaaatggtctgaaatcggtcccagcgcctaggtagacgtataatcaacttgggccctttccaatcagtttcccgaaaaagtattcgaagcatttttcatgtcataaaaaataaagtagatacaagaaaactcggggagtaaaccacaaacccgagggactggaaactgagcccagcacgtagttgacctagtgttgggcccatcgctcaagttgacaatcaacttggtgcgctggttttgatcactcagatctcaatgttgttccaggtattttctttgaaatgatcacaaatagggtaggagaccttgttctcaagttttagaaccttataagtatcaaaatgacatcttggaagctctgaaattagcacctagtgcccagattgacaaatggcctggtgtgctgagttttgcttatctgattgtgattttgtctcgactattcatctagtttttcacaataactgagagctatgaagttagaaaactcaaattcacaacttcatatttttactttttcgacaaggtgatttactcagaaactg

SEQ ID NO: 350916 - DNA, 712 bp, Cannabis indica
tatgtcatgaataagttgactttcgacttccacgagttaatcaacaaccttcagacatttgagaatttgattggaggacaacagaaaggaggaaacaaagctcctagttctggcactactaatggtaaggctaaggctgaggcaaacattgcctctactttgaaacccagcaagaagaagaagtggaagaatagcaagaagcctcttaaagctcttagcacatctaataagaataaaaaggctgccgattcaaaagcaaagcaaaaaggaaagtgcttctattgcaacgaaaagggactggaaaccccaatgtcctaagtttttggcaaagaaaaaatgtatttctatttttgttataattccatgtgttttagagaattattattcccttgggttattaattctagatctactaaccatgtttattttcttcttatttcagctacaactaattaaacttggattgctatcctagcgagttgagtcgaatggttggatagaagggtggagattgtccaagttgaagatgaagctcgttatcttccttaattttgaactaattgttttagtttatgaacaatttagtttcaattattagtttggaattttattccctatttcatatttatgacatctttgagattattaatataattttctctttaagagatttttattatgaattgtttttattaaattgagcttcatattt

SEQ ID NO: 350917 - DNA, 501 bp, Cannabis indica
ttggatgaccactatatgcacctatgtatatgtagcggtaaaatctcgaagtcgatacagtagtaatccaattagtatttaacagtattatctaactaaaactttaaatttacaaaaaaaaaaaataaaaaaaactcccacaaaaaaaaaaaaaaaaaaatttaagtgtataaaaattaaaacacaaggggattttgcaaaaaaaataaattaagagagttaagtgtattaaaattaaaacataaaattttgccacaaaaaaaaataagaagattaagtgtatacaaattaaaacataaggagatttcgtctcaaattacactttttcttttaattcacaccgagatagttttttttttttttttttaacataatccagtgtttggaattgtaacgaatatttaaccgcaaataatactttaattaataagaaatactcgtaaaaaattgcagacagagcccctagtgttaacaaatcattgttttcacttttcattaaaa

SEQ ID NO: 350918 - DNA, 1060 bp, Cannabis indica
aatctctttgatcacattattgtatctcagaatacttcaagtcgaagcaaaacaaaccacattaaagggcatgctttataatgtgacctttaatatttaataaaccacaattaagcaatgtgttgaacacattattttttagtgtacattatatactcatatagtttatttaaatagcttgttgagggatatgtagaatagtctttagtaaaagcaagaaattattagaaatataaaaggaaaaagaatacactgtgtatagaataatacgttttgcctactgtattctggctttgttttttttttttttgttaataaatgaaatcagcgagaaatgaagaaataaaaacaagataccatacaacgtgacacgtgtccaccactgcaaatagaaaacgaacaatacccaccacactatttaccatgtgaagtactaaattatatatcatatagtgattaattaataataatagcttgactatagtaaataatttgaatatttatatacacaagtgacatgtgaagtaagtaacggtccaaagatgatgatggtaaacgtgaagtggtggcgttaaaatctaagtttatgtattgggttgggtttggggttataaatacacacatttttgtgtagtaatctataatatattatttaattattaatagatttaattaataatatatcaatgggtacttcttctactcttattgctcctctgcactacgattctgccgtggaagatgccgaagcacttcaaaaaagcatgtaaaaggtaataaaatgtatcactatatgtttggcacttatataaaaagtttatgtaaatttatttcaagttttttggatgttcctcctttatatgtttggcactttttttattttttcaattgttgtatataatgtgaaaacgaatattcctatctaaaaaaatgacatgcattgttttttttttagtttattaaagtaaaagaaaaaaaaaaaagtaagaaaatttttactaaaaaaaaaaaaaaaaattaaaactacttttttttattagtttttaattaattaaaaaat

SEQ ID NO: 350919 - DNA, 521 bp, Cannabis indica
taatactattcacatcactatagatggaatctaatatagctaccttaaggatacaaagtaggaatcgcccctcagcttcttcgagttctgaagaagaagaaccaatggaggtctcctctaatgattccgagaccaaatctgtgtcaatcccttctgaaaaagagcttctagaagattttggagtctcctctgacagtgtggaaactgatctcgaaccagagcctccattgaccaaatctgctccaacacctcctcgtggttcttctgcagccaaagccactgctgctgccaaaggcaagctgcttatgccgagttcatctccttgtaatatttctccatctcaagctgtaaattccagattttactatcatgataatcaacgtgattagaatctttatgctacccgaaagtttgaaagtaaaaggaattatgacttgattgctcatcgtgtctatggtattgtaaagtttgtgcaatatcatcattgggaaaatactcttactggttttgagggatatatt

SEQ ID NO: 350920 - DNA, 512 bp, Cannabis indica
atccagtatcaaaaatgaattttcttttatcccgtgtctcaaaaatagaagcattagttacacttccaggaaaaagaaaatggtcattgtctaagtcatagaggaaatagtgtaaatgactagataaaaataattttctaatttcctcaacgactttgtctatcacatcagtatgatagcatttcttttcatccagaattaggggaagaatggtagaatgagaaagagcttcattccggatagtggtgatatcatcctcctttatgaataatgtgggtaccacatcagtatggtaaccctcatatgtactcagtagagtggattcttcaaaattttcaccactagaggtagaggtgacacttacctcgtcaaaattgtgaaaggtttcattcagcggttgtagaggaaaaccattagcacgcgaacttaccaggtgaccagataacttgctcaattcctgcttaatttgtttcagctcagcaagtaagtctttcatcatctcacaatttatc

SEQ ID NO: 350921 - DNA, 431 bp, Cannabis indica
attttcaaaagaaaaaaaaaagtcacatccaataagaaatttaataaatgacaactatctcaaaacagagcccaacaaaaaataaaaagccaaaatagcccgattttttctatgttgatacaacactcaaccttttctaagaagctttctaacttttctaggtgtgaagagaaagctccaaattcatcacaaatatatcataacaatagaaagatatgcacaaatgtatataaagtaatttaccacaacgcattagattaggatatcaaacaagatcaaccatcattacataaaaaaaataaagataatccaagttaagagaaatgaaagaggactaaataaggagtaaacggattaaaataaataaattaaaagaaacctaccaaaaaaataaaccacaaatgttatctcaactttgtcattggataatg

SEQ ID NO: 350922 - DNA, 518 bp, Cannabis indica
ttaattatttttatatcttttttcaataataataatacacaattatatacaaaataattataattattataattattttaattgataaataaatatttatcattattataattattataaaatgattgtcatgttttcgagctaatctattcgtgtttatgtgttgtgtttttgggcttgtcgtgatgtgtcgtacctaagtttatatttgaggaaattatattgtatacccatttttactttatttggtttaatttttacctttatttttatattctttaagatatacccacttttatagataatgttctcattagacccataaagttaatgtaaattatattctaaatttaagtagagagttagggtatattagtcaacttactcataaaagtaggtatattttaataaaatataatataagagtatttttgattaatggatatgacaaaaaaataacactccatatatttgtaaaataaaatttaaaatccctttaaatatatatatatacatat

SEQ ID NO: 350923 - DNA, 1185 bp, Cannabis indica
tttctcggaccaccactactaatctaactataagcttaagttgcctttagtaagcatatacaagtaggagattgtaacaccctaattcattaggcacgctacccatgatacttaagaaatccctaatcccctaaatgggattactaataaaattagcgcagaaattaaactttaattacaaatggaatgaaaataaacttgtaataataatcttaactttacaaacaaaagttacaagtgttgggatcccaaaaatatttttacaaaatattattacaagtccgtttctactagccgacctaagcggcaaaatagagtcacaaaattcatcgctggtagaccccaacccgcttggtctagtgtggtccaaacatgtacatgcgctgttcagctcccatactcatggctgatcagaaacagatttaccctttcctgcacagtagagcacctgttagccaagcccaccaagacaatataaaatatcgataaacatatttatcatacaatataaacattaatgctattctcatatgcctgtatgacacagacatgcatgttacgcttacatgcctatttatgtctatgtaacatagacctacgtgttgcgctcacacgtctaaatacaataaggccttagaatggttcatctcggatctagttaccgagtccaacctggttatgccttgaacacataaccctgaatctcaatatactaatatatttaagatggcatagcatttacacaacatatatcactagggaaataaccctaggctattaaaccgctcatgttagggtaataaccataatcccggttactaattactcacgtatatcatttccagtataagtgccaccgtgcataactctacatgctaaactattgccttacctaatgtcccgcaatagtagagattccaaatcccatgtgttcctgaccaagtgtcagtaatcctagtcacaattccgggatttacacaaatagggttaagccctgatttcacatttataaagtatatacatggcattcaaaatacaaataatcatatagagctcggaacgagctttcccacgatatatagaacttccaaaacggagttcggatcacaaagttatgcatattcaaagttagtacttcaatttgcccagaaactcgagggcgggctgcggcatgcaaaagccatg

SEQ ID NO: 350924 - DNA, 477 bp, Cannabis indica
tgaattttgagttcatggtgaagaagtctggcaccgatgctttttatgcaacttgcagggattcaaattgcaaatgaagagtgagggggaagaagagggcacgctgtgacatgtttgaggtcactgtattccacaacgaacacacatgtagcctggtttctagacatgctgataaccatcaagaagcaccgtgggttgttggccaccttattaagaacaagtttagatcaaatggaactaagtacaaggcaaaagacatacaaacggatatgtttcaggactatagcatcaagataagttatgagaaggcttggaggttccgggagaaggcacttatgtatgcgaggggtacccagtagaagcttatagtcagttacctagttacttgtacatgctggaatagaagaatctgggtactattacagacattgtcatagaggacaacaggttcaagtactgtttctggtcactggatgc

SEQ ID NO: 350925 - DNA, 670 bp, Cannabis indica
aacataactatcagaatctattggcatcagtttcaaacttcaccactatagtaaggtaacaccaaagctgataaaagttagtacagaaaactagctaatctcacaattaatcgacttgattgaaaggagtaatggtggataatacaccagatgacaaattagcaaagaatgttataaccttgcagtggccaaggctaagaaggaagtatcctccagccagagcacggacaagggaaaaaacattcccaaatagggaacttcccaaggcggtgatgaagatgtggatcctcgacttggggacccaagcagcaatgttggacctgtagaagaattagaagagatcgaggtcgatccagatatcctgaccagaaaactaaaaatcagaaaaggtttgttgctcgaagtaaaatcagaattgataaaatttttgagagaaaacctagacgtttttggctggtcacatgcggatatggttggaatcgatccttctattatttcacatgttctgaatatcgatcccaactttcggccagttcaacaaaaataaaggcttttgcacaaagaacagcagtagccctgaaggaagaagttgaaaagttgcgcaacaacaacttcataattgaagccttctacccggcttgggtcgcgaatcccgtattagtgcccaagc

SEQ ID NO: 350926 - DNA, 659 bp, Cannabis indica
tactgtttctggtcactggatgcaaacaactaattatttctgattgcctttgcaattgttgatagtgagaatcacgactcttggaagtatttcttgtagaagttaagggaagcaattagggaggttaaaaacttagtgtttgtattgaataggcatcaaagcgttgaacatgttgtcgaggttattttccctgaagcatgccaatgtgcatgctacaaacatatttctatgaatgtcacccacaagatcaagattgatgtatgtaacacgcaaatatggctggccacttacgcatggtcatagagggaatgtgatagacatttatagatgcttcgacagatggatccttgcatcactgcttatgttgagagtataggattggaaaagtgggctcgtccttattgtctaagagacaggtacaacataatgataaacaatgctgttgaaaacctcaacaacatgacagaagaattttgaaaatatccaattactactctagttgagttcataaggttcacattgtaaaattggttcgctgaccgtctcgaaaaggcaaggaagtgcgctaccccttggcaactcattttgaggaagatttggtaaagcaacatgagtatggtaggtttagaagtggcctacgtaacggtgcacaattgttt

SEQ ID NO: 350927 - DNA, 1346 bp, Cannabis indica
atgccttgccttggttgaaacctttggcgacaaagcgagctttaaatctgtcaacatcaccatgttggttatatttgactttatagacccatttgcacccaatggctttttgccaggggagttggtgataatccaagttttatcttttcgagagcttgggtttcattatccatagacctgaagccagtggtgaaaaagtgatgtctcagcatacgttttggttcaacgtgtgagtatgctgttaagaccgcaacacgaaactgaggatgtaacttgatgtaggatagaaagggttcaatagttcagggagaatttttaacggccaaaaaagttcagggggcataatttagtatatgtaaaagtccggggaaggggggaaaattgctaattagcctaaattttatagtaaagatttcaatttttagaaagatttgaaaagacactgaaatacactgaattgcatacatgataagtccctgattaagtgcatgcttgacgtagaaggtctattacaaaatacacatgcaatgcatctaatcagttcaacaattattatattatgggtaaatattattttggaccttatgttttacaaaagttattaattggaccttctgttttgttaaatgataaaatatactctgtattttctaaaactgtacaaataggaccctgaactgattttttatcaaaataaaacttaataataattcaatctagagataacgtgaacaaaactgattatattttctgtatttgttcgtgttataaattgtctgaaagttgattttatattaaaaagtaaaatcgttgaaaattgaacagtgtcctatttttactattttaaaaaatataaagtttattttattatttaataagacaaaaattttaattgataacttttacaaaaatataatatttaaaatgatatttacccatatattattataaataattggttaaagttcataggaataataagtcaaataagaacctaaccacgtagccccacagccaaacaacagtgccatatataatctatgagatttaattggatagatattgagatcgatattgttgttcttcttcttaattaagcattatatatgaggaagaattcgaataaagatctaggactagatatcttttgtttaattacactgacatattcctaccagcatatatattattttcgactgctttccacttctattttaataattcagtctaattttctagaatgaacatccaagtcaagcaaatcataatcaagaaaacaatatttaaataatggtatactaatttctcctaagcctacacataatatataagcccttttaataaac

SEQ ID NO: 350928 - DNA, 599 bp, Cannabis indica
aaaaaaaaaaagttaaaaaaatgtatataagataattccccaaaaatttaaattgagttttaaatataaaataaaacaaaataatcagccaccatacttggcacaatcaaccataatgttgagatttatgttctaaaaataagtaattaatggataatatgttagagaatgtatagaatataattataaaataaatgatacattaattataagagtataattattaaatatctgaaatttcattattcatatggatcatgtataatcttgtaaggatgtacaagagaattaaaattatacgataagaataaaacaagttggtagtgtattaaagtaatgagaatctttaatatggaaatactaagtacggtttactatacactatacttctagatacttgtgtgtgtgtgtgtaattttaatatggatcacatatgtggataaacatgtagtaaaagtgatgtgtataattcgattatacatgactggaccgatatgtaataaatatttcattaatgtgtcgcttaccatgaaagagttattcattttacaatgatgatcattagtagatcaacatgaatcctaagtatacatgaactc

SEQ ID NO: 350929 - DNA, 605 bp, Cannabis indica
atgtaaataattttatatttttagtaaactcgttctatattttaatttctattcaactctaacagttcgttgaaattttttgtagatcaaaatagttgagattcatgaaactcaactagcgccaaccaatgtcccgcgacattataatgtcgaccccacccaatttctcgtagacatgcctgttatgacacaggcgctgggtgagcgatcacgccacttgagaggaataggccaattgctgagacttaggacaggggcaaaaagagcaactctcggggtaagttcctccgggcagcccactatcacccaagaggaatataaggccctgaagcgaagggtggaaaagcaggaatcacggaacgagtggcaacaacaaatgatacagactcagaatcaaatcatgagcgtgtttcagcaacaaatgatgcaattggccagtgctgttccaggatttaacatgcccatgatgcctctgattccaccgattctaccatttcagcctcttggcgctgggtcctcttcccagactgcccatctcggtgatgacgacgacgatgatgctgttgtggatctatagttttttttagtttgcagtgtaaataata

SEQ ID NO: 350930 - DNA, 733 bp, Cannabis indica
agccctgatgtcccgaggatcgtacgttccaggcctaaccactccgacatgtacaatcttcatctactcgtcctcacggttcctcagctttgggcttgcccttacctacacataaacatagcactgtgagtcaatagactcaataagaaaagcataaatcatataacttacataaatcccgggttatgatcagacacccctacccctaaccacaaccctaatccccgtgtcccacacggtgctgagtctcaaacgttcgtacgacagtaattttgacatggtaatagcctatactcggtaagctagtcatactttagccgtaccgatgtgctaccgtatcagcctacactcggtacgctagtcatactctagccgtaccgatgtgataccgccaaacagtatggtgctattgaccataatatcagcctatactcggtacactagtcatactctagccgtaccgatgtgatactgtcaaatagcacgaaagccaacatacatatctaatgtaatctaacaggcttactaacatgcacgctaaacatgtaaatacataagaatattattatactattcttacctcaattccaaattcaggtgtgccagtcaacctgagtggaacaatctactcggcgaattacaggctcctaaatcataataatcacaacactgataagtgacacgctaaatcacttcccagggacttaaccttgaaactagaagtttccctatc

SEQ ID NO: 350931 - DNA, 819 bp, Cannabis indica
gtggtaaccaaacccgaaggagagaaagagtgtcgtgccgtactcaatcacctccttcattattcttccatatttgaaccttgagtgaatgagtgccgtgcccacacatagcaagtcaagtactcaatcatagagagtaagactgtggtaaccaaacccaaaggagagaaagagatccagattcagatcttgataatgctctgctacagaaaggaatcaagggctagagatcttgaacggaaggagtcattatattccgctacattcaatgtaaggttttcttaaacccttatgtgtttatttcattgttttagagaactcatatttaggatgttaattcaacatacttgttagtaaatctagatcttggtaaaatattcccaacaggaataactctacaggaaaattcgcttattcagcgagacgcagacacttggaggttattcgtggatggtgcatccaacgagcagggctcaggtgcaggggtgatattaatttcgccagaaggctttaagtttcattatgctttgagatttcaatttgatgcgtcaaacaacgaggctgagtatgaagccttgatcgctggtttgaggatagtagaagcgttgaaggtcaagaatctcatatgtcatagtgattcacaactgattgtaaatcaggttctcagggaataccaagctaagtgcctgaaaatggctaagtatctagagagagtttgaaagaacttggaaaggttcgatcatttgaaaatcgagcaaatcccaagagaacaaaactctaaagctgatgccttaaaaaaattggcctcgtagaacgact

SEQ ID NO: 350932 - DNA, 783 bp, Cannabis indica
gaagaatccagtttcaagagaaggagattcagactcagatcttggtgatactctgctacagaaagtatacaagggttagagatctgagtggaaggagacattatattccgttgcaaccactgtaaggttcctaaaactttatatgtaattatttcatatcgtttaagaagttcatatttaggatgttagttacatacttgttagtaaatctagatcctggtaaaataattccaacatttatgtgatttgatgaatgttatgtgaagtttctgttagggtctatgccctgataagcctgtaaagatatttatgattattaataagaattgaacattttgatttatgcatgaatattaaattattaatattgaataatttatatataaatattggaatattcttttttcatatatgaggttgtgacttgtagttgtatggagaattaagatcacttaatcatgaataaaaaagttagcaacatattaaagtttaggaatctttaatcaatggttgtcagtacgtttcactgatgtttgttagtcagtgcaagtaatctcgattcagattactgatgtagcatgacatctaagtgaatgtgttgtatataatagagattatatatgataaggactgatatgaatatagtctttatcaaacttaccatttactataaagacctaattcatatcataatgatgatcaattagtagatcaacctaaatcttgagtaatcatgaaatcttgttcatgttattagtttttttgatttcactcgttaaagtt

SEQ ID NO: 350933 - DNA, 606 bp, Cannabis indica
tttttattttttttaatataattatttacgtgggttaataaaattgtaccacgtgtatactgtgtctatgtggacaatccaatctggcagttaacaacaaaatttgatggaagttgtaatttgctaacagtattgtagttttgggagttttaccgctaaaatttaaattttgaaggttaatttgtaaacaaagaaaaattattgagaattttaccgtaattaaccttttttatttatagtaacaaattttattgtgactaaaacatcttttcctgtcctgtgatgtggcttttcatctttggcgctcttctccctggggcattttcccaatgtgcgacactggcatccgtgtttgggattgggtcaagtttatctgggatctaaacaacagagggatcgaagctgatgatgttttcttatatgcctcgtttgttgtggatactatttggagggtgcgaaatgagaaggtccataataactgttctcctgacataaaaagtgtattgataatatttgtacttcttatgcagattctcatgcttctttgcttcctagtcccgctcctgttctaaaggaagcttggtcccctcctcctctggattggat

SEQ ID NO: 350934 - DNA, 480 bp, Cannabis indica
actttcacgtacatataggtgtacacagtggtcatttagttagtatttaacagtaatatttaacaaaaaaataaataattaagtgtataaaaattaaaatataagtagatttcaccgccaattacttaaaacaaaaagaaacattaatatttaaaaaataaataaataaaaaacgtttccaatctttttatatagtagataagatataataaattaaagcttgatatgtctaccctcgaagcatatttagacaaattatatattaagataccaagtatagtgtacgtacgtgaaggtaatgacaatctcatctcaatgttgtggtgtcatattaatatcatgcaatattgcatgcatttatcttatctgatttgttaggcaattttcatgtcatgaatcatgataaataataaagtagttagatgtatatatatatatatatatatatatatatatatactaagtaaaagctacgtgcga

SEQ ID NO: 350935 - DNA, 841 bp, Cannabis indica
tctgagttctaaatggttagagatgtggactaaatgtgtgatagttatgcagtaagggcaattgaatagtctgattagcgagctatctgggcttgtggcaaacggtaaggaagagaatttttctttattgccataatgctgggaacatgtaaattctgttatgcaggatatgattagagaataaggggaaacagatacgagatctgagagaataataggctcgtcttatgtctattcctgtaccactgatacttcctgttgtgccactagatatggtaaaacttatggaactaacttacgcatagatcaggaaacaaaaactaaatgaaccaccaattatgggacatgagaaaaaggttccaaggtgactagaatagcggtcaatgtgagaataagaaatggaaatcacattctcagagttcaagatgcaaaaaggcgctattttggctaatgtagagccaaatcttgttattgtggggtagtgggtcatttgaaaagaacctggccacagttaagaaagactgatgttaaagaagaaaagtatacgggtcctgcccaagtgccagttatgattcaaagggacccggatatcggtcctttagtcgactcaatttagaatttatgggcaatattataattgatattggtattagacattgtactctcaatgggggaaacatcaaaagatctaaatggattgtgtctgtatattatttagtggtagttcatctgacagggcagacaagttagaaaaatgacagtatgaattaaaattgctagtatgcccaagtggaatataggacatgagtagttaatggaggcatcgatctaattgattcaa

SEQ ID NO: 350936 - DNA, 614 bp, Cannabis indica
tataataatataattcctcactactcataattatctaattaggattttgctaatctatctcttaacctagggtattacataacaattttgtttattttgtattaccttgtaccaaaataaacctactagtttattattgtatgtagaaaatgatacatcttataaaaaactctacaatatgtttacaaggtagtttacaaaaagcacaaatgcatgcattcttgaactaaaatatatgcacataatcatttagcataatgatatcttaaactataaagtaacaacctattatcttaccttataaccatttgtgcaacataatctataaatgaacctactagtttattactgtatgcatatcataataaaccttataaaatatacaatgcacgcattcttaaaatagcatatatctacataataatatagtatactaacattttattgttttataaactaccttgtaaacatatatgcatatattttatttaatcaacttattggtttattgatgcatatcgacaaataatacattaatgcatgcgagtatacatgttaatataatctaaaaaataattaaaaaaaatcattgctcatttataacttcaactaaa

SEQ ID NO: 350937 - DNA, 450 bp, Cannabis indica
ttttagagaattcatatttagaatgttaaatcaacatacttgttagtaaatctagatcctagtaaaatattcccaacaatatatacatctatctcacatataataacataaaaaatccatacctcaacataagaaaatatgttaatatatattttattatataaaaaatattaaatcataaaatatcacaactcttacccttgtattatcacctgttgattttttaccttcgattgaagcaaggtagaaaaaggatgagcttttgaatgttggaaattattgtgctccaatagaaatatcacatcaacaagattacaactctatgacaaataatacaaaagacataaacatggattaaataatgtcacaacactaaacaaaatatacacataaaatagagaataaagaggaagagagagattacaactcaaagcaataagctacacataa

SEQ ID NO: 350938 - DNA, 540 bp, Cannabis indica
tagaaggtcccgatgtgatgaaagtcgaatagtggttgatagttattacacgaattctgaactttatgggtgttaccggcaataacagagtggcttgtgccacattccaattctagaaagatgccctggtttggtgggatatggtggccctgacttgggatgtcactaccattacctaggaagagttctaggaattattcaatgcaaagtattataatgaagtagtttgtagcgcaaaaagaaaagaatttacttagttgactcagaaagataatatgaccgttactgagtatacaacccagtttgatagattagctaggctggctttgggaattgtgcaaatcgatttaagtaaaaaagaaaagtacctggatggattaaatcccaaaattaaacacgacctgatgatcacaatcgatgataacaccacatatgctgatatagtgtgaaaagcactgtgagctgagggcacaattgagtggatcaaggagtctcgagggactcaggttgttggtggggctactgttggaaattatttta

SEQ ID NO: 350939 - DNA, 913 bp, Cannabis indica
ggttgagtttgagcatttgtcccctgtgccgctctggccaaggctgcatcacgctctaactcttcattttgccgatgcgcctcctccaaacggtgcctcaggcggtgggtttctgtttcattagttctttctcccacatatgggcacctccacgattatgctcttcatccctcgtgctagggttctgaccattcccacgctgagttctcctcgagcgtgttgtctgcgtactaggaccaacgtcgggtcgagttctccaagaacgtgtggtccgcgcactggggccaccctcgggttgagccctcccggagcgggtggtccttctagattgcagattggtagatcttatggagcccatgggctcttttccaacacgatgattggcttcctcatgttgggtgttaacattttctccattttcagccatgaaggaggttgtttttttcttcaaaagaatggaggattttttctgagctttttcacagaggctctcaatgaaagcaccaaactgttaacatagattttcattaactaaatttgagcctcacaataatgatttcacacagaaaaagtaaaagctatcaaaataaagaatatgaacacagggtttttttacatggttttgcagttaaaattctgcatagtccacgagtcaatcttattcaaatttctcagtatttttcaaggcctctttcatatgagttttttcttcccttttttgatctgctttgtcactatttataattatatagtggaccatgatttacaaagttgaccgaaatatgtttacaataatcatccttaaaatcgtgggatttgattacatatcacatagtgtaaatgcggtttatgatttgaaaatcatatggctgtgatttttttgcttttattgggtcaaaattatcgtgtatta

SEQ ID NO: 350940 - DNA, 940 bp, Cannabis indica
acggttcagtaagcttttattgctttagtagcttattatttattatgaaataagaaaagcctgataggaagcatgttagtagcctgatagtagaataggtgcatgttttgtttttaatttccaaattaagcggcattagtaagctctcgttgatcattacctaatgtgccaactcggggtttcgaggctgttcagactagatggacggcagacgaaataccaggagtcagggcaactcagtcgtgtcaaatcagggtcaaggagctcatttttcctcaagtgttaggggccgaggtagaggtcctaggagcagggctcatggtcgcggtgatgataacccgccacaggctgcccaagccgagcaagaagcccagaattgggagactaggtttgctgaaatacaagctagaatagaggagcaagataatgagattcagatattgagacagcagggtgctcctgcagtgcctgtgccagaagttcctgtggcacccgcccttgacgctcaggccgagatagtagtagcggcaagtagaatggaacccctgtatgaaaggttttgcgagcagacaccttcagtttttctgggaggtccaggtgtcatagaagccgagcattggctatcagtaattacggggatattgaattttatgagtgtgaccgagtacacaactcagtttgatcggttggtgaggttggcctcgggaatagtgccaacccattgctgtaggaaggacaaaaaaatatatcttgatggacttaatgtaaagattaagaatgaccttatgatcactacggacgaaaagaccacctacgctgagatggtggagaaagcactacgagctaagggcgcagttggatgtatgtcggagtcggctagtactccagggagtggcagggctcctacccctcctgcatcaggtttcagcaagggaggtag

SEQ ID NO: 350941 - DNA, 533 bp, Cannabis indica
gatattcaaaaattacatccaatccgatccgatcacaattggatatccaatatatagcggtcggttgtaattggatcagttggttgtcattggattggatcgatttatgcacactcctagcctagtttatttctcttctcatttttcgtgtttcatatagcgagttgagtaccagcccacactatttaaggtggtatcttaatctttgtggaagatcgtgaatatttgttgcttatcggcttaaggaagcaatctaggttcatcatttggcaatatcctgctacagaaaggaaaccgagagttaaaataattgaacagaaggagttattaattttcgctgcaatcaatgtaagattcttaaactttgttattttatcgttttgttaattttatattttaatgtattagattattatgtgataatcatacattcaactattattttcaaatggaaaacttacaaaaatactggaatttggattaacttttacaaaaaaactgtcacacggaaatctttcaaaatactgtgtttt

SEQ ID NO: 350942 - DNA, 1290 bp, Cannabis indica
tgtcttatttataaattttcactaagcaaatggcttaattttgaaggaaagaggatttatggtttatttgtttattaagagactttgtaaagtctaattggcaatttttttgataattaattatatttgttaaataaatagttttgacatttataggattaaaattaaaaaatatgacataagtgaaagaaatgataaatagttgaaaaaatagcaatattataactagtggggcccattactatggtcggccattaattcattattttgctattatttatattttttattctatataatttaaatcccaaccctatgagaaataatataaaaggaataggatgctctcattctaatccatgcatttaacctagtttacaatctgtcagataactagaaactttgagagcctccttcctttactattttcgaattcccctctctttttcttcataatttttgagcctatagtgaaagagtatatgtccacccatagcaaatcaaatactcaatcatagtatggaagactgtgaagaatccaacacgtgaaggagaatcgggctcaaatcttgataatactcaacagcacaaaggaacaagtgttagagatttcagtgaaaggagacatattattccgctgtcactaatgtaaggtttcttaaattttatatgtgtttaattctattgttttaaagaattcatatttagggtgttaatcaaaataccttttagtaaatctagatcctagtaaaataacttccaacaaacagtatcagagttaagttaatgatttactttcgagaaatatggatttaaaacgatgaatgtgtgatttggatgtgattcaggttgatatatgtgtttatttgatgattgatttatgtttacaaattttttatgcaaaataattggattcacgatctggaattattttatttggatagtatgggaaaattaagcaatttattttttttacagaactaaatttttattcaaaaccaattagttatgaatgatgcgaggtcctcctccgcgtatgcaacatgacgcgtgtctgagggtgggcgagacacgactttagacaaaaaatgtatgggtcacgtgcgtgcatcatgcctcattgtctgagatgctagtgcaatcaagcacccatctcgacacccatatgcatccgattttcaaacaaccataactttctcaatttttatcagaattgagtttcgtaaaaatcaaaattgcttaattttttacaagaaatccaaataaatattttcagaacgaaaaaaaaat

SEQ ID NO: 350943 - DNA, 602 bp, Cannabis indica
tgtaaaaagaaaaaaaaagatagtaataaaagcagtagtggatgatggttggcttaataaatacggggttgaagacgaggccctctgcgctcctccagcaaggcatcaagcctcttcttcttctcccaaaagcgaacaaggacttcctcaggcttgggatagaagtcgagcttgaggtttaaaccattagtctgccaggccataaaaacgccgtcatcaaagcgcttagtgcaatgcttgaaaacgacaggggctaggagctcatctcatttagccttcttcaaggcctgatcttttaaatccctgagctccttcacctcaaaggtcaaattggccatcgactgcaagtccgcctgatgcaactactccatagacttcagcttggaagtcagatcctcggccgcttccttggcctccctcagctcgcgcctcgccttggccaccgcctcgtcccgggtcttcagctcctccaccttggcctgtaatgcatcctgatacctcctctccgcttgtgcctccctctgttgggcttcctcccggaacgctttcctttcagctgccaggtctctcatactcttcatggcctcgtccatgcccccaaa

SEQ ID NO: 350944 - DNA, 727 bp, Cannabis indica
gttatgtattcgatgatgaggacaatccagccgaactcttgctcgactgtttctcattgggacactcttgactttaatgcttggctccgcaaggcgttccacaggtactacctccagtttctcaatttcactgtctgaagctaacttagccaaacagtctgcgtgagcgttcttttcttcggggattctttctactttgtagtccgtgaactcgtggagcagttcccggaatattgctacgtatgtagccatcttttctccgcgcgtctgatattcccccgatacctggttcactaccaattgtgaatcactgtagacttctactttgttggcccccatggcttttgctaatctcattcctcctatcaaggcttcgtattcagcttcattgttagaagctgtgaattcaaaccgcagggctgcctggagtcgaagtccatttggagatatcattgctacccccgctccagatccattttcgttggaggcgccatccacgaacactttccatgccgggacttgggtcgtgggcatgctggcgttagcctctgcttcgtggcactctgtgatgaagtccgctagcgcttatccttttatggaggtgcgtggtatgtaatgtagatcaaattggcttaactccatagcctatttgagaagtctcccggatgcctccggttttgtaagacttgtcggagcgggtggttggttaatactttgattgggtgag

SEQ ID NO: 350945 - DNA, 785 bp, Cannabis indica
tttgttaaacaatttaaaggttgagttttaactatcaaaattataattacccacacttttagtataattacatcttatataattattggtattttaattaaattgcacacacgtggcgttcctgttggacagggcgttacactcaccattgcaccaaaacaaagaagatgtcagaataaaatcaaataccaccttctataaaaatctaaacccaaaatcaaatacccaaccaaaagatcatcgtcagtgaccgaatcttttttatgcttgaaaatctcaaaaacttcattaattagaaaggatagtggtgatcacatggggattcacctctcaatagctgaaaaacccgaacaagtgttgtgaagcccccacttagcaagagcgtgggcactaaaattagcattcttaggaatccaaagcacattataatcaataccatcaagagcatctaacaacttaccaaaagaagaaccaacaaaccatgaaggaacaaccttgcttgaaatggccttggttagaacttggttgtccgtaaaaaggtgcccgagaatagacccaaaccgctgaaggactttgaccccatgaagtagggcctcgtaggactgaacattttgagcgagttcgacccgaacctgaaatagtgaacccgaaatttgtttttctaaaaaaatgttcgggcgggtcgagtttaacccggtacccttcagacgagttcgcaggttgagtttttaggagtaccgggtttcgggttgaacccgccaacccgcccgccaacacgcccgcca

SEQ ID NO: 350946 - DNA, 890 bp, Cannabis indica
cccgtatttcttaaacaggtcagcccattttcatatatggacttaaattcgtactttactttttcataattttttttacaattactaaattatatatatttcaaaattttagttatatttatataatttttaaacaatattttataaataattatataaaaaaattattaacatcattatcattagaatttaaatattaacttataaatattcaaatttttatatcataccttataaataaattaatatataatcttaattaatgtttcaatagttttaattataaaattataatattcagtatattatatttaagttttattattattttaattcatttatatgataaattcatattttattataattattaataaattataagatttttaatatgtcgtgacatgctttttagacttatcgtgtgtcgtacttttcgagctagtctattcgtgtttatgtgtcgtgtcttttgtgctttttgtgtcgagtcgtgcttaaggacttatttttcatgtcgtgtcaatttgtagcatcgtaccgtgtcgtgtctaagctcatattttttcgtgtctagtcgtgcttgtgcctttcgagctcataccagtttcgcattgtgttaaaaatctcgaccgtatttacagcattacttgagactattactatcaattttttaaaattaataacttattatctacatcaaacataaatttttagagacttataccataattctctcaaacaactaatttatacaatattttcaccaaatctaaatagtatttgtctttttgctgaatctaaatagtatttgtcttgtttcaaaaaaaaaaattaagtatttttttttttttttagttttttttagttagtaaggtatacgtaggacg

SEQ ID NO: 350947 - DNA, 973 bp, Cannabis indica
ttgtaacatgtaaattttataattttattttcatctgtgtataaacctagtaacatgatatgatccatccaaattagtgtgtgcctatatatttgctttgggcctagatgcatatagggagcccattcagttttgataattaaaatggactagttgctaaaataaaaaatatcacttttaatagtttttatttaggtccaatcagtattggaattatttaatgaataataattgtttaattaaggttaaatatctctccttttgggccttgtgatgttgtcgtaagccacaacaaatttactaatatttatttccaatacttctaattattttagtataattgtaagtaagggtcgatcccacgaggactatgtttattcatttattcacaaataacaagaattagaagaggggttttgatgattagaataaaatagcaataataaaaaaaaacaaatttatagtgagactacgatatgagaaactagttaaaggttattctctacccttgacaatcattcttaatttctattaatgaatgtaatttcaatttccattataaactattaatccagcagataaagctgaagcagtcaattatcccaatctccctattatatgtaatcaaggcgaagcgctcaataattaactcttttacctaagcactaaatccacgaagcatgcaatttacttaacttagataaagctttgagatttatggagatagattaacctaggcaacaaatcaatgaagcatataattcatttaacctaggttctattcttcatcacaattaaaaattgtaatttgtcacaaacacttagaatcctagactgtaagaatttatttaacttagataaagctttgagatttatggagatagattaatctaggcaacaaatcaatttaacctaggttctattcttcatcacaattaaaaattgtaatttgtcacaaacacttagaatccta

SEQ ID NO: 350948 - DNA, 857 bp, Cannabis indica
gcctaaggtctcacaatccaacgattatccataaccacgcctacacaaatgggttaagtataatgattgcagccatcttttcaaaaccctcgattagacaaccaaaagtcaccatctcgtgacacccttttgcctgcctcttgcttatagtttccctcatgacataagctgtcagtcatgaaactaggcgcatgtgttatagtgagaatttctcacctagaaactcgaggtcggactcctaaaaaaatgacacgtggactcactctcctcaaagagggctgagatgttagtaagagagagacttctttagtgcaaacctcgcctgaaccagactcagtgagatgatgtgaccttgacattgtctagtcgcattcgtgtagcttgcatggagcagtaccgaagatcaggttaagactcacatataccaagatatatgtgaggactataaaggtcttcctgcgaagaggaaaagattgcttctgtactcaaggagctggtccggatgacccaacaaccttgataactcaataaggacacgccttatcacaggatgtccgtataagtgactcgaacaggacgcagacatcccaaacttgactagtcttgtacgcatcataagcctgtcagcttatgaaagaatatgaatagacaactcgtactatagaagtcgcatacattgctgtatttagtgaattgggctgaaactgttcttcatttattgtatttacgttttttattgatttaaatgttatattcaatgtataaacagattgataatgaaaacaatctctgtgtaatcaaaggacacatgctttgtatataaaggagtgattgttaggttataattaacctatatt

SEQ ID NO: 350949 - DNA, 702 bp, Cannabis indica
atacaatataatttggtgttgcgaaattcactcgacaataatgcttctcaccggacgtccttgtaagttatcccacaacccgccccctacggttaatggatcagtagagatcctcgcctgaagggctgtaagttgcgtgctgtcatccaaatttctaaccatagcggcagccctgctaaaacgaattaactacgccttaagtgtttcgccgggctactgatttatattagttagcgaggctgctttgggtcccctatccctagcggcctgaaattacttcttgaaatccctggatagctgctcccaggaagttattgaatgatgagtaaacttgttaaacgagctactcgctgccccatcaagcgaggtggggaacaaaatacaacgtaaattattcgtcacattactcactcgcattattgtgttaaagttattcaaatgggagactagatctgtgggtctgtcataagacaagacatgcaggtttttgaatcccgaaggaaaaggggtattcataatatctagattatacagctcaagctcctcgtcagagtcgtatccagatagtttccctaattcccccacttgatatcttctaaacttgtcctccatcttgtttatccgcaattggaatggattcccttgctttggaccaagctgttgccgaaggttaggtttcttccgattcaagtgctcttgcag

SEQ ID NO: 350950 - DNA, 937 bp, Cannabis indica
atgaattggttgaaattagaatttcagtcattgtgtagtcatcataatttatattttctctccattgacccccatatttgatgacacacatgatttgttccatatctacaattttagaaaaaaaaaaaaaaaaagtactatcataatcttattataaatttttattggaactaaggttttttaaaaaaaattataggtgttattattttggttttaagtttttaactggtttttaatttgtttactggtttttttactagttttttgtttgtcatttatttttttgattacttttttgtatttttaaaagaaaattattattaaaatataatcgtaattttgtttttaactggttttttctaattttatgattgtatgttttgtttatgtttttaattatttttcaagtttttgactgtttttttaaccagtttttttttatgttttgtcatttgtgacttttattattttttttaatgttttatggaaaagtaatattataatcttattatattttttatttggaaccaaacttttaaattatatttatcaatgttttaggtaagttttttaactgatttttaagtttttaactggtttttttctgttatatatttttttatctgttataacttttattacttttttgcattgttaaatgaaatgttttattaaaatctgattttaattttgtatttggaaccggtttcatttaatttttatgttctattgtctaatttaagtttttaactggttatttttgttctgctatattttatttttgtcttatgtctttgattattttattcatacgattgtccttagttttctatctttgtttaacctgttatattttttttttatatatgttatttaaaatgtcgagtttcttttttcttccaaatgatatatatattcttatataatatgttcatat

SEQ ID NO: 350951 - DNA, 639 bp, Cannabis indica
cgttggcttgggctcgatgcgtcgaatcttgcgccccggcttgtgtttcttcgacctcatccaaccccatttccactgtggggacctcaccctcacaattttccttccagtaatcaacctcccaattccgaggatacaagatttgaagcacaaccatctgcaaaaacacaagatcacgtcaaatcgcaaataaatcgcatattaataaaaaaattgcagacatatcgcacaatcatcgcactatatcgccaaaaatctattacataaacatagaaaagtatatcagctattgtcattgcaaatcgcacaaaatcgcacagtaatcgcataaagtcgccaaaaaatatgaaaacaatacaagtggaaaacatgagacttccaacaaatcgcacaacaatcgcacaagaatcgcataaggtcgctaaacaaataaaacaatgcaagtgaaaatttataaggagtgcaagtaaaatcgcacaaaatcgctcaatgatcgcataaagtcgccaaaaaacatattaataactgaacatttataatgcactgtaaagtaaatcgcacaaatatcgcacaatgtcgcatcaaatatcgcatataacacaaattacacttaaagaaaaaaataattgcgctaaaata

SEQ ID NO: 350952 - DNA, 1205 bp, Cannabis indica
tgtcttccgaagatcgtcatgacatgtacaatcatcatcagcaattagctcattctacggtacagtaagcttttattgctttaatagtttatttaattattatgaaataagaaaagcttgataggaagcatgttagtagcctgatagtagaataggtgcatgtttttaatttccaaattaagcggcattagtaagctctctttcatcatgacctgatgtgccaactcttggtttcgcagggtgttcagactagatggacgccaggcggaacacttggagtcagggtcaaggagctcagtttcccccgcatgttaagggtcgtggtagaggtcccaggggcagggcccgtggtcggggttatgataacccgccacaggttgcccaggctgctcaggccaatcaagaagcccaaaattgggagactaggtttgcaaaaatgcaagccaaaatagaggagcaagacagtgagattcaaagattgaggcagcaaggtgctcttgcagtgccggtgccataagttcctgtggcacccgcccctgttgctcaggccgagatagtggtagcgggaaacagaatggaacccctgtatgaaaggtttttgaagcaggcacctccggtttttctaggaggtcctgatgtcatgaaagccgagcagtggctaacggtgatcacgagaatattgacctttatgagtgtcaccgggaatgacagggtggtgtgtgccacctttcagtttcaagaggacgcattagtgtggtgggacatggtgtcccagattcatgatggcaccaccatgacttgggaaaggttccaggaactcttcaatgcgaagtacaataatgaggctgttagaagtgccaaaagaaaagagttcgcacacctgacccagtaggaaaacatgagcgtgactgagtataccacccagtttgatcgattggcgaggttggcctcgggaattgtgccaaccgacttcagtaagaaagaaaaatatgttgatagacttaatgtgaagatcaggcatgaccttatgatcaggacggatgacaagaccacctatgctgagatggtggaaaaatcactgtgaggtgagggcgcagtggggtgtatgtcagaatcagccagtactccggtgagtggcggggctcctacccctcctgcatcaggctatagcagggggagtagtggttcggccattgatcagagga

SEQ ID NO: 350953 - DNA, 709 bp, Cannabis indica
catattaagttgctgtagataggttttagtttaaaacttaattcccggttgtgatttagcgtgtcacttatccatgttgttatcgatgtgattaaggagcctgtaattcgtcgagcagttgttctactcaggttgaccgacacacctcatgaattcaatatgagataagattagtacaatgccatgcatatgttattacatgtttagcgtacatgttgtttatgcctgttagattacattgatagctgtaatagtagacatagagttgttatggttactgataaatgtatgttggctaaaatattgatcgatgttgtcacatcaatatggctagagtgtgactagcatattgattataggctaccattatggtcgatagtattgtcttatgaacgttctagactctgtaccgtgtgggacacgaggatggggttatgatcgggtgtatgggcgccaggggatcttagtatgtttcttgttaagtctgtcgactcacagtgctattttcatgtgtaggtaagggcaaggctaaagttgaggagccgtgagagcgagaaggtgaagattgtaaatgtcgtggcggttaggcctagagcgtacgatctttgggacatcagggcctttatttgtatagtcgctaggcgacaaaacttttgtatatagcaaacttttgtaaatgtattttgtaacgggatcccagaattttata

SEQ ID NO: 350954 - DNA, 601 bp, Cannabis indica
taagctctcgatgatcatgacctgaagtgccaactcggggtttcgaggcggttcagactagatggacgccagacgaaataccaggagtcagggcagctcagtcgggtcaaatcagggtcaaggagctcagtttcccccaaatgttaggggccgaggtagaggtccgaggcgcagggctcgtggtctgggtgatgataatctgccacaggctgcccaggctgctcaagccaatcaggaagcccagaattgggaaactaggtttgggaaatgcaagccaggatagaggagcaagatcaagaaattcagagattgaggcagcagggtgctcctgctgtgtcggtgccagaagttcctgtggcacttgcccctgctgctcaggccgagatagtagtagcggcaaacagaatggaacccctgtatgaaaagttccgcgagcagacacctccggtttttctgggaggtccggacgtcatggaagtcgagcaatggctatcagtagttacgagaatattgaattttatgagtgtgacggaatacactacgcagtttgatcagttggcgaggttggtctcgggaattgtgccaaccgatttcagtaaga

SEQ ID NO: 350955 - DNA, 511 bp, Cannabis indica
tattgtataaatttaatattatttttaaagttagttgttattgtaacaaaattaattagttgttttattttaatttaggaaaaattataaagctaatgcaggaaaaaaaatgggaaaaatacagatttttctaccattaatgggagaaaaatcagtatttttttctctttttcttacattcctggcggtttaaaattgtcgcctataatagggtataggcgacggttttacactgtgccctataccctgttataggcaacggttttaaaccgtcaggaagtccaaattattcgcttattttgcccgttttacgacggtcgtataggcaacggttatgaaaaccgatggaaatactttaaacgattgtttaaaaacgtcgagagaaaccatttttgtagtagtactcatatctagataatactctgtgacagaaaggaacaagggttagagatcagagcggaaggagttattatatttcgctgcaatcgatgtaagattttctaaactctta

SEQ ID NO: 350956 - DNA, 700 bp, Cannabis indica
ttcaccctccgggcccatccttctaatgagggctcgatcccttttaattttcaaaggaatgtaaaggaatccatcgctttttcttctcttccgttttccaagctgtggaccacccggagcttctcacggagtggcttaggattccttcttttctccgcactgctcctacctagctgttcctccagcataccaagactttctccacttatgacaagaaaggtcttaacgtgggagacttggtcacaacggagaactgccagatggccaagcttatctctgggagccagaaagtgaatgacttcaacctctcaaaggttctttgccaaaacatttgtattccggccgctgagaaagtgctccgggtggacatcatagcctcgccagaggaccggtaccagaagtacctctttaggagggaacaggagttggcctatatcaaggctcaggctgccgccgggaggacccttcgtgtggaggcgggcacagatcggatgccttctaggcctaaattgctggtcctggttcccaatactggggctcccgacgccagtacatccaactctggtaagtctcctttaacagttcatcatgttccttctgtccaagaatattcccagtgtaagcctatagaattcgacgagcatcttcttaaatttaggatgccccccactcggtggggggatcatgccaaggcctttta

SEQ ID NO: 350957 - DNA, 505 bp, Cannabis indica
tataaaaagaggtatgtttcaaataaatataaaattagaggtaaaattgattaattgattaataaaaggggcatttttcaactttcccccaaatacttaagacagctctgacctatcccaaatacaaaaacacaatgtcttcccattttaaaggcgttaaaaaaagttttaaaaatcaacaataacaaatgaaaagttaaaaatgagagtcaaccgagacataaatttaagaggaaacaagtaatattaggagagaagttgaagaatttaatttaaatatatttcttttttatgagttttgtactcaaattattctcacacacttacataattaatacataattttaaatataatagatgtgtattctttgtagatgaatgtatagatttgtaggaaattcggagcaaaattttgattagaaaataataaaaattatcatgaaatgataaggacaaaattagtagaatgaatgtaaaaagaaataaacataataatttttttttt

SEQ ID NO: 350958 - DNA, 722 bp, Cannabis indica
ggaaaaattaggataatttcaataaaaataagaatcgaacaatgtcccagtaggcaagagtcaaagttatttttatttttacacgaaatttacaactacaattaataatagaaaacaacatggtttaatataaattcatgcacaattcaaaaactattaagcatttagcaagtaaaaaagacacgtgaaaatacaaaactatcatatcttaaataatttccaagattgccaacaaactgatacagtgttccggtaggctagagacaaagtatcattcattgaatagagttgtcagctcatctaaaatggataccattctagcaaccttttattcgatcaaaataagaatccaacgttgtcccgataggcgagagtcaaggttattcttattttatgagctttcaccattgtttcatacttcgtaaatttatctctaagtagtcaccgtagggagagtctaatagagacaaaaacttacaaaatacttatcataagagatcgttactgtgtttaatgcttcaacgaataaccatccattagggggacgaagtctagcgtctcgagattatattgaaaacaaattaacctgtaggaccaacaatcgagatcaaatatccttattactaaagctcattattttaaagaattatattttcatttgatacgtattttaatttatttattttaatatatatttatttaattaaaattactaatttaga

SEQ ID NO: 350959 - DNA, 590 bp, Cannabis indica
cacgtatattgggaataaaccagggcaacaaagataaactgagagctcttcgaaaggatccatggtactttcaaaatcatcatattgtcctttatacacctactattttacaaaatgttacacctaaatccatggtttactactttttgtgttcaagcatataggcttccattcctcagtaaatcccgatctttggcaaaaacatggggtaatattattggtgaattcattgaagttcatgaggattcttgttatgaaggttcgggtccttttcttcagttttgtgtttgtctggatattaggcaatagcttttaagatgtcgtatgatcactatgtaaaaaattagagacaaattctgggtggaattccggtacgaacgacttcttgagtattgtatagagtgtggtagaattggtcatcctttcaataaatgccctttacatcttgagaatatggataatggtattgaatcagaattagcatatggcctaagtttaaagggttatgctgggttttataccctaaataaaactcatttcatataattagatttacttattaataaagatcagaaataacattttatgtt

SEQ ID NO: 350960 - DNA, 506 bp, Cannabis indica
ttttatgtttgagtaatttattgattatttaacttgtttacagtgattttggaatctaaaataaatttcttttgttgtatttaataggacatattgatcactctgctagagtgatgcgtgttattacatggaatagatcatttagaggccaatttaatgttgaagatggaaatgatgggtttgatacagaagagaatgaaacacatgcttctattttggataaactattcgcatggaaaaaacactctacgatgaagtgaaggtgcactttcttcttaagctatttattattattttttttctttcttagctgttgaattgccaattattgcctattatatttctataactaaattaatacttgaacttatttgatattccgttatatattttgtataaattattagtgcaacaacctatgtacaactcgacgatgatgccgagttgctagatgctgtgatgttctgagatgttgcagaaaacatattctcatgtactgcagttca

SEQ ID NO: 350961 - DNA, 1082 bp, Cannabis indica
gaccgcatatggttaataccttgaattattaaataattagggtttatgtatgagatgttattatcatttaataaaatacaattatgggaattttaattgagtttcatttatgttttttatgttattatgctatttaattacccaattcctgtgttgtgttcggaagctgtggagagcgatgttgggcctttagagagtcgtattgtatataatttagaatactatcggggtattattgttaggtattagaggtgttgtgaattggacgggatttgtaaatgtctaaaatgcccttggtattgtttaacctttggcttaagttaaaagggcaaataagtcattcttttatgttgacttttggttttagtgagaattggtggctgcctcttttacaaggtttaatattgattccttattttaaaatagaaaatagaaagaagcttagaaaggaagaaagaaaagagaggtttagtgagaaaatcctagaagtttctctctctctctctctctctttcgtgctacccattaaccagcaagggaaaggaatttcttgctgaaattagagagtttccagcttgcttttggaatctaaatcaaggtatatctctttagtaattttactcaagttttatataagttttggggttatgttttggtgttttaagtttaactaggggttgtgtgtatgaattcaatttggattcatttgctgaagttgagtagtgtttattcttactgttttaagctgggattgagctttaggttgtgaattattcaagtcaaagcttagaaaactttagttaggtctttaatggtatttttataatttgagtggtttgctgtgatttgttgcttgaattatgttgtgtggggtataagcaggtattctggaagtttttagaagatttgggtttgatttgagaaaaggggaagaatttttgggttcccagctcagaaccggaatttcggttcttggggccctgttgcaaccggtcgaccggttggtgccaggaaccggatttctggttggcaaccggtttgccggttgaggctttttttcccgagccctagtttttcccatt

SEQ ID NO: 350962 - DNA, 506 bp, Cannabis indica
ttggtttagtgtcacttttaataagctcaatttaggactatcaaactactattacatagataataatttatttttattaatttattttcacattgaaaaaatattaaaagaaaagaaaaaatcaacataaagttagctaataagctaatagtactcgtaataacttctctactctttttaaattctaaagaagatagaggagctgatgggttgctcttagagctgttatgtgtcacttttatgataaatattaaatgatcccaagcatttcactagttttgatttatagatccatcttacatacattttctttatttaaaaaaaaaaaacaactcagaataatatattttttatccatgttgcagttgccttcaattatattttattgttgtatagataaatactaaattaaataggccggaacataaaaaccgctaaaccgtgggaaccgcctaacccattagaatccgcccgcatggaaaccgcccattaaaaaaccgcaaaaa

SEQ ID NO: 350963 - DNA, 1217 bp, Cannabis indica
ttcaattttggtgataatataataccacaggttgtatttgtatgggggaagggagggagatatttttttgctgagtaaaatttacatatgttgtttaagcaaaaagtggagtctatacttgtggcaatatactttggaagttttgatttttaagcaacccaaaccgcccaaaaaaccgcataaaaccgccctctaaaaaaccgcccaacccaaacttttattgggcaggtatgggttgtgattttaaaaaaccgccaaataaaaaaaccgccaaaccgcccaaaaaccgcccaacccaacccatgtgcaggcctaaaattaaacaagctgaactgtgtgataataataaaaataatcaatcataaacgaatgttcattttcacatttaattacaaaaaaaaagagatcattttgactctacatttactcccaaatcatagtcaacgaacattatgtaggacacgactttttctatatacttgtaaagaaatcaaaaataaaatataataaaaattgaagccacgcttacactactataatgtaagcttttagctttttttttttcaacccaatttataaaaaagaaagttaaaggtagtgaaaatatctgcattgacatttagaggcggttttttggtaaaaaccgtaggtatagaatgtatatatatctatgtcgtcggttgggggttggggaaaatcagggttttgttattaaccctatggcgtcggttattgggtattaaccgacgccataggtgccacctttattcgacacatggcacctatggtgtcagttaatacccaataactgacgccatagggttatatatcagaccctttgtgcttcttcctcacttcctcatttcacaccttgttgaacacgaagaacagccacccacagcagccccaaacccacgaaaaaaccctcgccaaccaccactaaaacaacctcattctccctcatttcttaaccattttaccccatttttgtcttaaaatcttctattttctataccttaacttatactgtaaaaaagtttagcttttttcccctctatataccaaaccgaacctattataaagaaaggtggtgggtataactccggccaccgattttagcggagaaaacgttgagtctcaacgtccattaaggtataaatatgcattctatacattttatttatgtacattggtattatttcgtttttgtaaatttt

SEQ ID NO: 350964 - DNA, 421 bp, Cannabis indica
gagtactgagtttatcaatacaactcttcccgtaaaagacaaattcccggaactccacactttaattcttgaagtcatcttctcaactagcacagaacattcagccgaagatattctcttagcacaaattgggactccgaggtatttaaagggtacaatgctcctttgaaaacctaaagcatcaatgattctctttatttcactttctaccatcccactacagtaaatggctgtcttctgttgattagggtggaggcctgaggtcattgagaacaacttgaggcctttgagcatcaagtaaatactcttgtaatcacccctgcaaaaaagaagaacatcatccgcaaagctcaagtcgttaattctcaatttgccacatctttcatggaaatgaaagtcttctttatctccaattgttttc

SEQ ID NO: 350965 - DNA, 790 bp, Cannabis indica
tccgaacctacatcctcccccccccccccacaaccctagcgtcgaacacggtctttgacccgaacccgaatccaagtcagaacacacttttattttctgtttttaaaattgaaaaataaaagtggttacaaaacacatttttgtttttacaaaaacaaaaattttaaaaacaaaaattttactttcattttgtgattaaataaaataaaaaataaaagtgttaccaaacggtaccttagttagtataatttatttaccagtaagtttagttacaatttagttaattaaatatattaaaaactaattgattatttatttaatattgctcttttaaggtgaaaaaaaatatatttctcaaatattaaaatgttctttttaaagttataaaagtaaaattcatttcaaataaaaaagttataaaagtaatttttttttaaaaaaaaaacagaaaaaaaaagttcttcactaatattaacgtacacaaataataaaacctctcaacatattaaataaaaagataaatatcattttggactttgtattttgtaaaagttactaattagactctctgttttgttaaataaaaaaatagaccttatacttttcaaaataatgaaaataggatactgagctcaatttttaataattttactttttaataaaaccaactttaagataatttctaacacgaaaagataccgaaaatgtaaccagtgttgttataacatctttagattggattattactaagttttattttgataaaaatcagtttagggtcctatttgta

SEQ ID NO: 350966 - DNA, 947 bp, Cannabis indica
atggcaacaaacatggtgagtagtaccactatctagaatccaagatgtaggagaaaaaggattgattttaccagtcatgttgttgactgctggttggtctgatgttgaggcatcagtagtaggttggagttgttgggtcagcatggaaattagttgctggcattgtgcttgagtcaactgggagtcagttgttgaaacttgatgagtttgaggacgagatgtggaaccagaatctggtttcttgtgattgttggagtcagatcttggttttccatatccaggtggaaagccatggaggaaataaaacttgtccttgtaatgccctggtttttggccatgagtacagtgagggcgaggccgtttgttcttggatgtttgatttgcagctggatcagtgctaagtgtggatgttgtggctgttgtagcagcaatgggagggatgttgtgattacccaaagttctttgtctttcttggtggatcaccatagaaaagactttgttcaagggtggacatggatcaataagcaaaatttggtctctaacagcatgataagattcatgcagacctttgagacattgcaaaacttgatcatgatttatgggatcatggttttgtgcagcagcagcacaaacacatggtattcttggcctgagttgattaatctcatcccaaatagccgtgagtttagtgaagtaagcactaacagattcatcaccttgatgaagataaagaagagattcattgagttcaaagattctagggccattaccttgattgaatcggttgttgagtacggtccacatctctgctgctgtgtcgaggtacatgatacttgttttgatttctggagaaaccgagtgaatgatccacgacataaccatttgattgcatctgttccaggagctgtaaagagaatcatgtggaggaggttgaggtaaagatccat

SEQ ID NO: 350967 - DNA, 583 bp, Cannabis indica
ttttttttttttggaaaaattttacaatttttttaggcactaatgacgctgataaaagacataaccactatgccaaattctcttttgtggtatgtcctattttttagggttgagatgcaaaatggccctaaatttggtaactaagttagtaaatgtccacttttttaaaaaaattaaggaaatggccaaatctaataaaatagctaataaaaattataaaaatatatttatcacatatttttttaaaaaattatataataataaaattaagttacataattttttagtattgcatattattatattataacaaaaataaataaatatattagatcatttaaatatatacagctgtattagatatatcgtagtacagaaaattaatataccgtagttttaaaattatataccacaaagaaattataacaatactaaatgaatacttaaaaaatatatatatcatgctaacaaaattatatgtaccaccattaaaatatgaatacataccaaaaaattaatttatatataataaaatagaaactaaatatcatattaaataaataatatattatagacaacaaaa

SEQ ID NO: 350968 - DNA, 883 bp, Cannabis indica
taatttttttattattattattagagatttttctactattttgttgtataataatttaattaaaaaaatatatttaatttttctaataattttttttactgggggctcacaccacaacaagtgtgtctatgagttaattttatttgggtatgtattttattcacttttatatttataagattaatatataattatattaacataatttaattattattatttgtttttttttttcaaaaaaggacaaatccattgcataatacatatgtatatagtgtcataatagggtttgctaaaattaaattattaatattacattgaatatgtatatatataggagtagtttatcaacaaagttttttttattagatatagttccaaaaagaaacaattaattaagtttatacctaagtccaaatgcatgcaaatatattaacattgcaaatgcaaatatatataaatataaaatttttataaattgtgtaatagtacaagacacttaaaataaatttaaataattggtattattattaattagaaagattaataagtgatgtaaaacaaaacaaaacagagaatcatttgtacactatgaattccactttgatgtgtctgtttttcattttaatttttaacactccttttaatgttataattaattattattaatttttatttttattatatctttaagtacactttaatttttttctttctgtgtgctcttgaattaaaacagggattaatttagaagctagttaaagataaaaagcagttggcataaaataaggaaacttcttaaagataaaaaaaaaataaaattataatatatattatttatatatataaaaaagccttaagtagtgggaataataaataggta

SEQ ID NO: 350969 - DNA, 929 bp, Cannabis indica
tttttattgcataaattttagatttttatgttatgtttggcttttgagaatgtttttatatcattatttatagattatagatctattacttatcatgttaaatatatattttgaaaaatataattaaaaacttagtaaaaatagtacaattacttaaaaaaatatgaatcattataaatttcacttaaaccgtagtttcgaaccaaactaaaccgttcttaagggtttggtttgagaaattttttggtctggtttggtttctgaaattcaaaaaaccgttatactggtttggttcaaaaactataaaaatccggaccaaaccaatccgtgaacacccctagatccaagaaaaaaaggcgatgtatggtcatttcttaaaagtttattaagtggtgtagcatcttcttcactaggcatgatggtgatcatttatgtatcttagtcgtgtggctgctctgataccatgaaagaatagtaattagctagtctctttgtattgatatgaccatatgatatatatagaaagaatagaagacattcatacctttctaaacttacgccctctttaatagctagcctaaacacaagccttaatatcagaatattaaacagttttatattcctaaaatacatgatatgagaatatatgaaaatatataagaatatcctaataagtagaattttgagtttcttttattatatttttattataatgctatattaattttgtaatagcgtgtaattataataaccattacattagttttttattgtaatgagtattaccttaaaataattttaaccatattctctaaacacatttcttaattaaaatagagagagggattttgatttgtttttgctaaacttcttacatatcaatatatcaatatatatatatatatatatatatatatataaaagaggaa

SEQ ID NO: 350970 - DNA, 503 bp, Cannabis indica
tcgtcaataaacacaatcacacatttgtttaggtaatcctagaacatctaattcatataattcatatcagatatagtacgcagccttggccggtcattcaccctgatggtgttcttgcattttggatattccagataagatctgaaagaggatctgtaaccttgacagccaccttggtttccccaaagctttctaatactccttgatgttccagaagcttttgccttccgtttgtgatcagggttaccactgtcgctccccttactgatattaccactagcaggagggttcgatgccatggcggcatcctttacaatctactcctttattacatgttgctcagcctcctcaaaaattaaggctagttcgaccactttcctatataaagtatcatgagcagtggtaatcatcacgtctgactgattgtggcattcaatcctcacagcaatgttataaatttttcctcaaatagactcttcaactttttccaagttatcatactt

SEQ ID NO: 350971 - DNA, 1353 bp, Cannabis indica
ttgtataactaattggacacctgttttttatgtaaagggatgatccactgtgaaatgagacctacgaaactcttgctgcagtggactaagcagaccgtgatctgactgaaccactataatcctctgtcttatttttatttccagtcttctgttaagcatttcccattcccagttcgagtactcgccactgtaggttgaatactcgcaattgttcttcatataattttcttcttgtcattaataatatcatatacatttggtgttgcaaattttgttcgacaacacacgagaatcgataacttgggggcttctggtccaaagagaaaggacggaattaaggaaccgtcgaaggatagagagaaacaaaagaagcatgaaaaatacgtgccagtgtatactatttttaccgagcttaatgaaacctgggagaatatttacctcgcacatgagcagaaggtggccttcggcaaacccgagcctatgagaaattcgaggagcaaaagggatcctaacaaatattgtaaattccataaggatattggacatacgaccgacgaatgtcgccaattgaaagacgagatcgaaagtctcatcgctcgaggccattttaaagagtacgtgaaaagacagggctagggatacaaccagcccagtctgcccaataacccaaacaaccaggggttacaacctattcctatggaaggagaggacatcctggttatttcgggagggccacatatcgcaggggaaagcaataatgcccagaaaagatatgtgaaagagataaagaacgagcagtcgatctttgccccagaaccttccaagaaggtgaaaactgaggaacctcccattacattcacggaggaagatgagaaaaatgtgagatatcctcacgtggatccattggtgataaccactcaactcgctaataaaaggactaagagagtattaatagacaatggaagcttggtaaatatcctttataaggagactttaaagaaaatagggcttgaaaaagccaagctaagaccttgtatgtgaacctttacggattcaccggagacagcatcgctagccttggcataatcaagctcgcattaactttaggcgaggcacctctatctgctactattaggcaagacttcttagtcatcgacctgccctcgacttacaacatagtcatccagcactgatcggactaggggcaatcagttcgatcaagtacctatatatttttgaaatttcaaatgctagaaggcgtgggagttgtgcgtggcgactagatgctggctcgcgattgctatcgcatagagctgcagcatagaaaagtcggtcattagttgatgacgatct

SEQ ID NO: 350972 - DNA, 553 bp, Cannabis indica
ttttctttttcttcatttcttcactatcttcggcgtcaggactccaccgcctcctgcttctcaattttttcacctacgctgcttctccaagtcttttttttttgaagaaaagcgaagcaatatatattataatgatgaaaacagttagacctcgcggtcattacataataggtcgaccggtattgaggaaaccggaataacaccaaatgtcttgtgggtgaacgcccacttggccacgttatgggccgcaaaattacaggttcggctaacataagaaaaaacacaactagaaaataaaggagaagatctattacaaaaggagatgtagttctcaagcgcccattgagactccttcccagtaagagcattgatcaccacactcgaatcattctccacaataataaaattagccttaagatccaaagctgtttcaaccgccaagcagcaagctgctgcttcgccacacaacacatcaacgaagtctagcctggcaatttgttgctatatttttaaacgctacgcaagtatacgcaatcaagtagtaaatctcaca

SEQ ID NO: 350973 - DNA, 1619 bp, Cannabis indica
gttatttatgttgttgtcgtgacataggacccgggatcgttaagctttgattccacctaggtcagcatgtacgctaaatttctggactgaggtaagaaaatattacataccgtatatgtttaacgttataactgttatagtctcaattatgatcgaaattctggtatgtgtatattatgagttaatcttaatcgaggataacgatatgcattggttgtgactcgattatgatcaagggaaatgataggaaacgattattatcgttgtgactcgattatgatcgagggaaatgataggaatcgattattatcgttgtgactcgattatgatcgggggaaaaatgataggaaacaattatcatcgttatgactcgattataatcgagggtaatgatatgaaacgattattatcgttgtaactcgattatgatcgagtaaaagaaacggtcattaccgttatgagtaattactcctgaaatcgtggataggtttcttacttatcgtttgctgtatcgggcaacgatagtgacatatgtagctcgtggttaacgagtggtaagagtactttatgaagtaccgaaattgtgtggttatgatgttgtgaaatgaatcaagagtgttattatgtgataagttgtaattgagtaaatttttttatagtatgattaaatgaatgttatattgcttgtgaagttgaccacttttcttgtaatctcagtggtttagggatgtaagaatacatgattataatgatccatgattagagtgctttatgaagctctgaaattgaatgtatacgctaatgtgtgaactagagtgctttatgaagcattgaaagtaagtgtttacaatactatatgattagggtgttttatgaaacactgaggttgttgattatgtataactataaacattcttaattttgtatcaagtttgctcgtatagatgttgaattgtatatgtatgttgaaagaaagtgatctcttggtatgtataatctgtgatactataatttgctatcattttccatgatttgttttatctagtagcttttcttgctgagtcactgtgactcacgggtgcttcttggtacaggtaagaagattaacaattttgttcggccatgggtcagaggtctcccagcaatgtacatattaaccccttttctatgattgaacgtataacctattcttgtactaatggatttgtaattagttataaaagaattttattaagcagggtatccccatattacgacagtattttaaaatgaaagttttatgttgaatttaattaaaggttttaattaaaccacacttttccataatttatagattagtaataataagtttataaaagcacacatgtggcgtcactgatagtcagggcgttacaatttaattcttgtatttaatacatttaattaaatttaaaaataaatatttaagttgatttcattcttgattcttaaatattattattttcatgatatttaattaaatagaaaattattttaagtttgaaatcttattttggacaacttaaatttgaataattttcaaaatatattttattagtcattcgaaattgcatttcttaaatgcagaaaattttgaattt

SEQ ID NO: 350974 - DNA, 689 bp, Cannabis indica
actttagaaactcaaaccgtaaattttaaaaaaaatattttcattattttcatgtcaacctgggcactggggtcttatgttggctcccaaaggatcttgtttgctccttaagatcacttgtattttcattatttctaaaaatgaaaaagatgctcgaaacacttttcgggaaaaatgtccatgccaacttgggtgttgggtcccaattctggctcttagattactctgtttgttcctcaaaagcacccaaattttaaatattgacaaaaatagagaatattatagaaagacttcttctgaactatcgatggaaatggccaagttgagaaagtgtctacctgggcactgggtccccgttttgacctccaggctgtttctttctcaaaagcacgtgattcttcattttgaatggagacaaataaaatactcaagatacttctttaatattttgattagaagtgccccaatttgagaatatgtcaacctgggcgttgggtgcactaggtgcccggggcacctagtggctttggtgctaaaaaatgtcagtgtttcgattttaattcgagtgcctcaaatatattcgtgataggtcttattcatttcaaagtataaattttgaaccattttcactaagacgaaccgaaaaactaaaaccatagttgggatgtcaacctgggcgctaggtgaaa

SEQ ID NO: 350975 - DNA, 990 bp, Cannabis indica
gtaagaaaagcataacataacaacatactaatatcctgggttataatgacgcgcccatacacctaaccataaacctaactgagtcagaacgtctgatatgattaaccgcaaatccagcctatactcagtactctaatcgtactgatgtggtagcagttaactcatattatctgatatcctagcatatatctgttggcatctcggtgcaactctatgtacaccgcactgttgccctaatatgctaatatgagggctatagatttgcctattctgaaggcaactaacatgtatgctaaagatgtataatatatgcataacattatactaatcttaccttaattctgaattcaggtgtgccgaccaacctgagtggaacaactgctcggcgaattacaggctcctaaatcacatcaatcataccataggtaagtgacacgctaaatcacttttcggggaattaaacttgaaactaaaagtttccctatcgatgaataacatggcaataccctaaacatcacaaaaatgggacaaactagggttcccaaaactgccccaaccggtagaccggttcccaaccggaattccggttctgtggggtttcttggggaccaaccggaattctggttcctacaggtccctctgaaccagaatttcggttcagtgcaaaaatccaaccaaaattcataactcacccaattcaaccccaaactcaaagaaaccttccagacttgctatttagacctcaaagaacaatatcaaagcaacaaaacacttccataagctcagaaaatatgccattaaagagccaagcttgagttctaaaactcaaagcttgctcaaacatcaaagcagccatcacaacaagcctaaaacaaaatatctaagcataatttatccactgaaaacaataacaaatactagcagcaactacaacaacccaaatctcaaatcatacaaactttcacttccttataattcaagaaactaaaa

SEQ ID NO: 350976 - DNA, 609 bp, Cannabis indica
ttaaatggttagaattggaaaaatggcatttttagagatatagaaataaaattgaggaaactgcaaaatccaagtgaggcccatatcacaccatggccggccacctctttgcatgtttcccaattattattttcaattttaattgccatgtattttctaatcaaagcatagcaataataggaaagtggtggatcacactaaatgaggcagttaatcaattacacagtaaaagaggtcactatttatttaaaaagttgagctcttcccttttcctatttatagccgccgcctctcttctcttgataagattttgtatgtctttgaatgcctttgtatcacacgaaatcaagagagaaatagagagaaaattttgagattccttgtgagagagaagtgcccacacacatcattcagtacctcaatcatagtttggaagactgtgaaggatcacatccaactgaaggacattcaggctcagatcttgattatactctgctacagacaggaatcaaggattagagatctgagtggaaggagacacttaattccgctgccatcactgtaagttattctcaacttttatgtgttttgtttatcgttttagaagtt

SEQ ID NO: 350977 - DNA, 811 bp, Cannabis indica
tctttcgctgttaattttagctttttgatactaatgttttgtgttttaatcataaaaattattggtttgccaaatagagtcataaatttaatctagtggtattcagtccaattccctatggttcgacctcacctttgtgagtttactacttgaatacgtgcacttgcgtattattcataattttcgtaacaagtgtttggcactgttgctggggaattgtttaaagattgatattgcataagattacattaaattctactttggttactttttcttgctgattgctaacctttttctttcaacattgtcttagtctatttcaggaatttaaggtgtatgcgacgacaaggacagagtattagactaccggttgatcctaaaatttagaaaacttgtagaagaaatagaagaaacaaaaggcacaaaagagtttcagtaacagctggaacagaagaaatcatggctgataatgctaatggcggcaacaacggtaataacagaggtgccgttgaagatcaggcaaatggtcgtagtctaagagactacattcttccaactctgatgggggtccagtcttgtataagaccacccaccgtagatgccaacaacttcgaaataaagactgccatactccaaatggtgcagtcttcagtccaatttggtggactcccctctgaagaccccaatttgcacttgtctaatttcatggagttatgcagactttcaaggtaaatggagtcagtgatgatgccatccgcttaagacttttcccattaaaattggttgatctccttgccaccgaactctattg

SEQ ID NO: 350978 - DNA, 766 bp, Cannabis indica
ccaagttctttcctccagcaaagcctactaagctgggaggagaatttaataatttctgtcagctggacaatgaatctcttcatgaggcttgggagaggttcaaggatctcatcaagatatgtccacatcatggtattgaaaagtggattttggtccataacttctacaacggactgattggtaataccagaatgattatagatgccgcagctggtggggcatttatgagaaaaagtacaaacgaagcttatgatttgctagaagaaatagccatgaataataatggcaacctaaaagaagtcaaacgaagaaggtggctggtattcatgaggtagatgccatcaccaaactgacagcccaagtagaggccctcacaaaactgatagttgttcaggcaaaacaggctcaagttatttgtgagctttgtgggggccctcacacctatgatgaatgcccgatagatgtgaataatttgccaatggatgaagcaaaagccatcgggaattactctcaaaataacaactttgggtacaatcaaagtaatacccggaattaagaaaaaggattagcaaaaccctaattagataattacgaataattaaggaattatattattatatagttcaatatatttgaaattaaatgaaatttaacatgttaagaccccgttggtgagctaggggtattttggtaattatgacccgagagggttaaattgatgaaactaatttaattacgtgcttaatagaactatattattatatag

SEQ ID NO: 350979 - DNA, 727 bp, Cannabis indica
agaggagggaggaggatggtccaccagtgtgcgactcagagagagagatagagagaatcgttaacgattgggcagcgagtcgagttcgaaaggaagagaggggatgggaggtcaacaatggagaataagataggggagtagaggtcaagaatggagagggagagaggggagcggggtcgacgatggaggatcgacaatttcgcccatcgccagagatctttcttcttccaaatgttgaagacaaatgtgaacagtagtaggatcgatattgggaatttagggatttagaagtggttcgcgtcggcttgtaactttcaaaatttttttctctgtcagttgttaaagctcacatagcttttatttgactacaatgaacagacgggaatatgatttccatttttcatttttgttgctttcattcgtcggttgtatttgtagcgtctttttagtaaacgacgcaaatcaatatgctttaacgtcattttgtaattgacactcatattttttggacactatttacgtcggtcaacgccatgaacagtagcgttgaccgacgtgaatagtaatttttgtagtagtgaaatgaaattttaatcttaccttgatctgtttggttataaaccaaagatagatttgttgggttttgtgccctaaataaaatccattacaatctggttagttatcaatataagaaatttgaagtgatttatgtttgcatgaattttac

SEQ ID NO: 350980 - DNA, 1446 bp, Cannabis indica
  modified_base (42)..(42): a, c, t, g, unknown or other
gcttaattttttctaattcaaaccttacttgaatcgcataancttttagaatatcagcaaagtggcgatagtcttaaaaatctcaagaatagcctaagcactattttaccatcttgataaatttgatcagaatggggaaatggaatgttacagtttggatccactccctctctttttatcctcttcaagttcatatgtctaccttcatcactatcataatagtctccatgagcatcctcatcactatttgtcagtgataccatttcatactcagtactatcatcttcttcactatagtgttttccttgtttctattctaaatcactatcattagtgggtgatgatagttcttcatgtgatatactcgcagaacaaattgtatgcatgtagctagaacctgggcctgtaaagttagtaagggttttttttttttttttttttgagaaaactgtaagttagaagttgaacatgcaaatttcttaattaattgtaatcaacattccaaaaaataaaaataaaatgccatccattattttttctcatatgatatatgtatatgaaaatataaaatatatttagctatatactacagtcgtgtatcatttcaatttgtcatttatgaaacttaaagttatttcttagtaaagtccataaactaaaaaagttgataccttcacaacttaattaataatttatgatgatcacgcctaaataattggtaccatccatataatattcaacatatcaagctaatctaaataattcatacaatcactaattgcacacacaatattacaccaaaacacattacctgtagggtcattgaacattagagtatgatactcaattagttgagatgaggttgtagattcataaatatttgtggctgcaatatttggggcagttgctgcatcaagagactcatttttattttcttctttattttcaacatccttatcatttagattccatgtttgaggaggacaacaagatattctagcaagcttcttccttctactaggacttagagtagctactacaggggtaggagtacttatatcagctactacaagagcatggctactcatttttaacctgtgttaatagagaagaaaaataaaacaaaacatatatcaatatatatagtgttcatcaataatttcaaaaacattattcaaacctcttaaatattcgatgtaaacccacacaaaactagtaaaataacaatgaccaaataacaatagattccaatacattataatcaaataaaaatcaaaacttgaagagtgcacagcaaggcaaagagtttcaacatccaaaaaaacttgaaatacaacgataataatattcaaaaatcaatttttttgccacacccactaaagaaagtaccaatacaacacaaagtttaatctgtaatacattattatcaaataaaaatcaaaactt

SEQ ID NO: 350981 - DNA, 744 bp, Cannabis indica
gaaccctaacccgacatcatactcgaacccaggaaccgaacttagagccagacccttaactagactcgaatttgaacccaaacgcaaaatgggatcaaaactcgggacatggacccacatacagatcgagctcggaactagggacttggacccagacctggacctggacccagacccgaacctggacccaaacaggggacccaaacccagacctgtacccagactcggacccaaacagagacctggacccggacccagaccttcacagtgatccaaacctggacccgaaatcagaccaagacccacacttagacccaaactcaaaataaaacctagaccagaacccagacagggacccaaacccagacccagacttggacccaaaccttgaatagaattggggcgcagacctagaaataggacaagggcctgggcgacaatattgagaccgagacccagaacctgacccaaaccccgaccatgatctaggacccagcttaggactcggcacctaaactggaacaagagtaggagctgagatcgggatccgaatttggactcgaggcttcgaaccgacctgttgtctatgtttggatctaagacccgagccaaaacccgaactcgcacttggaatcaaacccagacaagcacccaaacccgaaattggaaccggagccataagctaagactcacacccagacccaaacctagaccgataccaggacctggacctggaccttgaac

SEQ ID NO: 350982 - DNA, 631 bp, Cannabis indica
ggtcacgatgccttaaaggtcttaaggccacatataatatatatataaacatgagataaaaagagaagtgttcaaacagctggagtcccaggctcttggttcggttcttctgagccaactggagcaggaggatctgttgttcgagcaggagaagcatcagcagcctagtcagaagcttggtcagaagttgaagcagccacctctttcccaccataggcaacttgggccgcacagtactcgaggtacatgtccttagcgtcgcccaagtagtcaatattggcccggggattagccttccagaaatcaaagaagaactcgaggccgacagtctctaaagcattgaccttctccttcaaacgatccgcctcggtcacctgggcgtccttatcctcctttagccgaagaagaacttgccgcagagaactcctctcatcctgaaggcggtcaacttcagcaaataaggtctcgatggtttcctcaaagcgatcagcaacctcgaggtcctttgttagcatggagataatcttctcagcggtaaatatcttcttgttggcctcacccaactcatgtcggacagctccagtctccgccctgacctcctcagctatcttctttgccaagtccacttccg

SEQ ID NO: 350983 - DNA, 677 bp, Cannabis indica
gggttaggcagtgttcttatgtagtcagggaaagtgattgcttatgtatccaagcaactgaaagagtatgaacagcggtatcctacacatgatattgagttggtagcagtcgtttttgcattgaaagtcttgcgtcattatctttatggcaaaaagtgcgagatctacaccgatcataaaagccttaaatattttttcacgcagaaagacttaaatatgaggcaacaacgatggttagaactagtcaaagattatgaatgtgagattctctaccatcctagaaaagaaaatatggtagcagatgctctaagtcgaaagggcccagggcaaatttgtgaatcaaagaagattttagcagagctggctgaagatatgactagagtaggaattgaatttgtggtcagaaaacatgctaacattaccctacaatatgatctgttggaaagaattagagcgacccaacaaagtgattctgagttacaggggcacaaggagaagttagaggtcggatcggcaaaagacttttcaatttcatctgatgggttattacgatacaagaatagaatttgtgtactggccgataagagtatcagacaggagattcttgatgagtctcatactacaccgtactccttacactcggggacaaccaaaatatatcatgatgtgaaagcttt

SEQ ID NO: 350984 - DNA, 771 bp, Cannabis indica
aaaaaaaaaaaaaaaatcctacaattctagaggattcatttatcttttcaaacactatttatagaacattttaggctgtgaatttcaaaatcctagagctacaaaattgagatataaacttagagagagagcaaggaagagatggagatcgcgacttcgaattgttcttcatcatagtcttttcttctccttaaactcttactatttattattattatcgttataatgtctaattctaagtaatttcattttagtaaaggttatttcaaaacccgagacatgaattcttaattctattattgaatgttaatttttaattttcattatatatcaaattgtttctattcttctacgttatgattattgttttaattttatttagacgaccgctaaattagattttactttaatatatcatcatcttaggattactattcacctaatagtctaggattctaagtgtttgtgataaattgcaatttttactattggcaaaggtattttaattgtgatgaagaatataacttaggttaaataaattaggctaattaggatttttgcccctgaactttgacatgtaccaaataatgccccctgaacttttaaggtcattgaaaatgccccctgaactattgagattgttggatttaaggacttttttctaattttagtaaaaaagtctaaaatggatgaaagttgagggagcataatttagtgcatgtcaaagttcgaagggcatgatttggtagatatcaaagtctgaggaacatg

SEQ ID NO: 350985 - DNA, 577 bp, Cannabis indica
cacgctacagtgcttttcaaatacagtgcaaactttgctaatcaaagaattttcttgaaaattgtgtcaaattaaaacttttatattaaatattcaactttatattatatcaaaatatttacaaaagcagggatccaattttcaaacttctaaacataatataccaaaatacatattattcaggtcacacagtaactacaaaatacaattcccaaatgtcctgagaccgaacactaaagttcgcgctgctttgacatgtacaactcatccgagctcaggttcagtcatgttacgctttcacctttcctttacctacacatggaagcagaactctgagtcaatagactcagtaagaaaagcatataacatatcatataatttttgacttgtatctaggcacccatacacctatttacaaggctcaacagatgagtaagaacgttccataccagggtatagccactataccacatacactacgtacctctttgtacgagtgttggtagggtttgtttcataccctgagtacctctgagtgatgtaccacacacactcattacctctccgtacttatgct

SEQ ID NO: 350986 - DNA, 550 bp, Cannabis indica
gagtccttgagtgatgtaccacacacactcattacctctccgtacttatgctggcatcacggtactcccagataacaatcactataccattacactctataccttaaccctataggtgttggtagtgcaactaacattttaagaatgcatatacacataacatatacatacactcagttcttgatatcacacattatattcagtcttaccttctttccgaattcaagtgtgctggccgacctgaacggaaagtctcgtgctagatggatgccctaaccacttatgaaaccgggtaagttacatgatcaaaaaccctaatcccgagaaacccgaaccaaaaatcctaggttctattatactctatataggttacacaaattcaggaattagggaaacacccaaccacggcactaaaatggacgaaaatcaagaaaatgaagtgtttgggggatcctgccctagccggttttagaggtctggcaaaatcggctagccggtttgcaccagttcaccccaaacccttcacctcctgctcaattttccaccaaat

SEQ ID NO: 350987 - DNA, 561 bp, Cannabis indica
aaaattaattgtaatttagagtatttattaagatttgttgttttgttaaaataaataattacactgtaattatataatttaattgagttaaaagaatttgaattacacttttcaattttcattctcctatacaaataaagtctaacacaatatttactaaagcatatatatatttatatatatgttgggtaaatattattttggaccatgtgttttgcaaaagttactaattggaccctctgttttgttaaatgataaaatagagcgtgtattttttaaaatggtacaaatagaaccctgaactgatttcttgtcaaaataaaatttaggctaattaggatttttgccccctgaactttgacatgtaccaaatcatgccccctgaacttttaagattgttaaaaattccccctgaactattgagattgttggatttaaagatttttttttttccaattttagtgaaaaagtctaacatggatgaaagttcaggggccatgatttagtacatgtcaaagttcgagggacatgatttggtagatatcaaagtctggagagcat

SEQ ID NO: 350988 - DNA, 608 bp, Cannabis indica
ttatatatagatatattattaatgatcactagaagtaatatacggtaataacattaattttaaatgtattagtaactacaagtggaatatgataattacaattattttgaaattatataatgagttttctataaatttattacgtattattaaaatatctgttgaattttgtgtgagttttctataaatttaataataatgtacgttttaataataataatgtacatttttaataatgttatatatattattatactacaagtggaatacggtaactatagctattttgtgtgagtactatttaatttttaatgataatgtacatttaaaaatattttttgtgtgctaaattacataaattattacttttggtaaaatacttatatttatattcaattacatatatatatttatggtattctgtaaaaacacaagaaaactacatgaaaataacaaaacaacatcattacaacaacaatacatcatcaaaataacataaaaaataatatacaaataacaaaaaatcaacaacaaaataataagagtataaaaatacatcaaatgaccgtattttatgtaaatgaaatcttaaaaactgtaaaaaaata

SEQ ID NO: 350989 - DNA, 627 bp, Cannabis indica
aaaaaaaaatgaaatttttttaacatgtgtatattttagaagatatgtatacttagatattgtcgtacttctaaatattttatagtaaatgcctaaaggactatggtaccatgtagctcaatatctccattttaagaaataattaatttacactattgaaatagttaatggtaagggcggtcaaaaaatattcaattcatacaatttaattcaatttagtttgttaagtgcatattggattgaaaattgtatcagatattgattgacattttgaagtaatcaatccaattcaatttatacaaatttatatatattttaaaaaaatatataaatatatacaattaaaattttaatgtaaaaaaataataatataaaaatcttatatatatatcataaatatattttacaatctaataaattaaatgtacattccattcttatatataagaaaaatataatctaaaataaaattaaatatttttttaacatacaattttttatcttcttcctttgaatttgttattttaatttattgttagaaacataaaataacaatattttattttattttatcgctaattatgtcaaaaaaaaaaatacttttaataaaaattaaataattcaata

SEQ ID NO: 350990 - DNA, 1073 bp, Cannabis indica
agtcatcagtccatgaagcagccagagtgacatactcgtgtataagagccattcattccgtgggtgtaaggacccaatggaggcttgaagcggggacgttacactttaagttgtctaatgagcagtgtccaaagtctgaagcagagagagaatacataaaggggattaccatatgcaatggttgttcgctgccttatgtatatcatggtcatcactccctaagtgtattgagctgatttatggcaaatccaggggatacttgaaatgaacaataaagtatggcttaatctaccaaagggactcatcaaatttgagattagaaggctatgtcgatgcagagtatgcatcaaacagggacattagaagatctactacaacatatgttagggattattttaccaggatctagatgtactaacaagtatgttgtttaacatcctaaatatgaattatctaacacaatagaatttaaacacatgtaaagtttcaaaaagtcatacattgattgcagcagaataatatgtctccttccactcagatctctaacccttgttcctttctgttgcagagtattatcaagatctgagcccgattctccttcaagtgttagatttttcacagtcttacacactatgattgagttctaaacttgctatggctgggcatgtactctttcactattaggctcgaaaatatgaagaagaaaaggaggatattcaaattctataaaggaggttctcaagtttttctagttgtctgacagagaatgaaaactaggtaaacttaagttgggttggatagaataagaatcatcttatttcttttataggatttctcctatattagatttaaactatatgacattaaaaaaaatgataaataattggctaaaaataccttaagtggccgaccataagatgggccccaatagttagatttttgtcattttattcaacaatgtatcttttctttcacaaatgttatattttccaatttcaatcatttaaatttcaaaactatttatttaataattaaaattaattatcaataaaatttccatttaacttatttat

SEQ ID NO: 350991 - DNA, 1142 bp, Cannabis indica
ctaataagcacttatcctatgcttgtcaaatccaattaatccaatctactttgattggattaaggaattattggatgagagtgtttcttttacctcaaagtgtgataaaagagattgagaaattatgcagggaattcctttagggtttgaaagataactgaactagagttcatttgacaagttgggagagggtgtgccttccaaaagcttatggtggtcttgggtttaaggatagaacaaagtggaacaaagcttctttagctaaatttatatgggacttgatgaataaaaaagccttgctttgggttaagtggattaaatcggtttatctcaaatggagtgatttctggtcttataagttgagtatggatatgagctgatattggaggaagctttgtaggttgcttataacttacaacaaggttgatatcgtagcagcaggtggagagaaattcaaagtcgtcaatctatatcgcagaatgttgcactaggttgcagaatcagctgctggtgtgatttggtgcggcttgaacatgccgaaacatgcttttcagctttggcaagcagcttagtccaagttactcacgagggatatgttgtgccgtttgaacgtaccaattctgaacaaaaactgtgtggtctgtgacaatgaaactgagagccacctccatattttttttcagctgcaacttgtctcaacaggtgctgatttctctcttccaatggctggggtttgaaggttggtcaaagaactatgatagctggattgtttgtcttggcaccacaaggtcgaacatcattgacagaattagagttttaatgttggctgccacgatttatcacatatggagaaaccaaaacaattgcttgttttcctattattccaatactattaattgtatagtgaacaaaattaaaagtgatgttaaatataggctcatcttgatgaaagataggaaagattcaagagaggagaagaatttacttcaaagattaatttataattattaggagcttttttttgttgcttctctttggagaagtatagcttgtttgtatttcgtgggttgattaatgaagttttcttcttcttgataaaaaaaaattaaaatttccatatttgactccattaaagatggtac

SEQ ID NO: 350992 - DNA, 697 bp, Cannabis indica
aaaaaataaagcttagagaccaacttactaaaacctatattggagcgtttggtataagatttagacttgatgagaatgaaaatataaaatttaaattaaattgaatgataaggggtttgtatttttaagttagtttcaccttttaaattaaaatggtggtaatgttaatctcctcaaatatatgagtttcatattccctctaagtctactccctccaactttattttctctaactcaaactcacataacaaacacctcattagctagcatttggttagaaagaatgaaagcatagctagaataagaatgacattctaatactttaaaataaaatcaaaaaaagaatagaataaaagttatttcctatctattctatttcattacctctaatcaaacactaccatataatttagcacctacggtacaaataaatctaaaaataagtataacttttgacaaccaattaatataagttaagggtgtactcttaatgggtattatccatgaattggtaaaattagaaaattttgagtttttatgcttaatttttctatctaattaaaaaaatctctcatttttatatcatatgggctgagattgttccatcggtaaaaaaaattaaaaaaaagttttttagcaagaaaaataagaaaagaaaaagttgagtttgagttaaatatttttatatgaacatatt

SEQ ID NO: 350993 - DNA, 539 bp, Cannabis indica
ataacaagaacgatatattatgtctcacctgattaaattaattaatctataagattgttattttttttttgtacaaataatgtatattaattgttgttccaatatatatataataatctacattaatgttgtttaattgtgtacaaattgaataatagcatttattttaagattgaaatacaaggtgtgtttataataaattataaatttggtttctaatctaattatggatacataaagactttctttattatcgtgtagagatttgcaagaatttgtggtgtagagatctattttcatgattattaattggtcaaaaaaaccgacttaagtgacataatataatgaaaagaatctacatataatgtttgtcactttgtctagctaataaatccccataatttttatattaggtaaatattattttagaccttattatttttgttaaaagttataagaatggaccatttattttattaaatgacaaaattgttagggttataaaacacttaaagaaatatataaatcacagatctaaa

SEQ ID NO: 350994 - DNA, 491 bp, Cannabis indica
tggtttgatatttttaaaattaatatttatagttaaatttatttagtaaccattcatgggtaatacccactaagaagtgttccatatatatatatataaatgaaagtacaataaaagttagttggcatttcatatatttttttttttctatttttactaatttttgagccttttacattttgagaacaaaataatattcacaaatttgatataatatgatgtatgttttgaaaagaaccccacatgatttattatgaaccattttgagtgttatatttgtacgtataagtacaatatttctttttttattttcactacaacattcaacaacattagcggcggaccactccgctgctaataccctgtctcctggccgctaaagggtattaagcggcggacttcggccgctattggtccgccactaatgcttggccgctattaatagtattagcgggcaaaaaaaaaggtccgccgctaatactattaataga

SEQ ID NO: 350995 - DNA, 271 bp, Cannabis indica
ataatttaaaatattttatatatccgccgcaaagcgcgaaatatttactagttatgttatataataataagatatataaaatagatatatagatagatatataaatttttataaaatagtagaacattttaaaaaaacataaaataaattaaaaaaaaaagccaaaacgtaatgtgaataaaaagctagctaaaaaaaatgtaagtgattgaaaattaaaaaaattaataaataaaatattattcttggagagttatcatttttttttttg

SEQ ID NO: 350996 - DNA, 1560 bp, Cannabis indica
tattttatttgaatttctgtgataataaattaagcaatttggtttttacggaactctatttcgataaaaattggaaaatttatgaaagtttgaaactggggtgcacatgcctcaatcgcacgcacaccagtccttcagacaaggtgatacgcgcacggatgtttgggcaaatcgtgtctgaagacatgcgagttcacccgttcagacatgctgcactcgcccaagactctacatcacgccgagagacatcctgcaggtgccggggtttcccgcacatcagaggctgcaaatccctcttccgcgcgcgcgcatgggctactagcagcctgtctaggctgcacgtgcagcctcctgggtagccactcccccttgtgcgattttcatgggattttttcccaatttcgaatttttccaatttcaaaccctaaaaaccaaaataaaatattattttcaaaatatttaaacttaaatatcaattttaaattaataatatttatttttaatagattattattaatttttgatattttcaggtttaaatttaaaaattgattattttttttaattatggttagattttaaaaatttgttatttttcttcaatatttttatattatttaattataagatcagatattttaacatagggcatattttaaattaaaagatatctttatctttttaattttaaatattatattaaaattatattatatgataaattaaataattaataaatttgaaattaacctatatatttttatagatattctaaccataatattttcgaattcaaaaatttgttattttgttaaacatttaattgtttataaattataagttagaaaaatgatatttattctattttatatcatttcacctattagaaatttataaattgtattttaaatatttaaataacctagatatttttgtagttatttgaaaaatgcttaatttgagatattttgacataattaggataattattatttattcattattttattcataaaataatagtatctaaccatatccattttaaaatggatttattttgttattttaattttattagattataagattagaaaataatttttgaaaatatcttttttggttattttcaaatcatttagcttattaaatatttaatttaagttgataaaaataattcaaatgaacctagatattttaaattagtttcatttttgaattttaaattttgttgagataattaaggttgtttcaacaaccctaaattttcaaaataattgttagattaaataataatttaattatatagaactaaatatcttatttcacattttgttacatggacattgtttgtttatttaattgtttattcaaaacttttttttaacaaacctattatttatttgatctaaattgctatgattaacttgttgacagatccaatgatctgattttaatcatagtccaattgtcaatagatcctataaataatatgtaacaggtaaattttgtaattctttcatctgtgtaaaacctgaaaacatgatagggcccatccaaatc

SEQ ID NO: 350997 - DNA, 591 bp, Cannabis indica
ctattggctctcatgggagatccgagaaggcccagcgcagaggcaaagccacagccagacgccgtgtctccaggagatgagttcattcttcccaatgattacagacctaatgatgtggaagatgtactccatacacctcagaacatgtcgatcacgtccattggagatacccaagattcagaggtacaggttttagagaccgttccaacaccggtggagaagagaccgaagaaaaggtcaaggtggtttgacgagtacaccgaaatgaagaagaagatgaaggcatcgatagtcaatgtgaatgttgacctacttcggcccgttgatgagaagctacttcatagttttcgaaattggttagtgggaaccatcagaaacaagtatctgagggacgtcttcaccagtgcatatggcgtggcttggtcccaaaagctacttacggacaaagaatgactttctgatgatgtaagtttattaactaagtattatatgttgttacttactgctatttaccgttgtcatttgttttatttttttttaatgttgtaatgtggttgtgctgacttatttgtatgtgttgtgcagcatttg

SEQ ID NO: 350998 - DNA, 730 bp, Cannabis indica
aaggtgtaagtaaactttattgcctttgctaccttctgatgaaccagaatccctttcaaactttctctccacaatccaaagccccctattgatcttcttgagttcaaatctagatgagctactcatctttaaatcacgatcaatcttagatgagtctcggtctcttctttcggatcatgaacactaactctgatttgttagaaattctatctcaacaacaacatcaagactcatctaaaacacacacgaattgatcaaaaattcatagaaatcaaacaccaaaatagaattgaaattaatcaatcatgaataaaaaattaaattgaagagggagacaagatttatcttggttctggtcctaaaaatcaaatcgattcctaaccattaggggtgttcacaaagtatccgatccaatccaatccgcacgatccaatccaatccaatccgcaaaatgtggatatccgcacttgtgcggattggattggattgaaaaatctaaaatccgcacttgtgcggattggatgttgtttgacctcaaaaagtaaccgatccaatccaatccgcacttaaatatatatttttaaaaaattataatatgtaatatatattaattaaaaaaaaaaacacaaacttctaatttcttaatcttttttagtaatatattgagttggtgcattttatttattttgtaataaaaaaaacaagaaaaataattcttattcacatagac

SEQ ID NO: 350999 - DNA, 921 bp, Cannabis indica
agaacatggagtttgttctcttatcaagatattggaatggggagtacctccaaaagtactacaagtaacaagcttgtatgaacgctactcttcagtagtagttctattaactcattaataagagttagtttagaaagagctaagtctccatcactttttaacgatggcttctacttggcatgtcaggcaggggtagtcacttgacttatagaagtagactttttattttgtaagcttattgaactaataattgtatgttgcacatcaacaacacattttaaagactaattggtgaataaaaatgatgtttcagttcaaaaatattgtgtctaaaccacttgctaataagataacttcttaaatttattcattttttagttccacatgcggacactcggaagccctccgagaaaattccgaggcaaggtctatgaaacttggtaaattacaagtgaccaagagaccgtaagtctacatgctcacttagggggagcccacactgtacaagcatcaaactggcacaaagaacttatgcagagaaatttaaagcttggtatgagaaaaaaattgaaagctaagtcagggaaggcatactttacttgacataaaaaagtaaatctggatacttatatgtctaagcataagaagatagccaggattaaaagaccgcctggtcgatcatatgtccatagtaaaaggctttaacgctaaacaaaagtagtgttcaaaaacaaaaggcatataggccaaaagcaagaacatgaaagccttaaggccaagaataagtaatgttcaaaagtaaagggccaatgggccatacatgaacatgaatctgaaactaatatgaaataaaatcataaacataagatactaataaaatgtgtctactcatgtgcacgtgcaaggggagtcgagctgaga

SEQ ID NO: 351000 - DNA, 818 bp, Cannabis indica
ttagttttcctaccattatcaaagtaaaattacttttatgccctcacagttatatttatctcttacaccaattacccacaacaactcaaaaaaataaaaataaaattaacatctttaaaataaaaataattttcacaaaactaatatagatatatcatgatatttaagtaatttgtttctaatcgtttaaaattaatcaaaaaatatagattaaacattaaaagtatgaaaaatataacgtgacaaaatataattaagtacaaagtaatgtaaaatggttatatttttaccaaatttaaaataagaacatttacctatatactaactaagggtgtacgctagtttgtttggtcagtttatactacattttattcaacccaatataaagattaggttacaaaaatctaagtgcaacctgtccaattaagaaaaaagaaaatagtaacccgcccaatgaaattggtcggtttggtcatgttaacccatccaaaccgaccactaacatttttttttttttttatttttactatcaatgtacattttagttaattgtaataatgagacaataaatagatatattgaattttaaatttaaatcaaccaaaataaaaaacaaatattagtttcaactttatattttttaggaatatttgtagcataaatatcataagtttttggttttatacacttaaataccacatgtttgttttcgacggattaaaaatcttaatttatatttccgttacttctgtcactacttttctgttaaatcctatcaaacatagagtatttacggcataaatacttgatgttttaaa

SEQ ID NO: 351001 - DNA, 1097 bp, Cannabis indica
ttcagcaagattttaatgagacaacttttatggacatccaagggggagtattatgaaatattatttatggatgtccaaatcaccaaataaattatcaccattaatgcttggttgtattttcctttattacattgatttagtttcccattcttttagtcatgtttttgtatgaataggggttcaccccattgaaataaacacttgagaaagtcccattcactttctctttatttcttcatcatcttcttcttcttattttattcttatctattttatattattttataacaccaatattattttttaaatttgttactatcatttaaataatttttattttatttttaagttatttgttttataaaaattatttttcattaattacaatttatactagaatcagctaaatgtatatatgtatataataataataataataataataataataataataataataataatatagtgtattaaagtgagggtaatttgggaatattacaattttaaagggaaattttattttaccataaaattctaaggacacccgtttcaataattttattttatattatatttatatctttaattatactaatctttttttttttttaacttttttcttcctaattcatattcttaaaaattatatcgttcaaacaaaataaattatattttaaatattatgacaaaaaaattaaaataaaaaaaataaaaaatatatatgcatgagttaggaaaaaattatgaaaatgaaaatcaaaataagtattgaaattaagataaattaacgtgaggtaaattttttaaaaaatattaagaataattcttaaaattattttaagtttattattttttttaataataaagtgtatttatcattttataaggtgcattttaaatacacttaaggtactaattatgtaatttttttaaaaatagcaccgtttgattattatttaaaacaaaaggtaccaaatatatattgtaccaaataaatatttacttattaagctctcataacaaatattttggacacatctaggggtgttcataaaatagccgatccaatctaatccaatccgtaaagtgcg

SEQ ID NO: 351002 - DNA, 694 bp, Cannabis indica
aaaaaatattaatataaataatatttaaatttttatttttattttgttttaaaaaatttatatttatatttttattattaacaaacaacatcaacttaaattttttataaattacaattttttacaagtgataaaaatataatttaaaaatattataaattattttaattaaatacgtataaatttatactatcaagaaaaaataattaaaaaatatataaaaaaataataattttatataatatatttttatatatatatatttgtgattatagtgaactagattataacattatcattattataatagaatcttaacaattcgaccatgttaaaatttctaatttactaaacactcagctcaacttttttctacagttctgctacagctattttttctaccaacacaactacaactattttttcccacaacataattgtgcctgacccttaattccttaccaaaaatattgtgttacttaatttgtaatattttttacatatattttgatgaataaacctccaataaagagaatcaattaaaatcaaaatttgtacacatgggaagactctcttctttcgattaataatttaagatgaaattacaaattttatgaatttttatattttttgtgcaaaaatatacctctcttttttttttttcttttttcttttttcaaaaatgttattttat

SEQ ID NO: 351003 - DNA, 774 bp, Cannabis indica
aaaaaccagcatggccaaggaatgaccgaatgtctttcacagtctaaggggaagcaagtttagagatgaggtcaattttagatttgtcaacctcaatccctctttaagaaacaatgtaacctaagactattcctgaagatagcatgaaatggcatttttcccaattaagaacaagacctttctcgatgcatcgttttaaaacaccctcaagattgagaaggcatgcgccaaaatattttccaaagacggttaaatcatccatgtaaacttccatggtgttttcaatcgtgtcacaaaaaattctcatcatgcatctttggaaagtagctggtgcattacacaatccaaatggcatacgccggaaagcatatgttctgttatcccaaattttgcactctgacgtggcatcacgggaatggtgacacgtggagtccacttcgaacacctgctcgggaagataagccgagcaggatgccttgctggcatgtttagagtaaaatgttcagcgatccgtgcagagcaatcaacacttagcgaattcatctttctcatcatgagtcatcagctcaatccctataactcagggatcaagttacgtggatacggcatacacacgatcccactatcagtgtattcagcctcaatcccacgatccttgcattcagtagtgatcccacgatctttctatttatacacattgtaacgagagaggaaactcttcctcctcaagtttcccagccctataaatattgatgcatattcactgggcagggg

SEQ ID NO: 351004 - DNA, 541 bp, Cannabis indica
agtctccttagcacccctcaaaattttattgaaaacactccatcaaaagaaaaataatacaatgtaaattagctcttgctcattttggcatttgtaaaaattttctaatcgtcgaattctgatcttatatgtcgtcttctcaaatattgatattggtaataattttgtttaagcatgcatgattgacacttgattgaatatgttggacaccaatataatcattttttgaagattatgtagtaagaagaacttggtgaaaatatctttggttctatctcatttattatagtttgagttgagcaaaacattttgaaaatctgtattttaatatttccagttttattatttaattaaatgtttaattaaatacagaataatgaaactggtactgaaacagttgtactgtagctacagaagacaattctgtaactccagaataaaccagaaaaataaacaatgcaaaaaagtaaaaacacacaaggtttttgtacttggcttcaacaatcctttcagatggttactagtccacggggccacgccc

SEQ ID NO: 351005 - DNA, 1035 bp, Cannabis indica
taagctaaaaatattagtcacaaaaatcacaatttgttgtgactaaaactaaattagtgacaacttgtatctaaatattatgtttagtgacaagtaacttttttgttgtgactaaaaatcacatttaatcacaaaaattttttattgtgactaaaaagttgtcgctaaaggtagtctttttttgtggtgtttattaatctatcttcttgtagttgcagatttctctgtaagagaagagaacacgtcactcttttttcaagttgttcattttgacttttatttttgtttgaaagtgttatatccgaaattcggctattcaccagaagttgacacatatactacaaaaggactatgaatcagctcaaaaattataataactaaattgcattattaaatacggtttaattaactcgttcaaattaattacagttgatagaaatatttaaactcgctgccacataagcatatgcgagataagaataataactatgaacgaatataattgacaagacaatatgttcatctcgggataaatagagtatataatataagcttataagacgagacatcaagaagcttgcaactcattgacccgtatatttgtacatggataagatagctatgtgcatccatctcgccctctacacgacgaagtaaccacctcgctagtatcattacaatatgaagaacaatgagaggagaagtaaatctatacttagcatcttctcctataaagatggtgaagaaggataactcacatatttagcgagaaacaactttcttagtcagcataaccgcttaaggataaagacaaagagcggttggatagttattggatattatctcatgtgcaaaaaattgaaacgtgaggaatgttcacgtttcataaacagttgtaaatgaatagatcccaatgaaaaataattgtcatccttatcaaaatagggacagaatccaaggaaaataggggagagaaactattatttacatttattgagagaactgtattctctatctagataaatatcctgaata

SEQ ID NO: 351006 - DNA, 525 bp, Cannabis indica
actcgaacccaggacttccaacacacacaccctcctatggccatttgaggctaggagtatcaatatttgtatatgtaaaaaaataatttatataattaacaattaataaataaaaattaaattgtataatttgttttataaaacaaaactaaaattaataaattaaaacattaatgtttgttttaaaagaaattaagcagaaagcttatatattataaataaaattatttttttataaagaaatatatacaatttagaaaaaaaaagaaattaatgtctaattttattaaaaaaaaaacattaatactaaagggtgactactgaatggttataattttattgtaactatcatgtttatatttttttttacctataatagcaggttactaataagtaaaattttattttttagaatcaattaattataattaatttttcttaaaaaaataattaattgaatattttgcaagacctcttttagcaattaataattataaataattttttttatataaatccttacta

SEQ ID NO: 351007 - DNA, 924 bp, Cannabis indica
gcattttttgctctttatctttttgattttttcacacacttttgatttttgaccatacataaatccccaaataaaccccaccgaatatagacgttttgaccaatacatatgagcccacgtggtcatatcacaatattgcattggacactgctaattttattttgtttttattttttattttttgtacgttttcaattttatttatttatttcacttattaaatttcgacaagaagacttattttaatatatatttagtcccatatatatgctaaggtatgcagacagtaattaccatcaaacatatatcaatcccaataataattatatgtctataatcaatcaaaataatattataatgtattttttatattaagtcactatgtttaattgcagtgtggatgaataaacaattaaatttaaattaattaaaatactattccctcctaatattaattatttctcacaaataaaaaaaatctgggtttattaattatagaactcattttatgacaaacaattatatataattaattaaatttaattctatatgaatgaaattaatatttctgttgaaaagtaagaaaggatataactaataaaattataatactaaaatatagaataataatatttatatcaatattgctttttatattataatgtgtaataaataatatatatttgagatgatgataacaaatcgagttattttttagctactatcaaaataattcattgtagtttttattaatatactccaattattctaattattgttcttttacacaaatttaatacatcgattaatttctaataatctaaaaaaaaatatgatcaaactattacatataagaaggtctgaatagagtcaatagagtccatttagcatgaacgattagattggattatattaaagggatta

SEQ ID NO: 351008 - DNA, 661 bp, Cannabis indica
agatcctggtaaaataatatccaacacgaactgctaacttatgtattgacgagaaaccatgggggtgcacacgttcatgacgaggcctcaacctcgctgtgtgaaagggaaagcgacaacgctaaaaatacttagcgtatattatacaatatacaaaaatgagtatagatagtatgaagatccaagatagcagatagcgaggcatttatctcgctagaagatggtatgcatgcaaggaagatcctctcgacacaagagagtatagttatcagagtaaagacaatattattctagagaagccaaaatgacaagcaactgctcgctatcaaagtgatcttggctcccttcacggcgagacatccctatgagataaggcttaccgtatatctttaattacgagttcatctcggcccaataaaagcgggatattcacagctttgtaaaaacctcatttatttggcttgatgtgtaatcagatcccacaattttagggataatggctgtaaacatattttggtcagctttgtaattaactgcaactatgcaattataaatagtggcagacaagatcaaagaaaaaggggggacgaaaaaactcttacgcaaaaggccgtgaaaaaaatactcagaaatctgaataagattgactcgttgactatga

SEQ ID NO: 351009 - DNA, 549 bp, Cannabis indica
aacattaaatgttatttctgatctatatgaattaagaaatctgattataatgaaatgagtttatttagggcataaaacccaacaaaaacaactaaaaaccgaagtcgattaagcggagcaaaggcgtcacagcctcacttagagactaggaggaacgtactagcgatttcaaaatcatatccggtacggagtgtaagaaggcattctggtcatttgcttatttaacataaaattaatcacaaaatcaataatttaaatttgagtaatttgcggcataaatacctaagttttatgccgagtaacagataaatacctaagtcgaatttttggcggtaaaaataccttctgtcacacttttagaacttctgtaggtacctctccgttaagttacatgtaagtgtccacatgtcatcttcgcattggtccacatcattaattttttatttttcattttaaaattcatttaaacttatttaaaaatcattttaaaataaaaaaaattatttagaatatataaaaaaaataaaaatatattttgaaacctaaaaa

SEQ ID NO: 351010 - DNA, 592 bp, Cannabis indica
actacacaagggaaaccagcagccaacatgactgagacacacaatgacaacaatgaaggagcacctggagctaatcaagatcctctagctggtctttccctcaatcaatgtcagaaaattatggccatgcttgctcaaaaattccacacagagagtacttcatctcccaatcagcccattgtgtcaaatttttctggtaagagtgatattattcataaaaacaaatggattattgatacaggtgccactcatcatgtttgcccttacattgatttgtttaccaatatttgtcacaaaactattctttctaatgtcactcttcctgatggtaccaagaaaagaatttcttgcactggtaccattagaatttcctctgaaattgttctggttaatgtcttatatgtaccagattttaaatacagtataatgtctgtttcagccttaatgtcttctgctaattgctcctttatatttcatgatgatacttgtactattcaggacaacagcaagaagaagatgattgggaagggtgaaagacatggagatcttttctttttaaaatctgattcctttgccactgtttttgcttttt

SEQ ID NO: 351011 - DNA, 589 bp, Cannabis indica
tacgtggcttggcacgtaacaatcacctagtatatatatatacacgtgcatagatgtaaatcaaaaaggataagcaagaggtgaattgaataaaaaagaaggagagacgagagctaactccaaaaaaaaaagaaaaaactgaagaaaaagaagaagaaaaatggagagagttttatttgagtgttatttaggattttagtttagcattttaattttaagattggtaaaaatcaagagaaagaaaaagagaaatttgaaaagaaaagagtcttgtcacaactctaaaatgggtttttatttttatctctattttcttttaaactttataatttttgcacaatctattatgagctaatttttcttttgttagaattatttgttgactaaaaattatgatttggtattttgttgttatgtttagtgagttgattttgttcattcaaaagtattttgtgtaaattgcttatttttacttgattatcattagtaagtactagctaatcttgattttgaaaaaaataggattagtggaattgttgaatgatgtatgaatatcactttgaaaaaaatgtgatttgtaaatggcata

SEQ ID NO: 351012 - DNA, 1067 bp, Cannabis indica
aatgtagaagcaaccatcaaatcatgatgattacatgcaaaccctctaaaaaaaaccagttagaaaaaaaactaaaccaaaaaaaatctaaacacctaaaattactaaaataacctaaataaactacaatacacacactatgggcttttgacaaataaattccagccgtatgggctttaaaatcccataaattatggccaaactttaaaaaagccatataaagtgtccatagttaattatgccatatttatcataaaaggtttaaaaaacccatactccacgtaaattctactaaacgtaatttaatttttaaaatatattgatatgaagaagtaaaacatacataaatacaatcattaactatatcttaactatcacaacaacaataattaattattattcttaaatgaaaataaaaaaaattcaaaataataaaaaataattttcaatattaatatttaaatttacttcggttttagattttttacagtattatgttattttttattagtatattcaaattaatttttaaataaaaaataaaaatttaataacataaaacaatcaatgattgtcacctgataatttatttgatatttaataattaaatatttatacttaaaattactataaaaaaaattaaacttaaattttaatttataattaaaactaaatttaaatatttatataataaattactcaaataataattacacattgtttatgaaaattcatagtatatatacctactataccaaactataattttattataaaattttggctaattagtaatttttccccctgaactttgacatgtagtaaattgtgctccctgaacttttttggtcgttaaaaattccccttgaactattgagatcgattgttaaatttaaggacttttgtctaatttcattcaattttactgtttcagtaattgtttatgtacttaaccatgctccctagactttgatatctaccaaatcatgcccctcaaactttgatatgtactaaatcatgccccttgaactttcatctatgttagaattttttactaaaattagaca

SEQ ID NO: 351013 - DNA, 949 bp, Cannabis indica
acttgagagcttaagatcgtcttttggataaaatctaacgacttgggagaggtagggactaaacttgattattggacttaatttttgtatttgttgaataacatcatgcatattccaatttttataatttgcaaattgtttaaaaattagaaacttaatctacacattttttttagattattcgggggcactgtgtgccaaatatatttttgtacaaatatttatgcagatcatgaattttcaatttattcaaaatacagtcgttatgctgctagattttctacaaaataaaaaggaatatgttcttttgttattcttattatttgtctggtttggttatactgataagagccatgttgatcatgatttgtgcatattattgtttgacgacctagtctctgtatcatcattggtagattaggtatgtgctcacctgtaggtgaaagacctagaatctacatagggagtgaattagtgacgaagccagaaatttgactgagtgagggcttaaataaatattaagtcaaaatcttttaaattttcatcttcaacaaaataaattaaaatattgtcaatagtaattttttttaataaagtgttaatttttttattatttgtattaggctacttttaaaatgggcttgattagaatgagggtaggtttatgaattatgattaagatattgagtgagggcttttgtggattgggttttaataaattgagtgaagtgaattaatatatgtacatatctacatgtgaaaaatttaatgtatatatttgagtgagggcttaagcctacgtataggcataagtccctccgtccctggagtgaattgaatctgagctctggtattatggtggttatcatgtgcaactacccagttttgaatgtcattttcgatgattggtattgagagctagggatctagtggacggtgtgatatgcat

SEQ ID NO: 351014 - DNA, 1466 bp, Cannabis indica
ttactaaattcagcaacgtatgcgcccttttaacatgcgagttgactgtacatattccaatgttaagctcgtgggcctaacacttaattgcgtttaggatgtctgggtttttatgtagtcgcctttgtggacaccgtatgacgagctgatagaacctagacatgcgagtctatatcggcttatcaaggctgttgggtcatcaggactaactcgcattataaagaatcgatctttatgcttacacaggaatatagagaggatactcacacatatcttgatatatgcgagttagatccattctcctatcccgcataatactctatcttgggtgaggtttaaacttcgaggagtctcttatagacgtctctgctttcattggaaaatctgagtacacgtgtcctctaaataagagtctggtctcgagtttctaggtgagagaaatctcactataacagctggctaatccggtgctggtaccaaaaccaaatgggacatggcaggtttgtatagattttactgatctaaacaaagcctgcccaaaagactgtttcccttgccacgaatcgaccagatggtggatgccacctccagattcaatctattgtccttcatggacgcatataccggttacaaccagatcaagatgcacatcgcgaatcaagagtgcactagcttcaggaccgataagggggtatactactacctgctcatgccttttggactaagaatgctggtgaaacttatagagaatggtgaaccggatgttgaaacgcattctgggacgaaatatggaggtatacgtggacgacatgctagtcaagtcaaaggcatacgcaagccacgcggatgacctaggagaatgcttcaaagtggtccagagatacaaaatgaaacttaacccgaagaagtgcactttcagggtcaaatcaggaaagcttctaggcttcattgtcaaccagcgggggatagaggcgaatccagagaaaatccaagctctcctaagcatgccttcccccaagaaacacaaagatgtgcagagcttaaccggaaaggttgctgccctgaaccattttatctcccgatccacagacaaatgcatacccttcttcaaaatcttcaagaaatgtcagaaatttgaatggtccaactagtgcgaggaggcactcaaaaaactaaaggagcacatggctaaaccaccaatcctattgaaactcgttctcggagaggacttgttcctatacttggcttctccgagaatgcggtcagcgcggccttagtacgagaagaggaaaagactcagcatcccgtgtactatgtcagcaagtgcatgataggggcggagacgcgatacccggtgatcgagaaactagctttttgcctcctaatggcctcgaggaagctgagaccttacttccaagctcacccaatcaaagtattaaccaaccacccgctccgacaagtcctac

SEQ ID NO: 351015 - DNA, 896 bp, Cannabis indica
atccataaacttcaaaatgaacattgtttttgggtggattgggacaatgggctgtctagtgtgattgttgactattttaaggatctttttgcagcgtctcaacctaattggcaagttgtggtaaataatgttcaatctcgtgtttctgatgaacagaatggtgagctgcttcatggtattaatgaagaggagattcgtaaagcacttttccaaatgcacccagataagtcaccaggccctgatggtatgactctgggatttttccaaaagtattggcatgacgttaagtgtgatgttgtggctcttgttaatgaatttttccaaacttgcactttgcctgacactttatgtaatactaatgttgtgctcattcctaaaaagaagaatcctacaacaatgagcgacttacgacccatctctttgtgtaatgttgtttatcagatcatatccaaggtacttgctaaccgcttgaagactatcctacctcaggtaatctctgactctcaaagtgcttttgttcctggccgcctaatttcggataacattatggtgtcctttgaggtgatgcattaccttacaagaaagagagttggcaaggaaggttatatggcgttaaagttagaccttagcaaggcttatgatcgggttgaatggggattttcacgtgctatgatgcttaagcttggctttcatgataaatttgtggatcttgtgcttaccacggtgactaatgtgaagtatatggtggtcaatagtggacgggagatgggtcccattgtcccgactcgtggtctccgtcaaggtgatcctttgtcaccatacttgtttcttttgtgttcagagggtcttacatctttaattagacaatttgaaagacaaggccgattgaagggttg

SEQ ID NO: 351016 - DNA, 443 bp, Cannabis indica
gcatgtgtcagaattagattggtttacatccatcaccaatcatctccgtattaaaatattcccatgtacaatatattcaaaccagattgttcaaaaaaggaaaccagatcataaattatttaaagttttaccattataaaatacatcatatatatggaaaaatttaagttatattatcagtaaaaacaaaaaaatcctactatattggaggaaaggtgatgttcctatacattaaatttctaatgtaatgatacatatattttgggtccgcacttgtggaatagtagctatatatagcaattaattaaaggttattggtacatatagtttatttttgttttatttatgtattatttttttattatataaatcacataattttattttgcatcaacacattacaataacaaaattttacttttagttacaacaaaacttgtgac

SEQ ID NO: 351017 - DNA, 1497 bp, Cannabis indica
aaattttaattaatcacgttttctataaacctcgttgattagcaacgagctgcacagcatgtttaaaaataacgtaatacgcctatgttagttagggtgttacaagaataatcaccatctcattcgtagactttctagcgtcaacgcaagtctagaaacctgatttggtgtagtctaagtgtattaaaataccacacttatcaactaacatatagttcccttcttgattttaagttttactttattgtcttccaatgtacctttcttagattaatctgatacatactcattactcccactcaacagcaggagtttggtctaatgcatttaaaacatacctgagacctctcacttttgatcttaaggatttttttctttggccctttatctattctggaatagttgaaatttttccttaaataaaatctatatctaggagtcaaaagacttcctataaatagccattcgaaaaatgcactatcaccttactaaaataagttgctaacgctagagtaattaaatcaccaggcataccccaagccacgggattagataatctcaaacctataatactaggatcacgaagttttgttaagtccattgaatagactaacttttcaaaatttcctttcttgtccttgtaatagaaaacttttggttacttcatatgaatatttttaaccatagttctcttggctttagttcttagtttcttattctgactatccattacttgtttaaaactaacaaaagatttttatcacaagtttcttccaagtcataatagggtgagttctttgaaaccctcccactacaacaaggtatcgtgactttctatctaggaacattaatggtattttccacatcagttgtgtcaatacaatagaggcactgggaccatcttatatagaataaaatgatagaatactcttggaatcaaaaaatagtatctcctctactttgctactttattttttagatttagtcatattcataaaaaaaaaaagtagtatttctcgaaacaaacactttcttattttaatgaccatagaatggtccacgcctaattactttagaatagctatcaaacatgcaaacttagttagcagttctagcttttcttaagttcacgatcaggacatctatgaatctagtaatggtttacactaaatacacaactattccatcatttggaaaatataatatcactagggtatttccctagaaggacttaggcagctactagtaactaatcatagacctttcactttcatcaacatgcaaatcaaatttttgggaaggtaagattggatacaattcgaagttcatgaacttaatgatttttgaactgcatatccaccaaatatttctctacccctatatcagtttaaagatctttaaccacttaccttaatattttttaacattgttaaaaattcatgaaatttatcaaacatttaaattttttttgtataaggtaaaatctagagtgatcgt

SEQ ID NO: 351018 - DNA, 631 bp, Cannabis indica
tacttcgagtgttcaattaattttaataatttgaatgtttaatgataaaatttattttattttaggaagctacaatttttaatacatttggtagtctacttaaactcaaaaaataaaaattagtattcttgtttcttctacatgaagtcaggaactaaatcctcttatgataaatattaggttttaactattattatttataaattatactactggaagagtttctaacaactaatttactttactttttataatatatcactaattttttttagtgtactttaaacattttatattatacaggcttttttgtttttttaacataatttaaatattattttttaacagtaaatactattttagactttatattttacaaaaattactaattgaatcttctattttgttaaatgataatttgaactctctatttttataaatagaacataattgtaccctgagattaattatggtcaaacttttttttttaatacgaccaaaatcaccccgatttttattttcatttttatttaattttttaaatatataatttattttatataatttataaaaataaaatagaaaattaaaattaccattttgaatacgcaaaacacaaaagctgtcaact

SEQ ID NO: 351019 - DNA, 520 bp, Cannabis indica
agttttatttagggcataacaacccaacacaaaacccaacaaaatcccacttgcactaatataaaagtaaaagtgaattttaattaatctcaacaccttaatatccatatcaagtgtagtatgtagtattatctttgtaataggatttaacaggttgtatttagtacatcctttctccacaattacatatccttagtcacaaaattttagatattgtgaaattcctttttatatgtctacttctcttgggatagtggattctttactttttggtaactatatttgtgttagtcaggaattaacactagtagttattggtacaatgccaaaaactatatagaactttacataggctgaataattatctagcagatggccactttaacattcaatctcactggtagagttagagacttcagatttgtttttacacttctccaaaaatcactgctccatccccagagtaattactatctcataattagactttctagcattaacgcaagtctagaaacctaat

SEQ ID NO: 351020 - DNA, 766 bp, Cannabis indica
tagtaaaagacttgatttggctttctcaagcttggttacaatttggaagcttgatggggtatttatagttgctcaccccttacactttatggctagaattatttcttctagatccttcttttactagaagaaattatatccaaacaaatctaaatgtttctagaatacaacataactagtatattctagatttaatctaatctagaattctcttaagttcttagataatttttctacaagtgtatagaaatttctagactaaattgtgtagaaatgtgtagcacttttcatcactcctccttggtacacatttcggtaactccgatcatgtctcgcaatagctcgaactttcctcttggtagtgcctttgtgaatatgtcggctacctgctcttcagtcttgcagtgcttgagctcgatttctttatttgcttctgcttccctgatgaaatggtacttgatgcttatatgtttagttctactatgaaatactggatttttcgccattgctatagctgatttgctatcgcaatatatctttgtagcttctttctgtgattctcccatgtcttctagtattcttttgagccatatagcttggcttgtagtcattgctgctgcaatatactctgcttctgctgatgattgcgcaacagttgcttgcttctttgatgcccatgaaaatattcctgatccaagtgtgaaggcatatcctgacgtgctcttcatgtcgtccatggatcctgcccagtcactatctgtgtagc

SEQ ID NO: 351021 - DNA, 764 bp, Cannabis indica
attgtatttcattcaatatttttatgtaaaactatatgtggtattgacttttatgagtacctaaatatataatattttagtataaattaaaatttaacatagcattatataaaaatatgatatataattcaattcaatacaatacaatacgacctaatactatgtaccaaacgagcccttagataatttattatttatattttttttcatatttttttttagaattagaagcaaattacttaaatattatatatagtatatctaaattaattttgtcaaaatcttttttatttgaaacttatgttgattttttttaagttgttgtgggttgttggtatatagattttattgtacaacatatttatattttgttgtatagtatattattattattattcttaaatgatgtatattttttattttgtaatgtataagagcatctccaaagagacaccaaatttggtattacactatcaccaaatttggtgtcaaaaattatttctactccaaccacaacaccaaaaattacactaaaaaaaatattccttattattatattaatttttaataattaaaaaataatatcctattaattacaaaattaccacaattgttatatttaaataaacttactaatgtgattaaagacaataatactgtaaaatcggcgaaattcgataattaaaatatcatattgcaataacataaatattacattactagagaacaaacattacattcatgacaaaaaattacattaaatt

SEQ ID NO: 351022 - DNA, 434 bp, Cannabis indica
gaacttaaaaattatttaaaaaatacatataccattcaccaaaacatatatacagaaaataataataataataattataaaaatatatctattctatataaatatggctatataacacaattattggtttatgagaaattattgggtgacttttttttttaaatgttgagtcaacgtccatgtagttaattaaacctaaatataattaatccacctaaagtgttgcaattaataataaatttgttcatattgtttatttttttattaaaaattattttcaaattttaatatttagaattaagtaaatttaaatattatgttaaattaaatttgaatgttttgatagtttaacgagatgagcattttcattaattgcgaagataaatttaggacgaataataattttttttaattactattacaaagtataatag

SEQ ID NO: 351023 - DNA, 527 bp, Cannabis indica
aataaataaaagatttggacatctacataattattaatatttataacaaaaaccacattatgactcactatttattatacctatggaaaaaggaaactaatcttttttaaaattttaaatcaattttttatattctttcttctttattaatattattcaatacattttttatattctaaaatagtcaatttgttaaaagaaattattttaaaattatataagtgggtcctgtagctttttaattagtatgaagttctaaaataatttcttttgtttttaaaaattaaacagaaaacaatgttttttttcttctttttattcatttgtttttattaaagaagaaacttcttattattataatttttagccatctttttcaacaacaaaaaaattggtttatccattttttttcaacaatgttcctaatttattattgttcatcattattttataatataattgttaatatatatatatattataataaataataaaaaaatatatatgttgacttcagttttagccaa

SEQ ID NO: 351024 - DNA, 547 bp, Cannabis indica
gtatagatattcaaatttcccttctattatcaaaaccaaaatgattgtcaatgatccttttaacatgaagcgccctaaagagaattcaccaccataaaatttaatgtctttccaaggccacctcgtcactcccagctctatccagagcttgcaccaagtaacaaaatttggtggaaaaaacaccactattatcttttgtccacatccacccatcacttccttccctcgaatgccttcctatttttcaaatactagcaatcgtcttctcatcatagagttggtggagtttttagatgttccactcatcaccaccagggtttaacaagtcagccacctttctacacctatcagtcgggctaccacgaggacttggacataaattagcaccatagggcaaaattaagaattagcaaataattagagatttaattgttaatttatgattatataattcttagtaagaaatatgatttattgtcagaaacaaacaggccttagagatacaattttccattatggagaatttattaaattctaagagtattat

SEQ ID NO: 351025 - DNA, 510 bp, Cannabis indica
tattttttaactttttttttcaaattaaatttattgtttgagtttctcaggtggtttttatgtgggttgcttacagattttggttgcgatttaagttgctctgttagtttctataagggtttctatgtgaaatttggtaaaaaatgaaaaaaaaaaaaaaggtctgatttaataaagtgtaaaaataaaaaagaccaataaaattaaaataactcccatctagaaatatttggtgatagtttgtcaagttgtgtagcattactcaagggcaccagttgtaaagaccgcttagtttaatttagaaattagcagttaatcatgtttaattatgaaattattatagctatttaaataattatttatactgttattattgaattttgaaatgcattttatgtcattttagagtttttcataagtttgcatttccggtgcccggtaacatagaactcggtgtttggctcagtaaaatcacaacttagtatgttagtattgtgggacggttttatt

SEQ ID NO: 351026 - DNA, 887 bp, Cannabis indica
aggtaaatttattttaaaaaatacactacagtaaaaaaaaattagaaactaaatatttcttacacaaaatagagatctaaaacagtaagaaaataataaatctatagaaaattcatcatataattttaaaacaactatcatcatcgtatctcatttatagtcactactatatttaaaattgatgtcatcaccgtatttcatttgtaatcatcattaataatttttctaataagtttgttttgtacataaaataaattaaacaataatcggtaagtacttacttttattatgtgagggaagagagggtgaggaagaacaaaaaattatatatatataattaaaacaaattataattatatatacatttaaaacaaattataattataattatataattaaaacataatatcagcctaagggttataaatcataaactaaatttatctttctcagaatgacggtaatcaagaatgagaagaatgagttgattcccacaagaacagtcactggttggaggatttgtattgactatagaaaactaaacaaagcaacccgcaaagatcactttcccttgccattcattgatcagatgttagacaggttagcagggcaagagtattactgttttcttgatggctactctggataccacaaaatagccatagcacgggaggatcaggaaaagactactttcacatgtccttatggtacttttgcttttagaagaatgccattcgggttatgcaacgctcccgctacatttcaaaggtgtatgatggctatcttttcggacttaattgaatcttgcattgagatttttatggatgatttttcagtctttggatcttcattcgatcattgcctagaaaatctggagaaggtgctaa

SEQ ID NO: 351027 - DNA, 1376 bp, Cannabis indica
ggttagtatttactcttggtggatgagttgtagtctggagaagcattaaacaaaccagtattgcggattcaaccatggaaatcgaatatatagctgcttgtgaagcagctaaagaagtattttagatgaagaaattctacacagctctggaagtagttctagaagtagaaaaactattggtgctctacagtgacaatagtggaggggtggccaactcaaaggaaccaaggagccacaagagaggcaagaagattgagaggaagtaccatctactaagagatatagttgagagaggtgatgtgacaatcttggagatcatgttagaatataacctagcagatccattcacaaagacagttcaagcaaaatcttttatgggtcatataactaaggtagatgcccaatttacttttagggtaagtggaagattgttggggttttatgccttgaaaagcctataaagatattttggattattaataaagagtttaaaattttgatatatgcttgaatattatattattaatatttatgattgaataatttatattaaatattggaagattctttactcatgtatgaggttgtggcttatagctgtacagagaactaagaccacttagctatgaataaaacagtcctaacatattaaagttatggaatatttaatcaatacttacttagatggttcactgatgcctattctatggtgcaagtaatctttgttcaaattactgatgtagtgagacatctaagtaaatggattatatataatatagattatgtatgacaagggctgatataaatgaagttatgtttattaacatgtcatttatcataaaaacctaattcatataataataatgatcaatagtagattgaactaaattctcagttatcatgaacccttattcatgttattagtttgtttgattcactcgttaaagtttgtcaaagtagatgattcttacaaattctattttgggaatctaataatattgatggctgagaacatgatataaaattatggaatcctaactttcctaacagacagacggttggttccctttatgtgttaattctagtattagaaagttacgcgcaaattcagatgggatcttgaattatactttcactagtcaattaatggagctaaaaaataaagaagtaattataagggttaacagtaatttgaccaaaactaaatacgaaccaacacatggagggctaataactggaattgattatataaattgacactacagttaaaatcaataaatatcactactacaaataacctttttaatgtctctttttctagtcaaacaaatatagtgttggacattaaattttttttaaatagattttaagtccaa

SEQ ID NO: 351028 - DNA, 830 bp, Cannabis indica
tgaaatgggtatacgacaatctctagcacctaaaaagaaaggtaaacaattataattgtctcctgcttgtttcactttgtccaaaaaggaaaaaaaatagtttgtaaatcatttgcaaatatgaaagtacccgatgcttactcgtctaacatcaaaaacttggtaaatgaggctgaattgaaactaatgggtcagaaatcacatgattgccatgcgttaatgcaacatctgcttccaattgacattagataagtcttgcaaaaaaatgttcgagagtgtttgacacatgtttacattttctttaataagttgtgtgggaaggaattagaattggataagttagatgcattacatgaacatgtagtgaaaacattgtgcaacttggaaaaaaaatttctgccatcttttttcgacttcatgatacatttaatggctcatctagtgagagaagcaaggttgtgtgggccggtatgggcgagatggatgtatccatttaaaagaactatgaaggtacttaaaagttatatgtgtaatcactatcggctaaaagcatctatggttaagtgctacatatctgaagaggttgtggaattttgcttagagaacatggccagagttgaggcaataggaattagcaaaccaagagctgacccagatgaggttgatagaggattaaaggggaaagggacaatggagacagtgtccaagcttgaactagattaagctcagtaagtcgtgatgaaaattactgcagaggtccatccatatataacatgtgacagtcagtagtcccgtgatccgtaaggggaaataccgggtaagctgtgcaa

SEQ ID NO: 351029 - DNA, 547 bp, Cannabis indica
caaagtgggctcaagtttggactgcattagttgttattaggctttaaaattgcacacatcatcatcccataaacccttataacacttcccaatcttccacaataaaaggtttaactagcttagttaaaggagttttaaaaaaaaaatccattcttattctaaaccgaataaactgccatatataatataagggttttcttcttcttcttctttctttttttttttttttttttgagaagaatatataaggattttatattaattttcttttttacaatgggaaatttgatttaagtgcatacatttagtgtatattaaatttttgaatacaagcttactaaaattaaaaaataggcacactttatagtcatacccattatacccttttctcttctcttctcttctcttctaactttaccatccacacttcctatttccatctatactgatggtggtctgatggtggcccgatgctatccattttttttttatgtttttgtacataaaaaatagcatcatgtgatcatcggaccaccatcaaaccata

SEQ ID NO: 351030 - DNA, 550 bp, Cannabis indica
cgcgggtaaaatttctatccctagatgaagtgggagagattgagttctatttataggcttcctcagatgtatgaacaagacacaaaatcaacactgcattaattatatggttgaatatacagtagaatctctatctaagaatacactttggactaaaaaaaattgtattctaattgagaggttgtaactatatagagttacactagaaaaaaaaaattaaaacaccaaaaaatatcaatgtaacaacaataacaataaaaaatctttaacactatatcataataaaattatttgagtaaatataatatttatacatgtactataaattggaataaagttattaattgtatataaataaatttataaactatatgtatatattttattaagatataattatttttatgtggaggtataatttctttatagaacatgtataattaattataatttataagtcattcttatttataatgggctcaaacttgaactatttttttttggataattacataaagcactatttttaataaaaaaaattacattttta

SEQ ID NO: 351031 - DNA, 800 bp, Cannabis indica
aaatatcaagaaggaacattttgaccatcacctttagatgagaagaatatcacaacactacatgaacaatttaaagacaacttaatcgtaagtaataaccacttacagtacagtgagtcgagctcgtctcgtggcaatgaactttacatgttagggctaaccacattctttaggaccgtattgctctgataccatattgtaacgccccgatttcccgagacgtcacacttactagtccgtttaaaaccatttatagaaaaacaataaactaatttattgaaaataattaaagcatgagatctcattattttaaaacaaaaacacttgattcatttataaatttttaaacattaacttttacaaaagtaatcgagccataatctttaaagaaatattctcaaaccaaaacatcgtgacaatcccctaacatgtaatccatgcctcgagctcgccaccctcactgtatagttttgccttacctgcacacagagtacccgtgagctaacgcccagtaagaagagctatgtaggacataactcccccaactagataacatagtcataaacataataacatcacaacatcaattaattcataccatgctagcatacatataccaacatatcatatcacatactattctcaaatataatataacatcatatcacagtgtaatcttaatgcatgctatactcacacacatacacacacataacacacaatatcttatcgcacattgtcctcacatacgataatctactcccactcacgttgatcagacatgaagtgtaacttgccct

SEQ ID NO: 351032 - DNA, 1030 bp, Cannabis indica
ttcactatggcatgggaggaagacttgaatgcaatagtcttctttttcttctcaacttcctcttcttcttgagcactcatgaaaatttcatggttcatgagtgagccaattagttcttccaagggaagtgttgagagatccttggcttcttgaatggcaaccacctttccttgataagccttggtgagacttctcaaaatcttggtcaccatatccttttgagtaagtaccttgccaagagagttcaaaccattagtaattgtagtgaagcgagtatacatattagcaatggtttcatccgctttcatcttaaagttctcatattgagtggaataaatttgaattttagtttccttcatagcactagttccttgatgagtaacttcaagcattttccacatatcataagcggtagaggcttgttcaatatttttaaaaatatctctatccaaaccacatataagagcatatttagctttagcatttttagaaagcattttcttatcattttcatcatatgcttcataagtcttaattacttcaacaccatttatgacatgtttagcaacataaggaccactagacacaatatgccacaaatcatagtcaatagattgaaggtaagtttccattctaattttccaataaggaaaatctactccattgaagtatggtgctctatttgtgctaaaaccttctaacatgttattttgtgaattacttggaaacgccatgctctagattgtgaaatctaatcaaataatttgagcccttgctctgataccaattgttagcccaagatatgtttccaagagggggggattggaaatttaaactaatttcggtaaattaaaacttttaacacaaaattaagcaattagtcacttaatcaaataaaagcaagtaatatggcaagcaatatattatgacaaataatcaaacttgtaaagtaaagagtttaaggattagaaaatgcaaactctcgatttttacaaggttcggtagaactatgccacctacgtccttggtc

SEQ ID NO: 351033 - DNA, 752 bp, Cannabis indica
tttttttaatggacttattgtggttatttaagatataactaaaaataaaattaacaatatgttacacgcgttattttttttattaatttatatacttatgaaatatattgctttaatcttattttttatattataaattatttttaatttattaattttataaaatatcttgaataactacttataaaaaaaaattaaactaatttcactacaagaattttagttattagcagcgaagcaaatccgccgctactaatggcactaataccgacgaacttctattattaaatattttttattatttttttataaaaatatattagcggcggacccatgtagtattagcggcgggggtctgccgctaatactagagtagaaaaagtgcgggaaatttccctcttaaatattttcaaaacattttaccagcggactttttttgttattagcggcgggtctgccgctaataatgaaaaatctgacaattttattattagcggcggaatcccattattaattaccagcggaatagtccgccgctaaataatatcgtatataaaaaatactatcagattcatttatacctttgcttttttcactttctttcccttctttctcaaaaattcctcctctactcacctttctcagcccttccctgtctccctccgcccaccctaaatccctctgcccggagcaacaccaccacccttaacgatttactaccagtgcaagtttttttaaccgtaagttttcta

SEQ ID NO: 351034 - DNA, 862 bp, Cannabis indica
tgatcatgcaaactcttacaataaataagaatatcatcaaaatacacaacaacatattttccaatgaaagcacgcaaaacatgattcattaatcgcatgaaagtgctaggtgcattagttagtccaaaaggcatgactaaccattcatacaatccatgtttagttttaaatgcagttttccactcatctccttctttcatacgtatttgatgatacccactcttaagatcaatcttagaaaacacacaagaaccatgcaactcatctaacatatcatctaaacgaggaatgggatgtcgatattttaccgttatgttgttgatggctcgacagtcaacacacatcctccatgttccatccttcttaggaacgagaattactggaacagcacaagggctcatgctttctctcacatgccctttgatcatcaatccttcaacttgccgttgtatttctttggtttcatcaggattagttctatacgctgggcggtttgggattgaagcacctggaataaaattaatttgatgttctattcctcgaataggtggcacaccatgtggtacctcctcgggaaacacatcctcaaattcctgcaaaatagaaacaacaacactaggcaacgaaaaatcttgttggttagtgtttaaaagagcctccttgtaaacgaacaaaagtattggttgttttgtacgccaagctcgcgtaatctcactttttttgcatacaaattattttgttttctctctattttttcctcattgatagaactcttctctttcttttctctctctctcttgcttcgattgttttctctttttggctatcttttttctcattcttttgctcactcaagttcttt

SEQ ID NO: 351035 - DNA, 658 bp, Cannabis indica
taccactccacaaaataaatcttcaagtcattgtcgacaagataaatctcaaagtcattgccgacacatcactttatgagcatgggatttaaaaaaaattgccatgaatattttttcaaaaatatcatcttggacaggggcaaagtcagtatatcgacgagataaaataaatctcaatttcattactaacacgtcactttaagagcatggaattttaaaaaatttcaccatgaatattttttcaaaatttcatctctgacatggggcaacgttggtacactgacgagataaaagacaaatgagggcactccaaggagccataactcaaaaaattttgcttaccaaagacatctcgaatggcctacattagagactttgacaagtgggttgcatgctaaaaatgagtatccaaagagttatgatccatgtcgacaacttgctcaaactagcaaaaatgcaagccaccattggcaacaaaattaatgttatctttaaaatctcacattacaaagataataagcatgggaataaaataagcaaaaaatatattcaacttaaaattctaaagtcaccaagatatggaattagtttaagttatatatgcttaaaaaaattccaaagatgtgaaaaagacttgttagttttaactagcaagcac

SEQ ID NO: 351036 - DNA, 962 bp, Cannabis indica
aaaagaaaatgtaaaattgcattaacatacctaatcccgagaaacccgaacccacaactgtaggttctgttatacaacctaggggttacacaaactcgtgaaatagggaagcacccaatcacgacactgaaatggacaaaaattgagaaaatgaagcattttgggaccctgtcaaaaccggctagccgttttgtaccaattcaccccaaatttttcatttattgctcaatcctccaccaaatgcaaccaaacattccagagtacctaattagggtatacacaacatattccaaccaataaaccacagaaaaactcactgaatcaaaacatgccattagagatcaaagttaaggattctatgctcaaacttgcacaaaacctaaaacaaacatcaaaaccagctgcaagaagcttaaaccaactcaaatgaacgtaaaaatctgaactataactcaacctaaccgtaacagccactaaatctcaaaatcataaactcaaaccaagtaagaacttaaaaaataaagaagggttatactagggcttaccttagcttgattctcccaagatttccttgctgaaaccaccacaaatcaccagcagtcccccccttattcttgctggtttcgaagagagagagagagagagaaagaaagagaaagcttctcttgattttttgtattttcttttaattcactaaatgaaatgaaggttagggaaaatcaatttcccttcctgaaattactttgctaggtgtcaaataacaaggcacccacctaacctttactttgtcaaaaagtctaaattgtcctttgacttaaacttagggtatttctaaaagctatgggtaaaatggtcgaattccataaccccgcttaaccttgacatttttattttctctaaaatagtttccacaaagaaataaggttctaaatttacccatgtgatcaaactagctatccatc

SEQ ID NO: 351037 - DNA, 539 bp, Cannabis indica
aaaaacactggagctacataccaaagattggtaaacaaaatgtttaaagaccaaatcgggggaaatatggaagtatatgtggatgacatgctcgtcaaatccaggaaggctggggggcacatagacgacctatacgaatgcttcaaagtcctctgaaagcacaatatgaaactaaatccctcaaagtgttcctttagagtcagctcgggaaagtttctgggcttcatcgtcaatgcccgaggaattgaagccaatcaagagaagattcaagccctcctagatatgaaatggccaactaaaaccaaagaagtgcaaagtttgactaatcaaatcgccgcactcagcaaatttgtttcaaaatcaacagataagtgtgtcccattcttcaatatcctgcgaggaaacaagcagttccagtggacagaggaatgtgaaaaagctttccaagagctaaaagcaaaacttgaaaaacctcccgtactctcaaaacctctggacggagaagaacttggaatatatttagctctcacagaacatgc

SEQ ID NO: 351038 - DNA, 748 bp, Cannabis indica
taaattaaataaagtagacctaatttttttttaataacaatatagccttcacataataaaaattctgaattcgtcacttctcatatcatcattgttgtgaatttctaagcagtttgccatatgagttaattaacatttgttcataagctaccttatcatttctaatgcatagagaacatccctttaaaagatgtaatcttcttgttgatttaaagtatcctttaaagtgaattttagaaatcaaataggcatggcttaagagattaattacaaattaagaaaacactaattagtaataatatgtacattaattagcaaccattttagtccttatattgattaagtgtcgaaaaaaaaaaaaacaaaaccccttcagctggggtaaattgtataagtagaagatttgatataattacaagagtttattgttgagccatactactttcactttgtctaaaaatggtaactttaacctcaggtttattcttgttgatcagctcaaagatgcatacatcatttggctgaagagagttgtctcttgcaaatgcatgccatccaccagaaaacctatactctaatccagaagatgatgatcccttattaatagctaaattcacatgccaatattcctcaccaacccaaagactgacaatttgtgcctttttctcaaaacaagattttgcaatagccactggaatatactgcacaaacaagaattaatataataaattatctacaaagaaagaca

SEQ ID NO: 351039 - DNA, 443 bp, Cannabis indica
gtaaatcagctctattttaatgtgttgggattattatatttactgaattcagaacaaaatgattagtataggctgttgaagtcgattagttggctagtgattgtcattggtgctctagctttgctgttcaaagggaaaaaaaaagcagaattgctaatcatattatgtcactactgtttgttgaggactgcaattttctatcctatctttgaatgttcaatttctgtaaattacaggattaacttacctggaactgattgggtattggtcagcacaagtgatggaaagaaatactattacaacaataaaactaaggtagctcagaggggtcgcttaaagtttttattaattattgtggtcttccctttttatatattattctcctttcaatttctttggttcattattttttaattcagtaccaaaaaaaaaaaaaaagagag

SEQ ID NO: 351040 - DNA, 682 bp, Cannabis indica
attgatgattgtatatatcacaagtttagtgggagtaaatacataattctggttctatatgttgatgacatattgcttgcactgatgatataggcttattgtacgaaaccaagagatttctatctttgtaatttgagatgaaagagcttggtgatgcctcttttgttttaggaattcgaatacatcgagatcgttctcagagttttcttagattatcaaaaaagagttatatcgataaagtactcaaaatttttataatgcaagattgtagaccaggtgatacccctattactaaaggaggcaaattcagtcttagtcaatgccctaaaagtaaccttcaaactaaggaaacacaaaagattccctatgcatcagttgttgggagtctaatgtatcttcaagtatgtacgcatccagatattgcgtacattattggggtgttaggcaggtatttaagcaaccttggtatcgaccattatatagtagccaagagggttatgaggtatcttcagagaacaaaagattatatgctcacatacaggaagttagatcatttggaggtcatagggtcttctaattctaatttcgctggacgccaatatagcagaaggtctacatcaggttacatttttctattagttggaggagctatatcttataaaagtgttaaacagacacttat

SEQ ID NO: 351041 - DNA, 1100 bp, Cannabis indica
tggccatttccagtcattatgagcctaagtttttcagtcaagccaaggggattccagtgtgggacaatgctatggattgtgagattgatgctcttgagaaaaatcacacttggatcattgtttctttaccagctaaacaccatgctattaggtgtagatgggtctacaagatcaactacaatgctaatggatctgtagagagatgcaaagcaagacttgtggctaagggatataaccaacaagagggtgtggattatactgatacctatgctcctgttactaagttggtaactatcaaacttgtgcttgcacttgcagcaataaatggatggtatttgcatcagcttgatgtcaataatgcatttttgcatggagatcttcatgaagaagtatatatgactctacctcctgggtatagtcctaagggagagcttccatcaaatgttgtttgcaaacttaaaaaatttctatatggattaaaggaaacatcaaggcaataatttggtaaattttctagtactttggttgaggaagggttccatcattcagccactgatcatttattgtttatgaggaacaatggagacaacttcatcattcttcttatatatgttgatgatgttatcttggatggtaataatctggttgagatggagactcttaaagttcaattgaataataaatttcagcttaaagatcttggaaatctcaagtatttccttgggttagaagttgctagatctcctaagggaatcattatatcacaaaggcattatgccttgcaaatgttagaggatcttggccatttggggtgtaagctagtgagtactcctatggaagccaacctgaaactaagtcaagatgaagaagacataatggctgctcctaaaccttatagaaggaatattggaaagctgcaatatttgaccattacaagaccggatatatccttctcgatcaacaaattaagccaatccctggttactccctaagctagacatatgaaggcttctgagagggtccttcaatatgtcaagaattgccctggccaaggtttattcttccctgctacatcagagattcaacttaaagcttatacg

SEQ ID NO: 351042 - DNA, 561 bp, Cannabis indica
aacccaactaattcttggtttgagcttttggggaaaaatagacctaaatcagtagttccccgtaaataacgaaatatattgttttattccatttcaataggtgatgaactaaaccttgataacaaattcactgtgaaagcaatatcaggtcgagtacaattagcaagatacataagagctccaattgcattaagatatagtacttcagtaccaagtatctcttcattattttgacaaggaagaaacaagtcttttttgacatttagtgatctaacgactattgggttacttaaagggttcaatttatccatagtaaagcgtttcaagaccttttcaatgtagtttgattgatgcaacattatcttattgtgggtatgttcgatttgtaagccaagacaatatttggttttccccaaatctttcatttcaaattcattcttcaagtacaatattgcctcatgtaactttttatcaatccaatgatatttaaatcatcaacatagacaacaataattacatatcctgattttgttttcttaatgaaaacacatggacaaactg

SEQ ID NO: 351043 - DNA, 821 bp, Cannabis indica
atgaaaagaaagcgaagaattgggccttgtgtaatagaccaggttgcacatgcttatagctggccatgtacatgaatgatctattgataaagcatacgtaatcagatcagtttcagcaaaccttgctggtatatggaattctcttcttattctatctctaacaagctggtagtcagacaaattttgtttttcctaagtctcatttggagctgtgtttgtgctgtcatgcttctcatgacttggttaaaatcctttaagcgtaatttcaaactctcccaaatcttccctcttgctagatgaatttgcatcaggtaacacactatccttctcgacttttcaagtgaggaaaattattttcattaaacacaatatttctagaaataatcacctcaggttttccattctggtttatgcagattctctaaccttttgtgtctataggatatcctaggaactttcctttgatagatctagcatcaagcttatcattggattgatgtgcatatgttgtacatccaaacactcttaagtgtttcaggtttggtatcttcacataacacatctcataaggtgtcttcaagtctatgactctattaggacccctaataacaaggtaacaaacgagagcgaaagcctctccccaataaggctttcccaatcccatactaagaagtaaacacctcactttattcaaaagggttttattcatacgctcagcaactccattctattgtggatttttcaaaactgtcctatgcctagttatcccatgctcattacataatctatcaaactcagtgttgatgaattctagaccatta

SEQ ID NO: 351044 - DNA, 599 bp, Cannabis indica
acatcagtctttcattcaagtatcaaggacagaacaaggaaaaatagaattctttccattgtcaatgctcaaggtgatagagttgatgatcaagagaagatcactgaggcattcctagactattacaaggagttattggggacaagcatgataggaaggcagagggttaaaacttcagtaatgaatgaggggcctttgataacaagcacacatgctgaagcgttgatgacagacttctctaaagtggaaataaaagctgccatgtttagcattcctagggtgaagagtccggggccagatggttatggaagttattttttccaagacaattgggagctagttggagatgaaacctatgaagctattgcctccttcttgaagtcaggtaatttgcttaaagaaattaattcaactgtcattaccttaattcctaaaataaaatgcccgaacagggtgagtgattttcggcctatatcttgttgtaatgtgctatataaggtggctactaagttgatttgttctagacttaagaatatcttgcctgaaatagtctctctaaatcagggaggatttattaaaggtagatatatagcacataa

SEQ ID NO: 351045 - DNA, 709 bp, Cannabis indica
atgcaaaaggtgatcaatcttaaacatgtgattaacacaaatatggataaatttcacaatcaagaaaggagaaatagcaattattataaataaagacaatgtcaatcaacattcatcatctccccaaatttagttcataaaatccataataacatccataatcaaatctaaaacagaaattaccatagaaatcgagagtttcagaaagaactagttggtgattgcactccggattgtcacaatagcttcctctcctccttctttcacttttcgggtccaatctctgatgatttttattctaaaacacgagtcccttaaatagaaatcatggttgctacctctgaatggcgaaaattcaaaattgtccaaaattcctgtgttttgcccatagttgcgattacataaatcctagtcgcgaccatggacaaaactgaaaaaccatgcttctgccaagcctcctagccgcaacccaagtcgcgaccatagaaaagggtcgcgaccatggggtatagtggtcacgattattgaagcatttttgtcagcttcaatagatttttctccaaaatgccccgtcttttcaacaattgatacaatttgagctctaatgcctcgaggatctaaaataagaaaaatcaagcataaaatcattccaaaagataacattaacagagaaaacaactataaaatcgacccggaacttaggctaaaa

SEQ ID NO: 351046 - DNA, 777 bp, Cannabis indica
ctctctctctctctcttcaaaactagcaagaataagggagtttgctgctgaactttgaagatttcagcaagggattcaaggaggtttaagctaaggtaaccctagttactttctagttgtgttttctcaaggtttttattagtttcaagttgtgattttgctatttgggggctgttaggtttaagtatgtttagaattcgaattatagggttcaattgagttggtattagcttcatgtagctgtttttgatggttggaatgggtgttgtgcaagtttgagctttgagttcaaagctttaaaatctaatggcataaattgattcattgggtttttctgtgaaatactggttggaaaatattgtctatgcattgtttaggtactctggaaagtttggtagcatttggtggaaaattgagcaagaggtgaagggtttggggagaactggtgcaaaccgcctagccggttttgccagacctctaaaaccggctagcggttttagtaggattcccgaacacttcattttctcaattttcgtccatttcagtgccgtggttgggtgtttccctaattctagagtttgggtaacctctaggaagattaacagcacctagggttatggttttgggtttcccgggattagggttttgatcatgtaacttacctggtttataatgtgattagggcatccatctagcacgagactttccgttcaggtcggccaacacacttgaattcgaaaagaaggtaagaactgaatataatgtgtgatatcaata

SEQ ID NO: 351047 - DNA, 694 bp, Cannabis indica
gcatatattttattattgaagaaacttatactcttaaggcatgatatgtttctcaatgccgtttccacctcttgcctctactagctgacgtctctttcatcaccaattgtaactgaatcgatcaagttttgtataaaaaattattcctttgaaactaaaaaaattttggcatgcactattatatgtttctatcttatgttttagttaattaatcaagttgatatggcttgtgatcatttattttttctttgatccatacacatatttatacattgattttgtaaatattatcaaaattatatgtattctatttattttattcatgttttttttttttatatattactaatttaaatatctaaatattatcccaatgtgcttataattttaggtgacatcttaatccatttccattctctattatttatttataacattatatatatgatatatatacattataaacaaacaccccaaaataatctgagataaccagaaaagagcataactatggtagagaaaaataggattgatttttcactccctctttctctctccttacacgcctatctcacactctctctctcctcatctcacacgctacacactatcaagtgtggtgtgagattatgactaaccatatctcaattacagttgtaacgtccccgcttcaagtctttattgggcccttaca

SEQ ID NO: 351048 - DNA, 1224 bp, Cannabis indica
tgcaaagtgagacaattaatgcaaccaaatagagaaaattgggatgtggagttagtgacagagttattcaacaacagagatgctcctatcattctaaacactcctatcaattcgggacctggggataactattactggaaatttgaaaactctagcttctatacggtaaacagtgcttataagtacatacaactttgcaaaggagcttggagtgctgatatggaagagcaagtgtggaaaatcttttggaaaattaaagttctagcttaatttatgcattttatgtggatggctcttactggttgcttacctactagaatgcaactccaaactaaaaatgtcaatgtcccttgttcatgtgtcttttgccatttgcatgaagaatcaatcagtcatgtgttgcttgaatgccattttgccaagagctgctggaatcgggcagcagttaacatctctgctgctgctatcgggttcgatttttctctctggtttgagagcctcctgcatcgtggacggccaggtatgattgaggaaggagtaatggtggcttggtctatttggaaagctagaaacgagttgctatggaataataaaatatgaactgttgcggaagttgtcactagtgcataatcagtccttgatcaatggagttatgctcaatctcatcattttgatcccttgttggtacccgctgccaatcaaaacaaggaagagcaatggtctaaaccagaaattaataaaatcaaggtgaacgtggatggtgcaatctttaacagctttggttcttatggcattggagtaggggcttgagatagtgacggtcggttgatagaggcgtttactgctctgaaagttggtagtgttcaaccagccactgttgaagctcttggaattatggaagctttgagctggatcaaggctaaagggtggtctaatgtagttattgaaactgattctgtgtcagttcaagctatctctagtttgctttttatgccttcaggttttggtttgttaatttctcagtgtaaacatttgctaaacttgttgtgtgatgtgtctgtgtcttttatttcgtgatctgctaacagaaccgcccattgtccgactcgggactcttgttattggtctgattgcacttttaatgtcagcaatgttcctaatactgcacattctgctataatggctgatttggctattataagttaatgaagttcaccttctatt

SEQ ID NO: 351049 - DNA, 541 bp, Cannabis indica
actcattcatgatttctcttttattgtcatcatccgtaggcacacaaacacgattcatcaatcgtggcattctcgtatccattataaagtaactagtcctcccagcataaatcctatatcgggatttcactaactctggatctcgcagttgtgcttctctgattcgctccaatagagaagatttcagggtaatattagtcgattccccacagccaagtcaattttagcttgggtcatttcatctgctaactgctgggagatctttttcactgtatttatcttactctggcgttttctactcatggcatcagcaacaatgttggccttaccggggtgataaaggatctcacaatcataatccttcaccaactctagccaacgtctctatctcatgtttaagtctttttgggtgaagaagtatttcagactcttatgattagtgtatatctcacatttctcgccatataagtaatgccgccaaatatttagtgcaaatactactgttgcgagttctaagctgtgagtagggtacctctgctcg

SEQ ID NO: 351050 - DNA, 1084 bp, Cannabis indica
gtctaatgaaccgaatcaatctaatccaatcctattacaaaaattggatatccaattacaattggattggattggatgttaaaaatcagattctaattggattggatcggttattggatgtcattctcaaaaattcaaattaaaaaatgatccaatccaattacatttatatatataaaaaatatatttatatttattcatgtataaataaaaaaatatatattaattatatttttagtagactttattttgtgttgaatttgtaacacttggttggtttgtctatttgttttcatgatattttgtctattttattactttgtaacattgttgttttacctatttcaaattttttttttgacgcggtattacaaatttttagtcgtattagactcgtaacaattactattttttatagtattattaaatttaaataaaatgtgatatttagttttttttgcgtattcttcatcatatttttatgttaatattaaaaattaggtgtatagttggatatctaattaaaaagctaatccaattcaattagtaattggattggattagattttgaggccaaattgaatcagatcggatgatgatctttacaaatccaattacaattgaattggatcgaatgagaagaaaaatgttggattggatcgaatgtccacccctaactttaagcatgtgctaaatttggaccactttatataccaccattagagtttatttttatgaaaataaactaaaatatgcatatacaccacagtattagctctacatttgagatgctcttaatatctgcatatctttattcactttaattagaatttaacttttctttccaattatacataatcttgtaagtttttttctacttgttgtgcccgcttatgtgaggttttcctatagtccttgatcttttatattttcttaaaatacataagattagggctatttacaaaaatatgggaaaataaagataagttttgatatatatggcataaaaacttaattacactaaatatgacatttttttaaaaaaacttacaaatatgggaaaaaatcttgagtaatgccataa

SEQ ID NO: 351051 - DNA, 526 bp, Cannabis indica
taaatattctgtaaagtgttaatattatatgaacatctccatttataaagctaaaaagtgggtcaatgacagaagtggtatatctgcaatcacacaaagaaatgccgttagataaacactttttaatatataaagatatatataaatatatatgcattttctgatgaatcaatcatctttagaccgcatattttttctttttttaaaaaaaatacttttacactttgtatttttttaataataccaaaaagttaaattagagttattgacccaatttttatcaaaaatatatttttaaatatgattataatttttcgtctaactaaggttttggcatagtttttgaaaaagttaaagctgttttttgaaaaaattgtgataaaatgtatttggtaaacagtcaaaaaatagttttttgaaaattttttggagaaaccacagctaaaaactaaactgcttaacccagcttttaaaaaaaactgttttgattaaatctcttatttttttaaaagaaaattaattttta

SEQ ID NO: 351052 - DNA, 694 bp, Cannabis indica
cacatggctaagccaccagtgctgtcaaaacctcttcacggatgagacttatatctatatttagccatttcagagaacgcggttagtgcagctctagttcagaaggaaggaaaagttcaacacccggtatattacgtcggtaaacgcatgataggagctgaaattcggtatcccctgatcaaaaaattggctttctatctcttgattgcatcaagaaagctcaagccttacttccaagttcactccatcaaggtactcacaaatcacatgcttcgacaagttttacagaagcctgaggcctcagggaggctcctcaagtgggccatggatttaagctagtttgatatagttttgatctccaaatcttgaggttcaatcgagtctcagcttagtgtcgtatttaggaattcttaacatccttccactagttggagtacgaaaaatataaacagtttaacaatgaatttcttccacctaatttttgaaatcacaccatcctctgggcattgaaaaatttaagaaggtattaccaaattcttagtacccttggtgttttaagtgatgcttcagatgtcacattcttttgtacttctcgttcttggtgtctagtttaagtatttaatcctagtttaagaatcaatattactttagtgaaaagtagattcctaagtagaggcgaactgtctttctcata

SEQ ID NO: 351053 - DNA, 500 bp, Cannabis indica
acccaaacctccaacctaaggttttgatattactaattggaactacaatatcccaggaaataggaaaacacccaaccaaggctctgaaatggatgtgaatcgaggaaatgaattgtttggggaatctgccaaaaccggttggtcctggcaaaccaattaaccggttggcactaggtttccccaaacaattccaaacctgctcaaaacatgtccaaatgccaccaaactttctagaaaacctataatgagcttacacaaccatttccaatcaatagaatccagaaaattgcacaaaatcaaaacaagccaaggatgaaccaagcttgagttttcaaactcaaacttgtgcatccactacccgacaaccctaaaccagcaactagatcatcaatttaactcaaattgaacttagaaaatgaattacaaaacatcttaaccctaacaaccaccaaaacataaaatcatacactaaagctcttggaatatattttaccaggatc

SEQ ID NO: 351054 - DNA, 892 bp, Cannabis indica
gataaggcagtgggattagatggttttaatgcttatttttaccaaaagaattgggttgttctaggtagagattttactagtgctattttagattgtcttaacaaagatattaatttttctaaaataaattctactcttattgtcctaatacctaaaaaacaacatgctaataagttaggtgattttagacctattagtctttgtaccactttttataaagttatatctaagattatatctaataggcttaaaagaattttagataaaatcatttctcctttccaaagtgcttttatttcaggtcgtgttatttttgataatattattattgctaatgaactagtgcatgctattaataataggaaatctggtaaaaaaggctgggctgctttgaaacttgacatggctaaggcctttgatagggttgaatgggattttttatgtaacataatgtttcattttaattttcctgttcgttttgtctctcttatacttaaatgtttgtcttctgcttttatttctttctgtgcatggtaatgttaagcccactagaggtattaggcaaggtgatcctttatccccgtacttgtttattttatgtgctgaaggtctttcagccattcttaggaattatcatcataggggtttgcttcatggtatctcaatttctagaaatgccccttctatatctcatttagtgtttgctgatgacagtatcttgttttgtgctgctgatcgtaattcttgtcatgctttgcagcaggccctctccctgtattctcaagcttcggggcagatgattaatttcactaagtcctccattttgttttctcctaatactcaaaatgatattagagatctattttttaggactttccagcttgaggataag

SEQ ID NO: 351055 - DNA, 712 bp, Cannabis indica
ttcctaaactttgttattaataacatcatgccacctgaattattagcgatgttaaatatttcttacttttgaacactgtaattttaaagtatgactactatcatgtatttccctccaaacttctgttaaattaaaaggacactcagtgatagaaatttggggagcaaaatatgatagtgatgtagttcaaagagtaaagttgttaattatttaacaaacgtctcgtaataattcagaaggcatgatttttttgggccaaagttcagaggacaaaatagatatagcccaaaagttatttattatttttagtaatattgttttggatccttgattacaaaaaactacaaacattgcctattgttttgcaaatttggttaacaatgaactcataaatagtctggatttccattgcaagtctcctatagcggatgaattcatgggagtcaaaacaaattggcgttcggttggaagaaataaaaacataggaataagaatgagaatgagaatagaaataggaatggaatggaatcaaacttaaaatacataaaaaaaaataaatagtcattcattcaatttcaaaatagaatagtcattctactaaaataataaaaaagtcattccatatgacattccaatactttaaaatgcaaccaaacaaaggaatggaattaaaattgtttcttttcatttccatttcatttcattacctcca

SEQ ID NO: 351056 - DNA, 518 bp, Cannabis indica
tttattaattagtaatctcattatattgaagtaggttttagttagggaagacaacccaacaaactcccacttccactaatataaaactaaatttgcatttcaattaatctcaatacaacctttctccaccattacatatctgtaatcacaaaatcacaacctttctccaccattatatatccttaataggatctgacaggttgtattcaatacaacctttctatactattacatattctctctgtaataggatctgaaaagttgtattcaatacaacctttctccaccattacatattctctctgtaataggatctgacaggttgtattcaatacaacctttctccaccattacatattctctctgtaataggatctgacattttgtattcaatacaacctttctccaccattacatatccttaatcacaaaatccttgatattgtaaaattcctctctatatatctactcctctagggatactaaattctttactttttggcaactacttctgtgtt

SEQ ID NO: 351057 - DNA, 1647 bp, Cannabis indica
atatgatcctggtattatattaggtaaaaaaatacttgccactgatgatatacccattttgtattcggaattcaagatatgttcttgaattattacaaaagaggtatatcaataaagtttttaaaacttttggcatgaaagatactataccaggcgaaaggcttgtagctaaagaaaataaattgtctaagtcattgtctttaaagcaaccttagaatataaaaattataagattcttaatttatattggaatctaatatatgctcaagcatgtatgtatttgtacttaatatacatattaataatgttggatagatatttaagtaaccatataaggaactttcggtatgcagccaaataagctacaaggaatttaaggagaataaaatactatatgttcactttatcagaaatcagaaaataaaaaattttggagatcattaagatttttaattctgatcttataaagtttttagttgtgagattttttttgtcacattggctgcaaaattagaaatggtattaaaagctattaaagatatatgttgtgacaataaattgatcaggttgcattttagtaacaacaggaactctataaggtcaaaagacacattgactttgagctaattgttgttaaaatgaagttcagagtaataaggtgtctatagaacatactaagaacaaactccatattttgtgtgatccggatcattaagaatataccacttaaggcttttcaggagcttattgctcatatatagatatgatattatttagggcaatttgtggcataatctccttaagtggtcacgtgtttgcaactcacccccaattctaaaattttggtggtaaaacctcctaaacccaagttctgttggcaattagccctttccatccatttttggctgttcactgccatggtggaatgtccacgtggcacaattttattggtccacgtaaataaatatttaataaaataaaataattaatttatttaaaaataaaaaataaaaattattttctttaaaaattaaaaaatgaaaaaattaaaaaaaccctaatttcctaatcttttctttcttcttcttcttcttctctactaaaaaaaacaaagaatatgaatcgtcggtttcacattcctaagcctgtttgactcggccatatcacacctcttcaaacaacaatcatacacacacaaaaaaaccatgtcaatacaactctaacaatgtcaagccctactctgtttcccctcttcttctccttcccaaaccctaaccctaaatcgacctaccaccaacccactcctcaatcgacttccccacaacctcaccctctacgtaaaccatggccaccgccttcccacaatccgatccgccatatctcaaaccaagaaagaagaaactgtcgacgcagtcaaagaaaatctcaaaaattgttacctcctagctggaatccgatctgcttggtttttcgttcacattgaagaaataccagctgccattaaaccctaagtatttaaggaaataaaccccagcaccagcaccagcaccgtcggaaacggcgcaggccgaaatcccactatcgcaaacggcacgagagagagagagagagagagagagagagagagagagagagagagagacgaac

SEQ ID NO: 351058 - DNA, 565 bp, Cannabis indica
gattggaaaagcaaaaaccttgggacgaaggaaaatatatataaaagagcaaatttttatgttttaattttgggaaattacttttgggtgattttacaatgcattctattaaaataggtgtactgatacaatctctaactgttttggtatttataaaaacttttagctaaattttttcatagtcgtgtaagttatagttatttaagaaattctgtcaaattttgagaaatttagcataatttacaatatagaaattaatatttaaaccgtctatttcatacgcctataaaataaaaaagtcacgcgtgcaacatactatttgaatattattttcgacgtgttaaatttttctgaattttttaaaattttgcaggatatcttaaataactataacttacacgattatgaaaaaaattaaactaaaaaaattcttatagataccgaaacagttagggattgcatcagtacactcattttaagggaatgtattgtagaattttcctatactattattttaattttttttttcaaattttacagtttgggtttctaaagtagtttcttc

SEQ ID NO: 351059 - DNA, 966 bp, Cannabis indica
gttccaaaccctctttctaaaatatcacaaggcctacccaaaagataaattattcccgtagccacatatgagcgtgtagctcccgaatcaaataatactgtaagcaaggagttgttgacaagaagctgacctatcaccatagaaggactggctgcagcattagcttgggtaatggcaaacgcccgagcaggtacaggttttgcctttggtttcggctcttctttctttgcctgagggcaatctttcttgaaatgccccaacatgccgcataaaaagcaagtcttccggttgcactctcccggatggtgtttcttacagcgtgggcactctaggtaagagtaaccttggcgtccacctctgccttggtttccatgaaatcgcttactctgccccgaaccaccagatgctggggtaactttcctcttctgatctgtggtggaatcaccaccatccctaccataggcaggagtaggaaaagtgggggttccaccaacattcagaatcactcggggcttctgaataaatttcacagcaccctcggctctcagagctttttcaaccatttcagcataagtggttgcttcattggtagtgatcaccagatcatgcgtaatcttcgcattcaaaccggccaggtacttttctttcttactgaagtcagttggcacgatatccacggcgagcttggccagacggtcaaactttgtagtataatcagtaaccgacatccccttggtttgcactagctcggtgaactctacttagcactgcagactgcttcattataatatttggcgttgaataattccaggaattcttcccaggtcataacagtgacgtcccgggtgagggttatcaattttcaccacacgagagcatcctcctggaattgaaatgtggcacaggtcacccgatcattaccaaacacccccataaagtttagaattcgctcaattactgtgagcc

SEQ ID NO: 351060 - DNA, 976 bp, Cannabis indica
gaaaaataattccaagtttaaagaccgcttggtcgatcaccttgtcttaaaaaaggccttttggcaggacagataaaaaagagatagaaaaagaaagtagttaaacggctggagttctaggctctttgtacgagtcttctgggtcagttggagctagaggatcgtttgtttgagcggggggcacatcaacagtctggccagaggcggaagtggtcaccttgggttccccataagccaccgaagaagcacagtactcgagaaacatgtctttggcatcgcctaggtaatcgaaatttgcctgaggattagccttccagaagtcataaaaaatctcgagacccgctgtctctaaggaatttacctatccttcgagcctcgcaactttagttttttgttgctcggcctttgacttgtacttctcaacctcagcgttaagctccccctccttgctcttcttccaacctgcggaagacagctcgaagaacctccctttcttcctcaaggctggtcacttcttttaacaaggaggcaatggcattttcaagttgatcaaaagcctgtagatctttagtcagctcaaccatcttcttctcaacagcaagaagtttcttgttgacctctcccagttccatccggactgccccaagctgaaccctggcttcatcaggatccttcctagccagatccacttcggccagcatagtgttggatatggcggcattctttgaggcagccgatttggccctggaataagcgtaagctatgtttagaccagtctgtatagagaaagagtgttaaaatctgaactatgtgaagaaggataaagtaaactgtcaagaaagacttacccttgcaaactccttcagagctcctcccatcatctcatcaactttagggaaaggtcatgtctgcccagccactgctcgttgcctcagggaccgatcgagtcacagagtgaatgagcatgtctttgcct

SEQ ID NO: 351061 - DNA, 712 bp, Cannabis indica
ttatttgaaatacgtggatataatatgagttatttctgaaataaaatattttcatgttcggcgatcttagagacttgattggaggccaaaaatgtcacaacaattttagttagaaatattgatgggattattgggataagttgattttagaaataccagggtattttaggatactcgaagttggccaaataccatagaaataaagatttcttagtagctaaaaaaataataagataactatcaataataaaatttttattaatattattttattatattatatcatattatattattattaatatttttttttattattatattatatatataagaaaaaaaacttatacgatttttatctatattatatatttaaaactatatcagtaactggagaacgaatgaacgaacgaaatcctagttctctcctttcgataaaactttctcctcctatattcatttttctttcaatttttcaacccaaaaccttagacgatctaagctctgatagttgcgtagatggacaaatccttgaagagggaaagcttaaggtatggtttaattacgttttaagctaaaaacgattgattttctatagggattttgtgaattagaatagttatggcgattctgacttcgtagaatcattttttggtacttatgggactaatatcgatgtttacttgttgaattttaggtgattttcagttag

SEQ ID NO: 351062 - DNA, 854 bp, Cannabis indica
atgatgatgatgagatgttttattttaaaagctaaccatgcatggatttttattaaactactagttctttgttattagtagttttcctattggactttatatgctcactcgtatattctctttcaagagctcagtttggtacttgtagatgtaagggaatcattgacagagaacgaaaaaattagcttagtcctagcttaattataattaacccttcttttaaagattgaactaggcatggtaaaagattcatttattcgggtcgggtcggtgatccgattcgacgaattattactaatacgaaacattcagatacttatcgaattttggatcagatccgctctacctcgcttaatttttttacgaatcggttatgaccagatccgttttgaatatatattcttttgtaaaagatatacaaatatcatcgttataattatagaagaattattaattaacatcgattaatagctcaacatgtgggcaaagctgaagctttcaaagataatcaaattaggtatgctatagttgttaataagttaactatatacatactatattatgtagctagacagatatggaaaaaatataaatatatttgttattaatataattgttcttcctaattataatgggataattacataaggcaccatttttttgtaaaaaaaaatacatttttacatttacagaatttttttttttacatttttacggttttttataaaaacaacacgaaaacaacaagaaaactacataaaagcaacatgaaaataacatctaaataatatcaaaataacaataaaaaataacatacaaataacaaaaaattaacaacaaattaacaagagtac

SEQ ID NO: 351063 - DNA, 548 bp, Cannabis indica
aagtaaaaaaattaattgtatttttttttataattttttttttatgttatttttgaatttttattctatttccacttctttattttttattttttattcttcatttctttattttttatattttttattcatcccaaccaaacaacaccttagagttttgaaaaaaagaaaatataagaagaatgacaatggtttaagttcttgatgtcttattctttttgtgggagttctcatatagaggaattaagctactataaagtataaatatattttattgtatataaattattgtaataattattttttaagtaataaatcatgaacttttcctttatataattgagtttagcaatttcattattttctttcaagaactcaaaattaaggtagaaaaatatgtgatgacggtggagtcaggggcggacccacatgtaggcaaggcggggtagtcgctccccttgaaaataaatcggccgaaaaaaaatgtacatgtaatttagttagttacgacatatatttgtaaaaaaaaatgatatttatagacataa

SEQ ID NO: 351064 - DNA, 734 bp, Cannabis indica
ttttctccttctttgatagttgattaaattagtcttattaattagttacaattatttaaatttatctaatcttgtgagaatttcatattaatgtgctaaaagacataattagtcactaatcttacttttgctaataatctcacatcaatatatcaatatcaatatatataaaggaaagtttaaagagaatgaagtggcataatctaaaaactttcttctattttctctattatattatttttttcacaattatatcaatttttgttattattttattattaaatgacttaattaataataatgtataacatttaaaaacaaactttaacatgtaataatttaataataatcaatttttaactctttgcattctatagaaactaaaagtcatacaaaattcaattaagtcattcaatattccattatgttatgtgttttcacctatatataggtataaagttaagcatagaaaattgcaagtgcttacaattttttatttttcaattaatccttctttgatatttttatggtaatgctcaaaaaatagtatgtatataaatagagaacaacacaaatcaatcttatattaaaattaattattcttaaccactattttttatctgttatatatataacttatatatataaaatttataaataattctctcttatatattgtttaaatagatttttattttatttgaaagtcttctataaaaatacacatggagatt

SEQ ID NO: 351065 - DNA, 962 bp, Cannabis indica
agggtgtaagccttcatattatgagggtagccaatgaagacataagatttggctcgaggtgagaatttatttgcagaattgacaacagatgcatatgctaagcaaccgaagttacgaaggtgattatactaaggttgtttgtggtgaaggagttcatagggagttttgtcttttaataagacagatggggttctatttaggagataaagagcagtggtgaccatataactccaatattgcaaaggtaagtgtgattggaaggcaagagcacgggccacattgaggatatgctggtgtttcctttcaacaacagcgttttgttgtggacggcctacacatgagttgtaattgataacacctttggtggcatagaaagtagtaagggttagctccttggcattatcagtacagactgatttaatgttagttttgtattgaatcagtatgtgctaaaagaaattttggatggccaagggggcattagatttagcttttaaaaggtaaagtgtgccttgaatggtcatccactatggttaaaaaatatctataaccttcgatggaggggacagaatatggtccccatatgtccatatgaacaaggtcaaaaatagtgggagatatgttgttatttgattgaatgacagctttttatgctttgcaatatgacatgttggacaattaaaaggtgtagaaatttcagaaacttgtaaatgtttattgattttattagtaatatttacagatggatgtccaaggcgagtgtgacattggatttgattatgatgtacattacaagtttctatagcagaattgtcctcagaatcgtgttgttgtaggtagtacaaattgccaagacgcttagctgtcccaatcctcgatatctgagaatggtcctgtattaaacaattgttagtattgaaggaaactaaagctttattgttgtgtgtgagtgcactgacaga

SEQ ID NO: 351066 - DNA, 943 bp, Cannabis indica
agttggataaatattgatattccacgaactcctcatccataatttagaagtgcacacatacactttggaagagttatagatactatatggttatagattatatacgatgatattttaaaagtgacaataatcttatgagatatattatcatcaaaataattgtgaatcacatgtgcatgaaggagagacatattcatgttgcactctatttctcttagctgatatattgtcctagtgggttttcctgacaatgtttttaacgagacaacttacaaataattattaatataaaatatatactacactcttttttccttacctcaagttttatctcactgagttttcttgacaaggtttttaacgaggcggctttaaatcatgctaacatacatgcactttatgtagcgagtagagaatgtgtaggagtgagattatgacataacataattgagaaacatatggactacactcaataaaaaagtatcaacaccagtagttctctatgaagataatactgcttgtatcattcaacttaaaagagagtacattgaaggagatatatttaaaacatatttcaccaaattcttctcaatacatttcaagagaatgcatattggtgtctaacatattcaatcaagtgtcaatcttgtaaacttattcacaaagtcattaccaacatcaatattcgagaagatggttcacaagattagaatttgttgattagaagatctccacaaattcctaaataaggaagaattaattatactgcattcttttttccttggccaagttcttatcctattacatttttggcaaggtttttaattagacaattattatagatatccaaggagaatgttataaaatattatatatatatatatggatgtccacgttaccaaaatcaattataccataaaatactattgtatttccctttatt

SEQ ID NO: 351067 - DNA, 753 bp, Cannabis indica
taatgaaaaatatgtaaagtcataactgttggaatgaccgttaatcatgacaagtggttatgaccgtcaaccatgaagggtggtcataactgtcaaccatgaagggtgatcatgactgtcaaccatgaagggtgattatgagtgttagaatagaattcagacggtcacctttacccctagtttgagtaaggtggccgtcttcaagaaggaaaaacgatagactaacaccttcataagcagaatgaacaatcaccacacacccacatgccaagttagtctaagggatagatgacactactgttgggaatattttaccaggatctagatttactaacaagtatgttgattaacatcctaaatatgaatatctctaaaataataaaataaacacataagggtttaaaaccttacattggttgcagcgaaatataatgactccttcccttcaagatctccagcccttgattcctttctgttgcagaacattatcaagatctgaacctggatctctttctctccttcaggtttggttaccaccatcttactcactatgattgagtacttgactcgctatgtgtgggcatggcactctttactataggtttcaaatggtgaagaacaatgaaagaggttgaaatcactatggaaggaactctctcatctaggttgaaggcaatagtcaaattgtcaaaagttggatcagtgagagcatcatgttcttatatagtgtttcaactagggcttagagctgaa

SEQ ID NO: 351068 - DNA, 999 bp, Cannabis indica
atatcactagttgatcttagatcaaaagatcttaatcctgacatggtcaggttgaatctcaagagtgttatttgtgttctttgatttgttattaaagcctaccatttggttcggttcgaatgtacattttgggaacatgatagtaaaattgagtgggagcgctaaaaatagatatagaatctatagcttctatctggacatagaagtgaaattatgatttttttgagcttggattaatagagataaatggaagagctcttattttagtaatttatattaggttccgtttggcaactacttttttaatcaattttcagtttttaatattggaaaagtgaaaatatttttcaaaaacatgttctataaaactattttcacttttcaattttttaattagaaatctaattttttttttttaaaaaaaaattactttcaatatttttttaaaaaaattttttttctcttaatcaatattttggatctgacaagacccgaacccaaatccccttcccatggccctggcgctgaacccggcttctgacctgaacccgaatccgaattcggacctagacctgactttaataaaataaaaaaatgaaaatgaactttacagaacacatttttattttctgtttttaaaattgaaaaacaaaagtggttacagaacgtatttttattttttaaaaataaaattttactttcattttgtgattaaaaaataaaaaaataaaagtgttaccaaacggcaccttagtttactgatatatcatttataggaagctaagtgttttaaagataaaatacattgaggggtaaaatggtaaatttgtctctactcgttgtaaatcatctataaaggatctttgattattgggattagaacgttggttgaatttttataacgtatctatatcgtggaacatatagagcgttctatatagttgagattgcaattccaaatctatagtggtgcaaggagaaattgttggaaattatttt

SEQ ID NO: 351069 - DNA, 753 bp, Cannabis indica
ccagcaccaggagtgggcaatggtggaagatccatgggaggcaagttgaaacccggcacagctcgagaaagatactcaaactgatcttggaatcgtctgaggtagagttgttgtgtctcatactgctgcctcgtatgttgagttgtctgctccgcttcctccacttttttctgtaaagcctcgtactgttccattgtaacagtcggttgggctgaaggatgcgtggcaggtgctcttttggccccaactcccttcagtctggggagatggccaaagcctctaagatgccgagatcgttccccgagtacttgcgtcataacaggtaagtctcgggggtactgtgtaggatcgacagcaggctcttcgggctcatcttcagtgggcgctggttgagttgccgctatttcaaccatttgctcctaaaacaattaaacaaataagttaaatggttaattttaacacaaaataaattgaaagaaataaataaaaattgaattaaaacgtaaacttacgtaagcttgttgcgcgaactcgttgcgccaatcgttgcctttatggtgaaacttttgaaaagttttgaaatatattagtattgttattttactagaaaaatttaaatgaatgatagttaaatataaacttaccccctcgacaacatgtgaaacaataggcttggagccccagcctcctagaaatttcatcttaccccgactttctttatttttcgctgctctcgcctgaaattaataattt

SEQ ID NO: 351070 - DNA, 975 bp, Cannabis indica
aaaatagtttgttgttttataaattgtttactgcttttggtgatgttcagaacccccatttttcatgttttttcaatgtttagagtattggtaccctagagacctaaagtgggacttgtggtgatgaatgaaggacctaaaatgagttaggtcaagtgattaatcagttttgttgttgttgtgacacaaggcctgaaatcgttgattgttctccatttaagtcagcccacacacctgaatcgatacttgaggtaagcaaagtacatctgtgccacatagcatgtcaagatacgatcaagatcatttgtgaattagttggttatgaaacaaacgagatgatcaatactataatgaatctaatgagacggtcattatcgttatgaaagtgaaaaagcggttatgaccactatgtaagaagagtcatgtctctaaactgaaatcattgttaggtttcctgcttgcccgttattgttggaggttatattaccagaatctagatttactaaaaagtatgttgattatattctataatctaacaccctaaacatgaatctcctaatacgctgaaataaacacataagagattaagaaatccttacattgatggcagcggaataataatgactccttccattcagatccctagcacctgattcctttatgtagcaaagaattatcaagatctgaacttagatattctctcctttagtttggttacacatagtcttcctcactatgctaagtattgctttgacatgagtgggcatactctcaatcaccatagacaacgaattttcatgaagaaattacaagaggaatttgaaatacaatgacaaatattaagaggttttctttgattcagtttgttagacaagagagagtctagagtctgttgggttttatgccctaaataaaactcatttcagtataatcagatttacttattaatatagatcagaaataacatttaatgtt

SEQ ID NO: 351071 - DNA, 1178 bp, Cannabis indica
aacataaaatgttatttctgatctttattaataagtaaatctgattatgttgaaatgagttttatttagggcacaaaacccaacatgcaccaggttgattgtctacttgggcactgggcccatcaccaggtcaacctaggtgctaggcttagttttcatgccctggaattcttattttctccccgagtatacttgtatcttcattatttcttatgacaaaaaataatgctcgaaacacttttcctaaaacatgattagaaacagcccaggttgataaaaatgtcaacctgggcattagggccagcactaggtgtcaacctaggcactgggtctagtttcaggctgccagatggtaacgtttgattcttgaaaatacttgtatcttaatctttgaagaaaacagagaatatgcccaaaagacttcttaaaaaaactccttggaattggcctaggttgacaaaatgtcatcctaggtgttgggccctctttctagcccccaagtcggtctgtttcttcttcggaagtacttgtttccttgtttttgatgatgacaaagaaaatgcacgggatagatctttagtttgatccttggaagtggcccaagttgataatatgtcaacctaggcgttgggtgtcgtggtacctggtgctccgagtgcctaaaaatagaagtgctctgaatttgattttgatgcctcaaatatgttcgtgacatgtttaatttatctcccagtacaaagtttgacccatttgcactaaaaaggtccaaactgaaaccctagttgggttgtcaacctaagcgcaaggtgaaaccctaggcacccgagttgattttcgtggtactgttttgtgtgttttggacttggatgcatcatgtcttcatggtatagaatactgaaagatagtgagttgaaaataaattggtgagatccaaacacccattttggagttcccaaagtcaacctaggccttgggctagggacccctcccaagtcgattattatgactcaggagtactactaaactctagtatgtattttttgccacgtgtcaaatattgatatccatatcatcagtgttacttttggtgtaaaaagttactaaaaaaatttagctataaattttaattttaaaaatattaaagcattagatttggatctaatggtgaataataaaag

SEQ ID NO: 351072 - DNA, 600 bp, Cannabis indica
aaaaactaaagagcacatggccaagcctcctatcctgtcaaaacccgttctcggagaagtacctatttctatatttggctgtctccgaacacgcggtcagcgctgccctagtccgggaagaatagagaaaactcagcatcctgtgtactatgtcagtaagcgcatgataggagccgaaacgagataccccatcatcgaaaaagatggtcttttgcctcctgatgaccttgaggaaattgaggccatacttccaagcacatccgatcaagatactaaccaaccacccgctccgtcaagtcctccaaaaacctgaagcatccggaaggctcctcaagtgggcaatggagctaagtcaatttgacttgcactacatgccccgaatttctataaaaggccaagccttggcggacttcattactgaatgcaacgaagccgaggcaaccgcgaatatgccagtaccgccaatccccacatggagagtatttgtggacggagcctccaatgaaaatgggtccggagccggagtagcaatgatatcaccaaccggactgcggctccaggcggccttgcagttcgacttcgcagcttcaaacaatgagg

SEQ ID NO: 351073 - DNA, 992 bp, Cannabis indica
tctgggtttaggactaagaccagggtccattattgggtctaagtctcggttttaggtcttgagtctgattccatgtacgggtctgagttcgggtgtcgagtttaagtttgaattttgatcctcatccaggtcctcgttcgggtcttggtttgggtccaagttggagtcctagtctagttacggttccaggtccaggtccaggttcaggtcctggtatcggtcaaggtttgggtctgggtctgagtcttggcttctggctcaggttccaatttcgggtttggttccttgtctgggtttgattccaagtgcgagttcgggttttggttcaggtcctagatccaaacatagacaataggtcggttcgaagcctcgagtccagatccggatcctggtctcaactcctactcttgtccaagtttaggtgtcgtgtcctaagctgggtcctagatctgggtctgggtttgggtcagaatctgggtctcggtctcaattttgtcgcccaggccctcgtcctattcctaggtctgtcccccaattctattatgggtttgggtccaagtctgggtctgggtttgggtctcggtctgggttctggtctaggttttgtttcgagtttgggtccaagtgtgggtcttggtctgatttcgggtccgggtttggatcactgtcagggtctgggtccgggtccagatctctgtttgggtccgagtctgggtacaggtctgggtttgggtcccctgtttgggtccaggttttggtctgggtccaggtccaggtctgggtccgagtccctagttccgagctcgatctgtatgtgggtccgtgtcccgagtttcaatcccattttgggtttgggtccaaattcgagtctagttaagcgtctggctctaagttcggtcccgggttcgagtatgatgtcgggttagggttcgagtctgggtcctagttggtctgggtctaggtctaggttctggtctggttttggttcgggg

SEQ ID NO: 351074 - DNA, 697 bp, Cannabis indica
ctttcaattttttgaatgcctcctcgcactcgtccgaccattcaaacttttgacacttcttcaatatgttgaagaaggggatgcacttgtctgtagaccgggagatgaaacggctcagggcagcaacctttccggttaggctctgcacgtctttatgcttcttgggagatggcatgctcaggagagcttggattttttctgggtttgcctcaatccccctctggctgacgatgaagcccaggaattttcctgatttgaccccaaaggtgcatttctttgggttgagcttcatgccgtatctccggactacctcaaaacactcttctaagtcgtctgcatggctattgcatgctttagacttgacgagcatatcgtccacgtatacctccatgtttcgccccaggaggcctttgaacatccggttgaccattctttggtaggtcgctccagcgttcttcagtccgaaaggcatgaccaggtagcagtatacccccttatcggtcctgaagctagtgcactcttggtccgccgtgtgcatctttatttggttatacccggcgtaggcgtccatgaaggatagtaatttgaatccggaagtggcatctaccatctggtcgatcctgggcagcgggaagcagtccttcggacaagctttgtttagatcggtgaaatctatacaaactcgccaagttccgtt

SEQ ID NO: 351075 - DNA, 664 bp, Cannabis indica
cttgttaataagttaattcagtagatttgtttaagaggtcccataggaggaacagaaagacacaattatgaattatgtattgtgggatcttatggttttgatcgagtagtaacgattgggcatgctgagttaatatgttgtctatcagtgcagacaatctgtacaataaatgaggatatggaattcatacgaaggaattatctaatcttgtaaaatttcaaagttgatatcattgtctatgatatttagaattaatgaagattatcgagaactatggggattaaagtaaaaatagtacaatattttatgcttgaaaggtggctaatctgggaggatcaatggaatattcaaaacatgttgtgagcatatttgataaaggttagattatcttagaatactttcttccattgacgaagtgtttgtttaaaagtgatgattaaatgtaccattgattaggtacttcaataagtgtggtatgagaaagatgttggacacctgttcactaaaggaacacatgtgataaaacaacacgatggaccaaaaagttccaaggaacttataaaattatagtgtgagttcaagatatatactcgtgatgcgtgtcataaaccacaacaaatttactatttttttaattccaatacttccaattattttagtataa

SEQ ID NO: 351076 - DNA, 520 bp, Cannabis indica
tatgaaaaaaaattaaactaaatttttcttctagatgtcgaaacaagtaggggtgtttcagtacatctcttttaaggggatgtattgtagaattacccaatattatttttataattgtaataagaaataaacaaaacaaccgcaacatgtttctaaaatcatattgttctttcttaaatagaggatttcattcatgttcgtaatgaaagtgtgactagcaagagtaaatctccattgtaaagtgttgttatgtggtgaattgaatgttaattattttataaacattttactaatctaaaaagctatttatgtcttatttggcttttgtctattttattccgatgttaaaattttatcttaattttcaagagtcttattttgaaaaaaaaaaaattcattaactttaattaaatatggcaaagaaattccttataatgcaaataaggtaaagagaaaaatgttttataaaatcatttggtgttcttccttttttttttttttttaaaaaaaaaagttaaac

SEQ ID NO: 351077 - DNA, 398 bp, Cannabis indica
gggttttactactaaaatttgaacttaaataattaaatacaagtaaaacgacaaataaaagagtttaaccccccaaaaactttttaaaaattttgtattattttttattcaataaatacaaattatatataaatgacatcaattacttaatacaggtgaatggaataacataattacaatgatatatgtaaaccattaatattttataaaaattgtaaaaaaaaatattaactcaaagaataattaaaaaattaaatataattcaattatcataattttttaaatatataaaatttaatttaaatttggactaatataaaaatattgggtgcttctacaatgctccgtcttaaaagggatgcactgatgcaccatctacctgtttcggcatctggaag

SEQ ID NO: 351078 - DNA, 1057 bp, Cannabis indica
ccatattaacaaaattatatacatacaaccaaaaattaatgggatatttttatttatacttttataattgatattttattcattttaaaaatagaaacaacataattgttaggattttataccctaaataaaaaccatttcaatataattaaatttactaattaataaaagatcagaaatcattttatgttgcatggttcacatgattactttcatgaatatatgactaatgtataaattctattaaatcctgaacatatagttattcataattatagtgttgtctaaacagtagaaaataatcataattatatgcttcaaagtatttactcccatgatttattagtgcactagatttacaatgacgtgataattatcaataaaatttacttgaacaatgatatgtggaatgtcctttctagggtattagcaaagtaaactagtatcagatgtatctggtatacatcggactggaccgatattgaaagtagaaaagatatcataaatttattgttatgtattttctaagtcaatataacttagttgatcttagatcaatagatcttaatcctgagatacttaggttaaggcttaaatgtattatatatgttctttaacttgttcgttaaagctgaccaaatggatcgacccaatacttacatcttgggaacatgaaagtgtaattgagtgggagcgctaattatagatatggcatatatagcttctacaactaataaaagtaaaacgatggtttccttagagcttggttaaacacgtttaaatgattaatgcctcatttcggtaattatattagtttctcaaaatatcatttacaagtagttaagtgttttaaggataaaagacattgaatggtaaaacggtaattagtccttattcattatagacctgttagaaataattggggtcacaattgtatatataaaatgtgtgttgggtcatcaaataaataagtcaaatttttgtgttctattttgtaataaagtttatgacttaagggtataattgtcatgatgttaatatgtggataccaattaga

SEQ ID NO: 351079 - DNA, 903 bp, Cannabis indica
agaacttttttcaattataagattaatgtacattttactattaataacatacattattataacacaattatgttttacttactaaatatactgacacatattttatttttataaaacaaatcgttcaaataattatactattttaattattaataaaaataaaaaactaaaatattaaataaaactaacactacgtgacttggcacgtaacaatcacctagtatatatatatgtggacaaaataacaaaatatgattattttttttttctctcttatgttttttaatattttaatggacttttctttttcatattgcaaatcatttttccttacaataactagttactagttacaaattaattattttaaaaattgatgtagttattataaatgatacgatagtaactaattactactaaatcatatttttttaaaatattattttaatattttggtaactagttataacaagggagtatgagaacaaaaaatctcataaaaatgtaaaaaaaaaaaataattgtaatattgctccttcaaaattcagtgggaaattttgtagatttgccaaactggttgaaattggttttttctctttaatttttcattaaagaacaagatatccagttgggattttttgttgtcatttggcgaaaattgagatgtaaaatggtatttactatttaggcctaaaatgtataaaacacttcatccaaacccaaaggaaagaattgggaagaatggacaaaatgacaccatacactaatatggccaaaaccatggattggaatgggtcataaattgattcaataatggagtttttataccacattaaaatttcttacttttttttgtattggggcagaatttttttcaaaaatactgtatactatgttaagttt

SEQ ID NO: 351080 - DNA, 631 bp, Cannabis indica
gttataaaatacttatttttgcacaacgtcgtggaataaggtctactgatgtcagtgtcgataatctcttataaagagtgactacagttaacagtctgctttcttattttagtcaattttccacaagtgcaattagcacaagtatcccaaccagaagcatcacgaagaggaaaaattttagctctaattaatcgttcaaactttgtttcgaaaatttgacccaatctaaggatgttaccttaatataagagctcttacacacaatattcacaaaattaaaagagaaagctaaggaagtcaatgctaattattaaagaccaccagagtgaaatagtgtccaaatattcggagtcaaacataatatcaatattatgattggcaaaacgataagaaaatcattattgaactaaaagcggaagcaaaactgaattactttaaaagtaggaatcaagaaagtactgttaaaaacaatctgaacactaaactataattcaagaattaatgtgcgaacataaataacgtcaactccaatataagtgccactttaagctttgactccctcgcacttatcttcttgagatcccttagcctctggttgtggttgtttcttttcatattttctttatccttt

SEQ ID NO: 351081 - DNA, 649 bp, Cannabis indica
aaattcttgaaacttttcaaacgttttagctttcttatgcatagggttaatatgaccatatttagagtaatcgcccatgaaagtgccaaagtactcatagccacgtttagctttgacattcaatggtccacaaagatttaaatgcactatgcctagtggttccatggcacgctctccctttgtagagaaataacgttttgtcattttgccttctaggcaagattcacaaactaataattcacgtaaggtgacattttttaatggaccacctttggttaacctgtgaagtctatcatagcctacatgaccaagacgtaagggccatagatatgtttcgtcttcattatcaatcttttgcttttttatggtttctaggtttagctaccttaaacagttcgttattgagcgcaaatggttcatttggtctaagaacataaagcccctattccatagatgcaacacaaatttgaatgtcatttcgagaaatgatagaaccagaactcgaaaaattcaatttgtattgttgtaactgtaaacatgaaacagaaatcaagtttctactaaaatttggaataaataagacattgtctaaatcaaaaattctgttctgaaacttgactttggcttttcctctagctctaaccgatac

SEQ ID NO: 351082 - DNA, 624 bp, Cannabis indica
aaaaaaaaaaaaagcaaaaccaaacattggtggggcattagacccacttgaacttctatgtagtccaaagtgaaatggaaatatttagtgttaattcaggaatacattcacatggctaattttgagatttggctctgataccacttgtaaggaccgtcggacaccatttatttatctattggtatgatattgtccgctttgggcgtaagccctcacggatttgtttttgggcaccttcccaaaagacctcattccaatggagatagtgttcatccttatatacctaagatccttcctatttctagccaatgtagaactctggatgtacacccaacactgtttctattacttttatctattttaattttctcttaaatttgatataaccaaatagaagtaaatatttaatttaaagtacttaactacaatccttgtgagatcgacatcactctttgtgagtctattacttgtttacgatatgtatacttacgtgttaataataccacaacaagtttttggcgtcgttaccggagattgttagttaatattaataaaaattaaattttgttctaatttagtttttctttttaatttcagtactaattctatttatttcaatttttt

SEQ ID NO: 351083 - DNA, 401 bp, Cannabis indica
tttgtgaataattttctatatgtagttcctctaagatagtgatattttttcagctctttatcttttgatatctattccaagtattctctttgcctcccctagatctttcatttcaaattctgagcttaattgctattttcaattagtctattgcatctcttttcttttctatgatgagaatatcatcaacatacaataataacaagattggttcattattatagtacacatatggagtataatcactccttgtatatccaatgtagatcatgcacccatggaatctcaaattccattgtctgggggacttacttgcttgagcccataaagagatttcagtaatagacatacctgatctagtttgttactttgtagccatctagtcttccatgtatatttgc

SEQ ID NO: 351084 - DNA, 907 bp, Cannabis indica
cgacaatctcaccccacaagcgacactgctcctttcgcggacgttagctcgggatcgcgagttaaaatttggcagttcaaactttgaacggattttttggccacctctggtgtccgtttgatgagtcgtcttcaccactagactcggatcgtcgaggagaacaacctacactaagctattttgcccaacttgctactttttctagtgacgtttttgtagccctgcccctttctgatgacttttcagcgatatcgtgtaccgttttgacaaacgaatggcatgggtgtgatctactcgttgaggtggtcgttttgatatacactatccatatttttgacgacgtttccagtacacccatttttaccaccaccgatagttaatgtacaccatttaggtgaggcttcagaaccccaaattttaaatatagtcatattatatgtcgttggagtcagttttgaatgtaaaatacaatgatgataattacttaaccatttgatagtatatgtgagagtaatatataagattggactaaacaactggagtttgggacttaagagcttaagatcgtcttttggacaaagtttaacaatttgggagaggtagggactcaacttgattattggacttgatttttatatgtgttgtatcacattagacatattctaaatttttatgatttacaaattgtttgaaaagttgaaaacttaatctgcatattttctggactgttttggggtataagtgccaaatatatttttgtgtacaaatatttatgcaagttatgatttttagtttattcaaaattcagtcgttgtgctgccgaattttctagaaaataaaaaagaatatgttcttttcttattcttattatttgcatgttttgtttatactgatgagagccatgttg

SEQ ID NO: 351085 - DNA, 720 bp, Cannabis indica
ctaataaattttgaattaaccccccattttttcccgcacttatcatataacttcaaattagcggcgggctgtccgccggtattaccaaatgcccgccgctaattattattttatttattttaaaaaaacaaaaatctgaaaaattggaataataccggcgggcccccacatccgccggtaataaccttattattaggggcggaccttccccgccggtaataggtccgcccctaataaccaaaattgttgtagtgtttattgtacttattccaaaaaggtaatttttatacatatttatttatggtaaaccttattataatcaaatcaatctatattgaattgaaattacttaaaataatccaatttagctattatgacataattattcctattttaatttccaaaaagttgtaaaacttccaaaaattgtatccttttaagttaccataaaaacatttataatgataccttcctataccacatagattacaaaccaaattccataaaattttacttcccaaatatatctgaacacaataaattcgcaattgacaagatacctccttttattacaatatcttcgtatttattattctttaaattacttgattaattttaaataaaaatattagaatctgaatattaaattccacccctttccctttttgctaataattcctaaaaatatgaactaaccatagctaaaagctattatcgttt

SEQ ID NO: 351086 - DNA, 619 bp, Cannabis indica
ttccaaaccctctttcaagaaaaccacaaggcctacccaaaaaatcaattacccgcatagccatatatgaacgtgtagctcccgaatcaaataacacagtatataaggagttgttgacaagaagctgacttgtcaccaccgaaggactgctgcagcatcaccttaggtgatagcaaacacccgagcagttacaggtttttactctgacgttggctcttctttctttgcctgagggcaacctttcttgaaatgctccaccatgccacactgaaagcatgtcttccaattgcactctcccagatgatgttttttacaacgtgggcactcagggtaagagtaaccccgacatccacctctgccttggttttcacggaattgcttactctgccccgagccaccagatgctggaataactttcctcttctaatcagtggtggaatcaccaccatccctatcataaacaagagtaggaagggtgggggtcccaccaacattcggagtcacttggggatcctgaaggaattttattgcaccctcggctcgcagggttttctcaaccatttctacacatgatgttgctttgtcggtagtgatcaccaaatcatgtctaatcttcaca

SEQ ID NO: 351087 - DNA, 510 bp, Cannabis indica
gtctaggtctgatttggagtccgggacccggtctgattacggttctaaatctaggtccaatttcagttatggttcccagcaataggtatattatagtagtacatatgtgtatagttatcagttgccttggtgtgttttggactttgtatattatattcttcatgtactaaagtacttttttacagtattggtatttatttatttatttttctttttttatattgtttccgttttacttaatgttgtaactttttatcactaactttggtttacactttgttatgtaggtttattatcttagaattaacattttaattatgacaatacctttgtgtaatcaagttactgtataactttatgtattaatgtaaagtttagctggttaattttttgcagataatttttctaacttatttagtgattacatgcctcattgaattataatttttttaacttttttttagattatgtatttagttacagttacttttatagttaatgattataaaa

SEQ ID NO: 351088 - DNA, 1005 bp, Cannabis indica
cttttcttaatcacgggtattacaataaatttgtctgaagcttaacatcatcatagctcaatagacgggtcgagtctgatacattgtttatcagcatggacacatgaaacacattatatactctggacaacgtaggagttaaggctagttaataggctacctggcctacttactctagtgaacatgtatctaatatttttctcgtacaacacttattaaggtacctaacaactggtatattaaattatcctttttgaataaacacctcgttagagacgagattaatctaagataatccaaattttatcaaatatgctcacaacatgtttctaatattctattgatctactcaggttacgcacctttcaaggatagaacatcatactatttttttttatttaatctccatggttctcaaaaaccttgtttaattcttaacattgtagccaaagatatcgaccttggaatttcaccagattagactattcctttgtatgaattcgatatcttcatttatggtataaattgtatacactgatagacaacatattaactcggtatgtccaaccgttactacttggtccaaatcataagatcccatagtacataattcacaattatgtctttctattccttctatgagatctcctaagctgatctactgacttaacttagtaacaagttaaatatttatttctgatagatattcaattaaagcatttcttatttccactaactaatatatacttatctcaataccttgtaaatttttgtttattaacatatcactccctcttgataatctttggaaggactaccgattatgcatcctaatatgaatctttctagcgtactttatcctcactcatacgctttctaagatgactctccaaaatatttcccatcttgagattaccccaaattaagtatgctcaactccaaagtaacatcatggtgggttatcagaaagtagatgcctctttgtcgttcctaattgtatttctt

SEQ ID NO: 351089 - DNA, 609 bp, Cannabis indica
cacatttttggacgtagtctatgcaatctttttccatagtttgccagaaatacccttctctcagtattttttttagagacttgggcctcctgtatgatctccgcagaacccctcatggacctctagcataattttcttagcttcagggtccgatacacaccttagatacggtatgctgagtcctcttcgatagagagtgttgtccatcatcacataacggtccgcttggtactgtatccttctagatagtgccttttcttggggcaagccgcctttggttatgtattcgatgatgggggtcatccagttgagctcttgttcaactgctgccactgaggctaacttagcctaacagtctgcgtgagcattcttttctctgaggattctttctactttgtagtttgtgaactcgtggagcaactcccggactattgctacgtacgcggccatcttttctccgcgcgtttgatattcccccgatacttggttcactaccagttgtgaatcacttaagacttctactcttctagcccctacggcttttgctaatctctgccccgctatcagggcttcatattcagcctcattgttagaagctgtgaattcgaa

SEQ ID NO: 351090 - DNA, 598 bp, Cannabis indica
gggttaacatcaccttgatcgtgtgcccttcctctagagcctctgcctcaaccatgaacattcaaggggatctgagctccttgactgccactagacccgaccaagttaccctgactcctggtattttgcctggcgtccatactactagaacagcctgtgtaaccaagagctaatctgctcagattgcgatatagaataacctactaattaccgcttattttggaaatttaaaacatgtgcctattcagctatcaggctactaacatgcttcctatcaggcttttctaaaaacttactattaaaataaacttgtaaagcaataaaggcttactaaatcgtgagacgagctgatcgctgatgatgattgtacatgtcgtgacgatctttggaagacaacctggtgactctgataccaaattgtaacaccctactagcttaggcgtgtttacataatttttaacttagctgtgcaacttgctaatcaacgagtttattgaaaatcgtgaatgattaaaactttatttaactatttgtaattaataaaataacatacttatattgaaccgggatcccatttcacaaaatatttacaaaagtt

SEQ ID NO: 351091 - DNA, 764 bp, Cannabis indica
tattaactacgaaagtaaaatattatggtatttttacaaggtaggtaattgtttaattaaagcccaatatgaaagtttattagggatttataaatttataaattatttagtggattttaattaatgatatcaaatgacattattatagcattaatgttaaaaattcgtaggtttggataaattcgcaggactaaaatattttactaaaacgatcatatctagagttctagagctcggattgaggtgatttcagtggctttagaaagataattccaagatctatcaattatttagaaatagatttatcgtaattttaaatttattggggtcaaaattaaactacaaagtaacgacctgttaagttcagcgtagaaaccctaagttttcaaattcaaatttaaaacttatatctaacaaataagatttttatttaattattctatttagagttaaattagcatctttattattttcttttacaccattattaggtttaattagattataaaacctaaatctctcacattcttgctacgtaatatggaaagaatctctaacctaagaaaataaaaaactcaatctcaatctcaatctctttctttcagcttgaacaaaatacttagagaatacactcataaaatcctaatcctaccatctattcatctcgttatctttcaaggatttattatttttcttcttatttcgttctcttcgccaaacaccgttcatgattttcatcaacgtagggttgagatcatcatcac

SEQ ID NO: 351092 - DNA, 638 bp, Cannabis indica
ataatttctgaattgtgtatgaattatttaggattgtcattttagtatttatgctttcaacaacaaatttaaattactaaaataaaaataacaaattcaaaagaaagaagacaaaaattgtacgtagaaaaaaatatgtggtattattttaaattatattttctttatagacaactgacttgttacaactgacggactagcatcagcgtcagcctgagctatagtgaaaagtcgccccgggttctaagcagtattcttcttaggctcttctttcttggtcaggggacaatctctaataaagtggcccaccatgccacactggaaatatgccttggctcgacactcaccaggatgatgcttcttacatttaggacactcgggatatgatcggaatgaggacccgcgaccctgacaaccacctcggtttccccgaaactttctatttccccctgatgctccagaagcctcagccttccgcttatgctcaggattgccactgtcggtccccttactgatattaccactagcaggaggatttgatgccacgacggcatcctttgcagcctgctctttcattacttgctgctccgcctcctcagcaattagagccaagtctaccactctcttatacagagtgt

SEQ ID NO: 351093 - DNA, 556 bp, Cannabis indica
tcttattagatatttttttaaattataattaatttttggcataataacatgaaattttgaaaagtttgttaatttaggtttcaatagaaatattagggtttctaaccataaaattttcaaacttaatatattttattttatttaattattaaacaaaattgataatatatgttgacttcgcttttagccaatgacaatgagtctttttggtaagcgataaacaatatgtcgtaatgagaatatgtaataaagcaataacaagacacaaaaattttatagaggttcagtcccgagcagttcggtaatagcctaatcctcgttatttgtattgacttaagaataaggaagacgtttccttttcttatagctcttacagtaagatctctgaatatataattcttagatagccttagcttacaacgtttcgacttataatttctcagtcctttgcccagtgaacattcctcactatttataaggctggaaacttgacgaggaagactttcctctctcgttacaaggcgcataaatagaaagatcgtgtgatcaatgctga

SEQ ID NO: 351094 - DNA, 1776 bp, Cannabis indica
ataagtatctataaaaatatcccttattcctaggtaaatatcctataaacattgggattgttgttgaagttagatattccccttgtcttaaatttgcttgtgtgtcattgcgctttggaaatgcaaacattagagaggagtgacaagggatgtcacttctttagaaatatactaaattggagaggagtgacaagggatgtcacctctcggctagaaatataccaaattggagaggagtgacaaggaatgtcacctctcggcttggaattcataaaattggagagaagtattggagagaggtgttttaggatggcacttctcgcatatgatgtcacatgggctatggcatacctctccaacatcccatcatagttcacacttaataacaccaattaattcccaagtaaagtgtgctatcctatcttgtgagctaattttgagtctgataacttcagaattgagctatgacaatgagacatacttagatccattttgaaaagatctttccaattaaagttgaactaagtcatttggataaaaattgagagagttatgtctaatttactaaagggtagtatgtacttttttactccaaatctgaccattgccacgtccatgtgggagttcacggacgtgcatgttcttggacccctcggggtgtgtattgacttgtttttttgatggtgaatcatataatgggggtcctgagacccccaaacctcatttcgatgcccaaaaccctaacgggtgaccactgccactagttaatgctaaaagatggtagtggttgcccaaggcttatgggaagccttggatggtgtttcatgattattgtagtacatggatgctagaaaactactttggccacattggttcttggccaattgatagaagagagcactgccatctttttggcaaaaaagatagcagtggttgcctgtgagggttatacacccttgggtgacttttctcacttgtatttgatatgttgatgttgaaaataattcctcattctttgttatggctaaccactgccactcttcattttataccattgggttgatctccgttggattaagaaataaatgatctaacggatagaaataaggaagaagtggaaaagatggttatttaatgcttatgatgtgcctcgaaactacaaaactgccaaaattaaaggcatgcatttttttaaaatagatagtgacaaaaatacccatggtaatcatttaaaaaacacttttcactgaaaaagactttttaaggggcaattgttatacccgaaattaagctggcacttcagaggatgacacgtgtcaacctcgaggaatacgaatcaacaaatataatggcaattatattaaaagatattaaatggaataactcattaaatgtagagtcaatagggtatatttataaatcacagactgcacagtctttagcgagataaagatgtacagactattgattcacatgagaaaccatttcgcatcagaggacacagttgtaaggaggacaccgataatacgtagtgagacatccatctcgttataggaaagaatactcccggtaccgtcactaatcagctctaaacatctttcaatgggctccactactccgttgcatcagctctctacaaaagaagctgacattcaaatgatgttagctgctgaagtccatcttggcatctagaactgtgatttttagatggagcgttatgttttcaaccttggaaagacatgggaaaagctccagctcactgccagggttattgtt

SEQ ID NO: 351095 - DNA, 524 bp, Cannabis indica
accgttcgagactcgatgtgaagctgactgggcgtcccttcaattttcggctaataaatgctctgacaattaatatttcaaaatccaattttctctctccacggctaacggttgcactcgattacttttgatttcccatattcatttttgaggcgggaagttgaggcgtctgaggttcctttgatgcagttacctcttttcgtgacttgcctataaatacccatagcattggcacataactcattttatcacccttcattgctaagtaaacttcagagcgaaaagagagttttctggcttcaaagttgccgaagtgccttcatacaactgctggtttgcttgacgttgctcaaaccaagacactcgaatctttgagtaagtttctgatttcctttatgcttttctttgcatgtttacactttgaatgcaactatgctgtagaaaaatgcttaggaaaccctagggttagaaacttctgcaactcttctttatcatgtcttcatgtgggtttacagccatagagc

SEQ ID NO: 351096 - DNA, 798 bp, Cannabis indica
tcattttcctttctcattttatttactttcttgtttagtttttagcctagttcaaatcatcatcatcacttcttctttattttactcaaattgtttagtattaatttttgcgtaattaatttctaatctattcttgtggagacaatactcttttacttatcattgtattacttatttgtgactacgtgcacttgcgtatatctaattttagcacaataagtttttgcctttcctttacctacacattgaaacaatatctgtgagtcaacaaactcagtaagaaaagcatataacatatatcatattaccgacttgcattcaagcgcccatacaactacctacaaggcttaactattgatcaaaaatgttcttaacataagtactacctctataccacatgcactaaatactcgtcccgtactagtgttggtagggctgaaccgtaccccgagtaccactgagtgttgcactatgtacacgtcttgtactagtattggcatcactgtgttgtacccattgaacatcatatactgtaccaatgcactttgtaccactaccgtactagtgttgatagtatacgaatcacataacatagcatgcacttacatacatacacatatacatacacatgtcttttgatagtcttacatcgtgtcctgattcaaatgtgtcattcaacctgaatagaaattcatgcgttgacgcccgtacctacgctcgatacgtcaccaggaggaaaccctacaatagtttcaatttatgccataacttgacaattttcatatcactaacgcccgt

SEQ ID NO: 351097 - DNA, 733 bp, Cannabis indica
tattattattattattataaagtctttttttttaacaatttagatgccaaagtatttttttatttaaggtgagatttttttgtgttaataaattgattttctcacctttataattgtttttaatgcacttttctatcataagaaagaatcttatttcatctttccattttatatgtttggaaacttcttgtaagacaagaaattctcttatgaaaaattggctttctatggaaactttgatcatgattatttttccttaatgaattcgattgtgtcttgataagatcagattaagcacactgtttttagcaggtatcaagtccatatacatgatcggacactattttggcaagtttccttttttggtctggtttgttgctacagaacctgtctctgatgttgcaaaacaagattttcgtttaggaaagtttgtacaactatggaatcgactttgtagttgtctctaggatttctatgtactataaatagaacctagagagtagccaatcaattcaactcttctagctttcattttttacatattctcatttgtgaagagagagttctttttgtgagaacctagttgttaatctaggttttagtgttgataaatttattcttatactggtcttagggttggttagaacatcttgattgaacaagagaaaggtcttcgggagaagacttgttcaagccttacttcaagaggaagtaagcactcacacttcaaaga

SEQ ID NO: 351098 - DNA, 1053 bp, Cannabis indica
ttgatctttctaaggagctaactgtcatggacccttttgcttagaaagctgctaagtccaaggattctttaggaggaatctcggacaggcctagacagtcgaagggccgatccgagctggccaagagaggatctgagcagatccgggctcctactccaccttctccattgcatctagaagccaagagaggcaagtagatgctcactcactacatgaaccggttggttcctgaggtgagtgagcagctggtcggcgctgacaacgaatcttccctagagcttctaatgagaggagtcttgaaggaatttacaaaggtgaatctttcttgacagtttcctttgatccttctttacttggctagactctaatgttttttctctgtgtaggttggtctgaagatggcttacacctattcccgagctaattctgctgcctccaagaatgctaccatgtccaacaccatgagggcggaagtggacttagccaggaaggatcttgatgatgccagggtggaactcggagctgtccgaatggagttgggtgaagtcaacaagaagctttttactgctgagaggaacgtaaccgagttgattaaggacctcgaggcttctgaccaacttgaagctaccatcgccaccttgtcagcagaagtgaatagtcttcaagaggaaaggggagttcttcggactgtcttccgttggctggaagcagagaagaagtctaaggaggaggagcttacagctgaggtcgagaagtatatatcggaggttgaacagtagagagtagatgtgacgaggctggaagagaaattacatgccctagatacagcgggtctcgagattttttatgacttctggaaagctaatcccgaggcaaatttggattacatgggtgattccaaatacatgtttcttaagtactgcacttctcaggtgcttatggtgaacccgaggtgaccacttctacttctggccaaaatgttggcgtgccccccgctcagacaaaagatcctccagctcctactggcccagaagacccgaacaaagagcctgg

SEQ ID NO: 351099 - DNA, 1124 bp, Cannabis indica
aataaatagttttggtatttatagggttgaacgtgcaaaaagtggtatttgtgaaaaatagataaaatagttgagaaaaatggcaaaaattaaactagtgtagggcccactatgtgaccggccactaggtgctaattttactctatttttatcaattttttattccaaataaatcaaccctaatcctagtggaaattagtataaaaggaaagatatggtctcattattcaactaatgcttctaaagctaaaaacctaattttctctctaggtttatgagacttcatcttcttctttcttcttctaatttcgaagcctatagccttcttcacaaaccaaattcaagccttagtgattgagtgcatgcccacacataacaagtgagtcctcaatcatagtgtaagactgtgaagaatccaaacaataagaaggagtttcggactcagatcttggtgatactctgctacagaaaggatacaagagttagaggaaggagtcatttaattctacttcaactaatgtaaattttttcataccttttatgtgtttattttatatcattttagaagttcatatttaggatgttaaaaacatacttgttagtatatctagatcgtggtaaaacatattccaacaattgtcctcaaagccatggtaattgatttacattcaagaaatttggacttaaaacgataaatgtatgatttggatgtgattcatgtgtttattgatgattgtttgatgtttgcaaattttttacataaaataattagaattttattctggaattattattgttggatagtttgaaaaaaattaagcaattcacttatttacggaacttaattttgattttatttgaattagttatgaatttttgaaaattggaaaaatcatagggaccacgtgacacacgggtatcatgcgtgttcggacagcccctgtccaaagaaacacacacatagtgtctgaacaggggccctgcgtgcgcgtaataggctgcacgtagcctccttggccgaggtttctcggccagccctttcccaggacgcgcgctgatgatatgcaatgcataccatccgtaccaaatctaaatttttttcatggaattaacttcaaattttt

SEQ ID NO: 351100 - DNA, 711 bp, Cannabis indica
aagagacatttactaagtaggagataatatggtcttgacacgagagaatgaaaagaaagtagaaagttagggttaattatccaaggttataattgtaatttcatcatcaaatttttatccaaatgactattttgctaaatttttataaaaggggacatttactatcttaatttttaaatttagggtcattttgcatcttagcctttaaaaattcctcatgaactattgagattgttagatttaaggacttttgtctaatttcatttaattttactatttcagtgattgtttatgtactaaaacatgctccacaaactttgatatccaccaaatcatgcccctcgaactttgatatgtactatatcatgcctcctgaactttcatccatgttagacttttttttactaaaattggacaaaagtctttaaattcaacaatctgaatagttcagagggcatgatttggtacatgtcaaagttcggggtttaaaaattataattaaccttctttttatacgtacaattttttttcttcctttgaatttgttatttactattttatttattttaatgtgttgttggagacataaaataactataatttgttttattttgttgctagttatatgaatttttttttcataaatattaaataatttaatattaaaagtaaccaatccaatccgtacctttgcggattggattggattag

SEQ ID NO: 351101 - DNA, 840 bp, Cannabis indica
atctctgttattgcaggacaacaggtaagacagtagtttgcacgtagagtatgcgcagtggcgcttatgttgaatatgatatatgtgagtaattgtaaccgggattagggttattaccctaatatgagcggtttaatagcctagggttattactctagtgatatatgttgtgtaaatactatgccatgtcggatatatgcatatattgagattatgaattatgcgcttaaggcataattaaactagactcggtaagctagtaccttgagtttaattttaatgcggtctcgggttattacccaagaatattatgaatcaagtgaaagcatgagttagggttgacactcttagtaaatattatctgagtatataaaaatgtatcatatgagtgattacatagtatccaagttagggttattaccctaagattatatatgttgtagtaaatattgaatacacgaatgtatgttaagaattatatgtataagacataactgggttagacctggtatatatcaccaggataaaccaccgaaagaacgtaatacatggattacgtatattcatgaatagggttatgcgagcaaggcataactaggttaggctcggtaaccagaactgaggtaaaccctacttaggccttattgtatatagacgtgtgagtgcaacacgtaggtctacgccacgtagacataaataggcatgtgagcgtaatatgaaggtctatagcaaatagtcaaatattgttgtggcaccaataattatgtgttacacattgagattaagggttatgcgtcaagccattatcaagttggactcggtaaccagaactgagatgaa

SEQ ID NO: 351102 - DNA, 707 bp, Cannabis indica
attaaatgtatataaattttttaatggaatatttaaatttataatttttctctataactccagtttcaataatagcaaaacaggttacagtgggtcgcacgaacacgacacaattttttatggtcggattaggttgagaaaattagacacgtcaaaatatatgaatcgacacatctgacacaaaatataaaagcgggtcaaataatatatgacacaaacacgatacgatgacacgtttttccaccgttaagttttatttccacttcacaaaatttgtgatattgataatttattaagagaaagcaaaaaaagataatgtgaaaaatgaatagaatttagtaaatgtttaataaagaaaaattatgaattatttattaatttcttaaaaaattatttaatattaacaaaaattttatcataacaactattttaacagttatatatgattaattttcaaaaaaaaaacagttatatatgattatgtttttataatttagatttgtaaactttttaaaaatgtaactataaaaaaatgtaacattgctttgcaagagtcacagtagaaatattttttgctactacaaaaataccctttagaggcggtttttaagccctttaggcgtcggttttcgcgaaattcgctaccgacgcctatcagggcgacgctaaagggtttatttgaaccgacgccatatgtaccctactgg

SEQ ID NO: 351103 - DNA, 1298 bp, Cannabis indica
caaactcatatgttctggacttaaaaagaattcatacattatatacatataagcatgaaataaatcatgtgaaccatgccacataaaatgttatttctgatctttattaataagtaaatctgattatattgaaatgagttttatttagggcattaaacccaacaaacactttgttctttctcttaagttaatataatacaaggagagtaggctattaccacgctcatggggccgaacctcttcaaaatctggcgttctttctactttatcatttttgttctcttttaattatataattaatcattttttaattgattcctgtcgttggctaaaaacgaggtcaatataaaccttgagttctcttttcttctcagttaagccattccttagtgaaaattcacaaacaagagatagtcttatttagaattctaatttattaattaaaactaattaattgagactacaaaataatattatccccgttagtgtggggaccatcaccctatgtaatcaagctactaataagtagatctaaaatttaccaagtaaatatcctaacttattaattccttctgactccactatcgatttagaattgcactcttgattacataaaacactctattaccaaaaatagacgcgatttgagtccaaatatttatagatcatctatagatgatctatattgagtagggacaaatttacccttctacccttcaatgtatattatccttaaaacacttatctaattgtaaatgatattcaataaactcatataactactgaaatgagatctcaatcatttatcacgttaagccaagctcgaaagaaattatcgtttcacttctagaagttatagaagccatagattccatatctatgattagcgctcccactaaattatactaccatgttcctaaaatatatgtattgggccgatccaattagttagctttaacgaacaactcaaagaacacaaataatacattcaagccagaacctaactatcttaggattaagatctattgacctaagatcaactaagtgatattgacttagatagatataacagtaagtttatgatatcttatccaatatcaatatcggtctagtccgatgtataatccatacatccgatcctagcatacttgccaatgccctggaaatgacataacacttatccaaggtgtaagtaaactttatcgctgattatcatgttagtgtaaatccagtgtattgacaaatcatgggataaaaatttgaaacatataatcatgattatattccactgtgttgac

SEQ ID NO: 351104 - DNA, 471 bp, Cannabis indica
tctaagatcctagtaaaataattcccaacagagttatacctgtagacttacaaaattcatcataaatagagttctcaaactccttaccatgatcactctgaatttgaacaattttcccaatgctacatccgttttcaactcttaatctcaaacaaagagttttaaaagcatcaaatgtgtcagacttttctcttaaaaaatctatctaagtaaaacgagaaaaatcatcaacacacacaaaaatataccgcttaccattcaaacttacaacttgaattggacccataagatccatgtgaagcaattctaatactttcgaagtattgatatcagacacacttttgtgagtgatttttaattgttaaccaagttgacagagttcacatttaccaacgctttctttacccagcttgggtagacctcgaataatacttgcattcgacaattttttttagatttttataattaata

SEQ ID NO: 351105 - DNA, 734 bp, Cannabis indica
cacgaatggactcatccatgtgatacctcataagcatcaaacaacagcgattggaatgctcccaatcctcataggacttcttatccttttcagtggcatcatcagcaggtttaggcggtgcatccattctcaaggcaaaatccactctcataagagtcaaattcaacatgagagattctacccactgtttgtggttggttccattcagtgtcaacatggcagaggttcttagaatgcttaaagctgaatgagaaacaagagcaataaccattaaatgcatgttataacaaaatcatgtcatttgtgctctttctctcataaataaatgatcgcaaaataacaaatgatcatcatgtatgctagagttcttagacaaaattaataaagtagaactcatacacaggtaagaacaatctattaaatattataatcaaatacattaatttactatcgaaaggatagataaattgtgattcataatatttaataaattttcttcaccatattaagcattatccttagcaagcaattattatcgataggataattaattatttataaggatcttaatcttatatgggaagaagatacaatatttaaatgttcctcattaccaaacaattttccatgcttaatcttacgataggtaagaaaataagcactatttgttcaaataaacattaatttatgccataacaagataatattaataactaagattatgaataaattca

SEQ ID NO: 351106 - DNA, 879 bp, Cannabis indica
aagtacagcttgaggggggtgttagtacaggtagttaaagtctgttataaagttagttagtgagctgtgagtttaggtaagagttgtcactcttgcacagctcattcataacagaattatgttatctctgtattgcttgttctatataaataaagtatacaagagcctgtaaggtctacagctcatattcatcaatctcaactgatcctagtcttattttcttcttaccttgttgtgaattcttctttggtgaaggtggctccttcttcctatctgcttctctgattctttttcttgttctggtgtactcaattcccttgttcttcattttgttctacgatgtcaaatgatgatcaatctgtccattccaaagtcagatctccaaatccaataatcataacaaatccacaaatgactgccactcaaggcaatcagaatgttcaaacgatcaattcaagaaatcctatcgaagaccctacagattcgtattacctttaccatggtgacaatccaggtaatactttggtctctcaactcctaattggtcaagacaattgtgtgtctttgagtagagcaaaacaattggcaatctcaatcaagagcaagtttggtttccttaatggttctatccttaaacctttacctattgattacatgatgtatagtgcttagtatagaaacaataatattgtcatttgttggattctaaactctatttataaagaaatttcttcttgtattctttatgatgaaatgtgagtacttaagagtaggggtgttcataaaaaccgataaactgaaatcgaccatcaaaccgaccagaccgtaaccgaattttcggttccacgtcatcactgaatttggcagtcggtttcggtt

SEQ ID NO: 351107 - DNA, 568 bp, Cannabis indica
gcctatttgagtagtcggcctgatgcttcaggtttctgcaaagcctgctacaatggttgatcggtgtacacctttatgaggtgtgcctggaagtaaggtctcagctttctagaagccaagagcaaactataagtcagtttctccatgagtgggtaccggctttcggcgtcgattagccttttgccaatgtagtatatacggtgttgtacaccgtcttcttctcttgtgaggacatcactcacaacatgctctatgacttttaggtacacacctagctcttcattgtctaggggtttagaaaacataggtggttgagcaaattatttcttcagctcttgaaatgcattttcacattcctctgtcaactcaaattttttgttacctctaagaatgttgaagaagggtacacatttatctatagatttggacacaaatctgcttaatgcagcaatgcgtcctattaggctttgcacttccttgataattatggcgacttcatgtccataagggcttggatcttatctaggtttgcttttattcccctagcattgactatgaagccaaggaa

SEQ ID NO: 351108 - DNA, 557 bp, Cannabis indica
taaggtaaaatctagagtgatcgtcttaagaatttaacgataactcatatccacccctgaatgtacatccatattcgaatatagatgatcttactttcaagtagatataggcatcttgactctttgcagataatgatcttgtcaaaccactatgaacaagatacaaatgtcatagatactaaaatgtggttgtggtcttttgatgacttaggtctagttacattaaagagttcttaaaatagtccaagtgaatcctggttgcagaatactaaactaatattccataaattaacatacagttcggatccattgatataaaatagatattaataacttgtgaaagttgaactgtattttattctagaaaaagaaataaaaaatttctatttggaatataaaatttaaagtcaaaaacttaaatttataccaaatatgcaatgagttttattctagcttggaccaccactactaatctaactctaagtttaatttgcctaaagtaagcatacacaagtaggagatttctaagatcgaggatttatatcattttgggatag

SEQ ID NO: 351109 - DNA, 512 bp, Cannabis indica
actcaagaaataccatgtctccgacctgaaaatccatatctcgtcgctttggatcaacataacccttctgtctactctgagctgcgagcattcgcgcttggattttataaactgtctcacttgttctcagaacagcctcgggacccaagaacttcctttcacccacttcatccaagtgaataggaaatatgcactttcttccatataaaagttcataagggccatcccgattgtttcttgatagttgttgttataagagaactcaatcaggggaaggtactttacccaagatccttcaaagtcaagcacacatgcccgaagcatgttctctaagatctgaatagtcctctcggactatccattcgtctgaggatgaaatgttgtgctgaacttcaactgagttcccatagctcgatgtagactctcccaaaatcttgatgtgaattttggatctctatccaaaacaatggactttgggacaccataaagatgaataatttctctaacatata

SEQ ID NO: 351110 - DNA, 548 bp, Cannabis indica
agtttcccatgttggaaatgagagatgagaagttgtgaatttgacatctctaacttcatgggtcttagctattgtgaaaaactagatgggcagtcgaaatggaattagaattggataagcagaacccggcgcaacatgtcatttgtcaaactgggtgatgggtaccctattcacgagctcgcgggatctcattttgatacttctaagattcttgaacttgaggacgaggtctccttccccatttttgaccattttggattcattggtcaaattagatttcgcatttgagtaattgaaaacaacgccccagattgattgtcaacctgggtattgggccctagcactaggtcaacctgggtgctagccctatttctaagagcttgggtttatggttttctccccaattttttcttgaatattcattatttctaattgcaaaaaaaaatccagaacacattttcatgaacttgattggagacagcccaggttgacaatatgtcaacctacgcactaggcctagtgccaggtgtcaacctgggcgctaggtc

SEQ ID NO: 351111 - DNA, 596 bp, Cannabis indica
atttttaaatattataatattaatttaatgtgtaattactaactatcatgccaaacatgatattaagaattcacatgtaattaccacttgacatccagacacaccttgtattttaaaatacaatgtaattactatacagtgtaattactaccctagtaattacactacatagtaattacacagttgtttccaaacagactcttaacaaattgaataagcaacttctacaaaacaaaacaaacaacacaatatccaaaatggtacatattttcacggctaattaggatttttgccccttgaactttgacatgtaccaaattatgcctcctgaacttttaaggacgttaaaaatgtcgcctgaactattgagattgttggatttaaggacttttgtctaatttcattcaattttactatttcggtgattgtttatgtactaaaccatgctccccaaactttgatatctaccaaattatgtctctcgaactttgatatatactaaattatacctcatgaattttcatccatattagacttttttactaaaattagaaaaaagtccttaaatctaacaatctcaatagttcaaggggcat

SEQ ID NO: 351112 - DNA, 522 bp, Cannabis indica
tacaacatatctataaatttttgaaaaaatttgaatactttacaatgccgaaaatacgtttgaagttttttgaacgctcgtggtaaactagaatatcaggaactctgtttttggtactgtaaaactattcggaattttttaaaaatttacaaggatgatactgtaactataacgaacaccatgaaatattttgactaagaagttataatagaaggttgtatttagtattattcaaaatgtaatttaaattttgtgatccaatatagggatgataattatatgtgagggttcaggtacttggctttaataggacgaggcgagagttgacttttaggagtgggggtatgggtttaaatattcatacccgagttgaaaatgcgataggagcggaagaatagatacccgtcctaaattcgtcccgatatgatgtatgtatatatttaaattataaaatcatatctactacaatctaaacaacttcatgctttagccttttttattgattatagtaatgagacattt

SEQ ID NO: 351113 - DNA, 503 bp, Cannabis indica
ttagatttagaccattttgcatcttggcccaaaaaaaaattgtataaaattgtaatttataaaaatttgagtggggtcatgtgccccacatgaccccatgtggcttcgccactgcatataaacagggaagatattacaaaattaaatcaaattatgaaatattacacattcataattttttctgaccgaattgagttatatttttctttctgtaaaactaagaaacttaatttatttatttatttattaccatattgagttaatagaccagaaaagaagacagaactggtgttcactaaatatctgatccaatctaatctgtacgatccaatccaatttacaaaatgcgaatatccgcacttgcgcggattggattggattgaaagatctaaaatccgcacttgtgcagattggatgttgtttgacctcaaaaagtaactgctccaatccaattcgcacttaattatatatatttttaaaaaattataatgtataatatatat

SEQ ID NO: 351114 - DNA, 1053 bp, Cannabis indica
actgtgttgagagaaagttgagtaatggattgtatttcttgaatggaaagacaataacaggtagtgcaacacctgttatggactcaactaaatatagtcaagcaaagctatggcacctcagattggggcatgtaagtcagaggggacttgaggaaatgaacaggaaaggactattcaaagagaagctaacagaaagacttgaattctgtgatgaatgtgttttggggaaggcttgcagattgaagttcagcaaggcagaacacaccaccacagaaaggttagcttatgtccattctgacctttggaaccatctaggattccaataaaaggtggagcatactacgcacactactttatgagtataattgatgattacagcaggaaagtctgggtttatttgttgaaaagcaaagatgaggctctaagaacctctgatacatggaagaggctactagaaaaccagactgggaacaaaatcaaggtactaagaactgacaatggtcttgagtactactcaagtgagttcaagggattgtgtgccaaaatgggaatcaagagacatagaactgtgatcaaaacccctcagaaaaatggtgtggctgagaggatgaatagaacattgattgagagggttatgtgcatgctactaggagctggtttggatagaaccttttggagagaagctcttcaaatagtctgttatctaatcaatagatcaccatctgtaccaaacaacttcaagacccacaagagttatggacaagtaaaccctaaacttagattaggcactctctaaacttgctcagcattcaggacatttaatgtcctcactcatttcttttggatcaaagattaagtgagtctaatcaggtagaattgttgagattaaactcacttaacatgtcaagtcagtaggtccatctttttgctcatcagatgaatctgaaaaaagctattgttaattataacagttggctttaatgccaatttaaatgggaccccagtaacaactataattaggtgttcctctattctcaaagggagttctgagtt

SEQ ID NO: 351115 - DNA, 730 bp, Cannabis indica
taatgccatttctaggttctacataagattaaatcatttcctttatttgcaagaacttgtatactcaataatataatgaactaaaatgttaaatcatttatcaactttgtgaatcaagggtacaaaatagctaaacaaacgtatggatgattcttgaagccttcatttcttttactattgactacacctttatttactttcttttaatatttattatcaaatcaaaaatcaaaaaattattttttactattatcactatttattaaccttttgtttctatttttctacaaacgttttgttcataatcacctccgtgtggaattgaccgcctaatctatactacaaccaccgctagtggaagtcacattttgggcgtacaatctgcagaagaaaaaaaaaagaagaaaaaaactcagttgttatttgactaatctttgacccgaattgcacttaaaaaaattccaaaaatccttatttttctccctcaatttacacataaatacctatttattctttccaatttatttcacctaaataaacattccaattttatttttaccctaactttttcactatttttttatccaaactaacatttattttttccaatactcttacacatgctctatttatcccttcttttcccaacactaattaaattaattaatttatttattttatttcgattaatttaatccgccaattttgcctataaatatggtgttggaag

SEQ ID NO: 351116 - DNA, 446 bp, Cannabis indica
tgactaaactaataacgacattcctttcccaaacggacgccgtaggtgaccggaaaacccgttcaaagtttgaaaccccaaactttgacttgcgatcctaagctaacggcggcgagaggagcggcgccgcttggggtgtgaggtcgccggcactaggaggtcggagtagtccggcgcgtgaggtcgggcggtggccggagataggtcgccggagtggtggtggttatggaggtttatgggttattatttttctttttgtatttgaagagagagaaggaaagaaagatagatagatagacagagagagagagagaaaaacgtaactgtatataatttgaattttttttttaattatacatatatatattattttattattattttatatatatatataaacaaatttgactcggtcaaaccgagtctttacattctcccctccttaa

SEQ ID NO: 351117 - DNA, 658 bp, Cannabis indica
taagcaaaagggaaaccttccctcatgtaataaggccctataaatagtgatctagctccactgaaaaaaggatcgaaagaattgcttcagagagagatctaagagacttactcagtgattttattgtaagagctttgagagaaaaacactttgttctttgttctcgagttaatacaatctaaagggagtaggctattaccatactaacggggccgaagctctttaaaatctgctgctctttattacttatatgcttttgctctattttaattatattcttaatcatttaataattgactcattgtcgttggctaaaagcgaggtcaatattttggtgctttcattaaaagcaaaaacccaagtttgttgtttgtcttaagtcttaacaggcgtacagaatggtggtgcaaactcaaagagtcctggtcgatcaaagagatccaatggtgacagatcctaacgtacaaaaccctgggaatacgagaggaccaccagggaccaatcccaaacaggccaatacacagccacctattgtgggccatggcgtgacttcccctccagctattgtaacaccctaactagcaaaggcgtgttaacgtgatttttaacatactgtgcagctcgttgctaatcaacgaggttattagaaaaacatgaa

SEQ ID NO: 351118 - DNA, 469 bp, Cannabis indica
tggttttttgatttgaagtccacccctaagcaaggcaggtcggggtacttctatttttcttagctagacttcaagtggttgacaggcaccgcggtcaaggtcgttagcaaaattgggcattttgttgacgagtacttcatggtggatggtatgggcaccacttacactcgattccagtagatccccacatatcaccgccccccttcacacttgccctctgggatagagctcagaagcttgctctgcttccgggtgctgcccggaatatcactttgttgacctccgaggacaactttgtggagtacgggctttacccgaaggatttcattccccagcatgtgaaggagaagaagaggaaatccaatgctggacgggatgagggagctcatcaggaggatgagcttattcaacttaagcgtgaagttaagttgaagggaggtgcaagggccaaatagtatgctcatgagcc

SEQ ID NO: 351119 - DNA, 1803 bp, Cannabis indica
tacaaaattatttacaaaaatttcattgagcatatacaaaagtttgtcgcctagcaactatacaaaataagccctgatgtcccaaagaccgtaccctccaggcctaaccgcctcgacatgtacaatctccatctactcgctctcacggctgctcagccttagccttgcccttacctgcacatggaaatagcaaatgtgagtcaacagactgagtaagaaaagcataacattaaacataataatatctcgggttatactcaggcgcccatacacccaaccaaaaccctgtcctcgtgtccacggtactgagtttagaacgttcatacgacaatatcattgaccatagtatcagtctatactcaatatgctagtcatactctagccatattaatgtgatagcatcgatcagcattctagccaaacttacatttatcagtatccagtacaactctatgtatactgacactgctatcaatgtactctaacaggcataaacaacatgtacgctaaatatgtaaatacatatgcataaaattatactaatcttaccttatttttgaatttaggtgtgccgaccaacctgagcggaacaactactcggtgaattacaggcccctaaatcacatcattcataacacgggtaagtgacacgctaaatcacatccggggactaaggttttaaaccaaaagtttcctactaaaagttaacatggcaataccctaaactaaccaggaattgcccaaccaaaactctgaaactaacacgaaaagttcgagaacccagctgcagatccggttaactagttttataagccacactaggtaacccaaacaatttcgaaacccaacaaattcgaatccaaaccttccagacctgcatattataccccaataaacataacccaagcaactgaacaacataacatgctcaaaatcaaaattcaccattaaagagccaagcttgagttctaaaactcaaagcttgttcaaaccttacaacagctatcaaaactagcttaattaaacataattaaccataacctaactccataaaacaacaataaacatcaacaacaacaagtacagtacccaaacatacaaattcatgcataaatctcaacttaaagcttttaaaaccaaagaaagagatgctaagaaccttaccttgacttgttaaaacttaaagcttgctaaaatcaccttgaattgctgaagaaaaactaaaccctagctgggttctaaggggggttcgaaagagacagaggacttagagagagaaaactctttttttgtttaatttcttatttttcataaaaagaaatagaaaattggttttatctaatataatatcagcttaataaaataaaaaatcataactaatatgtaagtttcataattaaacgctatttatctactaattcctacattatccccccttaaaaggatttcctccttaaaatctaacctgaacaactctcgatactgagccctcatgtaggactctaactcccaagtggctttctccaccttgctctttctccagagtaccttgacccaatctatggtcttgttccgaagaaccttatcctttctgtctaggatctgaactggctgttctccgtatgataagtctggttgcagctcaagattttcatagcttagtatatgagcagggtctgaaacgtacttccgttacatggaaacatgaaatacattgtcaactgctgtaagagttggaggcaaagctaaagggtatgctaattagcctcttttcccgaaacgtttaatccccttcattggaga

SEQ ID NO: 351120 - DNA, 1282 bp, Cannabis indica
tgacgcgcgttgaagtgtcactatacacttttagaggtactcaatgtgtgtcactaaaacctgattttctagtagtgaatgagaaattagtaagttagtggattaacttggtaaattttagatctgcttattcgaagctccgttatataggctcatagtccccatactagttgagacaatactgtttgtaagactcagttaatttattttaattaatcaattataattctaaaattatactatgtctagtttatgaatttttcactaagctagggcttaattgtgaagaaaagagattctagtgtttatttattatttaagagactttatgaagtctaattaataaacatattaaatgacaattttatttgataattaattttaatgattaaataaatagtttctggtatttaagtggttgaattgtaaaaatggcaattttgaggaaataagataaatagttggaaaaatggcaaaattgcaaagtgggggcccacatcctatggccggccacttaaagggattttaccatttatttttccaatattttaatgccaaataattctaacctaaacctagttgtattcccataaatagatagtgatggccacatcttaaatgatgacaaaaacacttgcctttagataaaaatttgagccttcttccctatgctattcgacctcttttctctcttcctctcttcataatgtcaaaccctatagtgatagagtaagtgcgcacacacataaagtggtactcaatcatagtgtgtaatgttgtgaagaatccaaattgaagagaaggagactcgggcttagatcttggtgatactctgctacagactggatacaagggttagaaatctgagtggaaggagtcatttaattccactgcacccactgtaaggtttctcaaactttatttgtgtttatttacattcctttagaaattcatatttaggatgttaaataacatacatggtagtaaatttagatcttggtaaaacatattccaacaactgacctcagagcaatggtaataattttctttcatgaaatatggatttaaaacgatgtttgtgttgatttggatggtttcatgatggcttatgtgcatatttgatgattgtatggaaatcgcaatgtatgttgtaaaatattttttgtttcgttctggaaatatttttactgaaaagtataccaaaaattaatgaatttaggcttttacagaactcaatttgaatttattttggaactagctatgattttttgaatttggatga

SEQ ID NO: 351121 - DNA, 922 bp, Cannabis indica
tgaataaaatgccacataaaattcaaacataccaatgtattataaaacttaaactaaagtaaagataattatattctagaactatattcctaaattctattatcctagaacgtacttgacttcataaaacttgaattaaaatattaatggaaaatgtaatgatgattagaaatcatctaagtcatcatcacttgttttatcttattttagattattttttattgttattaataactttaaattttttgagaatgttcagttatatccattatgttgccgaaattttagtagaattaggataaaattattccatataagtttctcttaaacttggttgttaggattttttgctaatttttgttatggataaatcatggatgcgtgaggagtgccgattgttatatagtttataatttagagtaaaattagctacaatttaattacaaattatatttagtatactatagttagttacttacttagcaatttagtaagttctgcgatatatttgtactacagtcagatcaaacgtttgaatatctaaaatatgcatccgtagtgaagtaggttctgcgatacatgtactgcagacggatggatggtaaattttttgtattgctatatgttgttgtgaatattgttttatatattttttaattgtattttgttgttattaataggtttacattttttggaaacgttcaattatagctgttatactgttgaaatttcggtagaattagatatgctttctttaacctactttaataagaattaataaatacatatataagaattctattaatttattttaagtaaaacaacaaattaaaatattgcacattatttattattcaaaatactaattattatacaaaacataacttaaagaattataaaaatgatactaatatactagaaa

SEQ ID NO: 351122 - DNA, 1205 bp, Cannabis indica
tgctttcgttctcactgctctgaagtcggtcgtctctgaagcttctaccgacaaggacaaagaggctgaacacgagaagcaacaaaaggatttggactcctgggtcgaaaatgactttctctgtaagaattttattcttaacggtttatctgacgatctgtatgactattataattcagataaatcggcaaacgaaatatgggatgctctgcaaaagaaatacgatactgaagaagctggaactaaaaagtatgctgtcagtcgctacctcaagtatcaaatggtggacgacaaacctgtggaagcccaatctcacgagcttcagaaaattgcacatgagatcatctcagaaggtatgactttagatgaacagtttcaagttgctgtattaattgataagttacccccttcctggaaggatttcaaaagtactctcaggcataagactaaggaattttccttagaaagtttgatcacccgccttcgtatagaggaggaagcaagaaaacaagaccagaaagatgaagtgcttgttgtttcaaacaacaacactaagaaatccacaccagcggttctgaagcctaatggcaaaaattttaagaatcagaaccgcaactcgaattccaattctaaccgcaacaaccctcctcgtaacaataatcagagttggaaccataataggaaccaacatggaaggcagccacctccacataaacagaatgaccccgcacagtttttgtgttacaactgtaacaagccgggtcatatggcacgaaagtgtcggaacaagcctagctctgctccgcaggctaacttgactgaagaagcttttacagctatgatctctgagatcaatatgattggtggatcagaaggatggtgggtagacactggcgcctctcgccatgtttgctatgatcgtgctatgtttaagacatacactgctgctgatgacaagaaagtgttgttgggagattcccacaccactattgttgctggaactggaaacgtggagctaaagtttacctcgggaagaaccttattgctgaaagatgtaatgcacactcccgagatgagaaagaatctggtttctggttttttgcttaataaggctgggtttactcaaacaattggggctgatttgtacaccatcactaagaatggtacttttgtggggaagggttatgctactgatggaatgttta

SEQ ID NO: 351123 - DNA, 975 bp, Cannabis indica
agcttatagggtttctgtgtttaatgcctttaacgtgtttaatttatcaagagagtataaaatttgcatgtaattgagatttatatatctaagaaaactataaattacttgagtaaacttactattgcatagaaatttataataggaattgaatcatgttagaccagaataggtagatacaattgaaactaataaccctaatattcaatcattgttaatttacatatcaattacttgcttgtttttattgtttctattgcgttaaattctagttctaatttcttcttaaatttgaataaccaaatagaaataaaaatttcattttaacgtacttaactacaatccttgtgggattgacctcactctttgtgagtctattacttgttaacaatgcgtatacttgcatcttaaaaataccacaacaatatacaaacctaaaaggccaatatacttactcttggactagggctcattagcgcctgaaccacgtaaaactctctgtctatttcacttatatcatttcttatttcttaagttatattttaattagattccataaatctcgataaatattttggtgcttttattgacaactactgaaagatctaaactactgtgttgctgaaaccatggtggctacacaaaaaaataatcacaaagaagattcctcaaggatgttgaccaaaagtcaatcactcacttattttgatgataaacaaatatttgattattattttttactaatattttcttgaccattttgcaagctaattcacaaagtatcaatatttgctcggtaaagtcaaacataatcaaagaagtggattcaacaagtatatcaactacttcatagatcataagatcaaaagttttatcaagagatcaagaattcaacaccgtattcaaaagaggacttcaaaagctaaaagtcaaaagtcaacccaaaagtcaaagtcaactctcgggaaaaagtca

SEQ ID NO: 351124 - DNA, 592 bp, Cannabis indica
ctacaagttacagcctcatatatgaataaagaattttttaatatttatataaattattcaataataaatattaataacttaatattcatgtatatatcaaaatgttcaactctttattaataatcaaaaatatctttatatgcttttttaaggcataaatcataacacatactactaacatgcttcctgtcatacatttctaatcatatcaccttattaaattttaaagcacataaaagtttactgaaccgtgaatcaaacttgtctttgataattattatacaagtctaggtggtccttggaggaaaacctagtagctttgataccacattgtaacgcactactagcttaggcatgttacaagtattttcttaattattgtgctaacatttgctaatcaaagagttttaaccaaaaagtatgtttaatacaattttatattaattgaaactttaccaaatataaagcagtattataaaatgtttataatttgggatcttgaaatttatttttaaaacatacataaaatacattatatcaaaagtgttacctagcgacagccaaaactaagcatgtgttgtcccgaagattg

SEQ ID NO: 351125 - DNA, 683 bp, Cannabis indica
aagctgcacgtgtttcccattttaatgtgggtggggcccaacccacaatatattaagaaagagcccctcttttccaaaatgggccaaccatcgatcggcccatgttaacaattgcaattaaattttgtataattggtcaaattaaggaacaaacaaaagagacaaatatatattttcaattcagaaaatacagccgtacaaacgaattaaggctataataatcatatattcatattagtggcgattgccttaatcctataatgtcactttctacattcaattaccctttgacatcaccaaaaccatttttcatcaacaatattgtcaaatgtacctgccattaccttaaacaaaaatatcaatgcttacctcataaatttgtaaaattttaatgatgttattaatatatatctcatatatatatatattatatgagaagcgataattataacatcttattataattttttagtcaacttttacgtttgaaatcacatgctgaaatattttttttttcaattcttattactatagtggcattcgttatagttataatatattccttataaatttttaaaaatatctaaacagtttacagtatcaaaataaattactgatattctagtttactacgtgtgtttgaaaaacttcaaacttattttcgacactgtaaactattcgaa

SEQ ID NO: 351126 - DNA, 674 bp, Cannabis indica
taaatgaataaagatattaattattactctaattgtgtcaattatatttgtaagttatgaatttaccattaatgcatacaaaaggtccgctcaatcctaaaagtttaacagacgaaaaccatacttgtgaaatgaatgtgaccaagagtcataagtctactcggtcacttgggggcaactataccgtacaaagcattagtaaataacaagctcgaaaaaaaacaacataacagtgtgcacaattaataaaacaatggaaaatattcatttaaaatatgataaaagcgcagtataagcccgggattaaaggctgcccggtcagctagtcgtctcaaaataaaatgaagtattaccaactttaaaaactgcttggccggtcataatatctttaataaaagcccatgggccgaacaaataaaaaaagagattcacaatgtaagattcccaggctccttgtatgaatcagtttggtcagctagggctggggtctcattattctagtcggtaggggctagggtctccgtgttctggtcggtcgacgctgtggaatcggctgcctcaaggatttctttggctgcttaacccacatagtaattaagatatgcctctttggtatctctgaggaaatcaaagtttcctgtgttgggttttgtgccctaaataaaacccattac

SEQ ID NO: 351127 - DNA, 726 bp, Cannabis indica
cggctgcatgatttccacaaaattcgtcgtgaacttcaaatagaagtcgtgcagcttcatctggtgtgacacatctgagtaatggcatcgagaatcctcttctgtacatgaccccttctactatgatgtaccgtgctgcctttcttctcatttttcgagcttcatttcggttatctgggagttccccagagttgagataggctgctattggcgtcatccagtttggagatgtgtcgatcatttcgatttcttccgtgccagtgatgctaggctcttcaaggaactggatagggaccaggtttgccttgtcacttatattgctgctcgccaatcgagctaacgcatctgccgttgtattttcttctcttggaatttgtctgagactgtagcttttgaattgtgcgagcagatcatgtattttgctcagatatgctatcattttttctccccgagcctcgtattcgccggatacatgatttaccaccagctgtcaatcactgtagatcttaatgtgttcggccttcatttccttcgctagtttaagtcgagcggttaaggcttcgtattcggcttcgttgttagaggctttgaattcgaatttgaccgctgcgtgcaagtgttgctcccaggctttctggatttgacgagcatatcatccacatacacttccatatttctgtcgatctggtctttaaacatcttgttgaccaatctttggtatgtggc

SEQ ID NO: 351128 - DNA, 558 bp, Cannabis indica
tcagaggtcgggttcagcgccagggccgtgggggaaatttgggtcagggtttgatcgaagtccaagatattgattaagaaaaaaaaaactgtttaaaaaatattgaaagtgtttttttttttttagaattttgattctcaattaaaaaattgaaaagtaaaaacaattttatagaacatgtttttaaaaaatattttcactttttttattttaaaaacacaaaactgattaaaaaaatgttaccaaacgacacctatattttttaattattgttattctactcaattgttgaaaagatccatgctaacataggcatcaaaagtttttatttaatgggtactcaagattggatttttctggttcaacttaagaataaattcatatagttaattcggccaactaaatgtataatcaaatgttctttcaattatcgaagatataattgaaaactaggtaactaagccgcagtgttgtttaatttttataatctttatttgtatatatatatatatatttattgggatatgattttgtcccgtgattgtactttcacggaat

SEQ ID NO: 351129 - DNA, 952 bp, Cannabis indica
atgtatttttatttgaagatattgctttttataattgaaattttcaattatacaaaataataaataagagaaaaaaaaaaaacaaataaaattaattgtgtaaaaaatagattcaattactcattaaatttataaacttgatagctaaaaaaataataacataattagacattaaaaatgtcaaattatggttgctttgacaccatttaggatgtgtaatctaattagtcctgaaaaagtaaatatatttgacataattttttacaaaatatattcaaagtaattaatcataaactaaaaataaatagccaaaaactaatagataggtctatatagcacaccaccaaaaggtgtgttttagtaaaaacaaataatatttatagggagtgtagactaataatataattaaaaatgggcattttacataaatgtatacatttttttaaataattacaaaaaatgtgcaaaaaaacacaattttaaaaatgcacatatttgaaaacatatttacaaaatttcatacaaattcttaattaaattataatagatatattaatgattcaactttctatatttagatttgtataactatttgtataactattttcttattatgttttgttgtgtatggtattgtaatatttttttaatattgcttatatgtttttagtgtttttttttaaatttatatatgtttttgttaaacttgatgggttgtttttgtttatttttttaatgtattttttggtgaaaaaattattcatgctccatctataaaggtcctttttttttggtatttttatctttgttagttgtttttttttttgttggtgtttcttattatgttttgttgtgtatcgcattgtaatattttttttaatattgtttatttgtttttagtgtttttttttaaatttattatatgtttttgttaatcttgatgggttgtttt

SEQ ID NO: 351130 - DNA, 545 bp, Cannabis indica
tacccctttggggggtcggggtggtaccccgagccaaccttcttggaggtaggggcggccacttgatttggcttccttggatgtcggggtgacaccccgagactaggtgccattgccgatccttcttgcttgatttaaaagtcaagcgttatttttagataaaattatccatagctaattatggtttcttagcttggataaatgatggaatattgctaccactcatagatagatctcacaagtggggaaggtaccacatcaagccttacccgtaggttccacattgggttctatatggttatgtgtgtgatgacttaaacaattatgcgagtcatgacatagccaagttgaatgtaacttttggagtatctttcttgtacatatttgagtaccatgagcgtttttactagtagtcttgaacatatgtgtttgcttcaaatatgtaggggttatagttcaccccgcggctagaggatcggggtaccccctagtaaacccctttctcatttttcatttttttttaaacgcacatatatcccgagtca

SEQ ID NO: 351131 - DNA, 712 bp, Cannabis indica
aaaatccaaaatcaccattaaagtccaactttgagaactcaaaggttggctaaacttactaatagcccttaattcatgctcaaaataacatttctaaacatattctaaccttagaaaaaaaaacatcaaacaactacaccaataacaacaacaactatctcaaattcatgcaaaaaatctttaacttaaaattcaagtaatccaagaaggaggtacaagaagcttacctagaggttgagaccaccaaaaacctgttgaatttagcttgaattttagaaagaaaaccaaaccctagcttgctctaggaattttgagagagagaaggagagagttgaaagagagtctttttcatgccttttttccttattttttaaataaatgaggaaaagaaatttgttttattaattttctacagccaacattaatcaagaaaatcaaattaataagcttaataagacccacataagacaaaactcaaacttatgcaaaatgaccattttgcccttccaccctaaaaatcataataaccattaaggggtattttgggtaattctgaaatttcgactgttctcgatatttccaaagtctaactttatcatcctgatatactaaaaaaaactaggatgtgattctaatagccaaacaccgcgttccaatgttgtcgggcacaaagcatgcaaaattatgaaatttctatatgtgacataaaaat

SEQ ID NO: 351132 - DNA, 1366 bp, Cannabis indica
ttgaataggggaggtgatagctgtgtaagtctcttatttaccttgtacttatggctagaacgaaacaaactctacgtagggcgcctctatatgatcctcacttggccagggtggccataaggggttgagttagaatggaggaggagaccgctcagccccctgtggatgctgagctagagattgactcgggagctaagagttctaatgcataatctgagctggaggaggttgctccattaaggaggaggtgtaagacttgttctatcttccctgactgtcccttgggccactatgacgcccaaggtaatccactgaacaggctcagtgagccttctgagctaggactggaccatgtcctagagcaatctcctaagccggagatactggatgcgagaccacctagaatgagttgggtcacgcctacttctactctatctgatgaggcttttagtaagatccttactagtggtttaataggagatgtccattgcgagattctccatagaaactgtcgggcgcatagccccccttcgggttggttggcgtggtctgagcaccacattgagcatggggtggtgctgctacttcacaatattttttggacattgctacttactttgggatgtgcccaacacagctcatgtcgaagagcatcaagtatctctcggcaatgttcgtcttttacagggagctaggctggcctccgcctacctcttacgagatcaggtactattttgatctaaagtctacgctgaagcagagcaggattggatatttatattttggccagattggtcaccaatggctgggtgacactaactggacaaccatgtcgaaggttggcgggtatgctaaaaagtactttattgcacatggtcttcgtaggatcaggcaccacgaattttggtatgtgccactctttagacgtttcatccctactttgtgaataagggatagggaaaatcacatcctatctttattggttgagcaaagaaatattatttggttgaccaatgtggacagtttttagaagtatggcttgtatctttctattcctagagctgcaagagtgccaactgcagatggggcctactctagagatgggaaagctcctgacttggatgatgataaagtacctttgtctcatattgcatggaatttggaaaggagagagaaggctctctgccagtgcctggccagcgggcgtttggtaggtgatgcttctattcatattgggcctagaggcttggtttttgggagacatacacgccttgtgcctgcatctaagggcaagggcaaggctgtagttgaggactctgatagttcctcttctgatgatgatagtatttgatagttgataggatca

SEQ ID NO: 351133 - DNA, 779 bp, Cannabis indica
cttttcctttgggtaactcgccgattagatcaattccccatattgcaaagggccatggacttgtgatagaatggaggttactcggaggctggtgggtataagtggctattcgctgacacctgtcacacttctttgcaaacgcgagagcatcttgtcgcaatgttggcagtaatacccttgccgcatgatttttaacgcaagggagttacctccggtatgattgccacaaatcccctcgtgtacttcacgaagtatgtaaccacaatcctctccgctgatacatttgagaagcggttgactaaaacttctgcgatacaacctttggtcatatattacataacgggcggctcgctgtcgcaactttcttgcttctattttatcatcgggtaagagccccttttccagatatgcgaggataggagtcatccaggtaatctcctgaacggcatctatctccatgattacttcttgatttatggttgggtgagccaatacgtctaccggaatcacatcgagcaattcggcttctctagttgaggccaaacgggccaatgcgtctgcgtgtgcattttgagcacgtggtactcgagacacgactacatttttgaacttctgcattatttcgcgaacaatggctaagtatttaaccaatctcccgcctcttgccaggtattctccattcacctggcataccacgatttgggagtcgctaaaagcctgaagatactcgactttcatctcgagggcaagtttcaatcctgcgattaaagcctcatatt

SEQ ID NO: 351134 - DNA, 523 bp, Cannabis indica
aattacgcttgttttctatgttttcaggttctttggaataatagaggtctcggaatacaaaaatccagtaaaagacgagctgagccaagaaaaacaccattttaaggaaatatgcatatctggccgcggctatatacagcttggccgcggctagatcacgaaacagagaagcagggttttgaggctacagtcgccgcggcgagatacaccctcgccgcggccataaggaagttacaaaactggatttttaagcaccgatctggccgcagcgagaccatacttggccgcggcaagatcccgtacggcccaggggtatttttgtccgacgaaccataaaaattagatataaatagaaaactgcgattggaagtcagaaaaatgcaatttggaaccctaaaacacagcagaaagcggcaggaagagcagagtgattcaaagtgaagatccagaattcatccaccaacagtttctttctttattcctctttaatttattttatgttgaatattgtcataggaatggt

SEQ ID NO: 351135 - DNA, 1032 bp, Cannabis indica
cacaactgctgatgcattagctccacttgtgagcagcaacgtaaatgataaagcaaatctaattcctatctagtttctcgaaaaacctagtatcaccagcacagaagaggttgaaatgattgatacatccccgaactggatgatgccaatagcagcctacttcaacactagggagctcccagataacagaaatgaagcacgaaaaatgagaagaaaggctgcattgtacatcattgtagagggagttatgtatagaagaagattctccatgccgctactaaggtgtgtcacacaagaagaagctacacaacttttgtcagaagtacatgacggattttgtggcaaccacgtagccggacagagtttatctaagaaaattctaaggtaaggttatttctggcaaacaatgattgaagactccaaggcctacgttaagaaatgtgataaattctagagattttcaaagatacctcaggcaccgcccaacgaactaactcagatgcaaagtctttggcctttcgccatttggggaattgacctgatcgaacagttacccaaaggcaaaggcgaagtgcagtacgcagtggttgcagttgattgttttaccgagtggacgaaagcctagccattggcaaccatcacatccaaaaaagtgcaagacttcattgtaaagaacataattttttggttcggattaccatacaagatagtctcagacaatggcaaaaaattcgacagtcaatccttcgctgatttttgtgtgaaccatgggatcataaaaagtttctccgtagtggcacatccccaagcaaatggtcaagttgaaacagtcaacaagacactcaaggacaccctaaagaagaaacttgaagatgctaaagggaactggctggaagaacttcttgaaattctatggtcatacctgtttggttttgtgccctaaataaaacccatttcaatataatcaaatttactaataaagatcagaaatcacattttatgttgcatagttcacatgatttttttcatgat

SEQ ID NO: 351136 - DNA, 652 bp, Cannabis indica
tcatcaagacaagcctggaaatcagagtcggtatagcctactagatttaaagcaccacccttgtagactaacaaataatgccttatactctttaaatatttcagaatatgcttaactgcagtccaatattcctctcctggattcgactgatacttgctcacaattcctactgcatagaaaatgtctggtctagtgcataacatagcatacattagacttccaactactgaagcataaggaacccttctcatatcttctatttcttggaaatctatggcacactgttccttagatagtcccacgccaagtctagaaggcataactacccctttgttgtttctcattgagaatcgctctagcaccttatcaatgtaagttgcttgtgagagagcaagctatctattcttccggtttccaatgaattgaataccaagaacataactagctttgcccaaatctttcattttgaattaagtgtttagccattccttaatgtcaaatatttttttgatattgttacgaatgatcagagtgtcatcaacataaaggactaggaatactaccacttgattatccttgaggttgtactcacatgtttcatctttattttggtgaaagccataggctttgattatttcatcaaaccttttgt

SEQ ID NO: 351137 - DNA, 754 bp, Cannabis indica
gtacaagatatatatgaagttaactagaagaaaagttttaaaaaaatataaaaccaaaggtgtcgtttggtaacacttttgtgttataactttttaatcacaaaatgaaagtaaaatttttgtttttcaaatttttgtttttgaaaaacaaaaatgcgttctgtaattacttttatttttcaattttaaaaacagaaaacaaaagtgtgttctgtaaagttcatttctatttttattttttgattttatttaagtcgggtctaggtctcgggtcgaattcgggttcgggtcagaggtcgggttcagcgccagggccgtggggggaaggatttgggtttggatctcgtcggagtctaaaatattgatttaagaaaaaaagttgtttaaaaaaatattgaaaataattttttttgtttttaaaattttgattctcaattaaaaaattaaaaagtaaaagtagttttatagaacatgtttttaaaaaatattttcacttttccaattttaaaaacagaagactcattaaaaaagtattaccaaatgccaccaaagtttcttaaaaaatattgctcttgtgcacataaaaccaaaacgaaacacatttctcaatcattaattcatgcacagtaacttcactcttcttgaaagactttggaatattttcttgtacacttttaatgtgtgcaactaacttcattctgatcaactttgaagttcatcatcactagaaatagcaattaaaacaacgtcaaaa

SEQ ID NO: 351138 - DNA, 527 bp, Cannabis indica
atattaaataagaacttcctattaaaatattacattacaattcattatcatcatcagttgcatatacaatattatcatcactatcactctctaaatctaagcaattatcatcttggtcatttagactctcaggatcatcatcgacaatgaaatcatctaactattgaggctctgaattcgcacgatgaatgtttgcaacttcagttgggtccacatcatggggaacatattcaacatcatccaactgtgaaagttgaacaactaactcagtttcagctgaattgttttcctacataaagggcgtatccccatcagtgtcagggaagtcccagacatttcgcgggatgtactcgttcacaattaaccagtctttaccattcttaagatcaggaatgtaatatatcaattttgcttgagatgcaggatgaacagttcatttttgtaccactctcagttgacacaaatgctagtaagaacaccatcactgtccattttactcccattagtgtcaaactacttacacataa

SEQ ID NO: 351139 - DNA, 741 bp, Cannabis indica
aatctcacatagaaaaaataaaatctgtaaattaaaaagtatgaacacacatgattttttacgtggttttgcagttaaaattctgcatagtccgcgagtcaatcttattagatttctgatagtttttcagggcctcttttgtatgatttttttcgtcccttttttgatctaacttgccactatttataattacatagctggcagttaattacaaagttgactgtaatctttttacaacgattatcccctgaaatcatggggtttgattacatatcacgtagtgtaaatgctgtttttatttgaaaatcagatagctgtgatttttccgcttttactgggtcaaaatgatcgtgtatttaaaacacgtctttaattgtatcgttcagggatgtctcgacaggagcttggttccagtgactatgatagcgagctggagccttttttcttatccttccgaggtcgacaatgtacgccttgttgcttctttatttgaaagcttaacgcttaatttgtgacaatcgcattttttattaacagagagtttctcgaggctcacttgaatgttagcttctgactcgtcgagatttaaatctcgctgagaagatgtctgaagttaattggggaaagttataggaatgagctttcctatagcgagataagcacctcgcctattaggtttcgagccgacccgactgttatacttagtttgtacattatttgctaagtgttttcacagtcgat

SEQ ID NO: 351140 - DNA, 1566 bp, Cannabis indica
ctagctagtttgttaattaatttcttggtgaaatttgtgttgtgtgatttgactggttcagctcaatcaattggaaatattgttagaaacatacaatacaagactgaataaagattgattgtaaaatgtttaattgtggtttcaagatgctctgttgtgtactccttctagctctagcaatatataattattcagctgtctattaatagtggaaaagaagaagaaaagaaattcaattgaaggcagccaaattttttggtaaagcaaagcactatgtgtcatgttttgtcctcattacaaattcaattgatgaacaagacagagaaaaaccaatataaaatggcatcaaacacaaatttgaagagaatctatcctcaagttaaaatagctttttatggaaagtgaatccctcctaattgtgttttgttttgcaagagtcttgatgttgagaaagattcttagtagtgtaaaaatattgatgctgaggagagttctcatgttaatttggtctcttctctgattacttggcttaaaatcattaataataacctttattaattttaaaagtcgtaactacaaggctcaactcgtataaattccagttgtgtctaaaaggcacgtactcgcggattcttttatgttttatttttttttaaaaatttgatcaaaattgaatttaggtttggagtatcaatttttatttttcatgtatttttttctaccaaatacactaaaataacaaatttaatactaagactaaacaaaaatgaattaaacaataaaaacataagaaaataataataaaaaaaaactctaaatatacacaagtctaaaaattaatgatgagaaataatctattttttaaagttaggtagaaaaataatatcatatatataagatacataaattaatttttttattatcagttaatataaacttatgaatatataatatcatttcacttggaaaccatgaccttattataatctaataattataattatgaaagactgttaaaatttacaaaacattataatgtgcatcacttctacctaataataacaatgctcaagctattactaatttggagccaaacattagtatgtaatgaaaaagccttaaagatgggaaacaaagataaacgaaagacttttgtccaataaataaataaataaaagataaaagaaagactaatcatgtcgaaaagaaaagaaaaaaaaagtaatggtgactggtgagactgagatccctacattaaacaaaagtattaattttccaccacctaggaaatgtgggagaatataaaacattaatactctgtaccattattcctatatgaacataaactcaaatgatttctccactagctaagaattaatactttaagaaaatatacttagctaatcgcaaaataacatatctagaggtgttatacacaactgatattcagttacaattacaatgctcaaaagcaaaacactcagtttattaatagtaaggaaatttacatggtatactaacttttgccatttttttaagaaaatactgccagacagtattttttac

SEQ ID NO: 351141 - DNA, 448 bp, Cannabis indica
aaataatatacaaattacaaaaaaaattaataattataataagagtaaaatataaaaattacataaaaatatcaaaagaccataatttccgtaaataaaatcttaaaaaatcattaaaatatttaaaattccatacaactgtatttttataattttttattgtctttgtgtatttctaaaataatcacttaactttatgttactccaaaaagggtcaacggaagcccatcggaaaaccctatagtcattaagaaaaagcccaatatcaatacttacattgggctatctacacttttacatcctcattctcattgggcgcccaatatcaatacttacattgggctatctacacttttacatcctcattctcgagaaaattgtcactttttatatggtctttttttttatttttatccttttttttaaaagtttatcatttttacctctt

SEQ ID NO: 351142 - DNA, 519 bp, Cannabis indica
cacatcccttccatacttgattgctgctttaacttcttgatatgccattggcaatgatctgagcaatatgattgcttgactttcttcatctaccttatgatcaatgttagctaaaccaacaaatatttcattaaatttatcaatattatcatctaaggaaagagaagagttcattctaaacctgtataatctttcaagaagattaatcttgctcgatattgatggtgccatgtacagctgctctagtttattccacaatccttttgcagtcttttcttggattagctttcttctaactccattggacatgatgatggtgtagtatgccatctcctccatctctgcaatcttttctgtcttcttctcagccaacaacttttcatccccgagtacctttaggggtagtatgccatctcctccatctctgcaatcttttctggcttcttctcagccaacaacttttcatccccgagtacctttagcactttttggtgcacaagtatatgttggaaattattt

SEQ ID NO: 351143 - DNA, 990 bp, Cannabis indica
agagagagagagctttgagaggatgaacttcttatttttccaatttttctaaattttgaataaatgatgaaacatgcataactcaacccattatttcagccaagttaaataaaacaattaattcttagctctaagtccactaaaggacaaaaatacaaatggggcaaaatgaccattttgcccctccacactaaaataacataaaaagggtactaagggatattttgggaaaactctaaattctcgactaatcccgacattcccaatgtctaactaaacggccccaatatactaaaatactaaattgtgattctactgagccatacaccgcgttccatgttgtcggtcaccgaaaatgtaaaattatgaaatttcactatatgacataaaaatgcattcagaattcaaaaataacaacataaataattatttaaatatctataaataattatcaccattaaatcttaaataactgctaatttccaaactaaactaagcggtctttacagctagcaccactgcagctgcaacggcctgagcttgttgaggaggcacggcaggaagaccatgctgccttaatctctgaatttattcatcttgttgacggattcgatcttgcatttccacaaacctctgctcctaattcagaggagcttgaggaggatttacaggacgaccaccctgagctctgccacggccaaggctgcgaccacgtggattctaggatgttgatttccctgaccgcctccggtctcaaccatgttaccctgacttcttgtatttcactgggcactcattttataggacttagcctgcgaaccaataagccaggttggttagacagcgatcataagaatttataccgctcttatggacttaaaggcagcacacttaaaatcaataattataatctaatatgcttcctaacatactttaataatcatttaaaatactaaacaactacaggcttactgaaccgtgaaccgagct

SEQ ID NO: 351144 - DNA, 607 bp, Cannabis indica
ttagggttttctagcaaagtgctttcttgatagaaaacttgatctctctcaaatgagcaccaaaacctctttttataatgtttaggtgatcacacatagaatttaaaatatacaacactgtccgagaagatgcttgaagctttgaagaaaagagttggggcaagctcaagctcgtctcctccagccaagaagtctagaggcggtgagtcaacactgtccagagagaaggcaccagtcgaagcagttatcgatctatccgaggagctaaccgtggtagacctttttgctccaaaaactgctaagtccaaggtctcttgaggaggaagctcaaataggcccgagcagtcgaacaacggatctgagcagatccgggctcctaacccacctccatcactgcatccggagaccaaaagaggcaaggagatgctcacccactatatgaatcggtcggcccctaaagtgaatgagcagtaggctagtgacaacgagccttctctagagctcttgatgggatgagtcctgaaggagtatacgaaggtgagtctttcttgacagtttcctttaatccttccttacttggctcagattctaatgttttttctctgtg

SEQ ID NO: 351145 - DNA, 614 bp, Cannabis indica
cttcgttttcttacgtcaaaaacaatccttagggtcccatgcactcatatataacctcccttgacccaagaacaagcttaaacacgttcgaattcgagtccgtttcaagccgcaccttcgaagcttcaacaatgacgaaactcgaaacgaggacctccgccccttataccacgttaaaaagctttcttaggtcgtatataagtgatctccaacccccacttttacccaggttgcagtccgcttgaagaacaataagttttcgatatcgtatacgccgtatacgtgctctctttcgtttgttctctgtttttggtgtacgaaaatagagctcaaaatctaatttctatcgtatttaaactcaagcaaaagatcgctttgaaccgaagtggaacgattctcattccacaaaaatctctgttcggttcggacagttatacatattatcatatattttatatatatatgcatatatatatacagcaacacaacgatataactataataataataataataacaataacgttaataacaataataataataaaatgcataataataataataataattattattattattattattataattgtgttaaatataccctt

SEQ ID NO: 351146 - DNA, 511 bp, Cannabis indica
attccaaaaagaataacaaagaaggaaaacaactataaaaagtgacccaaaatgtaggctaaaattagcctaacagtattatgggcgttatgatgaaactggaaggaaccccgggccttttgccaaatacttgaaagaatgtggtattgatgcaagatatacaatgccagggacaccccagcaaaatggaattgctgaaagaagtaatcgcacacttcttgacatggtacgttgtatgttgattcattctagcttgccagaatttttgtggggtgaggcattaaggactgttgtcttgaatcaattacctagcaaatctgtcccaaagacaccatacgagttgtggtcaggtaagaaaccgagtttgcgtgattttcatgtttggggatgtaaagctgaggtaaggccctataatccacaatctaagaagcttgatccgaagactattagtggctattttgtaggctacactattggttcgaggggttctagattctattgtccttctcac

SEQ ID NO: 351147 - DNA, 593 bp, Cannabis indica
atacttctgttactttgttgatattcaataatctggattacattgaaatagagttttatttagggaataaaacccaacatccacaacatgcctatgttttctttccacaaccccattttgttcatgagtatgtggacaagcaagcctatgaataacccccacattgttctaataggttggtgaaggccctaaattcaccccccccccaattagattgaagagtctttattttatggccaagctggagctcaatttgagttttgaacttagtgaatgtgggtaaagcctcatctttggtccttaacatgtatatccaagtttattgagagtaagcatcaacaaaactaatgtaatacctatatccatttaatgagtttatgggagcaggcccccataaatccgaatgaataagttgtaggggttcatgataaactgtagtggaaaatggaaaaggcaatttgtgatgtttaccaagacaacaagttgagaaaaaatcaatatcagttttattattcacatggatattacatgattgtaaggtctgttttacaatcttggcagtaggatggccaagtgtaaagaccgcttagttt

SEQ ID NO: 351148 - DNA, 520 bp, Cannabis indica
tctaatttcattcaatttttacattttcagtgattgcttatgtactaaaccgtgctccccagatttaatatctaccaaatcatgcccattgaactttgatatgtactaaattatggcccctgaactttcatccatgttagtaatttttactaaaattagaaaaaagtccttaaatccaacaatctcaatagttcaaggggcatttttaacgaccttaaaagtttaaggggcatgatttggtacatgtcaaagttcagggacaaaatcctaattagccataaaacatttcatatcatgctctctaaacacattttttaactaaagaacttgaaaaatgaacttcaaccatataaaaaatgactctctataataacaaaagattaagaaactctcgaaatatagcaaactccctattttttttaatagtattttaatcaaagttattattaatttttcattattttataaaattaatttatatttgacaaagttgaattaagggtttttttttatttttaca

SEQ ID NO: 351149 - DNA, 749 bp, Cannabis indica
agtttaagtccccggaagtgatttagcgtgtcacttatcagtgttgtgattattatgatttaggagcctgtaattcgccgagcagattgttccactcaggttgaccggcacacctaaattcagaatcgaggtaagagtagtataatgtcatgcatatgcttatacatgtttagcatacatgttagttgccattagattaacatattagatatatactaggcaaattttatatagccgtcagattagcatatcagggcaacagtgaggtgtacatagagttgcaccgagatgccaacaaatatatgctaggctatcagatagtgtggattaactgctaccacatcgatacgactagagtaccgagtataggctggattcgcggttaatcataccttgtcatggacgttcccgattcagttagggttatggttaggggtatgggcgcttgattataactcgggatttagtatgtttttttatgttatgcttttcttactgagtttgtcgactcatagttctatgtttatgtgtaggtaaaggcaaggcgaaaactgaggaaccgtgaggaggagcaggtgaagattgtacatgtcagggcggttaggcctggatcgtacaatcctcggaacaacagggcttctgtagttagtcgctgggcgacaaatattttgtattgaatagcaaactttttgtaaagtgttttgtaaatgggatcccaaagtattttgtatgctatattacaagtattt

SEQ ID NO: 351150 - DNA, 919 bp, Cannabis indica
atattggttttcctcattaacaatggcgatgacttgatcttcctcccctgttgctaaaaagtccccaaaacaaccccagaaaaataaaacacgagcatcaatgggtaagaagaatttaaaagataatcatctagccctacttctccagttcctgctaaaagaaaactaggtgcttgtacttcaaagagcactaaatcaaaataccctcgacgtgtgttggagaacttcgactatgattttgagttggagtcagagtttgtaaagtctcccaaatctgataaggttttttttctattgatcttgtgttgttttaggatttttttcacgttgattatatctcccatttctcttttctttttttttttttgctattgttttttttttgttaatcctcctattttatggttttatgtttgtttgactctgtgtcttgttgttgttttggttttgttttgttaactgttagggaaagggtaaatcctcagtgaagattgttcaatcaactgatctgtttaagaacataattggaaaaagggttgttaaggtgtgtgatttctttattctagttctaatatttttttatgcttgttttttatgttctttatattttttgtgttgttttagttttgttttagtagtgttttcttatgtttttagaggattgtaaattcaagtacactcgatcggaatactaccattccagagttataacctctggttattactctgttattgaagatattaaaaaaattcttactgaaacccaattaaatatgttttcaaaaactgtattggaagttgtttttgattgcgtagtagctgaggacattcttcagtgtttccttgtttttgtatgtctgacctttttcaacttctgggtggtgtttgtctgttattagcttcgcgttgttgatgtcga

SEQ ID NO: 351151 - DNA, 594 bp, Cannabis indica
tattttaggaaaacttccatctttagaattctggattgctttcgaaagatcttcccatttattctcatagcttaaaatatcacctttagggaaaaatccagattcaaagcctttccattccattttttgttgaatatatttagatctcccagcctcggcaaccatttggataacaacaataagaatttgacgaagctcgttcgtaggattctcgctatcaaatcttttaaatgcttcgagggaattgtctaacgacttaaatcccaaattgacattctctctatttcccaaattatcataatttgtattgagattaacattaactcttcgagtactttctttgaaaagtaaagcttttgcttcggaagaagcttctttgaagaagtagcaacgcttttccacatctacttgataaccaattacataggagttgagagcggatattgcaaatgtgattttgaaactttggttttcaagtctcacatagacgaattgtttgtctctgaccgcttctgattttttacgataagggtatgtcatagctcgtggttccgctagcaattctcttcgaagagattgcatgaatgtttggta

SEQ ID NO: 351152 - DNA, 706 bp, Cannabis indica
gagagaaaaattagtgccattgaagtgcatctttttgccataacataaagtgcaactcagcacctgaaactttgagtttgaagaaatattaaatatataggtaagtaagaaccattctcctttctcctcatcttaaagccccaaaataactaaaataatatcccaccaaactccacttaaaattaccttttatattattatataaatataaatttaattagaatcaagggtctcgtggatattagtaaataattttcaatgttattattaatgagagtctcgtgggtgtgtgagtgtgtgggagatgtatagcgggatgagttgaaatgctcattataacatttgaataacaatgtgtatattataggtttatatacacaattataacattcttaacaattagttatataaaacatatcgtttataaaataatttacaattacttactaaattcttaaacaaaaactactagaatttatataaaactaatatttacgtggctcgccccgtaactctcatctagtatatagatatagatatataggtagactattaaaactaacatattgccatcagtatttattttagattgcaacaccattatttgaattatttgaacatacataaaaattactacactcaataataaaataagtttttcttgaatagatcactttattaaaaaaattcaatttgactataataa

SEQ ID NO: 351153 - DNA, 670 bp, Cannabis indica
tcttatttcttcttctttttttctgcagaaaccctcccaatccggcatcttagcaagagatcccagcacctgtttggacccaaacagggcttggccgagggaggctccgtggggaatggagattcgtccgtggctaagggagcgacgccatcatcggacttgacagaggtccgtccgcggctgagaacgagggatcaagaaccctcctggaaacatcgagaacgggcaaggatagagaaccggagacgagggttggcccgagaagacaactagagtggcgacggcttagggttccgtatcgtgcagacgtgcacagaggcggcttagggtttgctttctcttggtccgtggtcacattttacctccggagcagagcaacgtttgcctgattcgtccaccggagcttgagaatggttgcgtctgggagagagagtcaatcagactggattagggttggctgttagtgttaggaaagagggtggttgggtttctgcagaaaaaagaagaagaagaagaagaagaaagaagaaagaaaaagtaaaaattaaaaaattaaaaaattaaattttttaaaataaaaaaaagtaaataaaaaaaaatctgattttttaaatttttttttaaatatttataattattttttaaaactaatattacgtggaccactaaa

SEQ ID NO: 351154 - DNA, 747 bp, Cannabis indica
ctacatgacataaaaatgcatctctgaattcaataataacactataaataattatttaaatagctataaataatttcataattaaacgtgattaactgctaatttccaaattaaactaagcggtctttacatatattataagttaacacatgtcattgttattatttccacaccaataataatatgtaacaaaatcaacaaatcacgcagtcatttaatatccacagatatatatttattaggcattatgcacatgccaagaaaattaactattatatcatcacgaaaatctcatacatatttaaacccataaatatgtaaaatgacaaaaaatactctcagcggtaaaaaaatttacaaaaatacccttttgagttagtggatattaaaccttttatagtgcttcaactagggcttaggtttgaattatatggattacaaaagaatacattattgggcgaaaattcacactatgattggccactaaaagggaccattctctagttacaatttcgccactttatttcaaccacttattcttcttttaataataccatattttcccattcaatcatataaatgccaaaactatttatttaataattataattaattatcaaataaaattgctatttatattatttattaattaggccatacaaagtctcttaattaataaattaaccccaaaatctcttttcttcataattaagcccttgcttagtgaaaattcataaacaagacata

SEQ ID NO: 351155 - DNA, 1096 bp, Cannabis indica
ccttgcatgccttctccaggaggcatatccaagataatgcctttctttacaaagacttagctattaatttaaatgctaaaccctttgtgtccacgtgtccttgtctggttggtccacatacattgggcaaaatcaggggcaacagtaacttattctgaatttctcaaaatttcgttggatgtcttaaataattataaagtacacaactatgaaaagaaatagattaaaaaaacttctttaaatgttgaaacagtaaaggatgcttcagtgcactttttttgggggttgcattgcagaagcaccttataatatttatttatttatttttctaaagatttatcatataatattggaagttttgtggtacactcttaaaaccgattttgtggtatacacattttttataaataaaaaataataaataaataaaataataatagtcaagtttaaacttttaagtaagtttttatttattttattttttaaaaagtttattaaaatatattgtttttataagtttttatttattgtattttatttttttaaatttattaaaatatattatttttataaatacaggttgcgtctcataaaagtccgacacgacccgtataacaatatggttcatttcgggcctgaaccatatttcaagaattaggctataacaatccatgagttcgaattatttgtgtcgggtctgtgctttaataaattagctcgtttttattatatgtgtcaacccattttttattaaatcagttgaccatattttttttctatatatatagatgtcataatatgacctatgataaaattactactttttttcactatttttaaaccaatttctaaaggtttaattttttaatttttgaaacataaatattaatattattataattttatataaaacgtaatttatattttcgaaagattttataacttttatttttggatttttttttcttatttgaaaaaattataaataaataaagtattcataataaatacaaaaataacatagtgttacttaatacaaatttaattgaatatatactttatattttgttgaatatagtataattaaattgttaat

SEQ ID NO: 351156 - DNA, 667 bp, Cannabis indica
tctatgcggtagcattcacgagccaaaagttagtctcctcacaccacacctacacttgccggtgtttgaaacttcagggatagatgtttaattgaactaattgcccctagtccaattaatgttggtcgacccaacagtatgttgtaggccgatgataggtcaacaactagaaaattttatattatggaagtggatagaggcgtctcgcccatagttaatacgagtttaattattccttgactggcgacactatcgcctataaatccacacagatttaccatgcaaggttttattttcttcagtgtatccttataaaggatattcactgaacttccgttatccaccaacaccctctttattcttttgttggcgagctggattgtaatcactagtgggtcgacatgaggatatctcacatgttttgtgtcttcatccgagaacacaattggaggttcctcagtcttggctttcttagatgattttggagcaaagactgactgctcattcttaacttccttcacatatctcttttgggcattgttactttctccagcgagatgtggccctcccgagataactagaatgtcctctccttcaagaggaggaggttgtaatctctggttgcctgggttattaggcagatttggctggttttgtccattacctt

SEQ ID NO: 351157 - DNA, 1061 bp, Cannabis indica
aggatcttgtcaaaataaagacaaaaaaagatgaaactttgaaggactacattcaacagttcatggctgaggccaccaaggtcgaaggcctaaagcagaaggctcatatacgaccatcctcaaaggcatcctaccgttgagtgacttttggaaagatatcaggaggatctcaacgaacaatatggaggaactccttgagcgagatgatggcttcataaagctagaagaagatgtctggcaagtctagataagaaggcaggacaatgacgaacaaacacagggcctcatagcgccccaagcactgtccaacatgccgaccagtgaaaacaatctctgtcgattctcaaacaatgagaatggtggaggcaagagcaacaacaatagctctaccaacataacgacaaaagagggaaattcaacgattcccttatgccatgaagcccaaggaaaaaggaggggaagggtgcatgcttactctcctaccaaaactcccaaagcaaatcatgcccaaacatcccagtagggcaagtcagcagtctgaaggctggcctccgtctccgaaggctggtctccatctacaaaggctggcctccatctcttaccaagcacacaagcatttgccgacaacttagcctaaacctccagcggcaggacacttaggggtcatcattgccggaccccatattgcaggcaagaccagtaaagcttgggagggctatgctcggacactctgtcacgagcccaaaatagacatcctgactggcaaagaacgagactctaagcaaccaaagcttggagagcccacgatctctttctcaaaaggagatcttgtccaagtcaatttcccacacaacgactccctaatcgatactgcacaaaattaggaatatgactgtagcaagatacatggtggacaatggagcctcctttaacattcttttcaaataaacatatgaaaagacgaggctctagcttgctgacttggcaccctatagtcaaatgatgtatggcctctttggccaaggcattgcacccatcaggtatatgttgggttttatgcc

SEQ ID NO: 351158 - DNA, 799 bp, Cannabis indica
ctaaaaataaaataaatatactatataacaataaaacttatataccataataaaacaaaaaataaaaaataaaaataaaataaaataataattaattaaaaaaattaatatataccatattaataaaattatatgcaaccataaaataattatatcatagttacaaaattatatatgataaaataaaaactaagcatgtataatactaaaataaaatgatatactacacagtaaaatttatataccaaataaacaaaaaaaaaacaataaaacttaacaaataaaaaaatagtatatcataacaacaaataaaaataaatatatatatagcatgctaataaaattatatgtcacaccaacaaaagtacaataaaaaaataaattaacattgtttaaaaataatattaccgtataataaaaaatatatatatcattcaccttaacatatatactaataataataataaaaatatattactaatatatatatactataccaatcaaattatataccacaattaaaatatagaatttttagaaattttatcccttgaacttacgataatattgattctgctccctaaaatatacaacttgttaagaatctccctaaatttttacatttacaaaattttaatccttctgttaggttccttcctattattctatttaaatgctgacgtttctttgtaaatcaacaattttgcctactaaactttgacaactattaaatcatacccttcaaaataaaaatgagaaaaaatcaatatttttttaataaatcttaaaaaattaattt

SEQ ID NO: 351159 - DNA, 447 bp, Cannabis indica
tacttgtgagtagatctaagatcttggtaaaataatttccaacagagtaaaggttaagttagggggagttttattgggtagtttgggtgcattttataaagtgttttagatgtgtgtttcaattatttatatttattttggtgtagaattacgcttgttttttgcttgtttaaatggtaaaattcataatataaattgaaaatgagaagaaaatgttaaatgagatgaaaatgttgaattcattatggaatttggagttctaagatatgatggtgtgaaagattctaagttttggatgctcaacatgctctaattatgattgaaaatcaagtctaaagctttaagcccatttttactataatttgttcacttctaggaaaagtattgtgaataaaagttctagatatctcttttatcttttcaaaacatattgaatcgttcaattct

SEQ ID NO: 351160 - DNA, 884 bp, Cannabis indica
aataattatttatgttgatttatttgaattcagaatgaatttttatgtcatatagtgaaatctcataattttgcattttcggtgcccgacaacatggaacgcggtgtatgctcagtagaatcacaatttagtattttagtatagtgggactgtatatttagacattgggaatgtcgggattggttggaaatttagaatttcccagaatacccttagtaccccttttatgttattttagtgtggaggggcaacatagtctttttgcccatttatgttttgtcctttagtggactttaatttaagttaataatcagatttttcattaaataataggctgaatatagtattgtagtcaagccattatatcattttattaaaaaaaatcaaaggaaggaaaaaccaattcatttgttcaagctctttctttctctctctcgaattccttgggctgctagggtttgggtttttcttcatcaattcttggtgatcttagctcaatttttagtatatccaagccaaggtgagttcttagctttgaactttttagttgcttgaattgtaagaaaagaatgtttgcatgctttgagtttatacttactgtagtttctgtggtgaattgttattgtgttctgaggttaaagcatgtttgatggggttgatttaatctcgttatagtggttgttggttggatttaagtaagtttggaattttaactcaagcttgactcatcaatggtgaattttgttatattgcatgaagctttgttttattgctttagaaatgatctttgaggtctacttagcaagtctggaaagtttgatgtggtttggggttgttttggttgagaaatgatttttttaagtttcctgaactgaaccggaatt

SEQ ID NO: 351161 - DNA, 1347 bp, Cannabis indica
ttgcttgatcaccattagtaagtagtagctaatcttgattttggaaaaaatagagttagtgaaattgcttgaatgatgcatgaatatcaacttggaaaagtgtgatttgtaaatggcataggaatatgttatttaccttgtataacttgaaggattatgacattttaaatttctagttgacattatcaatttacaacaatactcatttgcatagttatatcaactttgtatttttaggccaatttaatagttctagcttgtttttatcatagtttgtgtttgctgatttttttttttacatattctcatcactttattttattttgttgaaaccaatttttgagtaattagttttataaattaatttctaattttcaatccctgtggagacgatactcgatttatcactttattacttgttacgattgcgtatacttgcgtacacaattttcacaacaagtttttggcgccgttgccggggattgatttagtgaaattttgtttgtagaacttaattactatcaatttggtttttttttttgttttcatttgtttacttttttttttgttctattttacgctttgtttgtcttgttttggtttgttttgcaaggagcttgagatgtcgcatcgacaagtccttatgaattttgttcaacatgacttggagcccttgtatgaagcatggtggagatacaaggcatttctaatgagatttccatatcatgggttgtccaaagagtgtcaattagaggtcttcctcaatgggttgaatccaagcacacgagaatgggtagaaagaggagatggtaccaccaatttctaccaattatcaatcgatgaagcctattggatgttggaagacatggcggagtacaatgagtggtgttgtaattgtccaaacaatgaccatgtttgggaggacaattacaacaatttggagccaaattttgacacttacactcaaggaccaaatgatgagattttagaagatttacaagagttcaacatagaagaagatcttcatcaaatggctcaaccaagctcacttgaggtgttgatgatggagttcatggctaaaaatgatgccttaattcaaggccaagcttcatccttgaggaaattggagaacaaattttggtcaatgagttgtgtgataaacaccatgaaactttgggcattgatatggaaaattcaaaggaggtagaagaaagtgaaaatgtcattttgagaagtggtgatgagttggagattcttggagaaagttttgaggaattacaagagctcacttcaatccaaagtagtgaagaaaagatgaggaagtaagcatttcaagtttgtcaacat

SEQ ID NO: 351162 - DNA, 457 bp, Cannabis indica
ttatatgtgtttatttcataatccttttagaagttcgtatttagggtgttaatcaacatacttgtgagtagatctaagatcctagtaaaataatttccaacagcatgagcattctccttgccttctaccgctctaggataaggcttccttagttgggagcaggctcgagggactagaggaaggttttgagcactttcctctcctccagactcattcagatcctcagtctcatcataaatcgtaatcagttggtggaacatatctgaatctataaaacaaaaaattaatatcacaacacacacaacatcataatgttatcatatgggtatgcccgaaaaagtgaataagtaagtatagaaaaaagagagaaaggaatcttcagagtcataatcattgagcactgtagtcttctcgggattgctatcaacaccaacaatcactccagtatccctcctcg

SEQ ID NO: 351163 - DNA, 984 bp, Cannabis indica
ttaaatgagcttatactcacaaacaatttggtaatttgtatatttcttctattccaagagacttattttattaatgataacttttttttttaaataaaaatttggaaatacagtaatttagtaataaaaatatttgaacatctttaaaattaaaaattgaactagcaagcatgagctcaaaataaatacataaaaataaaaagtacatggaattttcaaaattggtcaaaacgcgtttttttttccctttttatgggacaagatcatttatattatatgcataatacataataattgcaaaattatatacccttaaaacaaagtaatcatattagaaaaatctaaaatcataaccactaaacttataatggtcttgtcaaatttacctcatacaataataaatggacaactagagttctatattaaaaaaaaataaataaataaaaaaaaaaacaaactaatggtgaaaattacgcaaaatataataattgtcataaatttgtcttttttttttagttatttttaattgttttatagttgatttataattatcgtgatattgatttctcgttatcttttagttgttattttacattttgctgaacaaagtgtatatttataattttaaaattttactaatgaattattataattaaaaattttagatcgtaaaattgtgaataaaacataaaagaataatatttttaaaatttccctaaaacatttatatgatttttttttaaaaaatttttacatcatcctttttatggtaagatcttggacataggcagactaaataaatagaggaaattagactctataccctttttatattgttctctttcatttttaccctcttttttaaaacaatatcatttttacctatttttctaaacactttactgattttacccctgtcacatcaatatactctccatgtgactcccttatatcagggtattttgggtacaatacatataaaaa

SEQ ID NO: 351164 - DNA, 931 bp, Cannabis indica
agaccccaaacccaaacccaaacccacaccctaaccctagaccctaactcccaaacctgaactcaaacctggccccgaaccgcagacactgacttggaccccagacccaaacccgaacccaacccttagatcctgaccccaaaccccaacccgaccttgaatttggacacgtacccggaccccgaacctgaacccaaactcgaaccccaaaccagaactcaaacttgaccctgaatcctggacccgaacccagacccaaacttagacacaaactgggacctggaccacgaacccagattcgattctcggctcctagacccggacccagactaggactaagatcagggtctgggtccgagtttggggtcaaggtctagagtctgagtcctagtcaaggttcagttttaagctaatttcagggttggggtcaagtttattgtgaagaatttataattttacacaacctattagtacaatccaataccaaacatagtattgtattaaataatactaatacaatacaatttaatctaacacaatactatacaatacaatacatcatggtgtatcaaacaaaataaacttgtttatactatataggcaacataaaaaatggttccaaaacaatgtgagattttttaaaaaatatttatcatcaaactttcttcacaaaatgagaaagcctcataaattagtaataatagaaagaagatcatataaaatattttgtggttataggcatagtctaatagtttcacatttttcttcacaaagagaaaatcctaagttggaatctcctttatcaaaagaaataattataaaagggcgatgatgcaaaatggccataaatctaacaattaagttaataaatgtccattttttaaaaaaaattaacaaaatgtccttttagttaaaaatttgatgataaaag

SEQ ID NO: 351165 - DNA, 536 bp, Cannabis indica
gattccgtctctaatttttaggtattttcggtagtttgaggaacagtttcgatactgaactcatgatcgatcttgtggcgaccataaccgaagctttttttgctcgttaatggagtttttgttggtgagaatggtttcaaattgtgactttgatcttatatatgatcgcagtaagattttgtagatcttgtcagtagtctgagaaatgattttggttataaatgattgattgatgttgtgttgtttgtgaacgaagcttttttgttcgttaatggagtttttttttcttctttttgtgagaatgattcaagttgagattttaatattctttttttggttataaatttaaagattttattttcagtattgtgtttaatgcgtttttcaaaggacccattaattagtcccctaattagaggaagaatatggtacaggttttgtgtttgggatactgatatggacttattttgatttacggtaaggatgctgacgtgttacgctaatagaaagatattaaattaatggacgtcaattat

SEQ ID NO: 351166 - DNA, 393 bp, Cannabis indica
catcgtgaagtacaagattaatccctatcaatttaggatcgtatcacaaagatatggaaagctgtccaaatcccacaatttgtgtattctaaatatgaaatatatgttcttactaattatagacattgtaagcaaaagggaaacatttcctcaagcacgtagccctataaatagggatccattctcacttagtaaaggggtcaaaagaattactttagagaaatctaagagagcatactcagagatttcattgtgagagcttcaagagaggaaacactgtgttctttgttcttgagttaatactattggaaactattttaccaggatcttagatctactcacaagtatgttgattaacaccctaaatatgagctttctaaaacgatgaaataa

SEQ ID NO: 351167 - DNA, 529 bp, Cannabis indica
tataatatatgtccaccacgaagtgaaaagaagaaaagaaaaatatgatgtgcctctgtttgaacaatgaacacctattacatatgtatcaaatatatacatataatatatataatgagtgtgagaaaataggtggcttaacactttaaaattgtaattcaagtcccaaagtccaagaaaatcccactcgtagactgcagggaaaagtgaaatcaatcttcttatcaaaaagtaaaaaaaaaacatatgttaacagataaatatcattatatatacatacatatagtatatgtattggtgtaatcgcatcaaacaaagtctctaccgtgagcacatgtgtgaattaactgttagcataaatttttttttataatggttcacattataaactaatgaaggccaatttatatacctctcaaattagtcctatttcataaagtataaggacttaagttcagagatatattatactacgaatgtgtgatattttcatctcattaatttgaatttaatttcaaatttaaattat

SEQ ID NO: 351168 - DNA, 752 bp, Cannabis indica
ttcatcgtcactccatgtgacattaagacttttcttattctttttcagtgtatttgcacattcagattgaatatatccaaaaccttcacattctctgcattgaattctcttttgattgttagtcattgaaggttttgaaaaagtattacctttggagaattttggaaaattctttttgtcacttatctttttcatgtatttcttaaagtttttagttaaaacatcaatttcatcatcttcttcatcatctaaaatttctttttcagcaacattaaaagtaataactttacatttatcagcaatggacttgggtttgttcttctgcttcatttgttgattcaattcagaagtacgcaaagaacccattaattcttccaccttcattgtgctaaaatctttagcttcttccatggccaaaagtgtagtattaaacatgtttggaagaactctaacaatttttctgacaagaacagattcatcaagcttttcaccaagagcaaaatattcattagctatatcagatagcctttcataaaattcaattagggcttcattttcagacatcctaagatcatcaaatttggtctgaaacataataaacctagaacgcttaacatcagatgtttcttcaaactgagtttgaaggatccgccaagcatccttagcagattcacaagaagatataagcttaacataaccttcacctactccattaaatatagcatgtaaagctttgctattataagcagaca

SEQ ID NO: 351169 - DNA, 586 bp, Cannabis indica
tccttacttgttattttctaaatctgtatatgaatttatttgaactaagtaatttatttctatttattgatatttgtggtatcaaaatgaacaacccacaccccaatcctcatcttttacatgcttttgcaaataaactctatagtgtgaagatgtctcctggtaagagcatcagttcacacttactcatgttgaacttgaagttttagaaagcaaatctgctggaaattgatttatcaaaagagcaatgggttcaattcattctcaacagccttccacctgagtataatggatttgttctatcatacatgatcaacaattttaactcatctgacacagacaagctggacgcagaattgcatgcttatgaacggactttgccatctgtaaggagggctccctccagttttgcaaacaagggcaaaaggaaagttgaagaaattgaggatgatgcttctcacaatgctgcttctttgagttcaattttgaatgctagaatcgaaattgaactagcaattgaaacaattaaagaacaactgagcaaacatactcttctgtgttctcactatggagagaagggacattt

SEQ ID NO: 351170 - DNA, 507 bp, Cannabis indica
acagattcatcaagcttttcaccaagagcaaaatattcattagctatatcagatagcctttcataaaattcaattagggcttcattttcagacatcctaagatcatcaaatttggtctgaaacataataaacctagaacgcttaacatcagatgtttcttcaaactgagtttgaaggatccgccaagcatccttagcagattcacaagaagatataagcttaacataaccttcacctactccattaaatatagcatgtaaagctttgctattataagcagacatttatcatcatcttcagtagaccattcaagttcagattttaatttagaattaccttcaaaatctaccacaataggaggagaccatcctgaaagaaccatcctccatgttttctgattaatgaacatggcttagagaaaaaaataaagattatccaatgattgtgaaaaaatcaagaacaagtttcattccaattttgattactccaagtgtgtgtgtgtgtgtg

SEQ ID NO: 351171 - DNA, 537 bp, Cannabis indica
aaaaatgtgatgttagttgaaggactaagggctaatttacttagcattagtcaaatttgtgaccaagggtatattgtctcatttgacagtgatcattgttatgtacttaatgatgataatgaatgtattttgcaaggatttcgatccaatgataattgttataccctaactcctgtgtttacttgtcattcaaccatcaacaacaccacggatttgtggcatgccaagcttggacatattaattataaaaatctgaaaaaattatctaatgcaggtattgtttgaggactacccaagcttggtaaagaaagtgttggtaagtgtgaaccatgtcaacttagtaagtaattaaaaagcactcacaaacctgtgtctaatatcaataccttaaaagtattataattgcttcgcatggatcttatgggtccaattcaagttgaaagtttaaatggtaaacgatatatttttgtttgtgttgatgatttctctcgctacacttgggtagattttttgagagaaaaatctgacacttttgat

SEQ ID NO: 351172 - DNA, 676 bp, Cannabis indica
tgccatgacctccttgtccaaagaagtgaacaacctccaagaagaaagggaggttcttcaaactgtcttccgtaggttggaagcgaagaagaattctaaggaggaggagcttgccgctgaggttgagaagtacaaggctgaggccgagcagcagagagctgaggttgagaggcacaaggcagaggccgagcagcagagagcttaggtggtgaggctcggagggaaggtaaatgccttatagacagggggcctcaagattttttatgacttctggaaggctaatcccaaggcaaactttgattacttgggcgattccaaagacatgtttctcgagtattgtgcttctcatgtggcttatggagaatttgaggcgaccactgctacctctagccaggacattgacatgccccccgcccagacaactgatcctccagctcctaccggtccagaagattcgtataaagaacctaggactccagccatctgaatacttctctttttatctttttcttttatctgtctgaccataaggccttttttaagacaaagtgaccggccaagcagtttttaaacttggaattatttttcatttttcagacaacaggctgaccgggcagcctttaatcccgattttacgtgcttttgttatctttaatgaatttcatcctctgtttat

SEQ ID NO: 351173 - DNA, 589 bp, Cannabis indica
attaaaacataagggggggttttgtgacaaaaaaaaaataaggaggttaagtgtataaaaattaaaacataaggaggttttgccaccaaaaaaagataagggggttaagtgtataaaaattaaaatataagggggtttcgccacaaattgctctcttgaatattcatttatcaataaagaaacagatttatttcattacgtgtttaatatattatttggttcacatgtttatttcatgatcatttgtttggtttataaattcatacaaatcattatcacattgatattcttgattactatgtcaacacagtggaaactaatcaagattacgcgattaaacaaagtcctacaatttatcagtacataagatttcactgatataataatcaacaatgtagtttacttgcaccttggataagtgctatgtccttttcagggtattggtaaagtaagattgtattggatgtattgttatacatcgaattggaccgatattgaacttggataagatatcataaacttaccgtactatctatctaagtcaatatcaccaagttaatcttagatcaatgatctcaatcctgagatg

SEQ ID NO: 351174 - DNA, 1218 bp, Cannabis indica
aaataatcgcctaagtgagagaaataatactatttggcatgatccccccaccgagtggagggcatcctaaacctatggagacgttaatcgaaccctataggcctaagcctagcatactcacggacaggagggacgtaatgtatcgttaaaggggacttgccagaaccaaaagtgctggcatcgggagccccagtattcggcactgggggtccttcactcaaccgggctcccgatacgaaggggccttccagcggccacctgggccttattataagcctgctcctgtgccttttggaagaggtatttctggtacttatcttccgtcgtggcgatgatatcctcccggagtaccttctccgcttccggaaccctcacgtttgggcaaaagactttagaaaggttggagtcatccaccgactgatgcccctgtatcagcttggccttccagcagtgctccgtcgtggccaactccccgacgtcaagggccttcttgtcatatgtggggaaggtcttagcccgttggaggaaaagttgtgtaggttaagtccgcgcataaggagggatcctaacccactccgtgagaagctccggatgctccacagcctgcaacccggaggagaagaagaagcggtgacagtattccttcacatgtttctcgtggttaaaagggaccgagccctcattcaaaggataggcccggaaaccgtaagaaccgtccttaaacttatctccctttttagggacggaaacgagttcataaaaatacaaaatccttgccggactgggggagcctcagccccgggcagagtaaaaaataaataagcctgaaagcaggcagtaagcttgaggaatgagttggtatggcgcaaggccgacaaatacaagaaaattaataaagtaatcttgaaggggaagcatggccccgaccatcaagtgcgtctggctccaagctttgaagcccccataattgtggttgggcgtctctgcgtcccggggcggccggtggtaggtcccggaggtcccaggcttgatacctgtcaccaccacgatgtgttccaactggtgggggcaagtcagggtggagtgaagcttggccgcttcccaacccttagcatgggacttgtacccttcttgggccactggacccttcataacttcctccagggtagccagacgcttccctccttccgggaaagatttggaactggatgcagacat

SEQ ID NO: 351175 - DNA, 779 bp, Cannabis indica
ttactattaagtataatataatatagtactctattaattgtctagttgtagagattaattaatgtctacttactatgttcccactatacgacttgtattgccttgagtttgatcaacaacaaaaagtcttgccattccaaagtctgcaattttagggttcatttcttcatctagcaagatgttactagctttgagatctcgatggataattctcaaacgagaatcttcatgaaggtaaagaagtcctcgagctacgcctcctattattttgtaacgcctatcccaatccaaagtggcacgctttattggatctacatacattttcatgcaagtttatggttaatttagttaaaagaatttagaaatatattctccagtagtattctgttttaaaaagagcaataatgtcaccgtaccaaatatgaaatgatcaaggcttgcgttttggacaaactcatagacaagaagcctttcacttgattccaagctgaaaccaagaagcctaacaagattgcggtgttgcagcttggcaactagcattacctcattcttgaattccagatctccttgccctgaacccctacacaaccgttttactgctatgtcttgtccattggcaagtctcccctgaattacaccacaattttgaaaattttacatgtgtgacagccatttaatgctagacagtgtatataatagttttggacttgagtttttaccttataaaccgcaccaaaaccaccttgtccaagcttattatcctcagaaaactgatccgt

SEQ ID NO: 351176 - DNA, 805 bp, Cannabis indica
ggagctagacaatgtgcgtcccggcagtccctccgaggtggagggagaggaagaggtttaacccccaaattacggggcagtactatgaggctgcggagccagtcgatggtaatggagacgtcttggtcgagggcgtgcactatgtcagtgaggagcttaccgcgctagttcctcataaaaggcagggtgccttgggcgccagatgggtaagtcctccatccaagattacggaggcgcgccttcgaactcttgaccagggcgggtacttgggcgagctggattgctacattcctgcccacaataatcgcaccacaaaccctgacaaggggatgtgcgcctggtcgggaacccattgtcagcaaggagcgttaaatcccttgcataagtacttcaaggatgtggcaaacttcttcagtctctgcccggcccagttcactcctaaaggcaatccctacgccagatagttgatcggtagccgacccatccacatgtagtttcatggtcagtttttcttcattgttattttgctgaggtgctggctcgaggttgctttctggtatgctttcttttttgcttgtgcattctcccacaaagtcagccaaggcctggcctttgattgttgttcggggtcgaaagttgatttcgtaatgacccaattctactgcccacttgagtaaccgtccagaagcatttggcttttgcagtatttgtcgtatcggttggttggtatatacccgaacaggatgggcttggaaataaggtctcaacttccttgttgctagaatgaggcagtaggcgagttttt

SEQ ID NO: 351177 - DNA, 717 bp, Cannabis indica
tgataaaatggtcgattgaattggggcagttctacataacataccagcttcgaacatccatcaagggccaagctttagctaacttcttgatagaaggtatagctctagaaaaattctacatgatcagtgagacatgaaaacctagaaattatatgtggatggtgcatccaacgaatagggtttgggtgcaggagtgatattaatatcgccagaaggcttttagtttcactatgctttgaggtgccaatttgatgcatccaataacgaggttgaatatgaagccttgatcaccggcttaaagacaacagaggcactgaaagtcaaaaatctcatttgttatagtgattcgcagctgatcgtgaactaggtcctcggggaatacaaggccaaaggcttaaaaatgtcaaagtatttagagaaagttcagaagaactttgaaagattcgattactttaaaatataacaaagtccgagagaacaaaactccaacgccgactccttagcaaaaatggcctcgcaggatgacctggatgaattgaatctagttctggtagagatgctgagcgagccaagtatatgtgaaactgaagacgtcgagatgatagatagctctccaacatggatgacacctattattaattatttactcgacggaaaacttccaaatgacaaaaaggaggtgcgaaaactattgtattcagtgcctcgctacataat

SEQ ID NO: 351178 - DNA, 545 bp, Cannabis indica
agcttgatggagtatttataattggttacccctacatttaattttttctagattgttctagttctacatgatttatagcttttctagacttttctaattgatttatattcttctacattcttcttgattggttacttctagttttctaaatattctaggtttttctagtttatttattttgctaggtttctaaagttttcactagaatattctaagatacaaatattctagaaatgtatagcacattttaacagtttttaacaatataagattttcttttctcagtctaataaatctgatttaggtatataatttttgaaatttgaaaaataattattaagtaatgaaattattaacaatttaaaaatgtgatgtgtttgtacattatttttgttaaaataaaatgtaacttgatgtatatcataataataatgttatatgttatgatatatttgataaatttaaaattattttatgactattctattatgtttaaataatcatttattgtataatcttatttcatttaagtatttaataataat

SEQ ID NO: 351179 - DNA, 561 bp, Cannabis indica
cttcttcttcttacttccagatctctctcgatctctttctccggtaatgaattttcttagcttaatttggggataaagtttgtaactttagtttgtttgtctgttttagttttttttaatacgattaatcaattaatttttcatgttcgttttgaatgtcattcccgatttggagtatgttaatggaagtaagtctcgtttggtttctttgggtttctattttaggtttaacagaacaatgaatcaatgatttaagcataagaaaagtgtattttttgctttaatttacttttattatttttatctgttattgcatttgtattcttcttccaaaattaaagtaacttttttttttattactattattatgtgtaatgatgaatgacttttagcttaaggattgtgattttagtaaagtgttaaacatgttgtggaccatgtagctaatcattacaatggtcatcaattatacccaaaaagaagatgattgaaatgatattgggatttatttttatttttttttttattagttatggcaaagatgaatttttggggcatgtt

SEQ ID NO: 351180 - DNA, 860 bp, Cannabis indica
gttaatgagaacacgttttttttaaacaagtagcatttagtttctgatgttaagaatattaagttttaaaataaaataaaaattaatgtaatgcatctgaacccttcacgtgtctatatttatgagttaacgtaagtactagtagtaacagtgtaagagaattgtaacattaggtatttttgccaccaaaaataaacattaggtatttaagtgtataaaatcagaaacattaggtatttatgtcgcaatttactcttttgtttaataattaattataattgttaaatagataaaattgacatttatagagttagagttaaaatatggtatttgagattaaaagatatgttatttaatgaagggcccaataaggggttcgaccacaaaggtttaatttaaagccattttatcgttttttttaatctatatatttaaatcataacctaaccctaattgatatagtataaatagataattataggctcttatttgaaagaggttgataactcaaatcactttgtcagacaaattagagagctcctataatttttgaaattctcttcttttctcccctcttgaatttcaaacctatagtaaagagagtacatgcccacacatataaagtcaatattcaatcttagtgtggaagattgtgaagaattttatcacctaaaggaaatccgggttcagatcttagtaatgctctacagaaatgaacaaggattagagatctaaatgaaagaatccattatattctgctgccaccaatgtaaggtttttctaaaattttatgtgtttatttaattattttacgaaattcatgtttaggatgttagattatagattataatcaaatatac

SEQ ID NO: 351181 - DNA, 507 bp, Cannabis indica
aggttaaatcagccaaatgtaaatttgaagaggagtttgaagttttaaatgaagtcaaggaggttttgactgggaagaagtttctcatcattcttgatgatgtttgggatgaagatagcaacagatgggatgtgataaaaagtgtctttcaatcagggttgcatggaagcaagatcattgtgacaacacggagcaataaggttgcttcaattatggaaactaagccaacatcaacttattccctcagcactatatcgtttgacaaaggttggcagttgtttgttagacgtgcagcaattgatgtggacatgcacgagtatgctgatctacaagtaattggtcgaaaaattgttgagaagtgtaatggccttcccttagctataaaatcacttgggggacttttacgtgggaaacaaaataaggaggattgggatgacatattaaacaacgatatatgggggttgtatgagagtgagagtgttgatattcttccagctttatggctga

SEQ ID NO: 351182 - DNA, 845 bp, Cannabis indica
ggaacaactactaagtaaatccatagaaaaaaaccaaaaaaacttccaattaatttttcccatcaaacaccgaaggcacaaccccagtcaaccaagatttgaaactagaactccccgtcaaataccaaatctgtcaaatatgcaaaacagccaataccacttgttttaacaaacattattaaaattaattacataataatgggtatattaacctaaattttaacccaaaataatataaaaaaacacaatcttcctaacagttaaaaaaacccagaaattgacctaaagcaaaatcagatataaagagcttcaaacgaaccctacaccatgaaagtcgaaatccacaacgagcttcaatcgttgtccaccacgaacgctgcagagaaaggagagagcgagagagaggcaaacgaaaaaaaaagaaaaaaagaagaaagatatttacccgaggcggtgacggtaagagaggcggcgacagtaaacttctgctcgtaagaacaatggccatctggggcggcctacggtgtgacgaaggtcagaatgcctgttgggtgttttgggttcttgaatggaggcaaatggatttgtggcttcggttcgaaaacagagagatggtgagaagtcgagcaagagagaaggtcggggtcatggctccgttgagaaaatagagagagggtgagaggttgaggtcgtggctccggtgccaaaacagagaggggctgggatgagtggcctcttgcggctgagatgttggctgttagaaactagggtttttttttgtgtttaagagagagaaaagaaagagataaggttattatagggttttgagaagaaagagagagaga

SEQ ID NO: 351183 - DNA, 654 bp, Cannabis indica
ttcataatctttattattgttgtgtgacaaaactagttcattgataaagaaatcactttcttggtaaaagaaaccggtttcttaatgaagaaactactttcttagtgattttttcggtatttttgctggcgacaatgtcaattatgacgagtttttcgacgttggcagtaactccggcaaattttcagacaccggcaactactccaacgacttttctgccaccgacaccaaactctagaatagtcgtcggaattggcgttgtaacttgtaaaatcaccagaaaaatcaccacaagaaatcggtttcttgcagtttcttggtgatttttcctgtagtttttccggcgacaatgctaattctgacaactttttcggtgccgacgacaactccgatgactttttcggcaccagcaactactccgacgactttttcggtgccgacatcaaatttcggtgactttttcggcacgagtgacaactccggcgatcactgtagttttatttgttttaaaaaaaataaatataaagggaattttaatattttttaaagtgattcaattaagtttttaatttttgtatgaatcttaaattcaaattcgctttttaatattttatatggttaatctttttaaaaaaaccatatttttagtttgat

SEQ ID NO: 351184 - DNA, 619 bp, Cannabis indica
tgtcaagttataggacatgaagcccagtctgaatccgaaaaacccctgagatgaagagaggacatggcagagtatagaatgccttgaccaggactgcctttgagataccgaatgagatgttgtagggcttgcaagtgaggtgttcgtggagaggccataaattggctgagaacattgacatcataagtgatatcgggcctagacaatgtcaaatagagcagtttgccgatgagttgtcggtaggtggttggatttgtcaagggttcaccttgttggtctttaagtttgtgtctaggatccatgggcgccttagcaggcttgctgcctatgtaaccactttcttcaagaagctggagggtatatttccgttgggagagaaacatactatctttggttctagctatctcaaagcctaaaaagtattttagttttccaagggtcttgagtttgaatttgtcatgtagagagtcttgaagttgttggagaattgtgatgttgggaccagtaatgactatatcgtccacatacacgagtaaagcaatgaagctgtcatcttttcctcgagtgaagagtgtgtagtccgcttgagattgatgaaagccttcttgtattagagctt

SEQ ID NO: 351185 - DNA, 503 bp, Cannabis indica
agtaatctattcatcttatatattgtaatataaatttactaatatataattaaaactagtttcttaacgaaaaaaatctatttcttgaaaaaaaaaaattgatgaaaaaatcaattttttgatgaatggtctttagtgagtaatttatctaaatattaaatataggttttaaaatttaaatttagatatatgttgcataacaaatacattaaaataattaaaaagcaaaaaatacaatgaaaaatagtcaaacttaaaagctacttaagaaaaaaaaaaaattaaaactcatattaagtataattttttagtttttaatatgaaaaacactaacatggtacattttttttttttgaaatacactaacatggtacattggtgcacccttttaaccatagaaacaccctttaatttaggaaaatttgatattatatgcttaaaattaatttatccactgaaaatagaaatttttacatgaaaaatccattttacacaatttatta

SEQ ID NO: 351186 - DNA, 686 bp, Cannabis indica
tatagacattgtaaacaaaagggagacaccttccctcaagcacatagccctataaatagtgatttaatctcaatgggcaaagggtcgaaaagaattatctaagagagcatactcagagatgtcattgtaagagctctaagagaagaatcactgtattctttgttcttaagtcaatacaaatcaagggaagtaggctattaccgaattgctcggggccgaacctcttcaaaaactctgtgttctttatttatcttaccatattacatctaaattatatcatttatcgcttacaattaagactcattgtcgttagctaaaagcgaggtcaacaaattgctagatcagattagagctttaattttccataataattttgttggtatctcatttgtattctgcgaggccaaccgagttgctcatgctttagtcaattatgttttggttcacaaagctagtgccatatggattgggggtcatacctccttgtgctcgccaagcagtcttgcttgatgagccgaatcctgtgtaatgttgttatttaatgcaagaattctgtttaaaaaaaaattacaaaaataaaaaacaaaattacttacctaacacgattttagaaagtattttcatatggctaattaggatttttactatttcagtgattgtttatatactaaatcatgatcccgaga

SEQ ID NO: 351187 - DNA, 641 bp, Cannabis indica
ttttcccttagctcaggttttgtcccactaggttttcctgacaagatttttaacgaggcaacttgcaaatagttatgaacatgaaatatatattgcactctttttctttaactcacgttttgtcccactgggttttcctgagaagtaggtttttaaagaggcaactttaaatcatgttaaatacttgtactttatgaagtaaggagagaatgtgtgggagtgagatcattggcataacatattcgaaaaatatatggattacactctataaagaagtatcaacacaagcaatactctatgaagataatactacttgcatcactcaactaaaatgagagtacattgaaggagatagaattaaaatacatttcaccgaattcttctttatacattttaagaaaatgcacattggtattcaacaaattcaatcaagtgtcaatcttgcagacttattcacaaagtcgttaccaacatcaacatttgagaaaatagctcacaagattagaattcgtcgattaaaaaatctccacgaatgcctcaataagggggagctaatttacactgcactcctttcttttgaccaagtttttcagcaaggtttttgatgagacagtttttatggacatccaagggggagtgtt

SEQ ID NO: 351188 - DNA, 946 bp, Cannabis indica
ttttctcgattttttcagaaccaaaatgtctgcttccgcatccgattccaaatcttccatgaaaggagaagttcgattggccaccctggaggagaattacaagtcccgtgccaacggatgggaggcggctgagctccactccacactgacctgcgctcaccagcttgataagattgtggtggtggcaggcatcaaactttcggtctccaggacctactaccggctgcctcgggacgaggagacacccaaccacaactacgggggcttcggagcttggagccagacccatttaatgtccggggctattctcccccttcaggactattttgtaaactttctcgtttttgtcggcctcgcgccatatcaactaatccctcaagcttactgcctgctttcaagcttgtttattttttatgccgcccgaagctggggttcgcccagtccggctgaaattttatatttttacgaacttgtttctatccccaagaagggggataaatttaaagacagattttatggcctccgggcccatcctttgaatgagggcgaagtccctttcaataatcaaaaacatgtgaattcttctcctccggtttccaggccatggaccgcccggagcttctcacagagtgggttaggatccctccttacatgcagaccgcgcctacccaagtattcctccagcgggcgaagaccttctccacgtgtgacaagaaggccctcgagttggggagttggtcacgacggagaattgtcggaaggccaagctgatatcgaggaaccagtcggtggatgacttcaatctctccaaggtcatctgcctgaacgtgagggctccagccgaggaaagggcattccaggaagacattattgccacggcggaggaccggtaccagatgtacctttttaagagggaacaggagctggcctacatcaaggcccaggc

SEQ ID NO: 351189 - DNA, 1051 bp, Cannabis indica
ttttttttgtatagttttttcttccactttaacccatttttttccatgtttctttagattgcccaatgttctttgtatatttaaccgctttcttttccagttaatatggtcattatctaatgttattttgtttttaaccggttatttttttagtgatcatatattttttttgtttattaagttttttgtgttgtataaattatatagaacctttttttttttggctttatagaacatgtatgttggttcatgtttaaatataactggtttcattttgtttttgatttcttttgttttggtgcatgttgaatataaccggtttttttttgttgttttaatttttttataaggcacttctatgttatgaaaatttcatttttattcaaaaccaattaggtttgaagatatggttcatgatcaaaaaatattgaaatgatttttggaacatacaaaatctaatatagtgtttttttattgtaaatgtatctttgtattcaataaaaccggttattgttgttgtgtctttactttcttgcgccttggttattttggttgttgttgcgttggtggtattgctggattagtgcatgtttatctgttgtgccctgtctttttgcaacgtccacactttagttgtacctttggctctccttttgaacttattcttcttctcctaggtctccctgctctctttttcttgtttaatggtaggactatcatttccaagctctcaggtagtgtccattcactttcatttggtaatgggttcgctgttgtgtcatatgttgctttcatttcgtcagttttgtagtagtccgcaacatagtcgtaaactcacaatcctcgtttcgagaatacagctattgcatgagcacatgggatttcatcttgctggaactggttacattcacatgttttgtccagtaaattgaccaggattttccatttctctagcacattcacttggtggagtatggttgtgactggtgtaacctattattgtaaatagaaaaaattattttagaaccgattattttatacaactgttcaa

SEQ ID NO: 351190 - DNA, 502 bp, Cannabis indica
gagacgattctgcatgtgctggtgcggtactcttttgctcaaagttgctggagcaaggttccaatttctgttgtggcgcctgatgcaatgatgttctcgagttggttcgaagcgggtttggtatcgtggaactcggtcgaggctcttgaggatggtatggtctgttggtcagtttggactcatcggaacgagttagtttggaactccaagcaccctgatgcaagtgaggtaatgacaatggcaaagttaaattatgttgaatggtttaatgctcaaaaagttaatgtcacaataagaagagcaaattcgaattaatctacaaccagttacgtacgagtgtgtttcataatagtttatctattttgtaggaattttgtttgatagtgaaaaagaaagattacttctacatggtaagttttatggaaatagttacatatccgttttataatagctgcaaaaaagttttgatacaaacaaaactaatgaaaaaacacaaggttca

SEQ ID NO: 351191 - DNA, 798 bp, Cannabis indica
tgaaatcccgagatagggttttagctgggaaaactagtgactttatagtggatgaaatgggaatgttacgatttatgaatcgtgtttgtgtgcctatggatgatggtattaaaagagagattatgaatgagtctcgtacgactctttactcaattcatgtaggctcaaagaagatgtatcaagacctcaaggccatgttctggtggccacgcatgaaggacgatatcgctgagtatgttgctaagtgtcttacttgtcagcaagtaaaagctgaacatgagaggcctgcagggttgctgcagccattgaatattccagagtagaaatgggaagacattgctatggactttgtggtaggcttgccgagaaccaccggatagttggactctgtatgggtcacagtggacaggtttacaaagtcagcacactttttgcctgttcgaacgaacttctccattgatcagtatgctgagttatatgttagagatattgttcgtcttcatggtgtcccaaagtccattgtttcggatagagatccgaaattcacatcaagattttgggagagtctgcatcgagctatgaaaactgagttaaaatttagcactgcatttcatcctcatacgaatggacaatctgagaggactattcaaatcttagaagacatgctacaggcatgtgtgcttgactttgaaggatcatgggtaaagtaccttcccctgatcgagttttcgtacaataacagctatcaggaaacaatcgggatgtccccttatgagcttttatatggaaggaaatgta

SEQ ID NO: 351192 - DNA, 709 bp, Cannabis indica
ttatcttttttggaatagttgaagttatcccttagataaataaactttatgtctaggagccaaaagacttcctttaaagttagccattaaaaaaatactccagcatcttactaaagtaagttgcttgcaccaaattaagtaaattactaggtataccacaagtcgtaggtttagatggtctcaaacctatgatactaggatcaagaagttttgttaagttcattgaatatttattattaaaatttctcttctttccttgtaatagaaaacttttagttgttcatgtgaatggtcttagccgtagttctcttggctttgattcttagttccttattaggactatctattgcttgtttaaattaacaatgaattttttttatcacaggtgtcttcctagtcataacaaggtggattccttgaaactcttccattacgaaaaaggtatcatgactttctgtctaggaacattagtggtattgacctgattgattgtgtcaatacaacaaaggcaatgtgaccatcttatatagaataagatatagaacactttggaattgaatcaactagtttctcctctactttgcaactttattttcagatttagttacgttcttagaaaagtagtatttattgaaattaatactttcctatcttaatggccataggtgttggaatttattttaccagatcttagatctactcacaagta

SEQ ID NO: 351193 - DNA, 541 bp, Cannabis indica
attgacgtgactgcaccaaagtccaccaaggcctgtcggctgaggattgcgttgcaggctgtcgggcagtccaccaccacgaacgtgcagtacttgaaagtgctctggggtgtgtccgggcacaaggtgactcgaagcctcacttttcccattgggataagtgttgttccattgaaccctgtgagttgggaaccacttggtgaaaggtctcggtctgttaggcctattgcagtgaaggcctctttgaacagcagattcacggaactcccattatcgatcaggactctggccacgatcttattggcaatgggggtctctatgaccaacgggtcatggtggggaaaatgcactgctttagcgttttcttccgcgaatgtaatgggttgatccattagccggggcctttgagctgcgagttgagtaactttccacacctcatcgtgtttcacggcccctgcgtaccgtttcagctccttgcgggtagttgttggaaattattttaccaggatcttagatctgctcacaagtatgttgattaaca

SEQ ID NO: 351194 - DNA, 712 bp, Cannabis indica
atcagtcaaatagagagaaaataggatctcaactcctcactccctatttttactcatcctttacgttataggataaaaaaaaaattattggaaaaaatagggtcaacaaataggagaagttgagaacagaaaagggcatcgatactttgaaaaaaagagtctaggaaagagagaaaaagaaacaaaggaaaaataagcgatactttttggcaacaatcaagaaaacttcaagggtaagtattcagggaatgaactcattcctaattcccttttttttttttttttctttttgatgtgtattttgttcccctcctattcctatttctctctattcatttataggataccctcattctataaatgaaattggatgccctcattccacaaaaattggatgctctcatccatggaatgccctcattccacaaaaaaattggatgctctcatccatggaatgccctcattccacaaaaaattggatgccctcatccatggaatgccctcattccacaaaaaattggatgccctcatccatgattccacaacaaattggatgctcacattcatggaatgccctcattccacaaaaaatgaatgttctcatccatagaatattcttataaaaaaaataaaaaaaaagaataccatcaaaactgtatatggtaaagtagtaaaatttgatatgacctacacctgatagcgtgccaatcaa

SEQ ID NO: 351195 - DNA, 897 bp, Cannabis indica
aaaaaaaaaaaaaaagcaaatgtgtaataataaaaggctatataatagaaacttaactagtgtctctcctatctttgtattatatatatgtgcaaaaacctttctcataagtacaagacttactactctaattcaaatcattagtagttacaaaaaagaaaaaaaaaaatgttgcttccatgcacaaaaaacttttgtattgatgatcatgacttccaagaaatgttaccaccacttggagccacaatcaaccaaaaccaaactactcgactcaacaaatatattgtttctccttttaatcctcgttacaggtaaattagtttgctgagcttctactttttgcttttagtttttagtaagtttttcctcgagaaattcttcttttcttaagctaaaagctgaaaagaatattttcgaagttttagaagtcttaaaaagtttttaaaaagcttaatcaaccaaccgttgtgtgacatatgttcttaattatttcttaatatttattctctctcatgtaattataatattaatgtggtttgatgagattagggcttgggagatatttcttattgttcttgtggtttactctgcttggatatgcccctttgagtttgcatttttgccaaataaaaaagacgacgctttattcataatagacaacattatcaatggcttctttgccattgacatctttcttactttcttcgtagcctatttggatagccacacatatcttctaattgacaatccaaagaagattgcaattaggtaagtatatattaccagaaaagatcatttctcgtcggttaacttctttaataaaccgacgcaataggttaatatgtctatttataacaaacgtaaaaaaaaaaagactttttttgatagtggtaaact

SEQ ID NO: 351196 - DNA, 783 bp, Cannabis indica
gttgttccctttcttaaaattagagttctcattgatgttactcgagctcttcatcgtggtatgcaagtgttttttcaggaacattgctaggactaaatagattggttttcagtgtgagggtcttcaaaactattgctactattgtggtaggctcgaccatactttcaacaaatgtgttagactcttgtagaaatgtgatgaattggattatccttttgttttaggttacaaagatattcttagggctcatcctaaaattaaaatccaagaggttcaggcccttagaactggaacctcaaggaactagaagtaggcaaatttttttaaaaataaaattgttgaaattccaaggccctagccattggaaccatgccatgatatgaacccattcaggttcgggttcgagtttggttccgggtctataggatctgagtatgtgagcaaaaatgtaaaatataatatgttagacaaaaaaaattgttattgaaaattaaaaacaacattttgatattttttgttttttaattttttaaaactcaatttttaaaaaactgttttcaaaaaatgttaccaaacaatccctattaatttttaaaagttgtttttagtttcaaaacacaaaaaacagtttttaagttataaaaccaaacaacttccaagtttctctaatgggggaagatgagaatagagttgttcttgtttcttggagaccactaccaatatataactttatagacatgttattaattttaagtatttctaatttagtccctcaataaatta

SEQ ID NO: 351197 - DNA, 519 bp, Cannabis indica
ggatcaccatgacttgaacaaggtattacagatttgtctaaaaaatttgaattttctatctctaagcactaagggaactctcatagaaataagtttgaaaactattaagtcttagggagagttttttagcaatgtgtttttttgataaaaaaacttagtctatcctaattaagcaccaaaaatctctttttagggtttttgatatcatcactatttgaaattccaactcataatctctaatggatgttatgaactcaataaagagttgtaattcatgcacacactataactcttatatcattaagaattttaaattaagatgtataatatattttccacacttaatattgatgataattgcgaaagttacctataataacaagtaactttctcatatattacaaaacgatgacaattaatatagattgtcttacctactttagtagtttgttagagtaatttgcggcataacttcctggttttccatccatttttgggtgttaagtgccaggttagaat

SEQ ID NO: 351198 - DNA, 1006 bp, Cannabis indica
caacaatgtttcaacagggactgttcccacgtgaattgataactcgggggtttctggtccgaaaagaaaagacggaggtagggaatcgtcaaaagatagaaagaaacaaatgaagcatgacaaatatgtgccattgtatactatttatactgagcttaatgaaacttgaggaaaatatttacctcgcacatgagtagaaagtagccattggtaaacccgagcctatgaggaattcgaggagcaaaagatatcctaacaaatactgtgaatttcgtaaagatatcgggcatacgatcgacgaatgtcgcaagttgaaagatgagatagaaagtctcattgctcgaggccattttaagcagtatctgagaagatagggccagggatacaaccagccccgttagcctaatgacccaaacaaccaggggttgcaacctcttcctgtggaaggagaggacatcctggttatttcgggagggccacatattgcatgggaaagcaataacgttcagaagagatatgtgaaaaaaataaagaatgagcagtcgatctttgcccccaaaccttccaaaaaggtaaaaattgaggaacccccctttacgttcacagaggaagacgagaagaacgtgagataccctcacgtcgatctactggtcataacaatccaactcgctaataagaggatcaagggagtgttaatcgataatgggagctcgataaatatcctttataaggagactctaaagaaaatggggctcgaaaaggccaagttaaggccttgtatggtgaatctctgatgattcaccgaagatagcatcgctagccttgacataatcgagctcgcattaaccataggcgaggcacctttaactgctaatgttatgcaagacttcttggttgtcaacctgccctcggcttacaacatattgtttggtcgcccagcactgatcggactaggggcaatcagctcgatcaagcacttgtctttaaagttccaaaccccagatgg

SEQ ID NO: 351199 - DNA, 506 bp, Cannabis indica
aaattaaaaaaaaagaaaatagaaaagtctattttgctaatttcaatttgtcaaaagtccattttgacaaatttttcctctcatgacctctcttcatcttcatcttcattttcaattgagttcttcattaccatctgagtttttatatttatcttcataccactactctactctagtattttttcttcaatggtattttaatatttgacctaaaaaattcaagaaacccttataaaagaagtgaaaattccatccaacaattgtaaaagttagtaattgactttactctcaagtttaatgattgtgtatatgttattttacagttatatagcaatataaaatataaatttaggttattctaaaaaaacaaacaaaaaaaaaactggtgtgaaaataaccccagttcgaggttgaagatgaccagtgatatgtgaccatgtgcgacgaatttggtcgcctttggtcgcatatggctgtttagtgaaaaaaaaaatactatgcgacca

SEQ ID NO: 351200 - DNA, 630 bp, Cannabis indica
aaatataaaaaaaaaaaataatagaacatttgatgtagcgtgtttttactttaactctttaaatattttaaaaaatttcctatttaaagcatctaagagagtgtttgttatggagataagtgttaggatgtgagaacatttgaaatgagaaatgctaaaggtgaccagtggtgcctagcacccttctatgtgtcaatatcgctattggtccaactaaatatcgggtttcatataatttaatataatagcttttagggagtatcgctagccaatcgcaacgcgacatgtcgagaaggtgctagacactactgatgcctaatagcaatgcttgtttaaaatatatcccttgtttggtgctttttttaggtacaaatattgtgggtcccacaattatttagtaggtagagcgaataactttgtatacttgagtttcacatgtaggaatgccccacatgtaattcccttgtccacattcctatgtaacccaaaattaacaccaaacaaccctaagagaaatactaaaagtcaccgatgtctagtatcatttgaggtgttatattgctatgagtaggagggcggagggaaaggggtcatgttgaggcacatgaccccactcaacttttaataaat

SEQ ID NO: 351201 - DNA, 756 bp, Cannabis indica
tgtacacacacttgtacacatggcacgtttttagtggtccatgtaatattaatttctaaaatattatgaaatttaatttaaaagttataaaaattaaaaaaataaataaattatatataaaaaatattttattttattttatttttctctttctttttttttccctttcttcttcatctaaactacaaactattattatcaccacccataccaccacactacctactattattatcaccaccactacaaccaccataccaccaccactaaaaatcaaagatcttaattttttttaggaaaccaaaaccaaaacaacaaataagagtttcatgaggaatcacaccaaggggaagagaaggaaagagaaatgaagctcaaaacaaatttccggttgatggcgttgtatgagggagagaaccacgagatctgaaagttcttaagaagggaaacacgaaattgcaactcacttggctcaaagaggctcggatttggccagatcgaagccgagaatagcggcaaaatggtgaagggggaacacggggttggggttttcgatgcatggtaatccatttctggggtccgtgtgggctaaagaggactgattgaggtggtccgttcggtcctcatcttcggcgagctcctgatagcggtgcaaatggaggatctatgtgggctaaagaggacggaggtggtccattccatgtgggtttagaatgtgtgggtttagagaagtagaagaaggaagaagaagttgta

SEQ ID NO: 351202 - DNA, 541 bp, Cannabis indica
aattaaaaaaaaaaaaggagaatttatttttcaagggagaaataataattatttattttatagtaaatattattaaatttaatatcaaataatttggggaagtcacctttgtctagacaggatggcgccactttttctattaggacataggggtgtgcataaatcattcaatccaatgataattgaccgatccaattacaatcgaccgctaaacattggatatccaattgtgatcggatcggattagatgttatttttgaatatccaattggatcggatcggatgttgaatggggtatccaaaaatccaatacatccaacatccaatcaaactaattattattttcagttaatttggatgagtaattagattttatattgttatacgtaaaatatctatgtagttataaaaattaacattaaaattttactctgttctcttggattggagggatccaatctaatcctatacatattgaacctaaaatattagatggattcgatccgatccaaaaaatattaggtctaaaatattaaataaa

SEQ ID NO: 351203 - DNA, 906 bp, Cannabis indica
tggaaaagaaataaaaaagatgataaaatgaagcccaaagtacatgaaaatgacatttttaaaagccaaaagtctaaggaaaaaaggcccaaaatcggtccaagaaggcagcccattttctcattcaagaagacaaagagcccatgtggactcctcccatttgctccgcaggcgcgccaaggggctgtcccctctcccttcctcacgcgcgcgtggagcgcacgacccctcctgggccttttgtttgctccactcgtcaaccacgcggctggctctccttcagtccggcaccccgacaacataccataagacaaacttgctccactcttagctaatagaagcgagacacgtgtccaatgacacaacaaattcagccaacaccacctttctccacttgccacgtgtccacatgcaaccaatccgatagtgaaatgtggcagctccgaattaagttattttaattgcaaaaatacccacatgcaatttgtaataaatttaattgcgcattagtctttttacccttctataaatagaagcttaagttttttagaattcagtacagtttcaatttcagacagaaaaatctagagaaaacgctcagagcactcagtattagtttactactttcatagttaattttcttatgggtttctaagtttccttattattaaggcggacgatgaaacctagtgtatttaatgaagtatttatttttatttttattcccaatacaatatatgcttatgaatttcgcttcttaaaataatttctttcatctttaatatcacgtattttttatagttagaaattatttatgcttggttccacattttataaaaaataacattctttgattttttgtatttacattaatttttttcacatttaatgcttagaagttataat

SEQ ID NO: 351204 - DNA, 686 bp, Cannabis indica
aagaatgaatcgaacctaaatcttcatagagttgtattattagttatcttcttagaatccaaaaaatggaatccaattttttttttattttctcaaacaatatttgattgaatcaatagatttagatgtattataagttttaacttcttgctttataaatacatgtgtagcgctctattagggtttttgagtttttgagttgttctcgtgctagtcatgttttggtaatgggtttctctttggttaccaatcatatattactcttttaaattgttgattctatctcaccaatattctagccactgaaaatttattctcgtaacttttttgtttttcatatcatgattctctgttggggtcataatggtgtacacgagttggaggaaaggtgtggattatgatttatctcgtagaggagtatgtgggttgcagatggattagaatagggaaattcgattttttatgcttacatttggttaaaaaaaatttcctaaacaaataataactaatatttgtaggatataacaacttttatgatatccttaaaataccttccatttacatcacccccatttacacaatcggaccccatcgaacctcatatcggacccatcagaccactcattggaccaccatcgaaccatatctgctaccaattttttttttatgtttttatacataaaaaa

SEQ ID NO: 351205 - DNA, 654 bp, Cannabis indica
aacggagcaacttaaattgcaataaattcacatagaaactaaatcatgagaaattcaaattataaatttgaaaataaaaaacaataattagcaattttgcctctgatcttttaacaatattaattttgaccccttaaaatatacggtttgttaagaatcccttgaactattacatttacagaaatttagtccttctattagcttctatctaattattccgcttaaatgatgacatgtctttatcaattagtaattttaccctccaaattttgacaattatcaaatcgtaccccttaaaataaaaatgggaaagatttaatattttttattaaatcttaaaaatttaatttagatcttaaaaaaaatattttgaatgattaaaaagattaaaaaataaattaaaattttaaaactaattacgcgatataaaaaattatctattttttattagaaaattcatttagatattaaaaaatatattaaaattaatttgtaaaaactaaattttaaaggaacaaacttgaatatattttgtttttattcaaaaaatgtagatttgtttaagtaacataatatttttttagtttaattggaaaaaattattttttattgaatttttttatttgttaagtatatgagtttataaatataaat

SEQ ID NO: 351206 - DNA, 690 bp, Cannabis indica
tttttaatcattttttatttaaattaaaattactaactttttaaaaaaatttaataccactttattatattttaaattatatattacattctttaatttttttttcaatcatttattaatttttaatcatttattaattaaattaaaattactaacttattaaaactaataatatcattttattatatttaaaattatatattacatttcataattaaatattttcctaattatttattatttaaattgaaaatatttttttttaaaaaaaaaaagtattattttactaactttttaattacatattttcaatttcaatttcaattttatttcatttaaacattcaattaattttacattttctctactaaaatttcggcagcataacggcttaaaaagtgtaaacccaaaatttttaatacctataaataacacaaacaaatatttccagacaatatatacacaaacaaataatccacccatccaacagcagtcaattttatcacagaacctacttctctaacatgcatagacatattaactaataacaaacactactacgtactaagcgaaagcaaaaaaacatacctgaatcgagtgcaaaaatgacaactgcaggcagctagcggtaatccggagcggtcgaacacgaacctaattccataaaaaagtaaaaccaaattaaaaatt

SEQ ID NO: 351207 - DNA, 501 bp, Cannabis indica
tactttaactaatgctctggaaagaacatagaatttctccaaatgcaagtaaactttgttgtagattatcatatcagttaatccctgtgtctgataaatctaggaaactttattcacatagtcatgtttactttccaatgtgttgacagcacaataaacaagatcaagtatgtgaaaatggtttctgatgaataagtaaatctgattatattgaaatgagttttattttggggcataaaacccaacaaatcaccacaagccccaagaaactcacctgaggtaactaaaattcacatttcttaaacttggcatacaacttatgctccctgagacgttgtaataccattcaaagatgtctttcgtgagtctcttctgagtctgaataaattagaatgtcatcaataaagacaataacaaaatcatccagaaaatctttgaacactcgattcatcaggtccataaatgctgccggggcatttgttaatccgaaggacattacca

SEQ ID NO: 351208 - DNA, 508 bp, Cannabis indica
cgagcgtaggtacaggctcataattaggtgatgcaattttttggcgacgtgttgggcgtaagtatgaccgtcaatgatatatgataagtactgggcgtaagtacggtctcatatgattagacgatgtgatatattggtgcctgattgtggcacgggctcacctgattaggtgatgcaattatatgatatatgggtgcaagcttttggcacaagctcacctcattaggtgatgcagttatgcgacatataggtgccttgctatggcacgagcttacctgattaggcaatgcaatacaagattatcctatttaagcaccaacttgcctgataaggcaacgtgatgttatgaagatggttactttacgaggtaacatatatatataatttatttgattaagtgaatataaattctatagattatcctcttgtcaacttgacttttcaaccaaactaaatctagtttttattctttgagaactagtagatgagatgttggaaattattttac

SEQ ID NO: 351209 - DNA, 525 bp, Cannabis indica
tatttttgttaatttttttatttttttatgtttttgtaaaataattacttttatttaattactaaaaccatatcatcaatctaaaacttggtaaatatgtaggtttaaatataaatatcacaataaaaatttatataatattccattatcaatcgtcatgtaaaaataataaaactgtaactcactcatatactaaaaagagaattgctaaaaaatattattggtgcttagcacttttctcagtgtcattccactattagtgtaattatataacttaagaaaataactttcaacaaatatcgctaaccaatagtaaacaccacttatatagaaaaccactaatattcaatagcgatacgcaattacatatatttatatatataataccagtaagcagtaagtaaagacaatcactattatcataatttatatatatctttatatattaaaagtgcttatctaacggcaattcttggtttaacggcaattcttggttaataggtttgatctcccgttaacaaataa

SEQ ID NO: 351210 - DNA, 638 bp, Cannabis indica
atatatattagatagatatattgatattttttttttttcaaattaaaaccatgatagaacttttattgttattggcctcttaaagttgatattcttaggtgttgtaaaatattctaacatacaaatatacctagttagttatatttagaaaaatgataaaaagtattagtagcatttaatacaatcgaaggaaatttatcgctattgatacaattaaaagtattagagaagtaccaatataccaatataccaagaaaaatgttaaaatattcttacatataccaatatacctagttagttatatttagagaagtactaaaaggtattagtggtgtctaatattatccaaggagtcatatggctatatatacaattaagtataattttttggatgatattagagaaatattaaaattattaatcgttgttagtacgggtattattaattgttcaattaagtatcaggtctcctataatatattataataatttttatgtattatatctgatcattctgaatactaaccaataattaagtgccatatatagaataatgagcatcttaccaaacagcaatgctctatctagaaagatagtattttatatatatgtctaaaaattatatataaagaagaaat

SEQ ID NO: 351211 - DNA, 589 bp, Cannabis indica
ttttcccttaagaatttatttctcatggaaattagttctcactcgaaatccattcatcaaataaaacattcccatgtatagtgttgtatagaggtgacttggggaccatggacctatattttaaagctccaataaactcaagattactatcaatctcatcaatagaattatctagtttattaattctattattactccactttaaatatggaattgcactctttgataatatagaattatatttacagaattcttacttgtagtctattgatataatcaatatacgtacctcaccctcaaattattagttcataattagaattagtcaaaataccattttatccttctaattatgtaatgactgcattttagaatatggattagtagagacaattgtccttgattattgatatttttagaattatgcatatatttattatgttgtggatcccattattagaaatgggcattagagttataatttctcaatttcagagattttattaaactctagaagtattatttgtgttatatatgaattatgtaaaatttatggtttttgctcggcgatgacggaaaatgcgatgga

SEQ ID NO: 351212 - DNA, 847 bp, Cannabis indica
gcacgctaaacatgtaaatacatatgcacactgttatactaatcttacctggatttcgaattcaggtgtaccggtcaacctgagtggaacaatctgctcggcgaattacaggctcctaaatcacatcaatcacaacactgataagcaatacgctaaatcactccccggggacttaaacttgaaactaaaagtttttctatcgataaataacatggcaataccctaaataacacaaaaatgagaaaaactaggattcccaaatttgccccaaccggaattctggttcagggaagaaatcctggaagccaaccggaattccggttcgtacagacctctctgaaccagaattccggttcagtgcaggaaacaccaaaaaactcatatctcaaccaaatcaaccccaaaccaattcaaactttccagacctgctaattagaccccaatgaacatttctaaagcaacaaaacaaagcttcatgcacaaatacaaaaaccaccattaatgagccaagcttgagttcaaaaactccaagcttgctcatccaactaattagcccataaaacctgcttaaatcactttaaataaacaaaatataactacagaaaatatcatttaatcacagcagcaagaacaacaagctaaacaatatttcaccattaaaactaaagtttgagtttaaaactccaaacttgaataaaataaactaacaaccaccacaacctgttataatccattcatctgaacataattaagcctaagaaaacaacaataaacacatatagtagctgcagcaagtaaaacttcaaagcatgcaaaaatttctttttcttccaactcaagaaatcaa

SEQ ID NO: 351213 - DNA, 677 bp, Cannabis indica
cccgaaattatggactttaattaggatccacatacataaataaatgtagttattatttaaaaatttcacagctgtaatttataccgttttgaaggaagtcaacgttgacgtggattaggacacgctgccagaggtacctcgctgaggtgtctcacctagtacatgaacaacttggtttattcataagccttccaacaatggcatgagcatcagtgtactgagcaaatttaagaacggttctttgaccataaggccttgcagactagacaatcatgtccttcaagttacttcacttagttgttataatgtatattatacgctaagtgttctaatagttaattcgcctcgtcaacacctctttacatattgcgaggtagatgcctcactatgcattgtctatgtctttcttgagattatgtcctttgatgcgaaatggtttctcatcaatacgtgaatcaatagtttgtacatccttgtctcactaaagactgtgcaatccgcgagttataaatatacatactctattaattctgcatttaatgagttattccatttaatatttaatgatatagttatcaatatatttgttgattcatattccctgagactgacacgtgtcaccttctgaaacacagccgaatttcgggtataacaattgcctcttaaaaagtcatttt

SEQ ID NO: 351214 - DNA, 590 bp, Cannabis indica
tggctacgtgccaccttcaaacccgtagataaagcctaacaacgaccctataagggcagtgcagcaagtgactcggcccccgtggacatcgaaccaatgaggattgtatcattagcagatccagatgcggagtcaggaggaggtggccgagatgaggcaggcgatccaatagtaagggtgtgaatatcaatggccaggcgagggttagttttcctaaccttaccaggaggagccatgggagaggcgttagaaggcgaaccctctttctcctggtatgtcgtttgttgcaacaggctggccatatctgcaaaacacacaaaaatgatctgtaacgtataataacatgcaaactaatgaagaaatgcaataagaaagacaaatagcgatcatcaccaagagagtcgcactccctgattggtctatttttagaagactcgggcatagtgcttttcgctatggctgtctgtgccagcgtcggaggtcccaagggtctcgggatttcccgcactccgctaaaaggggtaacaacaaagttgaacccaaaatcatctaacgcccgaggggatgttagaatgtttagatccttctta

SEQ ID NO: 351215 - DNA, 396 bp, Cannabis indica
aaacccattacaatctgattagttatcaatttaagaaatttgaagtgatttatgtttggatgaattttacatgcttatggtttaatatgtttatgggttttactccttggaatatgttctttgagattaatatgagtgttctggaaagtttggtggtgattagggaagatttgagttggttttggaggcttaaagtttgtgaattttcgtgttgaatatgcccaaacaaccggaattccgattggttggactatattggggaaggctgattttcgtattttggccataatttttcactcgggtgtttgttttagacgttctatatgttggaaattattttaccaggatcttagatctactcacaagtatgttgaataacaccctaaatatgaactt

SEQ ID NO: 351216 - DNA, 529 bp, Cannabis indica
gtacttgatgccttgctattcacattaaccgacatatagtttcttgctaatatactaggcaacagtttgtgtattttttccttgcctaaaactttacagccagcaggttacaaatatactctgatgcttatgtaattaatgagttattccgtaaaaagtggttgcatcgatccatattcccttttatcttaacacgtgttttccactaagatggcagctgaatcttgggtataacaattgccccttaaaaaattctttttcagtaaaaagtgctttttaataattacagagggcatttttgttataatccccttttttgaaagacgcatcctttgattctgacagttgtatggtttcgagggtaattatgaatcgcctcttcatattctgccctattcccaaccgttagatctcccaatctttggctttcttgtcactggactttgtgtataaaagggcggctcaagttttccatatttcacaaacttttggttttttggtgagatccatcttgagaatggattgtctc

SEQ ID NO: 351217 - DNA, 643 bp, Cannabis indica
tatttaagctaatatctatgtgacaatttcttttttaaaatgctattgtgatattattttatataatataatatttagattaaataatatagtaataaataatttagtgtgacaacatacaaatatatgaagttgtatatgtgtgagttcaaagctcttaccctttatattgatataattataaaatttgtaactcatatctataattatcactcttaatttatattagaaatataattgttgggaacttatttctatcatttataaggtgcaaaaatgatataaaggcaatgaagaaattttaaactgtttggagttattttgcaaaatgtttaataaattaataattggttactggttaccatgtgttttgaggttttacactattggtgacttgtttcttggagacggacaacatgttgcatgaccaattttcaacatacatttttaacgttttatggacgttgtgcactacaaaaaataactacttttaatgataattttttagtcacaatataaatttttgtgactaaatatgtgactacatatgataattagtcacaaaaaaaaattacttgtgactaaaacacaatatttagctataagttgtcactaatttagttttagtcacaacaagtattgt

SEQ ID NO: 351218 - DNA, 588 bp, Cannabis indica
tctggatcactgtcacacgtctcagtgtggttctggtttaggtcccaggtcccatttctttgtttgggattgggaacgagacttgcgtacggctctaggtcctgaacatggttctgtgttcctagtctggttccatgtttgggtctgagttcatgttcgggatcgggtctcgagtccaggtttgggtcgggatccttgtccggctcccaatttaggtctaggttgttttgtaatctgggtcctggtctggttacggttctggatctacgtccaatttcagttatgattccatgtccaagtcctagttccagtcctggtcaatttcctgttttggttccaattatgggtcacaatgtacgggtttgggtccacttttgggtttgggacctggttcaggtccaggtgtgggttcgagtccttgtcagggttcgggtctaggactgggtcccaaatccagacaccgactacaggttttgtccaagccctttgtctagatcttgatccaaatctcaggtccctgtatggttccatttcttgtgccgggtgacgagctggatcctaggttcaagttcgggtcttggtcgagta

SEQ ID NO: 351219 - DNA, 537 bp, Cannabis indica
attttttttaatatatatatttttttatgatggtgtgatatgtaagtttaaaattaaaatgttcaaattctaccacaaagattcaaaatggtagagcaagtagattctcgtccttccatatgcatgcacctccacttctagccccactaaataaatttgtttgttggctgaagaccaaagactttactacttactatgtatgcctcattttcttatgattgtgataagttggacaatgattttacctaaagcatgaacccattaatacgggattcctttactccactaacaatattcaatatatcaagaaaaatacgagtaaagcaatgaaagaaatgatatattgtaagagagatggaaataattaattcaaaattaaaatataatttatttagtaaaagaaagttttaatggtatgtgtgcatattatatatttatatacttaatataatatttatttttagaaaaatatattatatgttaattttagaaaaagacaaaacataaaacttttagatttctttttcttctttccaa

SEQ ID NO: 351220 - DNA, 1530 bp, Cannabis indica
gaagaagaagaatggaaaatggagggtatgtatcgactttactgatctcaacaaggcatgtccgaaggattcgtttccacttcctcacattgacatgatggtagacgcaacagctggacatgaattgttgagtttcatggatgccttctctggttataaccaaatcttaatgcatcccaatgatcaagaaaagacatcattcataactgagcgagggactttttgctacaaagtcatgccgttcggactaaagaatgcaggtgccacgtaccaaaggctggtcaatcgaatgtttgccgatatgcttggaaagacgatggaagtttacattgacgacatgcttgtcaaatctttagcagcagagaatcacctcgatcacctcaagcaagcattccaggtattagaaaaatacaatatgaaacttaatcctactaaatgctcttttggtgtctcttcaggaaaattcttaggttacctcgtcacaaaaagagggatcgaagcaaatccagaccagataagatcaatccaaaatatacaatctccaaagtcaatcaaagacattcaacgtctcaacggaaggatagcagcgctcagccgtttcatttcaaaatcatccgaccgttgccacttattcttttcaactctcagaaagaccaaagactttgtgtggacggaggaatgcgaagaagcgctaagacaactcaagagctatctcacctcccctccactcctagcaaagccaaaggatggagaaacattgtacatgtatttggcagtttcagaagcagcggtcagcgctgcactagttcgagaagatgaaggaaagcaacaaccgatttactatgtttcgaagacattgctagatgctgaaacaagatacactcagctggaaaaattggccttagcgcttgtcacagcagggcgcaagctcaggccctatttccagtgtcatcctatagtggtgctaacccaatacccactccgtagcattctacacaaaccggaactttctggacgcatgaccaaatgggatgttgagctcagtgaatacgacataacatatcaaccgaggacagccatcaagtcacaggtattggcagattttattgctgacttttcttgtgttggacaggtacaagtagaaaaggaattattatgcttaaacgagcaaacaaactcgacatggatgctagcagtagatggatcaagcaatagcaaggggagtggcctaggaatcgtccttacctcccctcaaggagatgttatccaacgtgcaatcagatgtgactttaaacttaccaacaatgaggctgaatatgaggcattgatcgctgggctagatctatcaattgagttgaatgccaaaaccattgaagtcgtggcagattctcaacttatcgtaaaccaactcaacgggtcataccaggccaaagattcaaaaatggcatcctaactccagagttttcaagacaagatttcaagattcacaaaattcaccattaaccaagtgccgagactagagaacaacca

SEQ ID NO: 351221 - DNA, 522 bp, Cannabis indica
atcaaggaatggcttgacactcaattcgaaatgaaggatttgggtgaagcttcttatgttcttcggtttaagattatcaaaaactgaaagaacgaatcccttggtctctctcaaatagcctacattgataaggttttaaagagattctcaatgaaaaacaccaaaggggcgcaaataccttctagatttggtatctgtctatctaaggaacagcgtcccactaatcctcaagagatagaggacatgagaagggttccttatgcttcagcacttggaagtctaatgtatgcaatgttatgcactagatctgacatttgctatgcagtaggaactgtgagcaggtataagacaaatccaggagaggaacattgaaatgcaattaaccatattctgaagtacttgaaaagtacgaggaaatttgtgttagtctataagggtggtgctttgaatcccataggctataccgattcagattttcaggcttctcttgatgacagaaaatctacatctgggatggtgttt

SEQ ID NO: 351222 - DNA, 872 bp, Cannabis indica
gtgaaggagcaacaaagcttttaactcttacctcaactttggatccaaaagatgcttttaaatcttacagtattgatgatatatgttgtcttgcaaagaatattatcctcttgattttttttttgagaatgagaaaattaatataaggtttcaattgaagcattttgaacttgatgtgcttactagttcaaagtttcaaaatttgtcattgatcgcagaattatgttgaagattaatagagacagagaaatcaaagatatactaacttattgataaactaatttaccttgttttaactatttcagtatctacagcggttagtgaacgagcattttcaaccatggagattactaaaacaaggcttcaacataaaattgaaaatgattttctagcaaacaatttaattatctattaaaatagagatagctaatacttttgatttaaattcaatacttgatgattttgtttatttaaaagaatgtaagttacagttttagacaatgtattattttgtatagtctatatttatacgtgtttttatattttcttttgtaaatgttttttttttcttaaaattaaactcttattaacaacaatcagaattcttttgtatatattatattattttatatgcgttggataaagttatttaactttttatattaatttatataatactatactaaaaaaattaagtaaaaatatattttatttgcccctttttattctgtcgtttggttctgccactgttctcatcatttttaaacttttatccatcttactctctttgctttttactaaactataaactattttttagggattaattacataagacactactttttgtaaaaaaaaaatatatttttgtg

SEQ ID NO: 351223 - DNA, 571 bp, Cannabis indica
cctatatatcatttatctctattaaaccaagattgaagtaaatcatcgtttcatttctaaatacttatagactatagaatcaatatccatgattagcggtcccactaccattgaactaccacatccttaatctgtatgtcacttgaagatccaattggtcgactttaactaataaattgaagaacataaataatacaattaagatcgaatctaaccatctcaagattaagatctatagacctaagatcaaccagtgatattgacttagaaagatataacaataagtttatgagatcttatacaagttcaatatcggtctaatccaatgtatactccatacatccaatactggcatactttgccaatgatctggaaatgacataacacttatccaaggtgtaagtataccttatcgctgattatcatatcagtctaaatccagtgtactggcatatgatggaacttaaactttggaacatataatcatgattatattccactgtgttggcaacactataataatgaataactatatgttctagacttaatagaatttattcattaaacatat

SEQ ID NO: 351224 - DNA, 600 bp, Cannabis indica
gttccataacaaaataaataaacacaaataataacacacaataactcaaatataatataaaaaattcgttatatttatcaattagttaaaaattttagacaaaaaactagttccgtaaaacaactaaaataaaaactcacacacaaaaatcagttaaataaaataattcaaacaaaaatatccattcaatatgctccaacctaccaaataattacactcatattatatctacccagaaatattcattcactatgatatataaccgattctattttagttataactggtttgagttatttcatgttatttatttttattcattgtaacattgttatagaaccggttctatattaattataactagtttgagttattttgtgttatttgtttttattcattatgttacagaaccggttatatttcaattataaccggttatagttattttatattatttggttttttattcattatgttatagaaccgattctgtttttatttatatctaagacatctactttgttggattttgtgccctaaataaaacccattcaatataatcagatttactaattaataaagatcagaaatcacatttta

SEQ ID NO: 351225 - DNA, 554 bp, Cannabis indica
ctctcgcactgaactaacttggcttgatcgccctagttcgattccacaggtcttcagtatatcacctgtgtagcctgagatagatcgcaccttcgattttattaactcagcttcaaaggtaactttgggatcctggggagtctttgatgtatgtggcttgggaggcattatttcaaagtccaagtcacctggttaaaaagcaatcgtgactttgggtaaaaacaacggctttgccaaaggaataaaggacacgctgcgaggttctagttaggccgcatctcgcaagaatcgacgtttaccttcggagatttcttgcaagaaacgcctgttgggctttgtgccctaaataaaattctatttcaatgtaatctttatcattcaattatcaataaagagacagaagtattttcatcacttatttagtgtgtcatttggttcatgttatcatttatatgtttatttgatttataaattcatccaaatccttatcacattgatattcttgtttattgtgtcgtcaacacagtggaaagtaatcaagattatgtgattaa

SEQ ID NO: 351226 - DNA, 816 bp, Cannabis indica
agcttgcataagaagacctttgtacaagatactctctagtatcgaggaagttcctgaggctgggaatgaagtctcggctgcaggaaatgggatctcctgatgtggagaatgaggcctatgcagaggtcgagaccttttacgtgtagacggtctttctccaatctgtgtagacggtctttctcgagctatgtgtagacggtctttctctgagctatatgtagacggtctttctcgagtttatcaaccccctttgtattctttgtttaggaagatgacttaatggttttctcctagtggaattttggtacagacaagtttgtaaacccagatggaagtaagtcgagaaggagaaaattgaagagacggagaagaaagagaagaaagaaagaaaaaaaatattttatttatttatttttcattttaaattatttaataattttaataataatatacaattggaaatcgacatgtggtattcttggaggacttaacagatctgttaaaataagtactaacggaaataatagaaattgaggatttgagtacttttgccgccatttttagattttgggtatttaatagcaacaaattgaacaaaataatttatgcaccaaatttcccttatatctatttaacttttacaacaacatgatgaagttgtcttgtaccttttgaatgtatacatcattgaactgataatgagaaaatataatagtgacttttgaagagtgtataagttttggagaattatatagttattttatttttgtatataaaaatagaacttgtaataattacttatatgttgtagtgatt

SEQ ID NO: 351227 - DNA, 1313 bp, Cannabis indica
aaacacaactacgccatggacgagttcagtcgggggcatgctgaggtggaggccttaaaaaaggttctgcgggaggagcagcagaacactttgcacgaggacgccttccggaatccttgggacctgaacatggaccctttgacggattggttcaaccgctttgtcgggcctaccctagctcccttcgcctcggagatgaccagccagtttgtctcccacctgactcaattcccagccaagagatacgcgacttgtgcctccatgaactccgtataccaggtgcaagacatcagctctgctctggtcgcggtgagtacttgtaatttattcccttctcttatattttgtctaaggcatctgatttcattcttgtttcttttttcagattgctgccgagaccggccgcctttccaagaccgtgatcgatcatgggttcatcatgtccgaatttgggggcatagacgaggccatgaggatcctgcgggacttgtctgccgaaaggagggcgttccaggaggaggctcgacaaagggaagcccttgcggaggccaagtaccgggaggaggcctagcaaagggaggctgaggcggaggcgaggcaccgggaggagctaaaggcagagggcgagactgcagctagggccaagcccgagcttcgggaagccagggaggcaatggacgagatggctgccaagttaaaatccttgaaggagttgcatcaggtagacttgcagtcgacggccaacctaactgtggaggtgaaggagctaagagactttagagatcaggccttgaaaaaggccaaaagagatgagctcctgaccccagtcgtctgcaagcattgcgtcaagcgctttgatgacggcatctatatggcctggcagtcgaatggccagagcattaagctagacttttatcccaaacttgaggaagctatcgctaagtttcgggagaagaggaaaaggcttgatgctttgctcgaggaacgccggggccctcgtcttcctcctcgtattgaataggccgagcagtccaaccaatttcaccattacaaccatatatattttttttcttttacattttcagtctcttttctttccttttagacagtttaaattattgtcttctaaggggagacagttattatggcccgtcctcaggcctataatatttttttggacttgctgttaggtcaacatatttaaatatatactttcactttgatatgtattctgcttgattttgtttttactttttggcctattttacatttgtccgtgtggtatgcctcagtacccccctgagtggcatgaa

SEQ ID NO: 351228 - DNA, 973 bp, Cannabis indica
tcggccactacattggccttcccagggtgataaaggatctcacaatcgtaatcttttactaactccaaccatcgcctctgtctcatattaaaatctttctgagtaaagaagtatttgagacttttatggtcggtataaatttcacacttctctccataaagataatgcctccaaattttcaaagcaaacactaccacggcaaattgtagatcatgtgttggatatcgctgctcataatccttcaactgacgggaagcataagtgataacctgatcggcttgcattagcacgcatcgtagaccctatccggatgcatcacaaaaaactacgaacttttctttgtcagaaggcaaagctagcactagagctgttatcaacctctatttcaactcctgaaaactagcctcacatttgtctgaccatataaaacgttgattctttttggtgagctcggttaacggtgttgagattttagaaaaccattcaacaaaccgacgataataaccagctagacccaagaagcttctgacttctgtcactgtttttggtcttggccaatctctgacggattctatctttcctagatccaccttgatcccatccttgctaacaatatgccctagaaaggacacctgagataaccagaatttacatttcttgaatttggcataaagcttgtgttctcgaagccgttgtagaaccattcggagatgtagctcatgctcctcttctgattgagagtacacaaggatgtcatcgataaacacaatcacacaaatatcgaggaaatccttgaataccctattcatcaagtccatgaatgccgcaggagcattggttagtccaaatgacataaccagaaattcataatgtccatacctagtacggaaagccgtctttggaatctcctcctctcagattctcaactgatgatagcccgatcggagatcaatctttgaaaaagaccgtcttc

SEQ ID NO: 351229 - DNA, 718 bp, Cannabis indica
actcattattctcctcaaattcaagaccaagtttctgcacaattattggttcctcaatcccatgaatttctcctctcccacgattgacgccatgaccacccgaataatgaacctggacatcgttctctgcaagtccgactgctgcaccaccgtccctcatggctgacgacgactgctcctccccgtgtttctccttacgtcccgatcgtagccattgtcctccgatcagtttgttctggcgttgagtcatggctcgcatgaagacaccatacggcttgacaatcttctcctcgatgtctcaaatagctttggacaaagtttatcagcatggccaattaacccccagatgaagcaaaatgtaggggcatgctcatatttaaagttaacccaaaaccaatccgaactattaaattgacgaatcttcattcggcgcttgagaggttgatcaagattaattaacacgaactttaaagtattctctccacacaccgaagaaattattctcatcggactccacaaactttccgatataatcgccaagcttctgtaacgtcctttccgttcgaaatccatgttgaagatcatggatttgaacccataggtcaagtcggttgagaatgatagttctcagattatcacccaccttgagtctttcaaatattaattgcttcctttcaaatgtccatggactcccaccaatgactcttttgatatccaa

SEQ ID NO: 351230 - DNA, 433 bp, Cannabis indica
ggaaaaaatattggattggatcggatgtccacccctaagcaaatataccaatgagtatacctcatgttttcttgtctctactagtctcttagaaagatcagcaattcctttcaattctgaaaatgcaacatgagaacgcatatcttcaacataagtttgaagttgacactctaacatctttaaatctgttgtagaaaaatcatgtggataaagttgagcaagacgaattaactttcccttgtcaaaagcagaaaatgaattattggggacaaacatgccaaacaaagcaacaactcagtgttagcctcattgaaacgactatttaactcttgtagttgtaaatctatcacagtattgaaataatcaatacgaaagaagtgaaaatttgtaagctttggagccttgcgtcgtgattttccttgagcacaataca

SEQ ID NO: 351231 - DNA, 522 bp, Cannabis indica
attttgcctctcttccttctaaaacacgagccccgcccttaaatagaaattagggttgctacctttgaaaaagtcaaaaactgcccaaaaatctcgtttttcgcccctagtcgcgactacataaagtctagtcgcgaccataggcaaaatacgaaaaatatgctcgctgcgtggctcctagtcgcgaccatgaaaaagggtcgcgaccatggaaagtggtggtcgcgactactggagcaaaatttgacagcttcagcatctttcagtaaaatgtgcataactttcacatacaaactccaaatgagttgattcaagatgcgttggaaagaagaaaaagaaatctaaaacttttatgttttgactttttccaaaatctgattagaacatagtcaaatttaagcttgaagtttcagctttattttcttgcagaattttctctattttatagattgttgttttccgaaatttgatcaatttatacattccaagtgtgaaacctgaaaccaaagaaaacaagcgtaa

SEQ ID NO: 351232 - DNA, 561 bp, Cannabis indica
tagttattttattgcttggaatatatcttttggtgtataatatgcaggtctgaaaggtttggtaaggattggaattgattcgattatgttttggaatttttggagtattctggtgtaaaccattaaccggatttgctactgggttccccaaaaatttcgtgttgtcgattcgtgttagtttcagagctttagttggttaattcccttttagtttagggtatttccatgttaacttgcagtaggtaggtttttggcttaaaacataagtccccggttgtgatttagcgtgtcacttatccatgttatgatcgatgtgatttaggggcctgtaattcgcccagcagttgttccactcaggttggccggcacacctgaattcggaaacaaggtaagattagtataatgtcatgcatatgtatttacatgtttcgcatacatgttgtttatgcctgttagaatacattgatagcagtaatagtatacatagagttgtattgattactgataatgttaggttatttttaatattaattttagattaagtttattatatttttaatt

SEQ ID NO: 351233 - DNA, 932 bp, Cannabis indica
tgcagatatgttacttgaagtctattcaaaacatctcttcgaccacgtgcaaggaatgatggccatgtgtcactcgtacatgctgccatgtcacagtgtaaaaaatggaaaaacatttgcccccaagtctgcgcgggacttccaaagtcgcgcgtggacttcactcggcttggatatttatttgaacgggtgacacgtgtttgatgcgtctgttggtgatccaacgtgattctgaccaagagtctctttcatattcgactcattaatgctgattgatcggtacctcaaattactctaaaaatttgcacgctttgacggttgctcttcaagtacttgaatgcctaatgtttacttttagggggaaaccgaagcatttaaattttgaaatggttgcacttcctcattaatttgcttataaatagggcagagatccctaataaaccacttttagcatttttccttcttgacaatttcagagcaagaacattttttcctctcaaattcttcgaagaatttccaggaagtgcctatctgtgtcattcgaacagctctaaagcttcaaacagtgagtaagttcttcatctgtttcctcttttatgtttgaatatttaattttttggctttctacggtagaaaattcggtagttcttgaacttgttctaggaaaaccgtagaaatctaggtttaggaatatgatattttgattatgcttatccatgtggcttgactgtgattgcattctgattttgattccacgatattcggtttcacttgcccattcggggtttagtgaaaattaacccttaatctgaagttttgaaattctggattataaacctaatatcatgcaaaattcccttttttaatcctttgatcagacctagttggtatattcaatttgtttttgttcgatatcccggccaaatactcat

SEQ ID NO: 351234 - DNA, 733 bp, Cannabis indica
gtaaaataaatttccaacacttaaaaggtttggcatgcaagattgtagaccaggtgatacccctgttgttaagggagacaaattcagtcttagtcattgccctaaaagcagccttcatattcaggaaatgaaaaagattccctatgcatcagctgttgggagtctaatgtatcctcaggtatgtacgcgtccagatattgcgtacattgttggcatgttaggtaaatatttaagcaaccctagtatggaccattagatagcagctaagagggttataaggtatcttcagaaaacaaaagattacatgctcacatataggatgtcagatcatttagaggtcgtagggtattctaattttgatttcacaggatgccaagatagtcgaaggtctgcatcaggctacatttttctgttagttggaggagcataaaatcagggaatatgacagagaaactttgtcattaggcagcgtattttggagaatgtagaaagaccactcaagatattttgtgacaataaattagttgtgatgtattctaataacaataggagctcatccaagtcaaaacatattgacataaagtcctagttgtgaaagaaagagtgtagagtggacagatatccatagagcacattgggacaaactccatgatagtggatctactcacaaaaggattaccagccaaggtctttcatgagcacactgctcttatgggtgtagtattacttgagg

SEQ ID NO: 351235 - DNA, 647 bp, Cannabis indica
cttttacaaaaatgagttttagtaacagtgttattaatgtgggtgactgaaaagatatatagtatttagtaacacttcagggtgagtcactaaactcttataaagtcgctcatcgcgtgtcactataggtttttcgagtcaaactttatcagattataaagtattagatactcttacagagtgttactgtatttttttaaaaaataaatatgattttttattcaaattatatattataaaatttattataataatttaattaataatattttgataaaaatatacttaatgatataatttaattaattaattattaattatgaattaatgcaaaccattacatcaaaataccacaaaatatatacaaattatgaaacaatatcactaaaacttaatcaaaatttataactcttttgaacagtaaaacaaatttcataacagtaaaataaatgggcataaacataaatttaaaacaaaactaaaattcttaaatctttaaacaataaaatacaaaaaattttatatgcctaatatcaaatcccataaaaacccaagcggcggtgaccttcgtttggctcgtcagcgatgctggacgtccgtcgttgggaagaagatcggagctcgggccacatgaggaaaccagaggg

SEQ ID NO: 351236 - DNA, 922 bp, Cannabis indica
agaagccaagtctatttacaacacttaaggtccggaaaaacaaattgaccaaacccgattacatacctcaagttgaaaaagaccaaagtcaacctcaaagttccaacacaaatgacttgtcaaaagataatgatcaaattcttccttccattccaaaagctccttttccaaaaagattacttccactcaaaaaaggcaaccaatatagtgacatcttagaagtgttcaaacaagtaagtatcaacatcccattcttagatgccattaaacaaattcctgcctactccaaattcttgaaagacctttgcactgttaaaagaaacactaatgttccaaaaaaggcatttttaactgaacaagttagctccataattcaatataaaagccttgtgaaatataaagatcctggttgtccaacaatttcatgcatcattggtgatcattttattaacaaagctttacttgatttaggagctagtgtgaatttattgccttattctgtttataagcaacttggtctaggagaattaaaaccaacttctataacacttcaattagctgatcgttctgtgaaaattcctagaggtattatagaagatgttttaattaaagtggataagttctattttcctgttgatttcattgttcttgatactcaacctgttgaaaatgctcatgctcaaatacccatcattttaggtagaccatttttagctacatctaatgcaattatcaactgtcgtaatggtgtattgaaattatcttttggaaacatgactgttgaattgaatgtttttaatgttgctaaatctgttgagtgtgaggaaatacatgaagtaaacatgattaacacggaaaatatgtttgaaatggacatgaatgaatcttttgaaacttatgcaaaaatgtttggaatgtgctt

SEQ ID NO: 351237 - DNA, 682 bp, Cannabis indica
acaaaacacagcactatactaggttctttgcttgtttgttatccacttacacgtaggactagcctatacttatatcttaggagttcggtagtgcaattgagtgggagcattaatcatatatatggaatctacaaattctataattatttaaaagtgaaacaatggtttcgttatagcttggcttaatgacataaacggaagtatccttctttaggtaagtatattagtttaccgaaatattatttataagtagctaagtattttaaagataaaatacattgaaaggtgaaatggtaaatttatccctacactatgtaaatgatctataaagaatcattgattgtttagattgaaataacttcaatgtattttttcttaaaacacttaacttcctataaatgatattttagtaaactaatataattactaaaaaaagagctcttccatttatctctattaagtcaagctcaaagaaaattatcattcaattctatatagttatagaagttatagattttgtatctatgattagagctcccactcaattcactactacaaaaaaggctattcccaacagtttagaagagggtcaattataggaaccgttggaaaaagtaagtggaagtttttcccatcagtttagcactgtagcaaaaaaaaaactgttgggatagttattgcc

SEQ ID NO: 351238 - DNA, 591 bp, Cannabis indica
ttctttttttttttaaattatatatatatttatatatatacaactattagcttactcatcaaatacttgttagaatactaaatttttgatttttcataatatcaagtttttataatttctgaatatctgttagtagagtttttaaaatattttaagataaatctttgattttatcttatattttgctacgtgttgagctaattggtatattactgctcagtcattatatatacgtgttatatgattgaaagttattctctctttaaaagttagtatcagtatgctattctaacatgatcaaacttatcaaataaactgttttaagaaatggaactttgcttcttcaaactctcaggttttgtttactgagtcattatataaacttgatttgatgtatacttaagtcatgttttcatgtatatatgattttatttggtgaaatttattattatgtatttaagttttatgctttgataggtattatatgtgtatatttttggtttgtgattgaatctttgtgaatcttttcttatttatatactcttgtagttgcatgtgagtctgaacatctctctctctctctcttatttt

SEQ ID NO: 351239 - DNA, 796 bp, Cannabis indica
aaaagaggcgtcaccaagatctttcatatcaaatttcttagatagaaatctcttggttttgtgcaataagcctatatcattagtggcaagcaatatgccatcgacatataaaaccataaatatatatttactcctactgtacttgtgatatacacaatcatcaataatatttatctcaaaaccaaatgagataattacttgatgaaacttatgataccattgacgagaagattgttggaaatattttaccaggatcttagatttactaagaagtatgttgtttaacatcctaaatatgaacttctaaaacgattataaataaacacatataaagtatgagaaaccttacagtggttgcagcggaatatagtgtctccttccattcagatctctaacccttgaatcatttctttcgaagagtatcaccaagatctgagcctgaatgtccttctgttgaatctggattcttcatgatcttccacactatgattgaggtaccacttgatgtgtctgggcactttttatcactcaaggggttcagttaaatagtgaagaagagagattggaggtggcggctaggttaggtagaaggcagtcaggtttttctctgaaggaaataagatgcatcatctttttctgaagccatcactacctatttatagtatgccacctaacgttaggttagaattatttggcattaaaataatgaaaaaataaatgataaaaacctagaatagtggccggcctgggctttggatattgggccccacttttgtaattttgctgttttatcatt

SEQ ID NO: 351240 - DNA, 750 bp, Cannabis indica
atgttattttaaaatatctaattagatcggatcggatgttaaataaagtgtccaaaaatcaaatacatctaacatctaatcgaactaattagtattttcatttagttggatgagtaattagattttatattgttatatatatgtatatttaaaaattaacattaaaattttactcatgttttcttggattggatggatccaatccaatccaatataatggacctaaatattggatggatgtgatccgatccaaaaatttaattacattaacaggtcaatatcgtgctagtcgagtcaacccgaacacgacccgtttattaaataggttagaagagtcaacccgaacacgacatgaacccatttaagttaaacccaaacccgctaattctcgtgcaggtttcgagtcatgttatcgtgtctgacctgttttgtcagccctactaccaaataaggctttgatcaagactcttgttttcaaggtagttgtaaacaagagcttacctttgatggggttacaatgttgcactacagatattatggcgatttcatctttgaagcagccgagtgctgctttcagcatggtggcaatctttgccatcaagcagtttttaacatcgttgtttgtgcacgcagacagatggaccgcaattattgaccatctatgatgatgatatatggtcatttccagggccagccctgaaacaaagtgggccatagggaaaaaaaatttgggcccttatgttagaaaaa

SEQ ID NO: 351241 - DNA, 733 bp, Cannabis indica
tggaagtagggcctcagctttttggaagccaatggcaagctataggttagcttctccatgagtgggtatcgaattttggcgtcaattagccttttgctgatgtggtatatagggtgatgtacaccatcttcttctcttgtaaggataacactctcaacatgctctgtcactgatcagtacacgcctagctcctcattatctaggggtttagacaacacggtggttgagccaattatttctttagctcttggattgctttttcacattcctctgtccactcgaattttttgttgtctctgagaatgttaaagaatggtacacatttgtaagtagccttggacacaaatctgctgaatgcagcactgcatcttgttaggctttgtacttcgttgacggttgaggacgacttcatgtccaaaaaggctgggatcttttctgggtttgcttctattcccctaacattgactatgaagccaaggaattttcccgatcctacaccaaaagagcattttagggtattgagcttcatgttgtaattgcgaaggattttgaagcacttgtgtaggtcatccacactcccccccccccccaacctttttgcacgtgacaagcatgtcttccaaatacacctccatgttgcggtcaatgagatcaatgaacatcatgtttaccagccgttgatatgtggcccctgcatttttcagcccaaaaggcatgactttgtaacagtata

SEQ ID NO: 351242 - DNA, 989 bp, Cannabis indica
caactggaattccggtctggaaattcttggaagccccaaccggtcgaccggttgctgatggcttccctgaaccgaaattccggttcagtgcaggaaattttcaaaaattcatatctcattcaaatcaaacccaaaccctatcaaaccttccagagctgttctaaataccccaaataacaattctaaagcattaaaacaaagcttcaagcactagaacgaaaataaccatgagagctccaagctttgagttcaaaactcaagcttggttaaatctaacaaacatgcatcacaacctgtttaaatctacttaaatatgcataacaaagcttctgcaaacaacagaaaacaaccaccacaaacacagcaaccaaattcctcattttatcataaaaactaagttttgagtctaaaactccataatagattaaatccaactaacaaccataaaaggctgcttgaatcatcattttaaaacataactaaacttcagaaatcaatagcaaacacaaacaataactacagccccaaaattcactaacatgcaaaaactctcaaatcttaaaattccaagaaagcaaagaggagcttgaccaacaattacctcaactagaataacaccaaaacttgctgaaatcttgctgaattgaagaacacaattaaccctagcagccccttaggatttcgagagagaggaagagagagcttgagagaaaagcttccttatttccaaattttccaattttttgaataagtgataaaaatgcataatcttttcttactttcagccaatatatctcaaataaatcacatattttcacaacactaagtccactaaaggacaaaatataaatggggaaaaatgactattttgcccctccacactaaaataacataaagggtactaaaggggtattttgggaaattctaaattcccgactaatcccgacattcccaatgtctaaataaactgccccaatatactaaaatac

SEQ ID NO: 351243 - DNA, 758 bp, Cannabis indica
tgtcataataaacatattccacaacttaaacacaacaattgcactaaaaatcaaaaagtgccattaaagcaccaagcttgagttccatgaactcaagcttgcttttcacaaccaaattctcaattaatccacttacaacagctagcaaatactaaggatttaaaacacattatcaagcattaaaatccagcaattaatccctcaatttagattgcataaaaaaatcatagagttcaagcatgttcatggcaacatcaagctcttgaataagagcttcatcaacaacaaccaaatattttccagcagtaaaacaataagtaaatattagattcaagcatgaaaaacaacctagaatcatactctaagctcaatcctacacaaatcaagagattaacaagcttaaacatccaattcactaagcatgcaacaccaagaacaaacaatctcaagcatgcttttatcaccatatttcagccatgaattcaacaaacaactcatataatttcagctagaaactacctcaatctcttgctcaaacaagctccaagcttccaacacaaattccaggtattacagccttgctccactatagatttggaattgaatacactctcagttatatagaactctctatgtctaccatgatacagatacgttatgattatctattgttacaatcctaataatcaaggatcctctatagatgatctacactgaatagggacaaatttaccgttctaccatttaatgtattttat

SEQ ID NO: 351244 - DNA, 593 bp, Cannabis indica
ttcatgggcgtcaccgggaatgacagagtggtgtttgccacatttcagtttcaagaggacactctggtttggtgggacatggtgtctatgatacacgatgacctgggaaaagttacaggaacttttcaatgcaaagtactacaatgaggccgttagaagtgcgaagagaaaagatttcactcacctcacccagaaagaaaatatgagtgtcacagagtatacgacgcggtttgatcggttggcgaggttggcctcgacaattgtgccaaccgatttcagtaagaaggaaaaataccgtgatggactgaatgtgaagatcaagcttgacctgatgattactatagacgacaagaccacctatgctgagatggtggaaaaagcacttcgagctgagggcgcagttgggtgcatgatcgagtcagttaggactccagtagttggcggggctcctacccctcctgtatcaggctatagcaagggaggtagtggttcggccatggaccaaaaaaggaaagcacccactgcaaccggtggctcggatcagaacaagaggtttcgggggaaccagaatcgaggcagtcctcagggtagtt

SEQ ID NO: 351245 - DNA, 591 bp, Cannabis indica
taattacaaagttccaacttactcaaaagatggctttcacaccttagtatgggtagctctattccagcaaggggccttacaagaagctgaaacaagaatcgctcaactctgtaaatataatttatgcaatcccaatcacacatcaaaagtaacatgaatcttctgactcaacctcaaaagcatgataagtacaagatcctacactaattatcatccaaaagcataaacatgatatgtcaaataagaatgaaacaagattagatgcaagcaaagaacaactcaacaattttgtacaaaaattagaacaaaagagattagacaatgcaaaatcccagggattttctgagggagtcaaaacgacttgagtctagggccttggtgaaaatatcaaccaattgtttcttagtatcaacatattctaactgcaaagctttgttttcaacaagtttcctaataaagtgaggccttatatcaatgtgttttgttcaagaacattgaacaggattttcggagatatttatggcactagtgttatcacaaaaaatagttaaaacacccaattcaaaatcatagtcaatcaacatttgtttc

SEQ ID NO: 351246 - DNA, 708 bp, Cannabis indica
ctataccttggcttggatttacttgaaacttagttggaaatcccctagagcggctgaagaacacccaaccttagctggttctatgggtttcgaaaatgagagagaatagagagaaaatgagattttcctttactttgattttttttttcatgaaaatgagataatacccttttgatttattcaactaatatcagccttaaacattactaaaaatcagatttaccactaaaccccaatctcacaaagacaaactaaggcttggcaaaaatgacaattttgcccttccatactattagccacttaagatcactaaggggtaatttcagaaattctaaattcccgactattctcgacatacccaatgtctaactaagtcgccccactatactaaaatactaagatctgattcaactaagccatacaccgcgttccaatattgcttgacactaaacatgcaaaattataaaatttctatatatgacatataaaatgcattctgaattcaaataaatcatcataaattaataatttagaattaataactaattttcataattaaaccctaattatctgctaaatttctaaatttaagctaagcggtctttacagtttccatcttaaaatccctctcatctcctcctgattgaaaacctgatgtcattacctccattggagtggtcctcagatcagccgacccaaaatcaacaa

SEQ ID NO: 351247 - DNA, 449 bp, Cannabis indica
ttttatttagggcataaaaccttacatcaaccaccgtccagggatatgatgatggcccacacaaaacaaaccatgcagaagattgctgcgactgaccctcacgtggcctggcatgccaggatgccgagcgctgaacaggcccgacctgctgctgaggaggaagattatgagggggatgtcaaagtccaggaaacagaggattagggcgaggtccgtctggatagtccctctgaggtcgaggaggaaggagctgctcggcctttgcgctttggaggctatagtgaggccggggaacctgttgggttttatgcctcgttcaaatgaggctgcacccagcctcgttcctcggccaagcttccccttccgcgcgcgcaggggtatgcattgcatacccctgtgcctcaaatcttgttttcatcataacttttgattcaaaaatcgtttttcat

SEQ ID NO: 351248 - DNA, 631 bp, Cannabis indica
ccaaaacaatcactatcccctaaaatataatattagccgcaaaaaaagtagaaaatataatgagattatattccctaaacttgttatcttgataaaaaaccagttatagataccaaaaattatatataaattttacacgcttgtattctagatactgtatggaatatggaacaaattaaatacaataccaaaataaaactagttacaaactttttaaaagctccaagacttaaccatcaatgcactacactacccaaaatagtcattatccactaaaataaaatattagccccaaaaaaaagtagaaaatagaatttgaatattcgccaaagttgttatcgtcatcaaaaaattatcaaaaaacgtatcagagttgtcttcattacccaaaagtcaccagagttaaacattggagttgtcactagtgttagatgttgaaatttgacacaccgaagccagttacaataatcaactagttaaaactataattgagaaaccaattaattaaatcaattgaattaaaaattagaatgttagagacagtaatgtaaaacagcaaaaataataattaaatagggaaaccagttactaatacaacctaaaacaatcaaaagataaattgaaacataaa

SEQ ID NO: 351249 - DNA, 651 bp, Cannabis indica
caacttctgcacgaagatcaccctcaacttcgttctagtactccttctagagaaggctattcttctgaccttgtacccaaccataggatgatggctcgtacaaagaaaactacgtgtctgactgacgctactgatcctcaagtggctcagcttgccactctgcccagcgccgaacaggattcagccatcccgatggaggaggatcgtgagcgggacgctgaagtcccagagattgaggagctggacaatgtgcgtcctggcagtccttctgaggcggagggagaggaagaggttgaacccccaaattacggggagtacaacgaggctgggaaaccagtcgatgctgccggagacgtcctggtcgagggcgttgactacgtcaatgaggagcttgcttcggcagttcctcatagaaggcagggtgctttgggcgccaggtgggtaagtcctccgtccaagattatggaggcacaccttcgaactcttgaccaggacgggtacctgaccgagctagactgctacattcccgcccacactaatcgtgccacaaaccctaacaaggggatgtgcgcctgatcgggggcccatggccagcaaggagcgctgatgcccttgcacaagtacttcaaggatgtggcggacttctttggt

SEQ ID NO: 351250 - DNA, 984 bp, Cannabis indica
cattccataaatgaataaagaaacaaaaaataagaacgagagaggagcaaaataaacatcaaaagaaaaagaaataggaatgggatcattccctgaacacttacccttgaagcgttttgattgttgctagaaaagtatcgttagtttttttctcctgtgtttcttttctctctctctccgatctttttttttttttaaagtatcgataccccttttctgttctcaactcctcttatttgtagaccctattttttccaacaaaaaaataattttttttcttgtactgtaaaggatgaagtaaaaataggggagtgagaagttgagagagtggagggaatctcttatttttactctctctacttgactgattatttttttattattattattcttttaaaaccattatttcttcttttttttaagaaataatgaaataataataattttattaattttttttttttgttcaacagtagcacaacaatgcatttgtactaagtcaattggtggatcatttcaagttacctacataacgggtctatattatctgttaatttagagacaagaacatgtacatgtagatcatttgatctaacaggtataccatgtggtgatgctttagcttctttgtggtttcctaatcttgatgcctacgaatttgtagatccttgctacaagaaggaagcctttgaagctacctatgcaaagggtattgcaccaatgcctagtcctgatgaatgggagaacgaaggcaaaaatccaatccttcctctttctaaaactgtattacctgggaggcccaaaaaatcaaggaacagagaagtgaatgaacctccagcatgtgcaactaaattgagaaaaacgccacaaaccaaccagtgttccaactgcaaacaacgagggcatatcaaaactagttgtaagaaccaaaaagtcactcaggtatatttcttccaaccaaacttctatttgaattgtaatttc

SEQ ID NO: 351251 - DNA, 679 bp, Cannabis indica
tatttttgggttttagataaagtagtcctatattttcaatagtgatatgtatgagttttagggataacatattatgtatatttaagtatagaaaatcaaatttctctttatttatagttatataatatagttgttataatattattttttattattttgagttattttataatttatttatagttgttattaaattaatttcttatttattttttttattttttattgaaaaaatatattttataattataaaatttaaaaaaaaatatattttataaataaaatttaaatcgtaaaattgtaaaataaaaaataaaaaaaataatttttaaaaatttactacaaaaaagaaattacaaatacagtagaacctctatttaagaatactctattcaagaataacttctaatttgttaataaaaaaaaaaatcaaagtcccaatttgggccagttataaataagaataacctctaaattgtaattagttatacattttttaagtcccgtattaacaaagtatgcctctatataagaataattatatcttaataaaatatatacatgtattttgtaaatttatttatgtaaaactaataattttattttaaattataatacatgaaaatatatttactctaaaatatttctattataatatagtattaatgattatttattg

SEQ ID NO: 351252 - DNA, 1032 bp, Cannabis indica
tatttaattaaatctcttaagaaaaatgtataatatttaattgtcttaaataaaatctacttaaatattaattttttattaattaaatatatccagaaaaatatcaaaagtctacttaaaaaataactatctaaatatttcattaactaattattgatttttcaattaaaatataatatattttagtctatttattttaacttatcattaacgaaaataatacttgatttaagttaatctataattaattagaaaattaattttcaacttaatctaatttttaaaattaaaaaagttcaaaatatctacatttgaaataaatgtatttcgaaatttacattaaaataaaataaaacatactctaaaaattataataatttaagttgatctaaaattaaaaaatttccaacttatatataattctctatttaattaaatttattaaaatagaaacaaataattaagtatcttgaataaaatcaacttaattattaattctaatttaatatctaagaaaaaaaaaattctaatttaagttggtctaaaattaattaataaattaattttcaacttaaatatattttctatcaattaaatttattgacatagaaataaataattaagtatcttgaataaatcatcttaattattaattctaatttaatatataaaaaatattctaatttaagttggtctaaaattaattttttaacttaaatatatattagaaaatataattagttactaaaattagggtcaaaagagaggaacttaacctttaattaaataagtccaatactaattgggcctatcaatgatattttatttttagcaacctagtccatttaaatatctaagaataaatgagcttcctttatgcatctaagcccaattacaaacatatttgctcatatttaacaaattgatttggatgagccctatcatgttactaggtttatcacagatgaaagaaattataaatttacttgttacaaattatttatttgatctattgacaattggactatgatt

SEQ ID NO: 351253 - DNA, 890 bp, Cannabis indica
acttgtttctaatctgttctgaggccttgtccagattactccaacatgaagaagaagttggtcatcttaatgggtttaagttaacaagacatgctccatccatctctcatttgtttttcgcagatgatagccttcttttctgtcaagcaaatgagtcctcttgccttgccattaaaagatcattggatttctatcacaaagcttcgggtcaagttctcaatttagacaaatcagttatgtctttctcacccaatacaacactggcggctcaagtttttttccatcgacctctgaacatgccaatctgtgaatgccacgaaagataccttggtttgccttcctactttgggagggataaaaagaggatgtttagtgatattaaggagaaaatatggcgactaatgcatacttggagtgagaatttttttttagctggtggtcgcaagtgcttcttaaagcggtagtccaatccattcctacatatgcaatgagttgctttcgtctaccggtttacttttgcagccaacttgagtctatgatggcaaatttttggtggggcttgaatgagaatggcaacaagattcattggcgctcttggaagcttctgtgtaaaaggaaagacagtggcggtatggggtttcgttctttcatgcatttaatcaagcaatgcttgcaaagcaagcttggagaaacaaccagactccttacttgcaaaggtgctgaagagtagatactacccaaataacaatttccttcaagctaacattggtcactccccctcttttacttggcaaggcatccattggggtagaagcctttttgttgctggtttacgttggaaaattggagaaggatgtaggataaattgtgctgatgacccgtggattcca

SEQ ID NO: 351254 - DNA, 1251 bp, Cannabis indica
aaaataatttccaacaccttatacctgacggtttaaaatcgtcggctacagtataggcgacggttttaagttttaaaccgtcgggtatataggcccattacaaaattgtcacctaattctcgccacattttctacgtgcccacctacttcttttctatttcccacatgcccacctatttcttctccatttcccacaccctaaaacgaaaatcttaactctccaaaactccacccacgcctccacaccatcgccatcctctatcgccgtcttcctccctctctcgatctccctttcttatcgtttctctcatccatcgatctccacccacccctcctcccgtcggtctctctttcctctctgtcacatacgtcagaccaccaccacctcccgtcggtgtccctttcatctccgtctcatacgtcggaccatcaccacctcccgtctgtctccctctctctctttctctctctccgaacttagtataaatacatttatttatttatatacttttttataaattatatatatatttattttgttattgtaatataatgtgttttaaagttggttgttattgtaataaaattagtaagttgttttattttaatttaagttaaattataaaactaatgcaggaaaaaaataggtgaaatagcagaaaaatctgtattttttttttcacattctcgatggttgaaaaccgctgcctataccctgttataggcaacaattttaaaccgtcgaaaagtccacattagcgacgatttttaaccgtcgtctattttgcccgttttgtgacggtcgtatatgtgacaattatagaaactgacgggaatactatacacgactgtttaaaaacgtcgggaaaaaactatttttatagtagtgtaatgtcaatatcactagttgatcttaggtctatggatcttaatcctgatatagttaggttcaacttagttatattatttatattcttcaagttgttcgtgaaagctaaccaatgattttggcagatatttacatctttggaacatagtagttcaattgagtaggagcgctaatcatagattgaaatctatagcttctataagtatttaaaagtgaaacgatgattttctttgagcttggcttgatagagataaatgattgaggcctcatttgagtaattatattttttttagaaatatcatttataggtagctaagtgttttaacgataaaatacattgaagggtagaacggtaaatttgt

SEQ ID NO: 351255 - DNA, 568 bp, Cannabis indica
agcaaacatgtaggctcacataggtaaaaaaaaatgtggatggaccttatcatgtttctaggtttatcacatatgaaagaaattacaaaatttacctgttacaatttatttatatgatcttttgacaattgaactatgattaaaatcagatcattggatctatcagttaatcattgaaaattagatcaaataaataataggtttgttaaaaaaagttttgaataaatactttaaataaaacaaacaatatcatgtaacaatatgtgaaataacatatttattacttatataattaaattatcatttaactaaccaaaaaaatttcaaaaatttagggttgttgaaacaacctaaaatatctttttaaaatttaacaattcaaactaattttaaaatatctcgggttatttaaattatttttatcaaattgaattaaatatctaataagataaattatttgaaaataaacaaataaatatttttaatattattttttaatcttataatttaataaaattaaataaaaaaataaataatttaaaaataaatatggttagacaattattat

SEQ ID NO: 351256 - DNA, 684 bp, Cannabis indica
tgaaacgaggtttctgtaggaactggtttctggtctttgtttatgtctgtatttctgtgttattttctgtaggaaccagattctatatttatgttaaaaatcttgtttcaattaatttatggttcagacatactatcaggatatatccgatgatggtggtgggttacagttgtccgttcatactgttcaagtttaggtacaagctttttcacatttatgttttgcattgtttgttctaaatattttttcttcaattttgtaggaggaaaaggacactttgaattttgaaaatatgtttatcgatcctgattttcttaagggtgtggttgatagcactgttaagagtactttgaagacagatgatgtttcgtttcatgatgatagtgataagttgagtttggttttgtacgatgaatcgtatttgtctccggagattcaaaagaggcagcccaaactaagctctattgttctgtcgccatatgttgtggactttggttcttcttcatcttcaaaggaagtcttaatgaggattgtgcaagatgataaatttattgtgcattgaatcaatccttttaaagatgaaatttgttttaatactgctgttgagcagtgcattaagttttccaagtttattgatgagaacatagtcatgaatagggggttagtatttttttatttatattt

SEQ ID NO: 351257 - DNA, 638 bp, Cannabis indica
ggatataacgagatgaattattttgcaacacttaagtgtcttttcctattaagatgagaaggaaaactcatgtctgacgagagacaaccttccaagtcagcataaccgtctaatggataaaaataaggagtggttgggtagttattagatattatctcatatctaaataaatgaaatgtggggattatctacgtttcattaacagttccaattgaatcaatctcaaagggataactgccaacttatattcttataaatgggggtagaacccatgagaaaagggacgacaaatttgagtgagagaaaaatctttattcaaatattgatattatactcggtatcccagaaaatatccctaataataaggactcgtgaaatatgtagattttaactacaaaatcacgtaaaatatttggtgtcattgatcatttattatttatttatttctgtagtgcatttattgcaaaaaagactattaatttagttaacgaaaaatctacgttaatatgtatctttgctaaaaagttgtctagattcaatgtatttatttgaacggactgacaatctatttgaacaaaatttaactttccttttttgagaagttattccatttaatggcgaatttgtgggttttatgc

SEQ ID NO: 351258 - DNA, 1158 bp, Cannabis indica
agaacggtaggagaagacgccccacaatctaatgtccaacctccacaagctgaattccctatgaacgcccttctcgaagccttaagagtatttcccgctcaacagatggatcttgccgcttgacagagtcatcattttcaaatctttcatcggatccaagtgcttgagtttgagggtggacaagatcccatggtagttgaacggtggttgaggcagataaagaaaaatttcaacacaataggaacacctcaggaatatcaagttacttttgttgtgtccgagttaaagggtggtgcagcagattggtgggagaccttgtccaggacaatggaaactcatgaaatgacttggcgagattttaaggaagttttcagggaacaatattttagtccatctcacaggagggctcttattggagtattcgatggtttaagaaaaggggatatgactatgaatgagttttacatgaagtttgtagagctatcctcttatgcatatcttggtgttgttgaccaactcttggtgattgaacagttcatgcgtcgtttgaggcctgcgatgcatcgtcttatagcccctttgacctttaacaccctgacttagtgtgtgacaagccttgcgaactgaggctcatgtagaagggaatgagaagaagaacactagtagaggaaaaggaaatgaccgaaagatgaccaagaagaatcaaggacagtggtcctaaggacaataatttactgggggtagcactgctagtggatcatcgggaaaggctcgtagtagaccatacgggtgtttcagttgtggtcaacaaggtcataaggagaaagattgcccacaacgacaactaagatttcaagcatctcacgaaggacccacaaggagctatgtagagtctactccttttcatggacagcccaggacaaaccagtcccagtcttcatcctatggtttcacaccccaatcgggccagcagtctcagtacaaggttcagggttcaacatggggtactcacaaggttttcaaactcctgctcctagcgggagtcaaagagggtataatcaaggtggagtgtctggtgcaagtacaagccatcctagtcagggaaagggaaaggcaaaagcaaagtcattcgctcaagcctacgctcttggggttgat

SEQ ID NO: 351259 - DNA, 394 bp, Cannabis indica
ccaagctttactttaaccaatggcctggaaaggacatagcacttatccaaggtgcaagtaattactgataaaccttgtgtagtgtactgataaatctaggaatagatttaattacataatcctgattactttccactgtcctgacaacacaataaacaagattatcaatgcgataaggatttggataaatatataaagcaaataaacatataaatgatcacatgaatcaaatgacataataagtaatgaaaataaatctgtttctatattaatattgaaatgtggtaacagcaaatctttcgaattgctcctagtccacaggaccacacccagagaaagaaatatattagatgaatcacaagtggttacaaaactaaattgacttatacaaata

SEQ ID NO: 351260 - DNA, 675 bp, Cannabis indica
tattagatgaatcacaagtggttacaaaactaaattgacttatacaaataaagactccctctttgaatttgccgcagcaattgtaatctattcttctaatcaaatttcaaaagtgtcgagatgttgaactcccttcaattcgtagcacttgcacacttcatcccgaagaatgtctcacatgcaatcttcccccccaaagagtgtctaacttgcaattttcctcccgaagagtgactcacttacaatctttctcccgaagagtgactaacttgcaatcttcctagaccagaactaagacttcatagggagttttcaagttaatgactctattaagacttctattgatcaagtagaatgcagtaatgagagcctcccccaatagatctttcctaaaccagaactaatcaacaaacaccttactttattcaataaagtcctattcattctctcagcaacacgattttactgaggtgtgtgcttaacagtcctatgcctaacaattccaaactcaaaacacaacaagccaaattcagcattgatgaattctaaactattatttgtcctaagcactttcaatttcttttcatactagttttctacttcagttttccattctctgaatttttctaagcattcattcttagttttaagtagataaacccacacatgcctact

SEQ ID NO: 351261 - DNA, 563 bp, Cannabis indica
gagcatgctttccaattctaaacacagttataaactcaaaattaaagagtgaggagaagaactacctcaacttcaagccacaaccaagcttaattcccaattacaaagcctaatccaacaccaacataaagcaattttcaccaatttagctttaaaaattagagagggttagggagagagacagggtcaggtaagagagggatataccccagaatttttcttttcattatctcaaaattgagcttttaccaatataagtcaaataaggtcaaaagaccaaaatgcccctagggccaactctcacctattcacacatacaagggcatagttgtcattcacactcatttatttttcaaataaaattaagattatccattatcaaataaaatgtcaattaattcaattcaaattgcatttcgggcccgaacccgattcggcccgaaatacccggttgtgactatatcacgccaacctgtcaggacacacctgaaaagacaacacaggcatactacataataatatagttctattaagcacgtaattaaattaatttcatcatttta

SEQ ID NO: 351262 - DNA, 803 bp, Cannabis indica
tggaacattgacattccaatatgactattggattttaatgaataaaagaacaattgtgatcattattgtagttattgactcattgtcaaagaaggttctgattgtagtacattatcatgttcttttttagtaaacaacatttgtatttatgttttatatatctgtataaattcagtttgatgttttttgttgctaatgtagaacaactttgtgaaagtgtttattctgttggttaaagatcaagtaacttggtatcttcattttattttcttgaaaaatcctatattttgtgaagtattgattattgatttcttcactttgatttcttcattttattgattattaaaatcctatacttttaatttgtaatactattatttacattaattaatgtgaaatgtattatttatttattgtatgtgtaagtgtcgtgttttgtgtggcaaaatagatattactgttgtttggtaattctgaaactgcatttgcttttctaacatcttttctgtagttagttgcatctgtcttcactaatttcattttagtgccatgtcagctttctgcaagtttgttagtttgtgccagctgtaccttgctggttgtttagttagttaggtttattatcttcagcatataaatactgtgagaaccgttgtactaactaactctcttctgttagaatcttcttctggattcttgctctgctagggcatcttttttctgtgtttgtttcttgaatgtgcagattgttattttgaagatcttcttgaggtcgaagatggagatagaatctgcctgatctg

SEQ ID NO: 351263 - DNA, 602 bp, Cannabis indica
gtttcaatcagagcaatcgccccattctccaacttaagacctctgttaacaatgttaaacaaggcgataactcagtcaccagatacttcactcaattacaagccctatcggatgaactcaacgagtatcaaccaaatactccttgcacttgtggctgtacttgcagtgccatgcaaaaaattcaagattactatgctcgagactagatccttcagttcttgattggtcttaatgaatcttattggggaatacgagctcagatcatcctctttgatccccttctgccactgtccaaggttttctccatggttgttcaccaagagtgccaacgttgtcttggcaacactggcattgttgctgctgcccatgccaaaccgaaaccaaatcagccttctcagaataagaagcctcgccctacatgttgcaattgccttaaaccaggtcacttggttgagaagtgttatttttccatggttttccacctggatattgtgacaaaacgaaaacacacctactgctcgggcaaaccaagttttggccaatcctgaggcccctgttactggctcttctcaactacagctccaccagcaattgatctcttc

SEQ ID NO: 351264 - DNA, 861 bp, Cannabis indica
ctctctccttgtcctgtctctagccaattgatagttggtcaaatctagttgatcatcttgactggtttccagggatttcacctcagttgtatctgtaccaacctcagtgtgtctgcaccctgtgtttccacctcaagagatgtccttgcttctggtgtgtggggtaaatcaatggagacttcaatcttgtcagtgttgatctccaactcagcaaggtcatccctgttagtacctgcaacatcagaacccttgccttccttggctgtcaagtgcatgaaatcatgctcattaaagactacatccctagatatgataatcttaggttttccattttcaacatgacatagtctatatcctttaacacccttaggatatccaagaaagaaacatttaatagccctaggttccaatttgtcaagtttctggtgtgcatatgcagtgcagccaaatattttcaagtgattcagtttaggtgtagtgccatgcaatttttcatagggagtttttaaatcaatcactctactgggactcctattaatcaaataacatgcagtgatcaaagcctctccccagtagattttacctaaaccagaactaatcaacaagcacctaaccttgttcaacaaggttctattcatcctctcagcaacaccattttgctgaggtgtgtgcttaacagtcctatgcctaacaattccaaattcagaacacaacaagcaaattcagtattaatgaactctaaaccattatctgtcctaagcactttcaatttcctttcatactgattttccacttcaattttccattctctgaatttctcaagacattcatttttggttttaagtaaataaacccatacat

SEQ ID NO: 351265 - DNA, 272 bp, Cannabis indica
atttaggtactacttgcggtgtgtgggcactactctatcacttaggaatttcgaaacaaagaagaagaagaaagagagagaggtggcgacttaggaattttctctaaaaggaataaaatgcaattgtgttagtttcctgaagccattactttctatttatagaataccacatagggttagggttgaattacttggcatcaaagtaatgaaaatattaaatgataaatcctatgcatgtggccggccttccaagtggatatgggcctcacttt

SEQ ID NO: 351266 - DNA, 745 bp, Cannabis indica
gaagaggttatttgtagtagtgtcgaactacatactccgaagttttggcttgggaacgatgtaagtttttaagactttttttactgttttttgcttttaaagactttgtctaactcttttttatttaagttctgacatatttaattttcatgttttagcatttggatgcggcattccatttgatgaggaggcaacaacacttttatccagaggtctacccaaatagatgtgtcatcaagccgtgtattttcccagcaggagttattgctcggtgggaagctgtgggtgatgaccaggctaactatcagtgggacgagagcatattagatttgattcgaggggatgaaagtcaattcttggccagttggaagaataaggagagaatatttatggccatctactttgatggagcaaagcattgggtggcactagaggtagatctggatcattggttgttgaacatatttgactcgagcctcggatcgatttctgttaggttataattagcctatgtttcggatctttaaaactagcattatctcgtctattggtgtcttttggatcagttttacgcttgattttcattatttcaggttcccggagtgttaaagttcaaattcagtcaaatggcgaaaaactgggataaactggaaaaaattggaaaattcggctccagaagctacagtagtcgcgacttcatgagagccaggtcgcaactctggtcgcgacttcgagatttggcaga

SEQ ID NO: 351267 - DNA, 667 bp, Cannabis indica
agaaaacggtgcagagatcaaggaaagactggtcaagaaagctagatgacgcactgtgggcctatagaatagcgttcaagacaccaatcgggatgtcaccatattggttgatgtttggaaaggcttgtcatctaccggtggagttagaacacaaggcgtactgggcaatgaaaactctgaacatggattaaaaggctgatggacagaaaagattactgcagttggatgagttggaggaatttcggaatgaggcttatgaaaacggtaaaatctacaaggaaagaactaaaaggtggcatgaccgaaacttagtcaggaaggagtttcaacctgggcaacaagttctacttttcaactcaaggctgaagttgtttcctggtaaattgaagtcaaggtggtcagggccatttacagtggtcaaggtgtttctttatgcagcggaggaactgaaaggtgaaggccctaatactttcaaagttaacgggcagcggttaaagctctacttgggaggtcaatttgatcaagccaagtccgccataattctggggccactatgaagaactcaatcaacgtctagccgtgcgacgataaaggcagcgctaattgggaggcaacccaagtgttctttatgatttagtttaactcttttatgttttagtgttatttt

SEQ ID NO: 351268 - DNA, 535 bp, Cannabis indica
atagcaaatgggtagggtgaggttatcattctaagttctattggcggtacacgaggtatatttgaaaacctctaacacaaatcacatttctggacaaactcgtgtgtgtccttattgatcgttggctagtaatatccatgtctaataatctttttagacagactttgccagcccgcatgatccccacagaagccttcatgaatttctctgatgatttcatttgcttctgtagtaagaacacaccaaagtaagggcactaaatacaatagttttcgcgccttgcttttatcatttggaagttgtctgtcgagtaaataattgataataggtgtcatccatgtgggagaggtatctatcattttgacgtcttcagttacacatatacttggctcgctcagcatctctaccggaactaaattcaattcatccaggtcattttgcgcggccagttttgctaaggcattggcaatggagttttgttctctcagaatttgttcgattttaaagtaatcgaatctttccaagttcttctaaa

SEQ ID NO: 351269 - DNA, 694 bp, Cannabis indica
aagcatacctgcaagttgtgcacctcatgtaatatcaacctagtatatatataaatattagtggacctctaatggaacactatttcaccaaattaatgttaaatcttcacgctatttcactccaatgacacactaaattatgggccaaattagtgtgcaccaaatgttaaatcattaatggagttgattttttgaatctgcatcaatttggtgtacaatttttttttacattctaatccttatttaattttattttattatagtttagtcctcaaattaaaatttatcacaaaaataataattgatttaaaatactaacatatttttacaaatacaaaataacaataaaaattactaatagtaataaaataagaacaacataattaacactaaattataaaactaattaaaatcaacaacatttaagtaattaataatttaatagtcaaattgatcacttgtgaatcttagccttaaagaatatcaaaatttaagctatatagacttttagtattttgagaatctggatatctttaatatgcttgatattattggtgagctctttaaatttttacataattatttttttgatcgttttgaaactaatcgtgtatattatgatcaactacagaatttcaataagattcttttttgaaaaaaaaaattgtgttttttaataaatatttattttact

SEQ ID NO: 351270 - DNA, 646 bp, Cannabis indica
gcccttttctatggtagtgcatcatcttcataactctcaattacaaagttccagcttactcaaaagatgactttcacacctcagtatgagtagctctattccagcaaggggcctgacaaaaaactgaaacaaaaatcgctcaactctatacattaatactttagtttatcctgatcacacatatgtaagtaacttgactcttttaacccaacctcaaaagtatgatgagtacaagaaactaagctaatcatcatccaaaagcataaacatgtttcgtcaaccaagaatgaaagaaggatagatgcaagataaggactacccaaaattttgacaaaatggagaaccaaatgaaaaaaattaaataatgcaaacccccaaagattttttgacggagtcaaactgacttgaatctaaggctttagtaaaaatatcagccaattgtttttcagtatcagcatattacaactgtaatgtttggttgtcaacaagttccctaataaaatgatgccttatatcaatgtgttttgtacgagaaggttgaacaagattttcacatacataatgacaagtaagaacaaatgtgagagtgtagcaattatcaatagatctaaacccttgtaaaatgcattgtttattactgttaaga

SEQ ID NO: 351271 - DNA, 668 bp, Cannabis indica
accaaggccggtcgactgaggattgcgttataagctgttgggctatccaccaccacaaatgtgcagtatttgaaagtgctctggggtgtgtccgggcacaaggtgactgggagcctcacttttcccatagggataagtgttgttccattgaaccccgtgagttaggaaccgcttggtgataggtctcagtccgttaggcctattgtagtgaaggcctctttgaatagcagattcacggaacccccattgtcgaccaagactctggccacgatcttattggcaatgggggtctctatgaccaacgggtcatggtgaggaaaacacactgctttagcgtcttcttccgtgaaggtaatgggctgatccattagccggggcctttgagcctggagttgagtaacttcccaaacttcatcgtgtttcacggcccctacgtaccgtttgagctctttgcgggtagttcctccgatgtggggtcctcccgagatcatagccactctcccgttgggtctaggtgacaggccgggaacatggtgggcatcttcggggggaacaactggagccaatactcctgctgcacccccctggtgctccttgtggcaaagctcgagccgcatgacctgggttgagatggggcaaccggtttttgatccactcgtagaggtgtc

SEQ ID NO: 351272 - DNA, 772 bp, Cannabis indica
aaagaatttcagaggacgaagccaaagaaaacagccacagagacagcgaagtccaaaattagccaagtcccctccaaagaaggagtcttccccaaaaaggaaaggtggtccgcgctttgtgaactataccgagttggcagtacctcgagaccatatctacactattgaagaaaagaatggggtcttgaagaagcctccccaattcaggggaaaccgcgacaagagagaccctaaaaaattttgtatgtaccacaaagatattggtcacactactttggagtgtttgtttttgcaggacaagattgaagagctgatcaagagaggaaagttcagcaaatacaagaagaatgaggaaagtcatccccaagcggatgataaagaagaaaatcagaatgcgagtggttcgagaacttctcacaacatcctgaccatcataggcggaccccatattgcaggtgattccaggaagttgtaggagcgatatgcaagagaagccaaagaaaagccactcaccaatgtgaacaacctgagcgaacgaccgtagaagctgttcaagagggagtgcgacgacatcaccttcatggaaagtgatgcgagatgggtccattacccacattctgacgtgttggtcattgttgcaattattggtggagactgttggaaatattttaccaggatctagatttactaccaagtatattttattaacattctaatatgaattctaaaacaatgaaataaacacataggagtttaagaaaaccttacattg

SEQ ID NO: 351273 - DNA, 699 bp, Cannabis indica
attttaatggtaaaatttttcaaattacttctaaatttaagatatcatttatttttcacagactatttatatatacatttttgtatgtgtcaaatttatattagtataccgctaaatcacttttagtgacaattttttagtcacaacaaaaaaaatttgtaacatatcttttagtcacaacaaaaaaattacttgtgactaaacatagtatttagatacaagttgtcactaattttagtcacaacgtataaaatgactaatttataattagtcaaaactttttacttttagccacaagttttgttgtaactaaaagtaagatttttatagtatactagagtgtatatacctttaatttgctactagtttaataatttaaaaggtttcatcgctaaaatctgaatttagaggattcaattgaagtaaataaacgacaattggaaggaattagccgccaaaaaccctttctccaattatcaaatccctatcatgcatgggttaattaaagtttaatatttatgagttaatataaattttataaattactcacacacaatataatatgagacaaacagataagttttttctttatatttttatttttatattttaaaagtagttttttttttttttttaattgtttattaaaaaatcttacattagctaacttaaggcaacttaaatcgcaatttaaattca

SEQ ID NO: 351274 - DNA, 774 bp, Cannabis indica
ccctcccgtgtttggaaaagggaaagctgtcatgtctgagataagattgatgtcaggtgatgatggacttctgagtcttgttcgggcggtcaccttgcatttttatttatcttgtttttgagcttcttggttttcatgccttatgtttctgatggctgtcttctaaccatactatttttgttctgtgcaaacatgtctcggtagatgcttgacgctcttaggaagagaataggcggaagctctagcggctctccttcggccaagaagtcgaagggcggtgaggggtcctctacacaggcaaagaggcctaccagggaggttattgatctttccgaggagctgactgctgcaaacccctctaaccctaaagctgccaagtccaaggagtctggaccaccaacagttgggtctgagctggtcaagggagatcctgaacggatgctggcacctgcttcacctttgtcggtgcttctagagtccaagaagggcaaggagatgctggcccattatatgaaccggctggttcctaaggtcagtgagcaactggcgggtgctgacaatgactcttctttggagttgttggtgggcggagtcttgaaggagttccctagggtaagtcttttttgatacttccccttaatctttcatacttagcacaatatgctaaagattttcctttgtgcaggtcagtctgaagttggcctacacttactcccgggctaagtccgctgcttccaagaatgcggctctgtccgacaccctgaaggcggaggc

SEQ ID NO: 351275 - DNA, 773 bp, Cannabis indica
gatcctcgatgtcttctcttgtatacattttctccttaaatttaccgtaacttgtcgaagaagaaaatggatcgctccatccagtcacattggtccctcgagcatcagtaggaccactaatatcattggtctctctaccattattaggacctgtactgtcagtagttcctctagcatgactggtttcgcctggacgactactactagtccaggtgtttggcaattttctctacggggcattcttttccgtgtcggtggcctcggtggtatttggtacgatagtggagtcaagttcaaaggtacagcagcaggggcctctgtaccttggtcgtctcttacgccatcattgccctcaacataacattcagggtctggaccatcaaaaaaaccatcaatgaagggcatttgtgctacaatatcagcactcggcatcatagtgtttaattcaggtaatacatccgcaaccaacacctctggatttgtttctggaacaaaactcccaacctcgctacgattatccttaacagaacttggtgtgggactaggatcgacgcaaacattcttctttaacaaagtcacaaacaaaggaataaattcatctggcttcttcgcaagtgtagataaaaagtaccttgcacgcttatcatttccaataacttcagggcgatactcatagcctttcctgtacttgtaatttacttccaatttcaagtcatactccactttgtcaacatccagttcttcgtacaaaacatcaaccaaacctgagtagc

SEQ ID NO: 351276 - DNA, 1008 bp, Cannabis indica
aattacttgatataagttgatctaaaattaattaataaattaatttttaactttataatctaatttttaaaattgaaaaatttcaaaatattaatatttaaaataaaagtaattctaaattttcatcaaaaatgattaaaaataaaataaaatatattttaaaaattattctttaaatttttctgaaattgaaaattttctaacttaaatataattttctatttaattaaatttattaaaatagaaacaaataataaagtgtcttgaataaaatgacctaaattattaattctaatttaatatctaaaaaaacattctaatttaagttgatctaaaattaattatatagattaattttcaacttaaatatgttttctatttaattaaatttcttgaaatagaataaataattaactattttgaataaaattaacttaattattaattctattttacgttctaagaaaaatatcctaatttaagttggtataaaattaattaataaattaattatagttttttacttaattaaatattagaaaatataaattagttactagaaatgatatccagaattatttatttaaactaagtgtttttttctaaattaattttaaaataatccaataaataattaatttttatttattttaaaattaattatgttgctaatacgattttaattaggtcaaactagaataattagcctaatataattatttcattaaggaaaatgggccttcacagtgggggtttttcatgtgagggaggactaggtctagtatgtcgtacccactattaatgaccccctaactctcacacaaggcacagaagagaggaattgaacctttcattaaataattgttattaattgaataagctcaatactcattgggtctaaataaaacaatcatcggtgatatattatttttagcaacctttttccatttaaactatctagaattaaatgggcttcctacatgcatctaagcccaaaagcaaacatat

SEQ ID NO: 351277 - DNA, 679 bp, Cannabis indica
ttttcttgttgttttgtttttcaattttttcctcataatgtttaggttctcttcgattctgacttcgaggatgaagttcctgatttggaagtgaagcctaaagttaaacccaagggttgtttaccttgaattttttcatttttttaagttgaaatttttaatcaaccgttgtttttcattttgtttttgttctcatttatttttttgctttttttttttttagttttgttactgctattaaatagtttttaacattatttaacgaaactacaccgtttttctgtttctcagtttgagttttcttattagttatttttaagttttaaatgtgtttttttagagtttattgttgcttttgttcactttttgtacgaaggttttgtgttttcataacattttttctttgtttttaattcgttgtttgattgttcttttagtgttctattggctttttctaaacagttattttaatgtttatttttagtagttttagtgttgtttaattttatttcacagttaataatattttagtaatttcatgttttgcaaattattgttaatatgttttttcccggttgttcatcttttaagctgtttatgtccggttatttttaaaatgttgttttgtggttgctttctggtttttttctagaagcttagatgatgtttgttttttcat

SEQ ID NO: 351278 - DNA, 822 bp, Cannabis indica
gtaatatctcaagaagaaacgagatgcctttaacagggatcttagaagtggaattgtttgatgtgtgggggatagacttcatgggtccttttccttcatcttttagcaatcaatacattctattggctgtcgactatgtgtctaaatgggttgaagctgcagctacaccacagaatgatggtaagacagttctccgctttctacaaaagaacatctttactcggtttggtactcctcgagcaatcgtaagcgatgaagggagtcacttctgcaataaacagtttgaagcactcctttcaagatatggtgtccgacatcgaactgctttaccatatcatccccaaagtaatggccaagctgaaatttctaatcgggagatcaagatgattctagagaaaacagtgcaaagatcaaggaaagattggtcaagaaaattagatgatgcattgtgggcatacagaactgctttcaaaacaccgattggcatgtctccatatcggttggtgtttggaaaggcttgtcatctgccggtggagttagagcataaagctttctgggccatgaagactcttaacatggaattaaaagctgcaggggagaaaaggctgctacagttgaatgagctagaggagtttcgaaatgaagcctatgagaacgcaaaaatctacaaggagagaactaagaagtggcatgaccaaggtctagtaaggaaggagtttcaacctgggcagcaagtgttactattcaattcaaggttgaagctgtttcctggaaagttgaagtcaaggtggtcaggaccattcacagtagtcaaggtgtttc

SEQ ID NO: 351279 - DNA, 960 bp, Cannabis indica
atatatgaaaaactattattataataaataaatcaaatatttaaaaaaagattactattaagaatattataacttaaaaaattaatggtaattataacttaaataaaaagtatatttattatcattatgtatctttttacttttatacaaatgttaatatatgataaaaaaaaaatgattataaaatctttactatacttttttttttttttataaaagtgattaaatatataatacttcaataaatattcaaaatattattatatgattacttcaatatggccatttttttatatggtgatatatattgtgtgaaaattttaatagtatatatttttaaaattttgtaaaaaaaaataatgcataatttcaagggggatttttttatatatatacgtgattatataattatttataaaaataacaaaagtaattttaattggttgcaatagtgttaattgtaccgaaatataaataatatactattacacatattttttttatattgtgtcattgtctgcgccactgtcgatagttttttttgtgtctttttttttctttcttttattttgttattttaacataaatttattctttcttttttgttttaatatttatttttatcattttttcaaactactacagtattagtttagtgggcttatatggagtaccattccaatctatttttgaatgtaactattttaatatatggaatatatatttcaaaatgaaaagcaaaattttagtttattaaatgttgttaattaaaaaaaatattatatttaaaattatgagatactaaatagtttataagataatattatttcatatatatttttgttacttattttatattctagcaggttaattataattataattataattataaatggttatatactaatcaaaatacacttatgttacttttttgtttgtttatttttatagtaactt

SEQ ID NO: 351280 - DNA, 671 bp, Cannabis indica
aatatttatttacgtggaccaataaaattgtgtcacgtgttccaccatggcagttaacagccaaaaagggatggaaagggctaaatgctaacagaattttagaggttttaccaccaaaattttagaatttgggattagttgcaaaaatctaaccacttaaggaggttatgccgcaaataactcttatattaactgagaagattgtaataaaaaattgtaattatcactacattatttatattaaggttaaaggaatggaaagttattcgagggagaaccaaaaatgttgtccacagaaagacacattcttcttccacaaccttgtcaccatgttaaagtgggtaccattttaattttcgatgagaatataataataatatgttttaaattattttaaatgagtaacttgcggcttaaatacttaagtttaacccccatttatttaagtttaaattttggacgataataatacctaagttatatttctaaaaatctgtaggtacctgaacgtaaaatttcaagttattatcacgtatcattttttattagtacatataaattatttttaaaaaaaattaaaatttataacttgaaccaattagtaattgccaatgtgataatttacttaatatttaacaactaggtacctacaaaacttccaaaaactataa

SEQ ID NO: 351281 - DNA, 790 bp, Cannabis indica
aaaaaaaaaaaaaaaaacttaaagcctaattgattcactctcactcccaatcgcaacaccttcatcttctttgcaaacccagaactcgaactcaaaagttaaaaacacaataatatatgataattagtaattacatatctaaattaaaattattataactaattagttgtgcatatatgcagtgtgtttgcacctgcaacctgtttatgtgaagaagataaggatcaattataactaattaattatgcatgtgatttaaagtgtacaagacaatggtttgaataagtgtggtcccacacatttggctaacatgagcaagtatgtgtctgcaatggtaattgttggacctagaattacttactcaaggtagcctcactatgaccccttaagattttcagtagttttggtcacttctgtggtggctacaatctatcagctctattgagatttttgtcaaggattgaagtcttctcaaccccaaataaaaaaagagatgatctaaattctcaaagaaaaaaaaaagcacttactatgttttagacttgtattttataaaagttacagattagacattttgttttattaaatgataaaataaaaaatgtattttttaaaagggtacaaataggaccctcaactgattttttgtcaaaataaaacttaataataatccgacctagaggtgttatgataaaactgattaaatttttacatctgttcatattaggaattgtcttcaagttggttgtattaaaaaaattatcaaaaaattgagctcagggtcctattt

SEQ ID NO: 351282 - DNA, 555 bp, Cannabis indica
gtttacgaataaggtgtgataaagagcccctcacatactttgccagctggagggaccaagaacccaaactatacttcctcaagttctgggattttgccacgtgtcttacttatgttgtcttatgtatgggaagcttttgacttttcatttgacccactcaaactaagagtgaacacataaattaaagacaatattgtcaagtgttggggagttcaagttcttaacagccaaaatgacattatcttattataaaaaaaatgacattatcttataaaaaaaatgacattatatgattgtgttgtggagcaaaattcgcaacaccaaaagtatataataatactaattataagaggaaattgtttgaagaacaaatgcaagtattcaacctaaaatggcgagtacttgagctgggaacgtaaatacttaacagaaaactggaaataacaagaagacaaagaattatagtggttcagtcagatcacggtctgcctagtccactgtagcaagagtctcgtaggtctcatttcgtggtggatcacctctttatatacaaag

SEQ ID NO: 351283 - DNA, 531 bp, Cannabis indica
agcaatcataagcgatgaagggagtcacttctgtaacaaacagtttgaagcactcctttcgagatatggtggctgtcacaaaactgctctaccgtatcatccccaaagtaatggccaagctgaaatctctaaccgggaaataaagatgattctggagaaaacagtgcagagatcaagaaaagactggtcaagaaagtcagatgatgcattgtgggcatatagaacagcattcaagacaccgatcgggatgtcaccatatcggttggtgtttggaaaagcttgtcatctaccggtggaattagagcacaaggcctattgggctatgaagactctcaacatggatttgaaggctgcaggagagaaaagattactacaattggacgaattggaggagtttcggaatgaagcttacgagaatgccaagatttacaaggagagaacgaaaaagtggcatgaccgaagcttagtcaagaaggagtttcaacctgggcagcaagttttactttttaattcaaggttgaaattgtttcc

SEQ ID NO: 351284 - DNA, 944 bp, Cannabis indica
aattccactaaatcagcactcaactctctatcttcaattctgatcggcatagacctaacccaccttttggagataacttattttttcgccaggcaataggttccaaacctgttatcataactatcaaacggtctacctaatttatcaaatattctggccgccacatatgaataagtggacccagaagcaaacaatataaagaaataagagttgttgaccgagagctgacctgtaacaactgaggggctagcttctgcatcagcctgagtaaaagcaaacacccttgttggagcgggtcttgcttcagtcttttgatcttctttcttgagttgcaaacagtctcttttgtagtgtccaggcaaaccacactaaaatatcctcgccctttacacttacccaggtgatgcttcttacagtttggacattttgggtaagtgtattgggttacaaaaccactctgacggttgctacgacctcggtgtttgaatatcttttactaggatctagatttactaacaagtatgttgaacaacatcctaaatatgaatatctctaaaataatgaaattaaacacataagggtttaagaaaaccttacattgattgcagcggaatataatgactccttccgtttaagatctctagcccttgattcctctttgtagcagaacattatcaagatttgaacttggatctctttctctccttcgagtttggttaccaccatcttactcattatgattaagtacttgacttgctatgtgtgggcacgacactcattcactcaacgttcgaatatggtgaagaacaatgaaggaggctaaaatcactaaggaaggaactctttcatctaggttgaaggcaatagtcaagatgacattagtttgagaaagtgtcaagtggatgagatgagagcatcatattcctttatagtgtttcaactag

SEQ ID NO: 351285 - DNA, 902 bp, Cannabis indica
tatttatgagttttcactaagttgtgacttaattgtgaagaaaattagattttactgtttatttattaattaagaaactttgtagagtctaattaataaataatataaatgacaattttatttgataattaattataattattaaataaataattttagcatttataggattaaaattaggaaatattgcatttgtgaaataatagataaatagttgaaaaaatggcaaaaatataattagtgggatccatctatatggttggccacttaagccctatttttgctattattttatcattttgtattccatataattcaatcctaaccctaagtgaaatagtataaaaagaataagatggtctcattatccaactaatgacttataacctagtttacaacttgtcagataactagagaattcttaagacttctttctttcttctaatttcgaaatctcattgagtgttcttcaacaaattttgagctattagtgagtgaatgcatgtccacccatagcaagtctaatactcaatcatagtgggtaagactgtaaagaatccaaatacctgaagaagaatcgggctcaaatcttgataataatctgcgacagaaagaaacaaaaattagagatttgagaagaagaagtcattatattccactgcaattaatgtaaggttactcaaactttatatgtgtttaaatttgattgttttagaaattcatatttaagatgttaataaacatacttgatagtaaatttagattttgataaaatataatccaacaatagcaacattcaaaactgaagaataaaatttaacttttcaacttcatttcaatttgtaatattttgaaataaaattaataagtaaataaacaagaggagtgctaagcaaactctc

SEQ ID NO: 351286 - DNA, 1049 bp, Cannabis indica
tgttactttaaagagaataagtatcatttgttttaataacatttctataaaatgccattataaagatcttttagtgtcatttaataaaaaaaatatcactaatttaccactattcagtttttactaacattactaaaaatgtgactaaaatattattcaaataaattaatattataaccaacaagaaatttttttttaaaaaaaaacaaaacacataagtaaatatcccaactccccaagaaactactagaaaattgggttttagtgacactccacacgtgtcactgaacccttttagtgacacttcaacgcgcgtcactaatgaggctgactggaaaaggcagtttttagtgacactccaaacgtgtcactgaaacctattgcacctcgcgttttgcgcgtcactataggggtacagtgtcatgttttgtcagactagaaaagcaacagccacttacatggagtgtcactatatcctatttttcttttttttttttcttttttattaatatttttagagatatagtgacacaccaaaagtgccactacattataatattttttaaaaaaatataataattaattattttaattcaaatttgatatattataaataataatttatattaattatatacaaatacaattaaatataacaataataattttaattgactaaatgtaaaatttatataaattagactattataataattcacgttaacacaactaataaatattacatattagttcattataccaataaatccataactataaaattatataataactattggtctattaaaacaaaaaacaactaaataaccgataacatatcacttgcccattagtctattaaaacaaaaaacaactaacgtcggtaagcttgaataaccgataacatctcacttgcccaatgctctttcacttcatcaatttcttcttctgtataatttgcatcacttaactacaaaatttaaagataaataatatattaattaaagttatcatcatatacattaataataataataataataatatat

SEQ ID NO: 351287 - DNA, 561 bp, Cannabis indica
tgggccctatcatgttactaggtttatcacagatgaaagaaattacaaaatttacctatttcaaattatttatatgatctattgagaattgaactatgattaaaatcagatatcattggatctgtaaacaagttaatcatagcaatttagatcaaataaataataggtttgtttaaaaaaaatttgaataaacaatttaaagcaaacataaaacaatgtaacaaatatttggaaagtagatgggtcgacgagttacctcaggtactttgggctcacagaactactaagaagacaacaacgtgatacactcccttcccactagcaatcggctcggaagcaatgttacccgtggaagtgaacatatcgattcatagacaagagttttatgatcaagaagagaaccaagaactcctaaaattatctttggtaatgcttgatgaaaaacgaactgagtcgcaagtcactaatgcatcgtatcaacactgacgagaaagggatcaaacccacaactttaaaaaattaaaaaaaaaaattaaaagtttttgatcaaacctttctgac

SEQ ID NO: 351288 - DNA, 1193 bp, Cannabis indica
ttatagcacaattggtaagagtgagattttgtgttaatgtgtgggtgctgggttcaattcttagctccctcacattttagctgttttaaaaattcaaaagtactggttaaaaggtttatttatttatttatttatttttatttatttaataaaaatataatattttaaaatatattcaatgcattactaaaaaaaatatataatataatatttaggaatagatctatagaaaattgttgggatttttttcttaaaaaagtacatgatttaaaaaagaataaatattatattataaatatttttggtaaggagcaaagattatgcttagtaaactaattttttaaaaattactcttggtgcaatcaaacggatataaaaaatttattgtaaatactaataaataaatcaaatatttttaaaaaataactaacaagaatagtataacttaaataaaaaaaatatatttattaattattatttatcttcttaaatttataaaagcttataacatatattaaaaaagttaacataatttttaacatactattgattttttttcttctacaaaagtcctaaaatatataacatttcaataaagatgctattaattataatcaaatattacgttaagttaccttatgtggtgagaaaaattatttgatatatgaagataaaagagttaaatgatattgtgtcaaaatttcaataataaataatatctcaaagcaaaaataaataaaattaaataatatttattttatttttttgtaaaaaaaagaagccccgttttaaatttcaccctcggcctctcagcatcttgagacgggcctgagcatggctggctagacctcaacctacagtccttgcatggccgaccaaacctcccctctaggtgtatgcacggctaggattaacctggcaagattctctatacatcctgatacgtggaatgcaagctacctgtgaattgggctcttaacagcctaacaaactggatggaaaatatctactttcaaggggcaatttagttttttgtattaaatcaatttaatatgtaaatatctaagggtttcagttgtatattagggtttaggatctcctatataaaggcttttactctaacctagaagacctatgtctaattctagcctccaaatcactctaagtctgaaaccctaatctctctctctctc

SEQ ID NO: 351289 - DNA, 639 bp, Cannabis indica
aacaaaacaaacggttcttcaccttctggttggaagattaccatcttcctcttgcagtcaatacttgctggagtatttagataggaaatctatccccaatatgatatcaaaatcggctaagctcatttctataaggtcagcacttaactccctatagccaattctgatcggcatagacccaatccaccttttagagataactaactctctctcaggtaatagggttccaaaccctttatcataactatcatgcggtctatccaatttactaaagattctggcagccacataagagtgtgtggccccagagtcaaataatacagagaagtaaaggttgttgaccgagagctgacctgtcaccactgaaggactggcttctgcatcagcctgagtaatggcaaagacccgagctggagtgggtttcgccggagcccttggtgctttagttctgagctgagggcaatccctcttgtagtgtcctggcatgccacactgaaagcaccccagccctctacactcacccagatggtgccttttacaactggggcactctgggtaggtatattgggtctcaaaattaccttgtcgactggctcgaccctggttcccccggaacctcttgttctgactcgagccacc

SEQ ID NO: 351290 - DNA, 601 bp, Cannabis indica
tatggatcaccattgatctcactcaaatgtcatagtttatgcttatattgactatttacgaggtattacggacctatgaaacagtgtgatcgccaccacaaatgttctaagatcaacaattacactaatcggtagtgttcttattgactttatgtagtcaaaaggcttaggtttatgtagatcttctttcatctcacctaaatgtcgtagtttatgcttatattgactaactatagggtatttcagacctaatcaatagtctgatcgacgcctgagatgttctaagatcaacaattacactaatcagtagtgttcttattgactttaaggcttagattagtatcgatcaccattgatctcactcgaatttaatattttaagcttacgttgactaattacaaagtatttaggacctaatcaacgacctgattgccacctgggatgttctaagatcaattattacaataatcgatagtgttcttgttcactttcctagtcaaaagacttagatttgtaacgatcaccgttcatatcacccaaatttcataggttatgcttacaatgactatctacaggatatttcgaccctaatcaatggtct

SEQ ID NO: 351291 - DNA, 723 bp, Cannabis indica
tgatatcgaagataatgaagggcctattatttgatgagggtcatgttatcgaaaaaatttcagttgtttaagatgtcattcaaaataatgataaaaaaaaatagaggctattccagaagtacctcctctaaggagatctcaaagacaaaagaagtcaacaaggtgtgatgataattttggttaacttggagaaggaaaatatgatattggtcattttatggatcttgcccttatagtgaagcacttcaaagtccacaatctttacatggatagaagctatagatgatgagattgagtttatgaagaaaaattatatatgggagttagttctattatattaaggttttaaaccaataggttgcaagtggattttaataactaaaaaggattaagggacatattgaaaggtataaagcacatttagtggtaaaaggctttactcaaagagaatgtattgattatactaacactttctaacctatttctactaaagattcatttagaattattatcgctttagtagcgcattgtgataaagagatgcagagtgagcaagtctatatgtctcaacttgaaggctactggtttgtaaattgaaatgatccatttatggtctcaaataggtatctcaccagcggtacttgaagtttgataaggttctgacatcatttgatttcatagagaacacgtttgactaatgtatttatatgaagatcagtggga

SEQ ID NO: 351292 - DNA, 1225 bp, Cannabis indica
gagaatctcaaaaggtcctgtaaacgtagggcataactttcctcttttctcgaaacgtctaactcccttcatcggagacacccgtaggaatacaagatctcctacctgaaactttacatttttgcgcttcagatctgcataactcttttgcctactctgagaggcaagcattttggccttaatcttttctatagcctcattagtctgttgcactgattctggacccaaatatttcttttctcctgtttcatcccagtgaatgggagatctgcacttcctgccatataacaactcatagggagccatccctattgtactctggtagatgttattgtacgagaattctatcagtggcaggtacttgctctaggagccatcgaaatccataacacaggcttgtaacatgtgttccagtatctaaaattgtcctttcggactgtccatcagtctaaggatggaaagctgtactgaatttcagtttggtatccatagctcgctgaagactctaccaaaacttagaagtaaacttcggatctctatccgatataatggactttggaacaccatgtaatctcactatctctttcacgtataattctgcatattgatccactgaaaatgttgtttttacaggtagaaaatgtgtagacttcgtgaatcgatctaccataacccaaatcgaatcgtgcaatctcgtggttttaggtaatccaaccacaaagtccatggtggtatcctcccacttccactcagaaagtgtcaatggctacaataaacctgtcagtctctaatgttcagccttgatctgttgaaaagttaggcaccaggatacaaattctaccatattcttcttcatcccgctccactagaagtagggtttaagatcttggtacatcttggtaatgccatgatgcaatgaatatggagttgtatgggcctcctcaagaatctcatttctaagttccgcactacatggaacacaaaccctggtcttaaacaacatcatcccactatcggataccgtaaaatctttggcttgaccagatgaaacctcttctcgaatattcactaactctggatcatttaactgagtagctttaattcgttccaacagatcagattgcagcgtcaagttatgaagtttgcctacaacaaactggatgcttgatctgaccatgtcttctgctaactgaggtgaaataataatcatactagttatctgccc

SEQ ID NO: 351293 - DNA, 806 bp, Cannabis indica
aataaaaaatacacaatgcctaataactaaattttaatttacagaaccaatttttttattttaaaactttaactagttgataaatataaccaagttctttatattatgttttgagctattgtgtgttattatttgtttttatttattctgttatgaaactaattctgtttatatttatgcctcaatatttttggaattgatccccatgttttttttaaaaaaaattagaaccggttttatgaggtattatgtgttattcgttgttactcattttgttgtggaacttagttttttttaattatattttagtgttttaggaactgagttcctctttattgtcttaattataactggtttgagttattatgtgttattttttttattcattatgttatagtaccggttctattttagttgtaacatgtttgagttattttgtgtaatttatttttattcattataacactgttatagaaccggctctattttaattataactagttttagttattctgtattatttatttttattcattataacactgttatagaatcaattctattttacttaaactatttgagttatcttgtgtttttgtatttatttattatgttatagaaccggttctactttaattacaactggttttgagttattctgagttagtttttttattattgttgacctcgcttttagccaacgacagtgagtctaattttgtaagcgacgagtagtttaatacgaatgaaagatagtaaagcaaataaagacacaagaattttatagaggttcagccccgagcagt

SEQ ID NO: 351294 - DNA, 528 bp, Cannabis indica
gttacaattagataagaacaatacataagaattacaaatttaaaataatcataacaattagataaaaatacatatgaattaaaaatttataatattagtcttaatatgagctaccgagttttcatgatcttttttttgctcaggagtcatatttgatgtgtccaagaatagataatccatgtatttttccattacttttttttcttgtaccggcaccaatttctctaatgcatttacttttcgttgattaatatcataaaatgtagcaagttgctcatcttgctttccctttccctttctctttgccgccttttggccaatagggcgctcttcatgaacttcacgatcactgatgtctgcattggatgatgaagtatatgcccctcatcttgacacttttactctcttaataccttctgattggtacattgcattccatttcggctcgtcttttaacaatctccaacagtctacaagaaaatttgaattgttattttcagacttgtacatctcatgtgcattctcaat

SEQ ID NO: 351295 - DNA, 804 bp, Cannabis indica
taattatgtagaataaaataggtcttcgtttataatatatttatatattatagtattttaatactttatttagccccttgaatgaaatcttgggtccactattacgtcattcacttttttttttttttgaaagaagtgttctttattaaatgagcaatcgctctcaaggatagacatcaactccataggaacactattcatagaaaacatgcgttcagctagagaaatagagtgttgggcaacaaaatgcgcagcacaattcgcagaacgcttaacaaacaaaaacgaaacattagacaaactctcaagaattttcttgcaatcttccaccactgaaccgaaggaagaaataaacacctctgcactacgaatggcttctgcacaaacgaggctatctgtctcaacaatggcctgagtgaaggagtgatttttcagccaactcaatgcttcccatatgcccattacttcggccaaatcgggagaaacactgctaggtttcacaccagcaaaggcagcaatcaaatatcatattgaatctttactactactaaaagaaatgcaatattttattaattattttttctagaaatgttatagattttattttttcgtagaacatgaaaacgcaattaattttacaaaaatatcatatttgagattttgaacactaaatatatcttaagggtgttcgcggtgcgggtggtacggtttttgactatttttttaaaccaacccgcacatgcagtttttcaaatttcccaaaccgcacccgcaccgcgaaattaaaaacccgcaaaaaccgca

SEQ ID NO: 351296 - DNA, 1240 bp, Cannabis indica
tgtctattggggtataatatgcacgtatggaaggtttggtaaggattggaaacgatttggttaggttttggagtttttttttgggtaatttggtgtaaaccggttacccggactgctgggttccccaaaaaatttgtattatcgattcgtgttagttttagagctttggttagttaattcccttttagtttagggtattgccatgaattaagttgcagtagataggtttttgatttaaaacctaagtccctggttgtgatttattgtgtcacttatccatgttgtgattgatgtgatttaggagcctgtaattcgccgagcagttgttccactcaggttggccaacacacttgaattcgtaatcaaggtaagactagtataatgatatacatatgtatttacatgtttagtgtgcatgttagtttatgcatgttaaagtacattgatagcagtaaaaatatacgtagagttgtattgattactgaaaaatgtatgttggctaaaataatgatcgatgctgtcacattaatatggctagagtatgactggcatattgagtataggatgacattatggtcgatagtattgtcgtatgaacgttctagattcagtaccgtgtgggacacgaggataaggttatggtcgggtgtatagacgcctgattataacctgggatattattatgtgctatgttatgcttttcttactgagttcgtcgactcacagtgctatttccatgtgtaggtaaaggtaaggttaaggctgagtagctgtgagaacgagcaaatgtagattgtacatgtcggggtagttaggcttggagcgtacgatctttgggacatcatggtttttgttgtatagtcgttaggtgacaaaattttgtatatgaatagttaaactattgtaaatattttgtgaacgggatcctaaaattttataagtacattactttatgtttctaattaaataagaaaattttaattaatcacgtttttcgttaatctcgttgattagcaatgagctgcacagtacgttaaaaatcatgctaacatgcctaaattagttagggtgttacaattttatatcggagctgccaggttgtctttcgaagatcgtcacgacatgtacaatcatcatcaacgatcaactcatttcacagttcaataagcttttattactttagtagtttatttaaatagtatgatttaagaaaagcctgttaggaagcatgttagtagcc

SEQ ID NO: 351297 - DNA, 1082 bp, Cannabis indica
gtccaatccccggtcacgagttccactcgtgggccaagaggtaggcagacagaccttgtttgggaattcatcaggaggggccatgctcgacggatccacgcagaataatggagccattccacctgtcaaccaaacaaaccaatcgctaagacagccagtttcttctgtgttcgaaaggctgggaacgacccatgacctaagggacgatctaaatagaagaaggggaacagacgagcagaatactacagcaaacgtgcagcatggagcccatactcaaatccctgctcagaaagacgctgacataatccaactcgaccaaaatgccaatcaagtcagcccagccgtacaggcccagctcgacgaactgaagaatatgtttcatggcatggccgggcagcgtaacaatgatcttgagttagaccgtgcacgcaaaactcccttctcaccagagatcaatctcctgccactaccccacaagttcaagatgccaacgtggaagatgtacactgggagagaagatcctctctcccatctcaagtattttgagatgcaaatggatttacaaggggtgcgaggagacgtatgttgcagaatcttccccgccactctgtcggaagccgcacagcaatggtatttcaagttggctcctggaaagtttagttcatggaaaaccttctcttcggaattccatgcacaattctcttcctcacgccaactcccattgcatctgggagatctggtcgaagtaaaacagcgaccaggcgagccactccgggcatacatcagcagattcatgacggaagcgaccaaggtatcacgggtaaccgaggatggaaagttatccgcgatactgggggcattgaagtccttggcgaactgtggaaggatataaggaaaaacggaccggtcgactcaatgagtgatttccttgaccgggccgaaggtttcatcaagctcgaagaagccattcagcaagcagaaggtgagcaaaagccgagcaaaacgaaggttccttccactggaacgtccgcccaacttccccatgattccagcaattcaagtggcaagcgttcaggcagcaa

SEQ ID NO: 351298 - DNA, 512 bp, Cannabis indica
taggatgttaatcaaacatacttgttagtaaatctagatcctagtaaaattaattccaacactagtaactaatcataaaccttatactgtcatcaatatgcaaatcaaatttttagggaggtaagtttggatacaattcgaaaattcgcttaatgatctttgaacttcatatccaaatatttctccacccctatcagttcgcaagatctttaaccacttatagggacacctttccatatctctgtaatctgatccccaagctatagggattcccttgatgactcactatgcgaaagctgaattcgctaagtgtttgtcattctgcacgggttgatcattgcttcgtttgagcatgaatatgaggtatcctgttcggcttgtaactggcgagcagatacccgtagttgattccacgtgtcaccattgtgtgatgccacgtcagagtgcacaatttgggataacaacatcataagcagatgaattataaaccattcatccaatgatataatatt

SEQ ID NO: 351299 - DNA, 550 bp, Cannabis indica
tttttttagagaaatgttaaagggcaccagtggtgcttagcactctcctatgtgtcaatatcgctattggtccaactaagtatcaggtcccatatagtttaatataatagcttttagggagtatcgctagtcaatcgcaacgcgatatgtcgagaaggtgctaagcaccattggtgcttaataacaatgctttttttttaattaacacttttaactacaactatataaacttttttttttgatgaataaggaaacttgtattgctcaaaacaaccaatttacatcacatgattttgtacaaacaccattgatactactaccatctgctataactctaaaaactgctataaatctaaattctgctataccactaaattgtctaccaatttacaaattcaattacaaacacagcacccaactcttgtcctcatcctttgctttgcttggccaaacccccaaaatccttctcttgctgtcctgctgcacccgattgacaattactgtggtttgccactgtttttggttccatagcacatcattgcgtgcaccc

SEQ ID NO: 351300 - DNA, 654 bp, Cannabis indica
gttaatgtaggttaaaatagaatgtctggtcaaatcgattctaattttgaggatgatgttgattttgtgccatcaaatacaaatgaagtacaatctgttagtattacagtagatgaaactcagaatcagagaaaaagaacttctggtgcatgggatcatttcacacggcaaaaaattgatggaaaattaaagcagtttgcaagtattgcgagcgtaagctggtgggagacagttggcatttaaattctcacgtagataggtgtccagtaagaaaggcccaacttgccgctaatcctagtgcaagtgcaagcccttcagtttcttttaatattgatcctgatttaggaaggatcaaattagctcaaatgattgttaagcacgaatatcccttgtctatggttgagcatagcgagtttatagaatatttaagcactttatgtcccatgtttcaaatggtgtcaaggaatacagttacgtcggacattatgaaaatgtataaaactgagaaagaaaagtgcaggcaaactttggaaaaaagtaggagcaggaatagccataactagtgacatgtggactgcaaatcattagaaatgggaatatatggctataacagctcattttattgatgattcttggaacttacacagtcagata

SEQ ID NO: 351301 - DNA, 566 bp, Cannabis indica
aaaattggtatatcattagtggcaagtaattttttttactaatatataataccatgattatattcttactctcactgaacttgtgatgtataaacaattatcaaaagcttcaatcacaaaaataaatgagaatacttaataaaaattgtgttattgttgacgagaagcttacttgacactacaagaatgccaacttttgccggcgctattgagtaattgcgccgacaaatgtcaaccaatgccggcgcaagtcaacaaatacgtcagcaaagaaagtcaacaattttttcccaccacaacctcttaccggtgcctaatattgctgacaatatccaatattaccggcgaagtacacgaattgcgccggcaaaagttggcaccaaaccgccaaaaggtgggaattgttggcggttcgagcaaactttttccggcgagtttacatgcgccagcaaaagatgattaatttattttttaatattatttacttttgtcggcgcattttagtctgaaaaaaaggcggtcaatttccctcgcagtgaataaacgtgcgcgcaaaagtaggtggg

SEQ ID NO: 351302 - DNA, 562 bp, Cannabis indica
tactaatcttacctcgattccgaattcaagtgtgtcggtcaacctgagtggaacgaactgcacggcaatttacaggctcataaaccataacaatcacaacactagataagtgacacgctaaatcacttcccggggacttaaacttgaaactagaagtttccctatcgataaaaacatggcaatacccaaaacaacatgaaaatgggaaacactagggttcccaaaaaacccccaaccggcagaccggttctacaaccggaattccggttcaggaaattcctgaacaccatccagaatttcggttgctaaaccagaattccggttcacagcaagaaacacacaaaattccataactcactcaaatcaaacccaattcataccaaaccttccagacctgttctaaatatcccaataaacattttcaaagcaagaaaaccaagcttcatgcacaaaaacaaaaacaaccatgtgagctccaagctttgagttcaaaacttaaacttggctaaatctcacctacaagcatcaaaaccagcttaaatctactcaatcatgcatataa

SEQ ID NO: 351303 - DNA, 637 bp, Cannabis indica
tgcactcttgattacatagaatgatctatataccaaatatggatacattatgaattatccattgttacaatataaataatcaattatcccctatagatggtttacattgagtagggataaatttaccattttaccatccagtgtattttatccttaaaacacttagctaattgtaaatgatatttcaataaactaatataattactgaaatgagtactttatcatttatcgcgttaagccaagttctaagaaaactatcgcttcacttataatagaagttatagattctatatctatgattaacgctttcacttaattgaactactgaattcccaatatgtaagtattgtgccgatcctattgattagctgtaacgaacaagacaaagaactcatatactacaattacgctagaacataatcatcttaggattaagattaattgattaagatcaactaaatgatattgacttagaaaagacataaaggtaagtttttaatatcttttccactgtcaatatcggtccagtgtgatgtatagctgatacatgtgatactactttactttactaatgacctggaaaagacattccacttatacaggtgtaagtaaaccacatcattgattatcacgtcag

SEQ ID NO: 351304 - DNA, 1061 bp, Cannabis indica
atcgatccatattccttttatcttgacacatgtcctccactaagatcgcaaccgaattttgggtataacagtataatttaggaaacctaaaaggggttaatgtcattattcactttgagacagttcttactcatgcgttgagaaaaagcccaagaactcattattttgctttatcctaattaacccacaatgatccttgtgtatggtggaagatcaaggtgtaagtttgtcatcaccattataggatacaacttacgaaaaagattcaaggataccctgatatgctttaagaggtaaataatccctttcatctttgtatttcagattaaatatatgtacatatggagatcctagagtgtcgtacaatgataatctattaaatacttctgttgcacacttaatttagattttatatatgtacatatggagagaaagctagaattatcccataaatttagggatatttctgtgacttgcaagttagaaactatatgagacatatcttctaaaattatcatctcacatccactggttggtgtatgcaagatgcatgcatgatggaagatggtcagatgtttcagcttctattatgactttaagtatcaaatctccctgaacggctcattacgagtagaattgtccgtctaggttccaagattctctccacgagtcatccaaatggatgccaaatcacattgtgtagaatttaggataacaagatggtataaattgttggagtttattttaccaggatctagatttactactatgtatgttgtttaacaccctaaatatgaatttttaaaataatggaatttaaacacatataaagtttaagaaaccttacattggttgcagcagaactaaatgactccttccactcagatctctaacccttgtatcctttctgcatcaaagtatcaccaagatctgagcccgattctccttcagttgactggattcttcacaatcttacacactataattgagtaccaacttgctatgcgcgcgcatgtactctatcactataaggggttcaaaaattgaagagagagagagag

SEQ ID NO: 351305 - DNA, 670 bp, Cannabis indica
gattatattgagatatgtggctatcggggatacacaatttttaaaataaaaatattttattcgggctcggcgattgtagaaatttagcgatgtggtcagaaatgtcacgacattaagggatagattattttgaggatattccagactattttagaattttagaatgtcagtttggtggattagtaaaattaccaaaatgccattaagttatttcaaagtttaatttgcttctaagggcgaattagtcattctttaaataaacttttttttgtccctttctatttttattttagggggctgattgtatattaaaaaaaaacgaaagaagaaccttactataaattacttagaagctaagtaaccactaaaaaaatacaacctccactcttcctctctctcgtgaaagctgcttgaaccagccgacacctgagaatttttttcttcagcaagtgtcatttcaagctaaatctaaccccaagccaacctagaatcttgaggtaagttcgtcctcatatttttggtgatttcataggtttctaaagctaggttttgatagtttttattagttttcaaggctgtagggttagataagttctgagtatgatttcttagttgaattaggtttttttatacatgttttagttgatttcatggctgtttggattgtatt

SEQ ID NO: 351306 - DNA, 1100 bp, Cannabis indica
aatttacaatctcaagaagtttttgatactaagtacaaacaacaataaaagatgaaaataaagaagactattaagaaagggtaaaagaaaagtcaaacactaggcttggtcccctcttctttcttctttgttgtacttcctgctgcaattaaagctcctccagaaaaaatgcagctgctcaagtacgagatgatgaagatgataatggtgtacttcctttttttctcttcttttagatgttgggtttttagggtacaaacttcataccccaaaatagaagcccaaacttttccactttggcccactagggttagacccctttcttccacgtcagctggctggtgtaatttgagtgactggaccgaagttgctgaggtggataagtgaaattcgtgtttccacgtcactgccaggatgctgaattcacttcagcattgcttcagcaatcagcccaatttcagcttgtgctccttttcttccttgcttctttttcttttacctatcaatttaattcctcctttttcaacaaaataagcacagttaattggaaaaacacacccaacaatatcaatatttacaaaacttaaaggttagattactaaatagaaaataacactaaaactaattaaaattaagcaaaataaacacattttcactactctcctcacaatactttagtttaaaagcataaaaattaactctataccatagagttatcaacagtcctggaatctaaaatcctagttgaggatgtcaacttgagcgcagggtgaaaccctaggttccaggttaacttcagaggtgttggttcgtgtattttcagttcctagggcctcgatttagttgctccatgtgttcatggtacaaaatactaaaagataatgggttgaaaataagttatcgaagtttgaactttcatttggaagttcccaaagtcaacttgggcacagggctagggacccctcctaggtcgacttgctatgattcgagactactcaactctgagatgttttctttcttgccacatgtcaaacattgatgtccataacatcaggactacttttggtgtaaacaatgtaataaatttgttataaaatatg

SEQ ID NO: 351307 - DNA, 796 bp, Cannabis indica
atgccaccaaaccttccagagtacctaaacaatgcatagacaatattttccaaccagtatttcacagaaaaactcaatgaatcaaattatgccattagagatcaaagctttgaactcaaagctcaaacttgcacaaaacttaaaccaaacaccaaaaccagctgctaggaactaatttcaactcaaatgaaccctaaaattcgaaccttaaacatctctaaccctaacagccactaaaacccaaaatcacatattcaaaccaaatgaaacttcaagaacttaagaggtaaagatgctaagcttaccttggcttaattcctcttgaatcccttgctgaaataatcaaaattcagcaacaaactccccttgctttggctggttcgaagagagagaggaagggaagagaggtttccttcaattttaggttttcttttaatttccttaattgcttcaaatgaaaagagattaatcaatctcttgctgaaattagtttagctaggtgtcactaagctaggcagccacctcaaccttcacttaacaaaatgactaaattgccctttaacataaaattaaggtatttccaaaactaggggtaaaatggtcaaacaccataacaccgcttaaccctaacactttattttctcaaaaatatttcccactaagaaataaggttctaaacttacccatgtgatcaaactagccatccattgcattttccgttgttgttgagcaaaaattacaaaaattgcatatttcacatataagataaataatacccctagagtttaataaaatc

SEQ ID NO: 351308 - DNA, 724 bp, Cannabis indica
cactcccactcaatcatactatcatgttctcaaaatatacgtatcactagggctgttcattggatcacatccaatgtttttggactcatccaaatccaatctaattacacattggatgttggattcctccaaccgatccaatccaatactagaggtcaaccgaaccgaaccgatccaatgaaacattggattggatcggttccatccaatggatgaatccatgtattggatcagattcatccaatacttttgatccaatgttttttgtactaaattggatccatccaatatttttaatccaatattaattggattgattggatccatccaatccaatccaagagtaaaacctgatttttcacctaaaagactaatatattagttcaaaatattacaacccaacataaatccaacctaattataacataagtccaacataaatccaacctaaattgcaacataagtccaacataaatctattctaaaccatttcataagataatacatgttacataaacaagagtgcacaaattatgaatatcatagaatccttcatcagtccaaactccaaagtgacaacgtcactcaattctgatatcaccaattccagccaatatttctgcaaattaaaaaaaatgataagtattcaatattaaaaataaatataaaatatggtaaaaatataaatgcatttaccattctctaatgcttccacttcttcaat

SEQ ID NO: 351309 - DNA, 557 bp, Cannabis indica
tgataagtattcatattaaaaataatataaaatatggtaaaaatataaatgcatttaccattctctaatgcttccacttcttcaattgttgcagtgatatcaattgctattgtattgcgaatccaattttgagtacatatgagtgcttgtacagctttaggagttaaacaactcctatatggatcaatgactcgcccccagtagaaaatgcagattctgatgcaacagtagacacaggaatggcaaagatatcttgcgctatctttgaaagaatcttaaatctaccagcattatgtttccaccatttcaaaacatcaaaatcaggattttcaaagttctcacatgttggaatttattttaccacgatcttagatctactcacaagtatgttgtttaacaccctaaatatgaactttctaaaacgataaatgaacacatatgaagttaagaaaaccttacattggtcgcagcggaataatgtctccttccactcagatctctaacccttgtatcctttctcccgcaaagtattattaagatttgagcccgaatgtcct

SEQ ID NO: 351310 - DNA, 729 bp, Cannabis indica
aattagttatgattttttaaatttggatgaaaatatctaattttgggatgcacgtgtgcgcgtggcgggggtgagtgtgcactcggacaacacgcgttttcagacaagtgcctgaccgaggttacttggacaaggcccagtctgaagggctgctcacgccgagctccctcagccaacagaggctgcatgcaacctgtttcctcggccatccccctccatctgcgtgcgcaggggtatgcattgcatacccctgtgcccaattttatttttatcatatcttttgattgaaaaatcatttttcattgaaacaaattcaaattttggtagaattttgtgtagaatctgaatttttaattaaaaatctaattatcagagtaaaattaaatttttattaaattttttaattaattaaaattagttttagatataagtagcctttgcatttgaaaatttgagttttctacaaattggccttatggttaattttgaaatttttgattgttttatttattttaattataagatcagatattacttattttattattaaaatttgaaatgatcttattttgatactaaaatattaataaaatttaaaaataatctagttaaaatttcaaatttgctaaccatattagattttcaaaatttgttatgtttgaaatatattttattaaattaaattataagattagaaaaaatgtttttttttttaaactattttatttt

SEQ ID NO: 351311 - DNA, 508 bp, Cannabis indica
tttgttttaattgtaatcggtttgagttattgcgtgttacttgtttgtattcattatgttatataactgtttctattttagttataactagtttgagttctttcgtgttatttatttttattcattataacactgttatagaaccggttctattttaactataatggtttgagttattttacgttatttatatttatttattatgttacagaaccggttatatttcaattataaccggtttgagttattaatttttattcatataacaggttatatttttagttatatatgagacatttactttggtgacttttccagcgacgttgacttttccgttaactttttcggcgacattgactttccggcgacttttccgaggactttttcggtggtcgtgatttttccggcgacttttttggcaaaacttattgttgttttgcaaaaatgggatttctacttttttttacaaaaatatggcataaaaaaaaactcatataaatgtaaaaaa

SEQ ID NO: 351312 - DNA, 638 bp, Cannabis indica
aatgtaaaaaacaaaaaaactcataatcacttagctttatttatttatgccataaaaaagtaaactcttaaaattttcccatattttgggtaatttttactaagcattatgttcttttcttttgttattttagaaaattggtttcacattatgaaacttttaactggttgataagtgaaattgggttctgataatttaattttttaagctatttgttaaaaaaaaatgtgttatatttttttttcttcttgactaacttgtttttgtgttttaattttttttattgtttcgttgttttatgtctgttcaatcgtttacgtaattgatttctctattttaaatttttaattagttgtttaatataattgttttttttttttttggtcagatttttaattatttgttaatgtaattagtttctttttatatgatattcaattggttgtttaatgtaaatggtttctctgtgccaaattttttatctaattagttaatgcaactcgtttcaatgatttaagtttattcatcttttaagaattctcttattatggtggcatgctttttttttaattaactagtttttctgtttcaatatatcattttattattttataggtttcttatgtttttgttttaat

SEQ ID NO: 351313 - DNA, 1033 bp, Cannabis indica
aaaaggaaaaaaaaaaatagaaccatgagtagctagctagtactacttcgttttcgaagttttttaaaaattatcggttaaatttctcaaaccccactaaactctacgttttgtgaatgaaaggggtttttcatcattgcttggaattaatagtgatttctctctctatatatatactagctaagctattgaatattggagaaccaacttcattgaatatacattgatatttattgacatttcttataaaagagacaagagttttccaccaaaattttactgttggtaagactaagaaatagcgtttaaggggttttcttttcatatataattcgatctgttacgtacgtacgtggagtgcatgctctcctcaacaaccgctatatacaatggatgtagtactctgcatagctacctcttatatatatcgatctttttctttctaattaataatatacaataaaattcaaatataaaataactgtcatatcgatagctaatggataactaaaatgaagtttatatatatatctttatgtataaaataagattatttaactgttttttaagtttgacgaaatatattaaaaatataaaaatattcagttaaatttaacggtgttatataataagattaaaaatgcacagtcaagtgaagaaccgaagactattgtacagatgatcaaaaatgtatgtaaaactaggatacaaagtatatgacctaagaaagtatcaatagaagacacaacatggtttagtgaattgtaaccaatagaaaaagaaaaaaagaaaacaaaccttagtttataaaaggtactgaataggttgtaaaaagtttattgaagtaatgaaaaacacgtctgatttcctaaaaaaaaatattatttattttaatttaaatatatataaatatcaatattatttgttttaagttaattaaacttataaaatattcttaaattttatatttctttttctcaatttttaaaaatttaaatattattttatttatctcactatttaatatatatat

SEQ ID NO: 351314 - DNA, 859 bp, Cannabis indica
gtatcgctagccaatcgcaagacaatacgtcttaagtactaggcacaccactggtgcctaatagcagtgctctactcataaataggtagtattaagaaaatttgatgctttatgtttaatttttcaatttaattagaaattctttctttttaccgtataaaaagtttttcggtaaataaaaagataaaattttttaatttaatttaaatattttgtatataaatatatttttgatagtataaaaaggaatatttttgatatataatttttaattaaatagcatagaaatttaaatttctcttttattatttaatgatttaatatttttaaaatttatttaattataaccaacagataattatagaagatacatggaaagtattttaattatttgacaacgttaatatataatcatcactttttaataacatattttttttcgagtgtggaagttattattaataacattaaacatatatatgattacttgtaacaattactttaaaataaataaactttatactaaaaaagaataaagccatattatatatatagaatataaaataaaacctttaattactttaaatataattgagcatctttctttatatcttatatatatttgcaaaaagtctgacgtaatactatgcttttctttcatggattgcttgataatacatttacatagattatattttatttgtatgtaaattcaataatattttttaatatgacacttgtggaacacatttataaatgaatattatagagaaaaagaaaaagaataatatacaatagatttgaccaaagctcaaaattttttatcataaaagtcatttcttctcttacatggacacgt

SEQ ID NO: 351315 - DNA, 901 bp, Cannabis indica
ccaaggtgtaagtatactttatcgctgactatcacatcagtgtaaatccagtgcactgatgaatcaagggacattatcttttgaagcatataatcacaattaccttccactgtgttgacatcactgtaattgtgaataactatatgttctggatttaacagattttgtacacattaaaccataaacatgaaaactacatgtaaacataaataacttctaatcttctattgataacaaatcagattaaattgaaataggttttatttagggcataaaatcccaacaatgtttccctagcattcttcagcctatacggcatgaccttgtagtagtaaagttccatgttgattatgaagctcgtatgttccagatatgggacatgcatttttatctggttatatccagaatatgcatccataaatgacataagctcgtgcccagcagttgcatccaccaaatggttaatcttgggtagtgggaagcagtcttttgggcatgccttattcagatcagaaaagtcaatacaagttctccaagtttcgttaggttttaggtcgagaataggattagctattcacgaggggtaaaacaactcgcatataaagtcattgactaacagcttatccacttcttattttagcgccccttgcctctcggaatccaagggtctcattttctacctctttgctgggtagtttagatcgacatttaaatgatggcagataatattatggtcaatccctatcatatctccacggttccaggtgaactgatcctagtttgcccttaagaaacttattagctgctatttcaactgcttgtccaggttcttcccaacgtaaacacactttgtgggatttcctgggtcgagaacaacttcttccaattcttcaattagttt

SEQ ID NO: 351316 - DNA, 999 bp, Cannabis indica
gagttgttaattaaagtaccaattagttcgggtaacacatacatcttgagaacatgatagtacaattgagtgagagtgctaatcattgatacagaatctatagcttctatctagacatagaagtgaaatgatgattttcttcgagctaattggcttaatagagataaatggaagagctcttatttcagtaattatattagtttactgaaatatcatttatagggagctaagtgttttaaggataaaatacatttaggggtggaatggtataaatttttccatacttgatgtaaatcatctatagagaatctttgattattgggattagaacgatggataatttcatagcgtatctataccgtggaacatatagagtgctctatataattaagagtgcaattccgaatctatagtggcgcaaggaggaatattgaataagttagaaaatttacttggtaaattctagatttgcttattggaagctttattatatagccccatggtccccacactacttgagataatactgcttgtaagactcaattaattaatcaattataattctaaaattagactatgtcttatttatgaatgttcactaagcaagggcttaattgtgaagaaaagaggttttatggtttatttgttagttaagagactttattaagtctaattaataaatagattaaatgaaaattttatttaataattaatttaattattaaataattagttttgacatttaaacgattgaaattggaaaatatggcatttgtgaaacaaaggataaattattgaataaaaatgacaaaattctaatttagtggggcctatcttatggccggctagttaaggtgaattttggccaatttttatcattttttaatgccatataatttaaatctaactctaggagaaattttataaaaggaataagaaagttctcattctatccaactcagtcattctagttttcattctctgtcagacaactagaaa

SEQ ID NO: 351317 - DNA, 576 bp, Cannabis indica
aatagttaaacaattattatacaccatgaaaaaaacttaaaaaaataacaactcactttttctgctgagatggaagactagcaatctccataactcttagaggagctttcgggtcgaaacctaaattaggaacattggacctattcttccaaaatctaaggcgatcaaaaaataaaaggagcaaaacagaataagccttcattgcattctttgctgcagaattcattttcgcagtcctcaaagaattataaagaaaaatataatcccctcattcaaatcaagaaggccaaaaatccaatggctttctttcctaagatttataatgaataggacatggttggcttcataccaaagcttagaacaaggaaatcgcaagcctctgatataatgcactattgggtgagcagcatggatgagagacatctttgttttcattgacttgactttgcagaatttgtggtataaagattgaatagaatcatcgaaaaggcaatctgttgtagcgaaattcacaataacaacagaataatatttccttttttttcctaaggtaatagaatatagtattcatatgct

SEQ ID NO: 351318 - DNA, 459 bp, Cannabis indica
tgtaatttaacgtatagttattgtaatatcccgaaaaataatatagtattttattggacatattttattaaatatgtaattaattcggtaatggagagtaagattatgatcttacttggtgtaattagggtgaatttaattattgattaaataagcgtaatttattcattacggagattattttagaatatgtgggtgttatggatacaatttttgaaataaaaaatattttcagtcccgacgactgtggaagctcggcagagtggctagaaatgtcacgacaataaaggatggattattttagaaatgttttggactagtttagaattttaggttgtcgattcggcggattagtttgaattaccaaattacccctagatgtgatttaggtttaaggttacttaagggggtaaaagagtcatttgtggaggattagtgtttgactttctatgttttttt

SEQ ID NO: 351319 - DNA, 602 bp, Cannabis indica
tttctctgttgttgtaaatgattttaatttataatggcagtgaatttctcaaatatatatatatatatatataaatttaaatcagtataacatgtaaaaattaaaataatgttaaggtagggcaagagaataaaggtttacatgagagaatgaaagtaaaagttggcacaagataatctaatttttacattgaatactgtaaaaaactataaaaataaggatatttgtttagatttttttaatagtttgtataaatatatatatataatttttaaattttattgattatttacggttagaatttttataatatatatctattctatataagatgtgataacaaaatttttggtttaacgattctttttaagtttttactttaactttaacagaatatcctattaattaatagagtattttttatgaattttataatattattatatatatttaaaaataaaattatgtaaatattttatatagaaaagttttaatttaaatttaaaactatttaaaatattataaatattttgaatcatattttaaaatttattaatttaactttgaattaaaataaaaaaaataatataaatatttaattt

SEQ ID NO: 351320 - DNA, 701 bp, Cannabis indica
ccaaactgagtcgtacattcctgtggttctaggcaagccaaccacaagtccattgcaatgtcttcccacttccattctggaagtgttaatggctgaagtaaccccgccggtcgttgatgctcagctttgatttgctgacaggttaagcatttagtgacatagtccactacatccctcttcatcccataccaccagaaatagggcttcaaatcttgatacattttggtggttcctggatgtaatgagtaaggggtagtatgagcttcttctaaaatttcctttttaagctcactgaaatcagggacacacacccgtgctttaaacaacagcatcccattgtcagaaatggagaagtccttagctttgcctgctaagacatcttctcgaattttaaccaattcagaatcttctaactgggccattctgattctttccaacaaatctgactgaagtgtcagattaaataatttctcagtcaccaactcaatgtttgctctagtcatttccgaggctagctgagaggaaatcataaccatgttggatatctgatcaggtccttttctgcttaaggcatcagccacaacatttgcctttccaggatgatacaggatttcacagtcatagtcttttaccaattctaaccaccttctctgtctcatattcaaatccttctgagtgaagaaatacttgagactcttgtg

SEQ ID NO: 351321 - DNA, 722 bp, Cannabis indica
ttatggattttgaccattttacccctagctttggaaataccctagttttaagtctaaagggcaatttagtcatttggtctatttgaggttaggtggctggttattttagtgacacctagcaccccttttctcagccaagataagttaagtaaattactttacttaattaagaaaaaagaaagaaaggaaattggaaaattagaaaattggtgagaagctctttcttctctctctctctctctcttcgaaggcagcaagaacaaggggaaggggctgggatttttctgtgttttcagccatagattcaaggggaatcaacctaaggtaagctctaatggaactcttctttagttttcaagttttaagtttaggttgaatttgtgaaattgaatttcaggggctgttagggttagaaatgattagggttcgaattttatagtgtatttgagttaaattaggttcctagcagctggttttgatgcttggtgttagttctaagcaagcttgagttttgaaactcaagctttgagctttaatggcataatttgatttattggtttgttctgtgaattactgcctggattttattgtttatgcattgtataggtgtactggagagtttggtaaggtttgggattgaattgaattaagggggttgatttttgtgttcccagcacagaaccggtcgaccggttctgggggaccagtggcaaccggtcgac

SEQ ID NO: 351322 - DNA, 660 bp, Cannabis indica
cttgatgctctaaggaagaggatgggcgaaacctctagcgcctcccctccggccaagaagcttaaaggccgagaggggtcctcggagaagagaccttctggagaagttattgacctttttgaggagctgactgctgcaaatccttctactcccaaatctgccaagtcaaaggagtctcgaccaccaacgactgggtctgaatttgtcaggaggatccttgagcgggtgcaggcaccaactccacctttgctcgtgcttccagaggccaagaaagggaaggagatgctggcccactacatgaaacggctggttcctgaggtcagtgagcaactggctggtgctgatagcgactcatctctggatgtgttggtgggcggagtcttgaaggaactcaccagggttagtcttttttgatacttcccttataacttttcacacttagctccatatgctgacttttccctttgtgcaggccggtttgaagttggcttacacttactcccgggctaaatctagctacttccaaacagtgcggctctgtccgaccttgagggtggaggcggacttgtccaagaaggaagctgaggaggccagggcggaaactagagcagttcggcgtgagctgggtgaagccaacaagaagttgttgttgggttttat

SEQ ID NO: 351323 - DNA, 687 bp, Cannabis indica
aactacactaaggtaaaattcaagtcaaaagacattttactctatgcatctaagcaagatctctttaaaagtgtttgatttattcaataaaagtgggggatatataatattttattgattacataatgttacaatggtgtgtcacaagttttaatctagtgggggaatgttatattatattgttataatataaggtagattaaaatattaatatgagattaatgtatataatgtgactgagagttacatacatctaatattcacataaattttaacataagaggtggagttactcatattttgtaacttccacatgatcactaattaagtgtgtaaagagtggttacacaacttaattttttttgaaatttaaaactataattcaaatatagttgttggagattgaattttgtcatttataaaatgtataagtgatataaaataaagtggtaatggtttggaatggtttggagagttgtttgtaaaagctgaaaaatttggtaactagtaactagttactattttttttttcagctttaattgttgaacgttttgtgctataaggatgacttttaacaactcttataacctccaaatcatccatttaatcccatttaggtaaccaccattgggtgtaggttatttgaatttcaaaatatgtgatattaaaacactataaatagaggt

SEQ ID NO: 351324 - DNA, 484 bp, Cannabis indica
aatctgtatttttctctcttttttttaacattctcgatggtttaaaaccgtcgcctataacacagttaaaaccgtcgcctataccctgttatgacgacggttttaaactgttgggaagtccacattagcgacggttgttaactgtcactacgttctgcaacggtcgtataggcgacggttatagaaaccgacgggaatactttaaacgactgtttaaaaatatcagaaaaaatcatttttgtaatagtgaaaaagagtattttgctattatgttttaaacttaggctatagtgcaaattactcacttatagcagatttaaaatttatgttgaactaaattagtaggatcataatgtcacttattacttgattaactcaaaatattaatataaaccccaattatttaccattaagcttatcaggatataccattagtagtgttaaatttttaaaatacaccaattaagtgtaaaacttttttttt

SEQ ID NO: 351325 - DNA, 874 bp, Cannabis indica
tatccattatgaagcatggtttgtaagcttatcttctgcaaaaagagttgataataaagttgataacaacattataataagatactaatcagtaatcatgttagggagacatttaattaattaattgcttacttaaaaaaaagaacaccgctccatgagcaattttgcatagaatattggctgttaagtcattagtgaattatatataaaacgaacaaaagaaatttgatttgtccttttctggggacataaagtgaggaacccatgttataatgttaaaaaatgaaattggattaagaaagaaagccaaaatgcaaatcctttgttccttttctaagagtaagaaagcacgtagaatgactcagcaatcttcctggtactgagtcactgacaaataaaaaaaaagtgtatgctcatgttgcatcatgcatatgtgtatactatgcatcattatattgtatctctatatatataaacaagtaacaaaagagaatatagaagatagaaacaaacacgacacacatatatgtataacattttgaactaaagcattattgagtattgttattggtattagaagtgcacactattttttataagtagtcttgcaattggttaacaatatttttttaaagttatttttttaagttcttggacttgataattaattacactaataacaacattgaggaatgtgatagatactaatggtgcattttagcaattctcaacactattagtatgggacactaaagatttctaacacctctatgacattgtattttataattagttagcggttctttataaaatttattaaattaaataaataagatctaatattaaattacattaaattaaataaataagatct

SEQ ID NO: 351326 - DNA, 1330 bp, Cannabis indica
aaatatttaaaatttataaaaatgtcgatgtacaatttttgtaatattttttacaggtttaatatatattttttaaaaaaataggaagcattgtttttatattgtttatagcatcattatattatattgttagtctataaaaatgtaaaaaagtattgtatacactttgtgtaaagattcttaataaattattcactttgtttactaactacataagtgtatattaaatggatcattttataaatactcaaaaaatgatttttagcaaaagaaaaaaatgacaaaaaattatatttttaccaatttataattttttgctatatttttacgatttttatttttaatgaaaatacatagtgttagtttttgttatttttttaaataaaaaaaaaaagagcaataatagtatttatcgagtgagcaatgtttctttggagttcatttctataacgatgaacgtatgaatatttattggaccacattcaatgtttttaagtttatccagattcgatctaattatacagtggatgttagattctaccatccaatccgatctaattaatttcagtcatccaatcgatataacatcaattggatgttagattggattagttatatccgttgaatgtattttatatctatatttattagtttaatttgagtttattctatattttagacctaataatttttgaatcagattagatccatccaatattttaggtctcatatgtattggattggatttgatccatctaattcaaaaaaaaaaaatggtaaaattttaatgttaatttttatatatattttacgtataataatataaaatctaattaatcattcaaatgaaatgaaaatcctatttagttcgattggatgttggatgtattgaaattttagacaccacatccaacatctgatcctttactcattcaaatgaaatgaaaatactaattagttcgattggatgttggatgtattggatttttagacacaccatccaacatccgacccgatccaattggatatttaaaaataatatctgatttgatcataattgaatattcaatatttagagataaattgtaatttgatcagtcagttatcattggatttgatgatttaatcaaaatttatcttctttgtcaaacacaaaaaaaaaaaaaaaagtgaaaaaatgtaaaaaaaaaaaatccaatttcaaaagtatccatgtattaaaggaataattacataagacacaattttttgtaaaatatttacatttttacgttcaaaaaatggtttttttttttacatttttacggtttttcaaaaaataacatgaaaa

SEQ ID NO: 351327 - DNA, 723 bp, Cannabis indica
tgttttaaagttgtaaatacgttatttaattttgttactttttgagtatgttgcttttacgttgtttgtacgctgagttttagtagttaaaatctgtagatcttctaaattatatatacaattatttttatgcttttatatcgttgttaaatgggtgttaacaattttaaaaagctactcacaactaattttttttttttttgaaaatataattatatcaatacttgaggtagaaattaaaaatacaataatcactacaagaaatgtcacttttgccagcacatttttgtgctagcaaaagttggtgttgccgtggtaaaatagaatttacttgtgatgtgttggcaaaaggggttggcaaatcaatgttggtattagaatttttgccaatataaaatgtaaagcgctgtcaaaaatgacttttctcagcgcgtaaaggcgctggtaaaagttagattttagccactgtaaatgtacgctggtaaaactctgacctctttgccagcgcagtttgcgaaatgcactggtaaaaattacttttaccagcgcagtagcgaactgtgttggtaaaagcgacatttcttatagtgaatagtactttttcattgtactaaaaaatataaacaaataaaaaaattattatattcaatattctatgcaagatatatgtgaaattaaatagaaaaatatttaaaaaaattataaaagtaaagtttcttaaaa

SEQ ID NO: 351328 - DNA, 1235 bp, Cannabis indica
cctaaccctatgtggtatgctataactagatagtgaaggcttcaggaaacttaactttcacatcttgtttccttcagagaaaaacctgagccttctctctctatacctagccgccaccttcagatcctggtaaaataatttttctacagccctaaccccgggtcgtccccctacaccctcgcatcatggtgagtgaagccccggtccccaggtggtgtttgcttggcatctgcgttcatgcgagatgactctgggttgtcaggttgcacattcccacaatttgtgttttcgcaggaggttcttggatcgttgggttgagtttctttattgttggtgtatcgtagattttggggacctccttcgtcaactggaatattccttgtattccgtagttgatcatcttagggattcatgagatttccatggttatcacctctaggactttcctcatgtctcctgctttttgagcctaggtcttccccgaggtcccctagtggatgtgtttggttggttaggaggtgcatcgctgcgcagcccttctaaccataaccttgcattcaaactcaacattcttccaatttgattttgccaatcttaaacagagttgtctattttccaatccactaacgacacatatcttaggtctatagatcttaatcttgatacggttaggttcaacatcttagttgtattgtttatgttcatcaagttgttcgtgtggaagctaaccaatattttaggcagatatttacatcttgggaacatggtagttcaattgagttggagcgctgatcatagatatggaatctatgacttctataagtatttagaagtgaaatgatgattcccttcgagcttggttgaatagaaataaatgattgagacctcatttcagtgattatattaatttattgaaatatcatttataggtagctaagtgttttacggataaaattaatacattgaagggtagaacggtaaatttgtccctattaagtgtagatcttctataggggatctttgactattaggattgtaacaaaggataatcataacgtatctatatcgtggtacatataaagtgttctatataattgagagtgcaattcaattctaaatctatagtggcgcaaggcagaatttagaagttagggaatttttgttgggttttatgccctaaataaaactccatttcaatgtaatccattttatttaacatcaataaagaaacagaa

SEQ ID NO: 351329 - DNA, 508 bp, Cannabis indica
taggggcctaaataaaaaaaatattttaaaaaatatacatatatttttaataatttttaaaaatatcatttatctttatagaaggggccaatttttttttttttgcctttggtccatttcaactcacggtctgccttgcttggcaggcacatgacctgccaggtcctggcaggaccatggccggccagacctcccctgcaggccttgggcggctaggtttaacctggcaggacttcatgcatagcccaaaacgtggacaacacgcatgggctgcaaattgggccctaaaagcctaatagaatggatgaataatatctagatttaagggcactttaatcttttgtaattatctaataacctatgtaaatatctaagggctttattgcaatttagggtttaaggcttcctatataaaggccttaaccctagcctagaaacctaagttgcatttctgtcaattagcctccaaataactctaagtatgaaagccataatctctctctctctc

SEQ ID NO: 351330 - DNA, 881 bp, Cannabis indica
tagtagagttcgatattattttaggaatggatttccaacaattggggtatgtcggagtccgggaagaagagaaaactcaacatcccgtatactacgtcagcaagcgcatgataggggcggagacacggtaccccatcatcgaaaaattagttttctgcctcctaatggcctcaagaaaattaaggccgtattttcaagcgcacccaatcaaggtgttgaccaatcacccactccggcaagtcctgcaaaagccagaggcgtccggaaggctcctcaaatgggcgatggagttaagtcaattcgacttacactacataccccgcatctccataaagggacaagcgttggcggacttcatcactgaatgtaatgaagccgaggcaaccgcgaacgcaccggtaccatcgatccccacatggagagtattcgtggacggagcctccaacgaaaacggatccggagcgggggttgcaatgatatccccgaccggacttcgactccaggcagccctagggttcgacttctcagcttcaaataacaaggccgagtatgaagccctgataacaggactacgattagcaaaggccgtgggggccaaaagagtagaagtctacagcgactcccaactggtcgtaaaccagatatcgggagagtatcaaacatgtgacgaacgaatggccgtgatgtaacaataatctgggaactgctccacgagttcacggactacaaagtagaaagaatcccccgggaaaagaatgctcacgcggactgcctggctaagttagcttcagacagtgaaattgaaggactgggggtagtacccgtggaacgcttggcagagccaagcatcaaaataaagaggccataataacggttgggca

SEQ ID NO: 351331 - DNA, 965 bp, Cannabis indica
gtgagggtgtatgtgggtatttaagccctaagggcattttggtcatttgacccctaattactatgtttggaaaatgtgatttttgaggaaatgaaatgttaatttctggtggcttccccctctcaaccgaaccctctccctctcttttactcctttttgattttcaagcttgatttgtaagaaattagcttggtttggaagcttgatttgtgttggaagcttggagcttgtttgagcaagagattgaggtagtttctagctgaaattatatgagttgtttgttgaattcatggctgaaatatgatgataaaagcatgcttgagattgtttgttcttggtgtttcatgcttagtgaattggatgtttaagcttgttctaggttgtttttcatgcttgaatctaatatttacttattgttttactgctggaaaatatttggttgttgttgatgaagctcttattcaagagcttgatgttgccatgaacatgcttgaactctatgatttttttgcaatctaaattgagggattaattgctggattttaatgcttgataatgtgttttaaatccttagtatttgctagctgttgtaagtggattgattgagagtttggttgtgaaaagcttggtactttaatggcactttttgattcttagtgaaattattgtgtttaagttgtggaatatgtttattatgacatataatgatgctctggaaagtttgggagtgtttggagatgatttgagtgagttttggaggtttaaagattgagaaatttcgtgctctctgcccgaacaaccggaattccggttggttcagggctgctccaaccggaattccgattggttcagggctgctccaaccggaattccggttggagttcatcgggaaatgctgaattttgtttcggccataacttttgactcgcgactccgtttgggacgttctttataccgttggaaag

SEQ ID NO: 351332 - DNA, 811 bp, Cannabis indica
atggctcgtatgggtttcgctgacaggtggattaaactaattatgtcatgtgtctcttcggttagttatactgttattcatggaagccatactatgggtcctatcattcctttgagaggtattcggcagggtgaccctcattcgacatatcttttcatcatctgtgtcgaagatctttcttcacttatcaagaagtttgaatctcaacgagttttacaaggatgcaaggtggctcaggggcaccacctatcactcatatgttctttgtggacgatagctatttgttttgtcaatcaactactagtgttgccggcagtgtctcaaacttgctcaatcaatttgaaactgcatttggacaaaaggtgaacttttctaagtctaatgtgttcttcagtcctaatacgtgtcctgcaacccgtgtcgagatttgtgatattctccatatgcctgaagcctctgaaggaagcctctatctgggacttccaaacattattgggagaaacaaaaatgctgtactaggatttctgaagaccaaggtaattgcaagaattaatagttgggatggaaaacttctttctcgtgccgacaaagaaattctcttgaaaactgttgtccaatcgctccccacatatgctatgagtgttttcctccttccacttggtacatgtaatgaaattgaaaaacttatggcccgattttggtggaagtcatcttctagtaaagggaaaggtattatttggaggtcttgggatcgtatggctgctcataaatacgatggtggcatgggttttcggcacttgcatgatttcaa

SEQ ID NO: 351333 - DNA, 395 bp, Cannabis indica
tagctctatgaatatgaatacaaatcctaaactaaatattactaaaatttcatttcttttactatttgagccgcacggaacgtaaacaaactttatgcatgtaagcttcgattgaccaactcagtaactcaacacaaacgatactgaaaagactagcagtgttgaattcttaatgtatgttttaatgctttttataatgaacttaacatgcatgaaactaaccagaaaatactcaaatttacaagcttcatcggaccctgaaaactcatttcaggcgactagtgcttggattctcttgaaccggggtaataactttcactatgaatcaaaagatacactttccagtttcatacatacaccaaagtaatctgaaactatcaatcagaattacccaa

SEQ ID NO: 351334 - DNA, 727 bp, Cannabis indica
aaacttgccttatgcctagttcacgcatctctcaagttacggcgttacttccaggcacacccaatcaaagtgttaacagaacaacccttcagacaagttttatcaaaaccatacgcttcaagaagattaataaacaacatctatttcttcaatcgaaacaacttcccaagaaggaccacccaacaaatagtactgaataaaatataacacagccaacttgactgtaaaatcatcattacactttagattgtcagcaataaaaacaatttagataacactcttggtaattttttgcagccctttaaacagtgttttacaagcatattatcattttgcttgtactgaaaatgtcagaatcaatatgacaatccaacacggtaattaacgaaaactcctcaacaataaatcttagatattttccttgcaaacaaacgtaaaattctaactcatttggctgttgaacctccctcaacagcaaaccatggatgagttggaaatggatactatagtctgggatacaaaaaaaatgaccaaacacagtttttgaaaacatatttaatttggtttcagtaaatttttttaatatcttcaataacagagtaataactagaggttataactctggaatgataatattccgatcgggtgtacttggattcccaatcctataaaaaaacaaaagaaaacattactaaaacaacacaaaaataaaaaaataacaaaatca

SEQ ID NO: 351335 - DNA, 865 bp, Cannabis indica
aaataaatttgttatactgaccaggtcctatccaaggatcaaaaataggattcttgcctgatattaaggttcacaatctaaaatttcaaaatttcgactgaagggttaattttcactaagcccggaatgggcaagtgaaaccaaatatcctggaatcaaaatcaaagcgtagttataatcaaacaacatggttaagcagagtcaagatttcatattcctaaacctatgttttctatggttttcatagaactagaacaagaactttcaagtttttttatagtaaaaacccagaaaataaaatattcaagcataaaataggaaagagatgaagaacttactgactgttcaaagatttagagttgctcagatgatactgatttgcatttcctggggattctttgaaggatttacaggaagagatttctcgctctaaattcttcaagaacgaaaaatgctaaaagtggttgattagggacttctgccctattcataaactaattagtgaggtaaagtaatcatttcaaaatttgaataccttgatctcaccccaaaactatacgttaaagcactcaattacgtgaatggtaaccgtcaaaacgtgctactttttgggcgtggttcgatgtgtatgtcagtcagcattaatgagcctaatattgaagagacccttggtcaaagtcaagtcagattgccaagagatgtttcgaacacatgccaccggtttaggtaaggatccagaccgagtgaagtccacgtgcgacctcagaggtcctgcgtagacttgggggcaaatattatcacattctttgtactatgacgtggcaacacatacgagtgacacttgtccaacattccttgcacctaa

SEQ ID NO: 351336 - DNA, 984 bp, Cannabis indica
gtccatcaaccacatgacattcttcagtctaggagcccttcgaaattgagagttcctgtccctatgacttttccaacaagacctttaccaaaagtaatttcttcacactgcatgttctcaagatattctttttcacctgtcatgtgtctagaacacccactatcaaagtaccacatgttagtagcaatagttttaaaacaagaagaacctaccaagcatttatttttgacaacccatttttgtttttgtaaaacatgtttatttccaaggtaattagatttaaacatgttttgcatagtgatgcacttaggtcgaatgtgaccttttctcccacaaaaatggcaaatagggatgaaacgtcttccattccctttggaattgtcaaacttaccgtgctgcttcttttctgtaacagcagagtgtttcgctgaagtgacagaatcctgcgaggtagaaacagttcttccagaaacaaaaatatcagatttaacaaaagtggtattgaaatcagattgagtagaaccataacctagaccagtatgattagtttggccagatttttgaatcttttcaaaaatgttggaacctggatttaacattttgacattctttttaatgttttcaagttccttagtcaaagaaataatttcagactcttttaaagacagttcagattcacaacatttatttttttcatccagatcattaatgttgttacacaagtctttattatctttaaccagggaacgattttcagcacatatttccaaccacttaccaaacattaccttgtaagattcagccatagagttctcatcaatttctgactcatctgatttggatccagcttcttccttgttgtcatcgatcaaggtattattcatgcacatgaattttcctttttcctgcaaatttcttaacaaaacacttgttagagcaactttttctttttcaccttctactttcagaatcatcactccaagt

SEQ ID NO: 351337 - DNA, 539 bp, Cannabis indica
gcataaaacccaacagtatcttctttacttgtcccaattctttcatgtcaaattctgctttaagtttatctttaattcatttaattactgccttgtctttgcccattattaatatttcatctacatagagtagaagatacacaactgctgactcttctaggtgcttgaaatacaaataatgatcaaacttggaccttgtgaaaccaatctcctgaacataactgtcaaatcgtttgttccattgtcgtggtgattgcttaagatcgtatagggactttttcaacttacaaaacatctcttttccatcttgttccacctaaaatccaggtggttgctccatgtatatcttttcttctagataaccatttagaaacgcagttttaacatcaagttgctccacttctaaaccttgttgtgttgccatattcaacataagtctaatggtcttatacttcaccacaggtgagaacacctcactgtaatctatcccttccacctgagtgaaacctttggcaactaatcttgccttaaaccttact

SEQ ID NO: 351338 - DNA, 637 bp, Cannabis indica
aaaaaccagcaggagttcgaaaagttgctgcccagtaacacatgaaaaattgtctcaacatccatattacacaaaggacaaataagatcaacattcacatgctttgtttggagttgtaccttagttggaagacaaccggagcaagctttccataagaaatgttgaaccttgggaggcactgaaagttgccacaattttttccaaccattgtcatcttgagtaaaaagccaatttccacttgacgattgaagaaacttataagcactcttgactgaataaaaacccgaagactccatattccaataccaactatccacatctcgagaatcacttagctgaatatttctgattaagctaatatccctctcctcaaacatgtcattcagaatctccaagtcccaagacctctcaccaatactaagcaaattaacaacctgcttatcaaccaaacccggatgagtagtgactacataagggttattatcatggggcagccacgggtcatttagaatgctaaccgaggctccactagcaattgatcttcttgcacccttcctcactaagtcttgagcagcccatatactccgccaaataaaactaggattatttcctaactcagcatcaagaaaggaaccat

SEQ ID NO: 351339 - DNA, 652 bp, Cannabis indica
ctccggtacaccaatggtaaccttagtacttattatgtgtcacgggacccaaaaaacaccgccagtaatagtgtgagtactatgaacggttgactgccgctcagtagaaccctagcccgactgggttcagtgagttcgtgaggaggatagtgactccggtacaccaatggtaacctgagtacttactgtgtgtcacgggacccataaaacaccgccagtgagagtgtgagtactatgaacgggtgactgccgctcagtagaaccctagcccgactgggttcagtgagttcgtgaggaggatagtgactccggtacaccaatggtaacctgagtacttactgtgtgtcagagatacagatagtaacaggatgttcactatagtgagaagcagtgattgcaaccgtagtaataaatagcaaataataatcccgtgggatcaatggtgaatccaatgattgtgtgattcaaactgaatacattgacagcgggaccgtgtgctgatgactcatgttgcgataagcttaatttgctaagtgttgctcgccatgcgcggattgctaaaagcaaacgtattgtgggcattgttaactgttcgaatatttttgaaacaaggatgacattgtaaccataacgaaccccccgtgaaaattgt

SEQ ID NO: 351340 - DNA, 1264 bp, Cannabis indica
aaaggggtgatccaccgtgaaaatgcacctacgaatcccttgctacagtggactaagcagaacaaaatctgactgaaccactatatttcattgtcttctgtattttttccagctttgttgtttgttctcgcattcctatttgaatactcgcatttatcatctttcaaataattctatcttttaccagctaaattacacttcttggtgttgtgaaattctagtaacaacaacttcagctttccaggaaacaattttaaccttgaattgaaaagtaaaacttgctacccaagttgaaactccttcctgattaagccttggtcatgccacttcttggttctctccttgtagatcttagcattctcataagcttcattctgaaactcttccagttcatagttgtagcaatcttttctctcctgcagctttcaagtccatgttgagggtcttcatgggctaaaaggccttatgttctaattccactggcagatgacaagcttttccaaacaccaaccaatatggtgacatcccgatcggtgttttaaatgctgttctatatgcccatagtgcatcatctaactttcttgaccagtctttccttgatatctgcactgttttctccagaatcatctttatctcccggttagaaattttagcttggccattactctgcggatggtatggtagaacagttcagtgacggacaccatatctcaaaaggagtgtttcaaactatttgctgcagaagtgactcccttcatcgcttatgatttctcggggagtaccaaatcgagtgaatatgttcttttgaaggaagcggagaactgttttaccatcattttgtggtgttgctgcatcttcaacccatttcgacacatagtccacagccaataggatgtacagattgctaaaagatgaaggaaaaggactcatgaagtctatcccccacacatcaaacaattccacttccaagattcctgttaaagacatttcgttcctccttgagatattacatgtacgctgacaacgatcacatgcctttacaaaagtattagcatccttaaaaagtgttggccaaaagaatccgctctttaacgccttagcagcagttcttgtctcgctaaaatgtcccccacatggaaatgattgagaatagagtacatctcctcttcaggcacacatcttctaattatctgatcagcacagtgcttgtaaaggattggctcttcccaacagtaatgttttacctcagaaaagaacttcttta

SEQ ID NO: 351341 - DNA, 697 bp, Cannabis indica
atctcagttaatatccatcaaatccctaataagtgagttttagctcataattatactaaaacacaaataaaaacataagaaatcaagagaagagaaagaactagatggaggattgtcgcggatcgcccatgctcgctctaagagccttcttcttgtgtttctagggttccatatggtctctcctccataattcgcgattcccttcattaaaatagagtttttcagcccaaaaacgagaaaagacgaagttatccttgacctgtatgaagtcggcgccacgacggctgtagaaaagggaaaaacgggctttctgtacgtcccccgccgcggccactagacccattttttttctacttcgacatctttcagtaaaataggcattaactttctcatacaaacaccaaatgagctgattgaagatacgttagaaagataaaaaagagatgtaaaacttttatgttttaactttttccaacatatgatcataacatagttgaatttaggcttgaagtttcagctttattttctttcaaaattttctctattttgtagatcactgtttttcaaaatttgtccaatttatacactccaagtgtcgaaacctgaaatcaaagaaaacaagtgtaattctattctaaaaaataataataaagaaaaaaaaacaacttataaaaatgtgacccgaaacttaggctaa

SEQ ID NO: 351342 - DNA, 433 bp, Cannabis indica
ggcgacgatgagaaaatatatagttttctcacatgtcaaaatgaccgcatgacaattcattagtttcgaaaataaattcaaaggttactcaaatgtattttaaataataagatattataatataacataaatgaacataaataaactaaaaaatgaatatatagtttaatataactaatctaaaaattaaagattatttacagaaaatatttttatttaaagtggatcattttatgaaaagtaatcaattggtatattatcaaaattataagtaatttaaatattaatataaagtatactaaataactattttagaaactaattagtttctaaaatatactctaaaataacttatgagaaatttaaatgtttactaattttaccaataatttatgtgttttttttttttaaattttattgtaacttattagtt

SEQ ID NO: 351343 - DNA, 1044 bp, Cannabis indica
tcagggaattaaacttttgaacatataatcatgattatattccactgtgttgccaatactataatcataacaaatacatatgttctggacttaatagaatttataatataatcatgtgaaccatgtagcataaaatgtgatttttgatctttattaatcagtaaatctgattatattgaaatggattttatttaaggcacaaagcccaacaagagcctgtgttgtttcttgccactaaatcgaaatcatacttactaaaagattatcgcatcaacattgatcttgattgtatttttaccatgttttagccaacactcagatccatcatctttgttgccaaaacataaagatgataagaaagttttatcctgaaatttctccaatgatcaagagtaatagaagcagaagcaataatttcatcaacaggaagttttttgtttccaaacaatgttatttctatcttttcaaagagcccaacaacacatggctgcacgacacacttttttctcatcaaaacgtttaaaaatcagctctagccagctaccaaaggagctaccaggatcaactatagaagccataccttgttgtagctagcaagcttgtgcaaaggaggatgaaagtagagcatggttgatggattcaggtgaagaataacagactgggcaaatagaagaaatattaacatgctttacaacaagttggaggcaagtaggaagacaaccagtgactgagcgccaaagaaagttctttacctttggaggtattttcgtgccaaagacgatgccaaaacctagaattaccggcactattatactgatttttctgattcttgagcaaattataagtacttttgatagagaaactcccagaacgctcgtccttccatgatcaagaatctcttgtggcgtttgaattgagaggagtacccaagatcagagcaatatctcagccattgaagatgccgcatatgatatcagtattccaacttcgtgacctgaggtgaatgttaattccatttttggcatatttaattgacaaaaatat

SEQ ID NO: 351344 - DNA, 381 bp, Cannabis indica
agatcctggtaaaataaattccaacaaatactgtgtctgagtttgtggcaaaattctggaaaaggaatgtctctgttgtggctatgtaaggtgcgttgcaacattccaaatgttttgagtttgggtttgaggctgtggaagacaggaactgggccctggttaatggcccttggtgcatccggggttatactttagttctacagccatggactccggggttgactggctcggttgtatgtcatctgctaaggttatggatgcaaatccataatcttcctcatgaatattttcttggatattattttacaaggatcttagatctactcacaagtatgttgtttaacaccctaaatatgagttttctaaaacgatgaaataaac

SEQ ID NO: 351345 - DNA, 708 bp, Cannabis indica
aagtgctagtaaagtagtaagaggatttgacatagttgatatgactaaaaataaataaagtaacataatgattatgcatgaataataaatataattttagaattgctgtaaatgtgatgcatgagtgcatacaagtaaaatacataaaatcttgtttaagttattccacgataaagctctttgacaattgatcgccgccttagggtcagtatcgagtcaatttcattaagcctataagatacatctcatctttattattttgaaacctaaatatctcatattttattttcaaaatataaagaaacgcttttgaccaagttaaaaactaatcactatgaagcttggttgcactttgtgagtgtaacccattattttagatttcatgacttaacttagtgtgtctccttaagggtcaatgtcacactaaaatacatcacttcctcttatcttaatcaagagatcaaacatgagcaacagtatagacaaatactttccttagggggacaaaaataaaaccatctcgaggccagtctattctcccttgggactgactaataatggaggtcgtaggttatattgacatgtactccttctcccactcactattttaggttaatgtgttttgtttattaattcttagtattaatacatattaactactttaataattatgattaattcatttataataaaatcctcaaattataa

SEQ ID NO: 351346 - DNA, 567 bp, Cannabis indica
acaaataataaagatctaaaaaaagataattgatatataaatttataaaaaattcttacttcaaaatcgctatcatcaccgtatcttatctgtagtcgtcattatattcaaagtcaatgtcatatagtaaatatacaaaataattagtatcaaattttgaattataatataatagatattaaaatgttgataaaaattttgttgagtgcagtgtacgtacaactattaagtataaaattaattttaatagaaaattagcaaatttttaatctttttaggaagtaaattttaaaaggggagttttcaatattatacttaaaattgattttatttacaaaaatacctttaagaaaattatttgcacaaatactgttgtgccacatcagcatctataccgaaatttaaaataattaccgaaaatagaaaaaactaaaaaaactctcgtttctagatttttttcgcttttaggagttttgtgaaaagcaaccatttagttacttttgatgtgaataagatatcaattagttacttttctattaaaaatttattttagaattttacacatat

SEQ ID NO: 351347 - DNA, 443 bp, Cannabis indica
aaaattgtcgaaaagatagtaagtatatattaatccttaattgagtactaataatgagttagtatacataattcatatactaattgcttgaatatttgcattaggctcaattagaggagcaagttactcagggacaaattcaagtccatggctaaaacgatatccttacgtaagagctcgagacaccagagcatcctggacgtgttagggatgctgggtatgctagtacttgagaaatattgtttccttagttatacaaaataaatcatagctaattttatttaatgatttgcaggttccttaccaaggtatctaaactgtttggaaggaagaaaatggaagtttctgatgttgtggctcagaaatagaaggagatcgaccaattaaaagtcgaactcaagtcccttaaacagaagaaaacattgcccaacaagaggaagaag

SEQ ID NO: 351348 - DNA, 531 bp, Cannabis indica
tcggatgaccaccattaaaagtatgattttaattttctgcaattttttttgttcatgttaagttaaagatcaaatcagatcaacataatagctttggtgtaagttactacgttaacatacatatttctgatctataaatgaataaagatgtttattttgatttcaaattgagtcgagtttattagaatgtaattaatttaccatccagtgcgtacaaaagatttggtcgaacccaaaactccaaacagacaagaaagtatacttgtaaaaataaataaaaagtgaccaagagtcataagtctgctcggtctcttggggggctactatacctatacaaagcatttggtaaaaaacaaaacaaatacaattggacgatgattataaacagagattgaaattcattaaggataacaaaagcattcaaacccaggattagaagctacccggtcagctagctggttgaaaatgaaaaatatatttcaagtttagagaccgcttaactagtcaccttgtcttaaaaaaggccttatg

SEQ ID NO: 351349 - DNA, 765 bp, Cannabis indica
cataccttatacaaattctccttcaagagattagaaagactataaaatcagcaatccaaacccttttcttgctggttttctagggtgcacgaaagagagagggaaagaggaaaattcccaagcttgatcatcaatttcacacttaatccttctttcctttgataatattattattatctatgcatagattaaataaaggaagcttctacttccactaaaagccaaaacactaaaagcaaaaagacctatttacccttcaattaaaatatcaaaactaaacaacctaaggacaatttggtcatttccaaaacccgactattagcattaaacaaaataccccgagcaaataacatacatcaaaatataagatatgactctctaaaggccccaacgccgctttccacagcttccgaacacaacacagaaattaggtaattaaatgtaaaatagcataaaaacatatatgatatatgaaatatatttctaaaatatgcattccataattattaatacataaaccttaaatatttaataatacaaagcattaatcataggcggcctttacaattatccccccgttaaaaaggatttcgtccccgaaatctacctgaacaattcaggatgttgagtccgcatatcagattctagttcccaagtggcttcttccactttactattcttccagagtactttaaccaacgatatggttttagttcgaaggaccttttccttcttatccagaatttgcactggttgttcatcata

SEQ ID NO: 351350 - DNA, 590 bp, Cannabis indica
acacattgacatcaagttccttgttgtaaaagaaagggtacaaagtggacaaatttgtatagaagacttaggtacaaactccatgatttcagacccccttactaagggttttccaccgaaggtctttcatgagcatactactcgtatgggtgttttagagtatgcggatatctagattcagtgggagtttgtctttattatcctttgtgttttatttgtttcatgaaacttgtgtatttagatattttgctgatcagaatttatgttattaagtttatttcactttgtacattaagctaaagttttgatctctataaaccaattgaaaattgacatgaattgatcaccatgcatgtaattttcataccacattatcatgattgacctatgtcatttaactttgtcgatatatgtgaccattgattagttgtgattgatacaatgaaaactgctttgatcttatgttgatatagttaatggacaagattgtacgtgcctatggttatgatgacaaaattaagagctcaataaggttaacacatttattattgggaattgttttaccagaatttagatttactactatatat

SEQ ID NO: 351351 - DNA, 1281 bp, Cannabis indica
tttgggctctgtctgtgtcttaatcttggtcctggtcctagtccaagtccagttcaagttccagttgcgattccgagtttaagtttgtgttcgagtttgggtcagggttcgagtcctagtttgagtttgtgtttgggtccagatctcggtctaggtctgaatcagtctccgggagtgggttaggacctaggtcttggtcaaggttctggtccgagtcccaggttttgatctcgatctgagtctgagtttagttcttggtctaagtcctgggttctgatcctggtctgggttcgagttcgggtcctggtgcaggtctatgtttgggtctgattctgggtctgtgtctgagttttagttcagttttgggtttggtcctggtatgtgttcgtgtccaggatcctgtcctagttttggtccggggcagatttcatgtccaggtcttggtccgacttcatattccccgatctaggtcaggtccttgtttagtttgaagtcccgaatttagatcaaggtctgggtttcggggcctaggtccttggtctaggtgccccatccaagtccggttcctaggtcctagtctggttcaaagttccggttcacgtcctgagtcttggttttagtccaggtcgcggtctgggttcaggtccagggctcgatccctatctttgtctgggtttaggttcgagtccttgtcagggtctagatcctggtctgggttgcgagtgtcaggatccggtgagggtttaggacaaggtcaggtccaggtcccgatgccggtcctagtccaggttcaagtcttaggtctcaggtcccagtttggttccgggtcttggtctgggtcaaggtttgggtcagggtccgagtcttagtttgagtctgggtacgggtttttcggatctcggtctgggtccaggtctgagtcaaggttcaggttcaggtcttggttctgggtcccaagttcgtgtctggctgggtctacgtctgcgtctgggtctaggtcccgtgtttcaatccctgtctaggtttgggtcggtatttgggtctgggtatgggttcgtgtccatatctaggtccgaattccactttaggtcaggggcttggtcttggtctgggatcgagtcccgagttcgtgttcaggttctggttcgagtcttagtcctagtctaggtctaggactgggtctgagcccgagttccggttctaggttcggtctagttctgggtccgggtcgaggtccaggtcacactcccgctcatgttccagggtcctgatcacgttctt

SEQ ID NO: 351352 - DNA, 561 bp, Cannabis indica
tcacccctttatatacaaagcaggtgtccaattagttatacaaggattgcattcattgtcaatccgttttacacattgaattacaataattaaccaaacaacgttaacattaataaatgagcggcagttactaagttcatcaacgtatgcgtcttctaaatctgcgggttgactgttcatattctggtgataaactcgcgggtttatcgtttatgtttaggatgtctgcgtccttaggtagtcgccttttgtggacatcgcatgacgggctgataggacctagacatgcaagtctatattaatttatcaagggtgcagggttcttaggaccaactcgcatttacagagagtcgttctcctggtttatacacggacacggggaggatactcgcatatagttcgatatatgcgagctactctcttgtctcggatgagattagacttcggtcatgctcgctacctctcgctgattctatcttaagcgaggtttaaaacttcgaggagtccctcagggacatctcagctttctttgggaaatctgagtatacgtgtcctctaaat

SEQ ID NO: 351353 - DNA, 695 bp, Cannabis indica
atacgtagtccgcaaactttgtactttggatccaatatataaaacgctaattaggattttttttttttcccctgaactttaacaagtaccaaatcatgccccctgaacttttaaggtcattgaaaatgccccctgaaccattgagattgttgaatttaaggacttttttctaattttagtaaaaaagtctaacatggatgaaagttcaggaggtataatttagtacatgtcaaagttcgaagggcatgatttggtagatattaaagtctggggaacatggtttagtacataaacaatcattgaaatagtaaaattgaataaaattagacaaaagtctttaaatccaacaatctcaatagttcacggggcattttcaatggccttaaaagttcaggtggcatgatttggtacatgttaaagttcaggggataaaaattctaattagcctatataaaatggttgtgctcatctattttagtgaatctcttttattttcttcattttgtcttttttctcacttttatataaagtattatttattatttaatacaatgtaacttttatagagcatactaaactgcctaatatatatagtttaaccaaatatcaaggtatgattgttttacttcatatatacactcgggatttccaactaagtttttttttgaataatccaactaagtttttcgtcaaac

SEQ ID NO: 351354 - DNA, 540 bp, Cannabis indica
caaaagactaatggggcaaaatggtcccacagtaaaagtcataaaatggcactaaggggtattttgggaaattttaaaatcccgactatacccgacattcccaatgtctaaactattgtcccgatatactaaaaaaatactaagatgtgattctaatagccatacaccgctttccaatgttgcctagcacaaaacatgcaaaaattatgaaatttctatatgtgacataaaaatgcattctaaattcaaataaatcatcataaataattaattcaatattaataattaattttcataataaagccctaattatctgctaatttccaaagtaaagctaagccctctttacaactatcctcccttaaaaggatttcgtcctcgaaatctaacttgaacaactatggattttgagctctcatgtctgattctaactcccaggtggcttcctccaccttgctatttctccagagtactttgactagagctatggtcttgttccgaggaacctttatcctttctgtcaaggatctcaactggttg

SEQ ID NO: 351355 - DNA, 855 bp, Cannabis indica
tcactaaatcttgagaaaaaaaccttggattaccaaagaaaaatacccagcttcttgctgctcaaagagggccgaaaatagagagagagtttgagagaaaatgatttttcttaatccttgattttcctcaatttttctaacttttaataaatgataaaagacatacataaagttaatctttacttcagccaacaaataacaaatacaataataaactcatttattaagtccactaaaggaaaaaatatcaatggagaaaaatgaccattttgcccctccacactaaaataacataaaaggggtactaaagggtattttgggaaattctaaattcccgaccaatcccgacattctcaatgtctaataaactgccccaatatactaacatgctaagttgtgattctactgagccaaacaccgagttccatgttgccgggcaccagaaatgcaaaattatgaaatttcactatatgacataaaaatgcattctgaattctaaaataacagcataaataattatttaattatctataaataattttccataattaaatcataattaactgctaatttctaaattaaactaagcggtctttacactaagtcatcaacatagcattctagtattaacattaaattaaaatacttacttaagattaagtaatcactagagataccataaaaaattccataaggaccaggaactgtgcttgagtctttcgaatagacattgtaaaatttcatatcttatcctcgtaattctgataagttattactatccatgtgaatggttagatgaactttgttttgttttattttaatgttcctttcttgaacatatcattgtaaattaat

SEQ ID NO: 351356 - DNA, 866 bp, Cannabis indica
tctttccttcatgcccgatcccaaccgcctctcacaatccgactttgcccgaaccccagccacctcacacaaccaccgcgccgtcgcccagtcgactccgaccgagacccacccactatccgaccgtcatcaccgccacatggaggagaagacccacccaggataaccgcaccatatctaaggtaattttttaaatttctcttttaaaatttcagatctgagaagccattggggaagaagggggtccgatgggtccgacgggttgggtccgatgggtccgatggtccgatgggttggggtcctatggtcacgttgggttgggtccgatggtccgatggtccgattcgtgcggtccgattagaccgataaggtccgatggctaccatattgggccaatcggacccgaggggttttttttttttctgtcgtacgcggtggagatcgtcgggtcgtaggcggtggtgagggggtgacgacgcggtggttgtgtgaggtggctggggttcgggcgaagtcggattgtgtgaggcggttgggatcgggcatgaacgaaagagggaccgagagagagtttgagtggaagagagagaaagggattgggattttgacaaggctattttgggggttttgaaaattggtcctattttaaaattacctacactaagtgttctccaaaccaattttgtttaaaacatgcataaaattcaaatttcccttacaaaatttaacaccttatttaggatggacatccgattcaattcaatttttttatcctctttcgatccaatctaattaataattaaatttaaaaaatcatcatccgatccaatctaattaaacctcaaaatccaatcaaattactaatt

SEQ ID NO: 351357 - DNA, 260 bp, Cannabis indica
gcataggcaataacccgatcagcttgcattagtacgcaccctagaccctgtcgggatgcatcacaataaatcacgaacttttctttatcagaaggcaaagctaacactggagctgtaattaatctatgcttcagctcctaaaaactagcctcacacttgttgtccatacaatatgctgattctttttagtaagctcggttaagggtgttgaaattttagagaacccttccacaaaccgacgataataaccagccagaccc

SEQ ID NO: 351358 - DNA, 674 bp, Cannabis indica
tgccaaaaccggctagccggtttgcaccaggtttcccaaatccattcattccttgctcaattcttcaccaattgccatgaaaccttccagagctcctattcaatgtataaacaataaaacccaaccagtatttcacagaacaaatcactaaatctcaaattgccattaacataaagctttgaactcaatgttcaaagttgcacaaaacttaaaccaatcaccaaaaccagcagctaggacttaaaatcaactcaacaagatcctaaaattccaaccctaggcatataaaaacctaacagcccctattactcaaaaacataagctcaaaccaaagaaaaagcttaaaatcacatcttcaagagttctagggctttacctcacttgcaatagctttgaatccttgcttaatccaaagaaatggaaggaaaaaatctggttcttgctcttggtttgtcccagccgaaagaaagagagagagagttcaagaggaactctaatttctaatttcctcttttcttgattttcttcaaaatgagaaaaaggattttaattaatccttatgctgaaagttaacttgccaagtgtcaaataattgggcagccacctcactctccccttaaccaaaagactaaaatgccctttaaacttaaaactagggtatttctaaagctagg

SEQ ID NO: 351359 - DNA, 633 bp, Cannabis indica
aagcacgcttaaccgtggagttcgttcgtgatgggctacgaaaaaataagatgcaccttgttgatataggtagtaccaatcaatttatttaagctctcttcaactgtatagtcctatacctttatagtctcaaaatcaccacacttgaccttctccaggcgatgtgggattacacagcttactcggtaattccacttacgaatcacgagactactgactgtcataccgatacaccatggattacaaaggtaataactatatatagattttcatagttgctaaaatttgctccaattctatcgtggctaattaatattgtcttaaattctccaagtcagcgccagcaacgtattccacgtcagcttcagaaatgcgcttttcctacgaacaatctgaaagacaatcacatgttccagatatgagttcaaggttgacataagctatctagaaggatgtctctgaatgtatgacaagctatctgaaagactctacttacggaagacaagctatctagaagaaccattaggactggccacaactttacgaataaagctttcccaatgaacaccaagcttttcgtaacttcttttcggagtaacaactaggggtgttcacggtgcgggtggtgcgatt

SEQ ID NO: 351360 - DNA, 744 bp, Cannabis indica
ctccaactgaagcacacgacctgtagagaaacaagaatccctggctaaaacatgagctagcttgtttgtagctcgtttgacgaaacacaactcaacattattaaagaataagagaagagtacgaacatcatgaactaaaagaccaaaagaggataataaagtaatttggctttgcacggcttgaacacaaactaagctatcagtttccaaaatcacttgtccccacaaatgacgatcaatccagcttaattaaagcttctttgatgccaacaatttcagctatttcaggttgcatccgtcccatctttcccatcgtgtaagtttctaccaaattactgctagaatctcgggccacacaaccaaaaccaaaccggccttctcgctcaaacaaagcgccatcaacattaactttgatcttatttatagcaggcacagtccaacgctcaagcacacggtccccatcaatcaacggagacaaagaaagaccctttattataatttttttttttgatttttcaaatatttataattattttttaaaactattattacgtggaccactaaaatttgccacgtgtacaagtgtatacacatggacagtccaccgtggcacttaattgtgatttttggacggaggtgtacagagcaaaacggaaccagaatttagatagttatgccgccaaaatttcggtttttgtagttaactgttacaaaccgtaaagttgaagtggtttaaccgccaat

SEQ ID NO: 351361 - DNA, 865 bp, Cannabis indica
gcacaaacatccttaaaatcgcataaattttaccacagtgaagtagaatcgcatacaaatcgtacattaatcgcataatgtcgccaaaaaatacagaacaaaacaaactaaaaaatcaagatcctgtcagttaacatctcactaaaatcgcacaataatcgcataatattgttaaaatcacataacctataccatatatcatacatcgcctaatgtcgcctaaaagtcgctaaacataccaaatagtattaacctaggagaaaatcacacaatatcgcatataaatcgcacaatgtcgcacaataatctaaaaacccataaaaacccagaaaacaactattgttcggaacccatattcatcccacagttttattgcacaaatcatcccaaataacatacaaaataacaacttccaattcaatactagattcaaccacgaatgtatgcattttaaaggagaaattcaaagcaaaattctacaaaaactaacctggattgctgcgattggggttggtgggattcgactggtgtgtgggttcgactggtgtgggtggtcgtcgtgggttcgctcgggtcgattgggttcatcgtcgtgggttccactggtggccgtgggttcgtgtgtgtgtgggttttggtgtgtgggttcgactggtgtgggttttggtgtgtgggttcaactggtgtgggttcgttgattattgcagcgtgggttttgggagagggaaagaagagagagaatgtagaagagagagaatggagttagaaggaatgtgagaagtttgaaaatacgaggggttatttttggaagaaaattgaaagaatggttatttttttatgtgtgataattgggtataattaaaca

SEQ ID NO: 351362 - DNA, 800 bp, Cannabis indica
ttgggaagaatgaactcatctcccgaagagacggggtctagttgtagctctgcctctgcgttgggccttctcggatctcccatgagtgttaatggggtcttcaagtaactcataatctctgtctgctctttcagaaaatcagtcttgccttacttcaaagtaagttattccctctcaacactctaatcttgccaatacgacaaaagatattggttcccgaggctgtgaagtgttgggaatagatgttgattgtagcatagatgaaaaatggggcatcaatgcagacagtggaacaaaatgggcccctcatggtagagagtgtggtagtgtatcctctctaaagattctagcttcctcggctcgttgttctagggtttgtgtaagctttgagtcctagctacacaaactatcctgggtgggttgtctgtaaagaccgcttagtttaaatttagaaattagcagataattagggtttaattatgaaaattatttattgatatttaaataattatttatgttgatctatttgaattcagaatgcattttatatgtcatatagaaatttcatatttttgcatgtccagtgcccggcaacattggaacgcggtgtatggctcagtagaatcacatttttagtattttagtatagcagggcaatttagttagacattgggaatgtcgagattgcttgggaatttagattttctcaaaatacccttcgtaccgcttttttatgttattttagtgtggatgggcaaaatgaccattttgccccatttgtattttgtcctttagtggac

SEQ ID NO: 351363 - DNA, 531 bp, Cannabis indica
tactatgtcaaaagtaccgtcgtacgaacgttcgagactcagtaccgtgtgggagacggggattagggttatggtcaggggtacgggcgtctgatcacaacccgggatatatgtatgttatatgatttatgcttttcttactgagtctgtcgactcacaatgctctattattatgtaggtaagggcaaggctaaagttcaggacccgtgaggacgaacaggtgaagattttacacgtcggggcggttaggcctggagcatacgatcctcgaaacatcagggcttttaatgttagtcgttgggcgacaaatattttgtaaatgaatagtaaacatttgtgaagtgttttgtaaacgggatcctgaagtattttgtatgtaatactataagttttaattaaataacaaattttaattaatcacgtttttcattaacctcgttgattagcaacgagctacacaacaagtttataaaatcatgttaacacgccttggctagttagggtgttaaaatttgttatcagagccgccag

SEQ ID NO: 351364 - DNA, 600 bp, Cannabis indica
ggtttgaagtttgtaaaagctaaacaaagaaaagttataaatgaaggttcagtattaattttagaacattgctaccccaattccataaggaatatttgatatatataactaaagagagcactgaatcacatatataaaaaaatagaagtaaaatattattctttttttgagaacataaacaagacgtgtgtaagggtattaacttttaaatttaactttatgtgagtgtctaactccacatattcattttttttatattgatttatttataaattttattgtaaataaaaatatgctacgcacaaaatgactcataaacataagtttgtctgtgtaaaaatattaactaactatttttaatcaataatataattacttacaaatttatttttaactgtaaaaaaatatataaaaagttgtacttataattatatttcatcacactattattctatacatattctaaatagtattatagataatatatataatttaattatggaataaaacttggacattttacaattttgtatacattattttaattaattacaaaatatgtgcaaaaaaacttattatcatttctcatacatttttata

SEQ ID NO: 351365 - DNA, 603 bp, Cannabis indica
aagaactcaattatcttttgaactttatcatatattgatccttatgagtggtggtagatctgaaagatcacattgtaaaattattacctttatggaattcaacttaagtagcaatgaaccttgatagttcttgaagaggtaaatttttctattaattgtaatatatatggggatccttggggtgttacgaggataaacataactaatttattacccaaaaattaaaagtagaaaagatgaattttgaaaggtcatggtcactaaaggcggttgcaagcactagaggttgctattggaaagaattttaattctcgagcttcatagaaagtttgtaagaaaaaattattggagccattagagcagtaaagaaactgaaaaagaaatattactgagaaaaaaaaataagaattgagttgaaagaaaaaattcactaatattatgtaaaagtatgaattttggactcgtttagaatgtcgtattaggtcgtattgtattgtattgtattatattgaattagattatacattatatttttatataatattatgttaaactttaagttatactaaaatattatatatttaggtgtccataaaagttaat

SEQ ID NO: 351366 - DNA, 1056 bp, Cannabis indica
attttatttttatacatagtagagagagtatgagagtatatttgacttattaaactatttcaaatcttttttttttttttgtgagaaaaatagaaattttaatgagacaatagtctatacatgatgatatatcactcaaataacataatcaaacaaaaaaaaaaaattatgttagggtaaattgtgttttgcaaaaagaaaagaaagaaaaaagataaatcttactccatcaggtgcttaaaacctaaatgtttaataactaggtacaaaaattaatattttcttctccacatctaacataacatttttagtaattttatctattattttcgatatagaaagatgcttaaaaaaattgacaataatataaaaaaatctacttgttcatttgctggtagtagcgagcaatgaatgttacctattgaaaatatgattaagatcaatgtggatgcttttattgttagtaagaatgatagttttggaattagttgggtggtacacgaccatgctagaaatatcatgaaagctaactcaaagttattgcccggttgtatacaatcaacaataacagtctttaggagtgaaagaggtgcgtaactgaattaaacattaaaatttttctcaaattgttattaaaattgattatcaagtagttgttgatacaatttgtcatacactctaaatgaattctttgtttgggttgattattaattattgtagcaggggtgtgttcatataatccgcaatctgtggttttaaatcccaatcaatccggaccaaactatttgagactggactaaatgaatttggtgtgaatgatttggttcggtcacggttttagaaatttcggtaacagtttaaaccaaaccaatcaatataatttttttttgggacaaaatatttatatttgggaacaactttatgtagaatattgatagtgaacttatattgatatgataataattttttattgctacttatgtattataaacttattaaattaaaaaaaatactgaaaaaacaattattgtaaaaaaaattagaacaactacgaaa

SEQ ID NO: 351367 - DNA, 887 bp, Cannabis indica
gagaccaatatccaaaatcaaaacagtaggaccaatgttaaattggcaagtgagaaaatggaagaaaaagatgaagttaaatactataaattatatacttttataagcaaagtagtggaaagtaccgaaatataatatccaaaatcgttgggtctttcataaatgagaagatcggaagataatggtgaacattggaggattagcacagagatttgcggaagaaatcttcatagtgttgcgacaaacagagaaaagagtaatgtaatacacagtaataaaataaaaaataataatttgaaatgttgatatagacagacaaggatgaataccaagctttggtcttcaaataagagctatgctaaggaagaaggatggccaagtgtggagcattaggaggttaagcctacaggaatgttggtctaatatttcaagtttacttgtgtcaactgatagaggcaagtccaagagataagaatgcgtataaaagcttgtacaattaaaactgcttccttaattcatggtgatatttataagcctaactaaaaatatccagctacttcaaaaaaattaaaaagaaacataacagtaatttaaataaaattcaaataacttttaaatagaaaacaaatttatatttatttaatacaaaaaaaaattctaattcaaattcatatttaaacaaaaacaaaagaaaacagaaaaatctatctaagtggaacattatattattgtttgaaaccgagaaaataaagctttcaactactaaataatgaataatcttaactaaaataaatactatggtaaagtcagtacaaaattaacatatagaaatttaaacatcacatgacaaaattgttgggttttgtgccctaaataaaacccattac

SEQ ID NO: 351368 - DNA, 650 bp, Cannabis indica
tacggtaaatttatcatatcttatccaagttcaatatcatgtcgctatttacccaatatactaatatataattgttgctttcttatatctatatatataatagttaaatagaacaaatttgttaagatgctttcatgtttcgaatcctcatgcctattttttttttctatgtgtatctatattttatttattaagaaaaatatagcggtataagtacttacaaaataaggtttgtaagtggcataaacttagtgtttatttttcacggcataaatacctaatatttaaaaaaattgtaattttttttctaattttgtcagtacagactctgttcaattgttatattatttaatataatatatgttattatgtgaataatatatataaataaattgtgtaacacatgatttatttaacctaaaattgtaacctacactctgtaacatggagagaagttacaaaattaattacttttgtaacttcttttggttgatcatattttgtgtaataaaatggatgttacacaaaattgatgataggattcaaatattatgaaatatagttgttacaattatattaattctcattatatgagataaatgagatagtgtgtttgaattctaagtgtgatcacctaaacactatataaa

SEQ ID NO: 351369 - DNA, 407 bp, Cannabis indica
aggatctttatgcaattttgttttttgcccttaaattattaaatttttataacaaaactctttataatttaaaattatacacataatttcataattaaaattttattatacgtataactttaatttaaaattattacacttaattatttatattttttatttaaatatttaaaaaatgaaaaataaaataggttgaatgtgttttttttttaaaaaaaaaatagctaaatgcctccatttttttttataaggagtcatttactcaaaaaaccaaaccagggtcaaaaaataaagtcaagctccctcaaaaaatgaagcaacctgaatagaaaaactcatacttaattagttcttctagttataaaaaaataatttgatatcatttaaaaataattaattatttgaaa

SEQ ID NO: 351370 - DNA, 688 bp, Cannabis indica
aactttcacatacaaactccaaatgagttgatttaagatgagttggaaagaggaagaagagatctaaagcttctatattttgactttttccaaaatctgatcagaacatagtcaaatttaggcttgaagtttcatctttaatttcttgcaaaattttctttattctatagattgttgttttttgaatttgatcaattgatatattccaagattgaaacttgaaaccaagaaacaagcgtaattctattccaaaaagaaaaagtgaccccaaaatgtagcctaacaactagctccatgccttatatcccttggccagccagcttacagaagtgctagaaagatgaacaaagctaaaattacaaattaccaaagaatgatcccgaaggccaatggagttgagcttgtctgacttgccaccaccaagctccttgagctcctcatccatgcaaggaaaatctctctctgtctctctctctatgcatatatgggatgcctccatagccctttaccctacagctgagtctactcctcggtcgagcctccaggaattctggcccataggtcgttccctcctagaaagtggatcatttatcatgggctacccagcttgtgcaagctctagtggaggaggaggatgagatgatccagcagtgtaacaccctaactagcataggcgtattacgtgatt

SEQ ID NO: 351371 - DNA, 564 bp, Cannabis indica
attcttgttctaatttttagtttgggaccccaatctaggtctgggtcctgggtccaagtctgagtctccaatccaggtccaggtcctaggtccaggtcttggtccaagcccatgtctgggtttgggttcgtgtcccgagtcctgattcaagttgtaatttgggtccgcatctcgtccgactctagttctgggtcctagtcagattctcgttcctagactcaaacccagtcttggactcgaacccaagtctggggtccgggtgtgggttttgatcagggtctgagtccgggtctgggtttgagtccgggtatgggtcctaaatccaaagactgactacgggtcagttctaagccatgaggttatggtccttgtctagttcgactttgggtctcaggtcctggtccgggtcctaggttagggtccgaatttgaggtccggtctcggtcccaatttttatgcccgtgtcacgggtctaggttccccatccatgtctgagtcctaggtcccggtccgagttcgggatccagtcggggttcaagtcctggtccgagtctgggtttgggt

SEQ ID NO: 351372 - DNA, 560 bp, Cannabis indica
ccgtatctatgattagcgctctctcttaattgtactatcatgttcctaagatgtatgtgttacccgaaccaattggtaggctttaatgaacaactctaagaacataaataacactcttgagatcaaacctaacatatatagattaagatcttttgatctaatatcaaccaagtgatattgacttagaaagatacaatggtaagattataatatttttactaggatcaatatcggtcccagtccaaggcatactctttacatccgatactagcatactttgccaatgccctggaaaggacataacacttatccaaggtgtaagtaaactttatcgctaactatcacatcagtgtaaatcaagtacactgatgaagcatgggacataaacttttgaagcatataatcgcaattaccttccactatgttgacattactgtaattgtgaataactatatattttgaatttaacaaaaattatatattaaaccataatcatgataaatacatgtaaacataaataacttctaatattttattgataacaaataagattatattga

SEQ ID NO: 351373 - DNA, 700 bp, Cannabis indica
atttgatgctaaaagtgatgttggtgtttttattggatattccttaaacggtagagcttatcgtgtttacaaattgagaactcaaactatttaagaatcagctaatgtagttgttgatgattttaaagattttttagaattttccacagaagccgagatagatagctttatggatactccaccagaagcatcaaaagtagattctgatgcagcagaactcaattctgacaacgcaaatgacgaatctgccactgcaactgatataggagaaccagaacagcctatctcgactcatccaaacatcatcactgattctatctagaagtaaccaagcaccagagttaaactgaaccatcccaaagatctcattcttggaaatcttgaagaaaacatggtaacccgaagaaggtatgttaatttgattagctttctttgttttgtctcataatttgaaccgaaaaatgtgatggaagccatgacttttaaagaatggctaaatgtaatgcaagaagaactcaatcaatttgttcgcaacaaggtctggattttggttcaaagaccaaaaggtatcaatgtgattggaacaaagtggatttttaaaaataaaagggatgaattcggtacaattgtgaggaacaaggctcgattggtggcacaagggtacacacaggtagaaggtattgattttgatgaaactttt

SEQ ID NO: 351374 - DNA, 541 bp, Cannabis indica
atagaacatgtagaaggtgatcattcttaatcatgtaattaaacacaaatatggataaattcacaatcaagaaagaagaaatagcaattatcattaaccaaaagtaatttcaatcaacattcatcatctccctaaataggaaattagttcataaaatccataataacatccataatcaaaactaaaacagaaattaacataaaaattaagagtttaagaaagaactcagcggtgattgcattctggatcgccaccattgcttcctctgcctccttctttcacatttgggtccaatttatgcctcccttccttctacaacacgagccccttaaatagaaattagggttgctacctttgaaaaagtcaaaaactggccaaaaatcccgtattttgcctctggtcgcgactacataaagcctagtcacgaccataggaaaaatacgaaaataaacttgctgtctggcctcctagtcgcgaccatggtcacgaccatgaaaaaggttcgtgaccatggaaattggtggtcgcgactactgaagca

SEQ ID NO: 351375 - DNA, 562 bp, Cannabis indica
acaataaatgacaaaatttttcttattggaaggaagagttaataatgaagcggtaatcaagcgttgctttaactcatgaaaaattttcttgcaccgatctatctgaacaaacttcagattctttcacgtcaatttcgttaaaggtgttgctatctttgagaaaccttcaacgaattgatgatagtaaccagctagacctaaaacgcttctaacctcagtagcttattttggtgttggccaatcccgaacaacttcgattttggccaaatagaccatgatcctatctttatccactatgtgtcataagaaagagacccgtgtaaccagaactcacactttttgaatttagaatagatcttgtgatcccatagtcgctgaagtactaatctgagatgtaattcatgttcttcttctaattttgaataaactagaatgtcgtcaatgaaaactatcacatgtttgttcaggaaatccttgaatactcggttcataagatccataaatgcagttggggcattggtgagtccaaaagacatcaccaaaaactcgtaatgtccatacc

SEQ ID NO: 351376 - DNA, 560 bp, Cannabis indica
aaatagatgagttagggtttaactcgctggggtgttgattacaggggtactagtaatggaccctccgcaatcatctagaccacaagacaagcaagtagagcccggggctacacgaaccgatccaccagcaccgcctccacctcctaaaaatccgggggataatgcgggggctgttaatgctaatcctcttgctgactggcagcagatgtttcatgaaatgtgaagtgtcatacttcgtcaagaggaatagttgcaacgcttgaggcagaaagttgccccagttagtcaagggttaccaccagctcctgtgccagtggtgcgtaaccaagggtatattatgtcgtatccagactctgtgttcgagcggtttgtgaagctgcaacctccggcttttctaggaggcattgatattattaaagtcgatcagtggatgagcattgttactcgtatcctcgataatatgggggtgacaggaatagggagggtgaattgtgcagcttttatgtttcaagatcacgcccgcgtctggtgggacaaagtgaatcaaactcgggatgtca

SEQ ID NO: 351377 - DNA, 911 bp, Cannabis indica
gttcctgctcactccaacgccttccactcgaacccgagcccaacaagcatctgtcgagaaagaactcagagcatctcgaagtcgtgataagccagtgactccagccaagatgaagcttaaggccaatcctccttcgatttcttctacttcagaagaagaagaaccaatggaagtctcctctgacaaatccgcgtctctacattccgagaaggagattccagaggacatgggagtttcctcagacagtgaggacactgaactcgagccagagcctcaattgacaaaatctgctccaactcctgctcgttcttcttcagcagcaaaggcttctgctgctgccaaaggcaagcagccaatgaaggagtcttctcctggtaatgttccttcaactctttctcactgtcctcgattttattatcgtgataatgagcgtgattggaatttgtatgctacccgtaagtttgaaagtgagaggaattatgatttgcatgctcatcgggtctatggaattgttaagtttattcaattccatcaatgggaaaacactctcactggtttcaatgggtacattgcaaacattgttaaggatttctatgctaatctcactgatgattttcttgatgagaattctagactttttcgaagagtatatgttaggggacattggttttctttttctgaaaaagacattgctcaagccttgcaacttccagagaatgtctccaatgcagttatgtctatggatcgtgaattgatgctctctgaactcactggtgcacggtctgaattgaaatcaggggagagtcttcggattacacatctcacatttgctcatgcatctcttatgcggtttgctcttagcaattgggttccaaactccaacaagaccgtggtgtctcaagatgtggcct

SEQ ID NO: 351378 - DNA, 1242 bp, Cannabis indica
actttaactaatgctctagaaaggccatagcacttagccaaggtgcaagtaacctacattgtagattatcctatcagttaaaccctgtgtactgataattcataagaatacatttaatcacataatcttgattacttttcactgtgttaacatcacaataaataagaatatcaatgtgataaggatttagatgaagttataaatccaataaatgatcatgtaataaacaggcgaaccaaataacacattaaacaagtaatgaaataaatctatttctttattgataaatgaatgttcaagattacattgaaatagggttttagtagggcacaaaaccaaacagtgtgtatattaaatttgaaagtaaatagatgaaaagaaagtttacctcttgaagcctattagggtattctcgagtcttttcatatgttgtatccttggaatggtgacgtccaacttacaccttgatcttccaaatcttccaccatacacaaggactagtgtgggctagtcggataaaatgtatataaagttctttttggatccttaacacatgagcaagaacaattctatagtgtttgagagaaaatattgaatcaaattaatcctttttaggcttatctaaaaagttacgttaaaattatgtattagaatttggtttatatgctatatttaaataaacccaagaaagattttatttaattagttatttaaatttaaatcatttgttaaatcatatttaattatttgaataaataatgtaaccaaacttttatagatatttatttcctataatcgattaagggaatctctcaactaccttgagagtatctaaaccaccaaaaatatccataactacttttcaagttcaaatttaaataaattttatcttttgaattaattaattaacccaaaaataaatccagcaaggacaatcttatatgataggcgcctatcactgtgtcaagacacagtgatagtggtgccacctatgtcttaattaagacattagtggtgtcttttgtccagacaactttaatcttttccccaatttatttaattgataaatttgaaaaaaaaaagttatttatttattacaaaataaataattactattttgaaaaatcaaaatagatttttctaaacttccatacagcttttatccctacccttgacagtgtttcaaggtggggattcagggaccatggacctataattgtaaactccaataaactagattat

SEQ ID NO: 351379 - DNA, 932 bp, Cannabis indica
aaagtatttgtttggcgtatgtttaatttagctttactagtagcaacacaacttatctcctggaaagttcgggtacctctttgctgctcccaatccggagaagaatctgaaactcctgagcatgaactattttcctgttctggtttgattccagtgtggcatcggttgggggtgtggtcggtgctctatcgatgtgtttatggactgatgcaggaaattctcctatttctctttgataggcaaccccatgaggcttttgaattgatgatgacaactctttggtggttgtggtatgataggaactcagttttatttggcaacaagcaatcaagattggatgttattccagacttagtcaataaccatctggaggagtttaaggagtatggtcgacgaagtctttatttggaattggaccttgcaaacccagttgtaaaccgagctactcgatggatgccacctcttcttgaattatttgctcttgcgatggatgcttcagtggttctagggaggggctttgttggattggggggagtgatacgggatgcagagggtgtggtttagttggcgtggtcatcaggtgtgttaggtgatttctctactattgtggcggaactgcttgccattcgtctgagtttgactcttgcgcatcaatgtggtttcagtatctccattattaatagtgattctactgtggcaattggttggattaataagttccacattaatttcagttttcagtctattttattagtgttacaaattaacaacctcagtttgtattgaattaagaaatcaacaagacacttaaaccagaaaataaaaaccagtaagatgaatatgagtaatgcatcaagaaattaagaacagaaagaaataaaagacacaagaaaatttagaggggttcgaactttcctctacaatttgtagag

SEQ ID NO: 351380 - DNA, 707 bp, Cannabis indica
gtggcattccatttaaaatattcagttttacctctcagaaccatttctgttacaccttggggttatgactttaggagttgtatatttatttatactcttaatattcattttgcaaattcagaacactgctagaatcgagcctgaagatgttgccaagcatccaatggactacggattccacgcaccatatctaaattataaagtatattatttagatacacgtaataataatctcacctaataactaataatattttttctttaatttttaattgtatcacttttaaataatatagaaaaaaaactaacataaaatttagtatacgtgcctcgcacgtactttttgctagtatatatatatataaaagagaagtatgaagcggtaacgtagagatctaaaatctctctaaaattaattttcttttttctccttaattctctcaatttttaatattttattaaatcataaatttacaaattaatattttactattattttaataaattttctctatatatatataaaagagaagtatgaggcggtaacgtggcgatctaaaatctctctaaaattatttttcttttttctccttaattccttcaatttttaatattttattaaatcataaatttacaaattaatattttactattattttaataaattttctataaaaatatctatcttaaattaattattttttaaa

SEQ ID NO: 351381 - DNA, 604 bp, Cannabis indica
accaggtttcccaaaacctttcatttgttgctcaactctccaccaattgccatgaaaccttccagggctcctatagaatgcataaacaataaaactcagccagtattttacagaacaaaccaattaaaatcaatttgccattaaagctcaaagctttgaactcaatgttcaaagttgcacaaaaccaacaacacccattaaaaccagctactaggaacttaaattaactcaaatgaaccctaaaatttgaaccctaaacaactcaaaccctaacagcccctgaaacttaatttcacaagttcaaactaaagaaaaacttcaaaaacatactctagggttctagggttttaccttagcttcaagagagcttgattccctagttgaattctagaaaaacaatatgaaaaggttggtccttcccctggtttgcctcagccgaaggaaagaaagagagagagttcaatagaaagtgtcattttccttattttcctactttcttgatttttcccgaaatggaaaaagaagattagaagaattaatctcagctgaaacatttgctaggtgtcacttctttaggcagccacctaaacctttaccaaataaa

SEQ ID NO: 351382 - DNA, 554 bp, Cannabis indica
aattttaaaatataatttaaatatatccattaattatacccataaagggtactaagtaacaaataaatctctactaattctcttttcttctcaaaattgtccaaatttggtgaaaattctcaaataagatatggtctatttttgaattctaattgacttattaaataaattagttgagtctacaagatgatattatctcatacaatgtggtaccatgggcctatgtaaccaaactcctaataagtagattcaaaatttatcaagtaaattttctatcttattaattcctcttgattctactatagattcaaaattgcactcctgattacgtcgaacgctctattctcaaagaatagatatgctattagttatctattatttcaatctaaataatcattgatcatctatagatggtctatattgaatagggactaaattatcgttttatccttcaatttatccttaaaatacttagctacttgtaaatcataattcgagaaactaatataattatcaaaatgaggcctcaatcatttaaactcatttagccaagc

SEQ ID NO: 351383 - DNA, 400 bp, Cannabis indica
attttagttgaatgacaatggagatagagtgataatggaaggataaattatttcaatacaagatatttattaattgatttaccgttatatctttctaagtcaatatcactcgttgatcttaggtctataaattttaatcttaagtttaactcagctgtattatttatgttctttaagttatttgtggaagccaaccaattgttctgacatatatttacatattgggaatatggtagttcaattgagcgggagtgctaatcatatatatggaatctatagcttctatgatttagaagtaaaacgatgatttcttttgagcttggattaatagaaataaatgattgaggtctcattttattaattatattagtttaaattaaaatatcatttataagtagct

SEQ ID NO: 351384 - DNA, 523 bp, Cannabis indica
ttaagagaaaagtcctcaaggtaaagcccatacttcaccagattatcatcggaggtcaactggatgatattcttgtcttcctccggtaactgggcaagtttatgagttctatccctaagagcaagagtgaggggaggacggtgatatgtcggaatctgctgaaaccgagtccgaggaatgctcggatccttcaccatgaagtactcatcaacaaattgcccttttttgttgatggccttatcatccgtgccggtcaaccacttgaagcctggctgagagaagtagaagtaccccgacctgccttgctttggggtagacttcaagtaaaagaaccaggcgacctcgtggggagaagcaacatcccatccttgggaggcgtagaggacgaagagggcggataaatacttgatgcccttgggagtgatctgagcagggcagagaccaaagaagtattggaattattttatcaggatcttagatttactcacaagtatgtttattaacatcctaaataagaactttc

SEQ ID NO: 351385 - DNA, 1442 bp, Cannabis indica
attagcattttggagtctgtattttgattatgcttgtccgctaaataattaaaaaaattaattttcaagtattattattattattataaaatacgggcgttacacaatactggcgtctagagtacctttcaggtacctcataatccatttcagtgcttcctaatgttcagggcctaggtctgaaatgtccctgttgactacactcatggcatgagctaagttaggtctagaacacaccatggagtacatgagactcccaacacaacttgcatagggaacattgctcatcttggctctttctgcaactgtttttggtgactgagatgcagacaacttgaagtgttgagcaagaggtgttgcaactggtttgcacttgaccatgccaaacttgttcaatactttctataggtaggcagcttgagaaagtactatcatgccaggctcaggtctctttatgtctatcccaagaattctctttgctttgcccagatctttcatctcaaactcatcactgagtttccttttcagcttgtcaatctctgactttgctttgctaaagatcaatatatcatcaacatagagtagcaaacaagtttgattgttgaaatacacacatgagtcatacttgcttttagtgtatccaatattctgcatataagtgtcaaacctcaagttccattgcctaggtgtctgcttgaggccataaagagacttcttaagtaagcatacatcatctagattcccattgtcaaagcccccaggcagttgcatatagatttcctcttctaactcaccatgcaagaaagttgttcttacatccatctgttcagtctctaagtccatgcttgctgcctttgccatcatggttctaattgaagcttgcttaaccactggagagaaaaatctcattataatcgatatcttcaatctgagtgaaacccttgacaactaaccttgccttaaatctggtaggctcattccatgaaccttatttgtgcttgaaaagccatttacatcctaccagcttgtagagctctggtttcttcacaacaatccaagtttcgttcttcctaagagattgcatctcttcttggatggcctgcagccatgctgcagcatctttacatgtcatagcttcttgaaagctagtgggttttgaacggtcaacctcttctgcaatcataagtgcatatgcaatgaattcagcataactaaaacgattagggacttttttctgtcttctttctatatcttttgctaattggtagctacttagttcctcctattttcattgtcttccctttctgttgccttagttccatctagaacatcattagttggtgttgtaggagcaacctgccccacctcaatatggacattctcatctaaaccagcttcactgtctttggaagtgctcttggttttcatggccatttcatctt

SEQ ID NO: 351386 - DNA, 864 bp, Cannabis indica
ggacgaaatccttttaatggggagataattataatgaccgcattttagaatatggattagtaaaggcaattagcgttaattattgataattctttaaatatttattaatttaattaattatgggtcccatttttagaaatatgcattagagttataatttctcaattctagagattttattaaattctagatgtatcatttgtattatatatgaattatgctactttttacaatatttgctcggtgacgacgaaaaatgcgatggatagttatttaaatcacatgggtaagtctagaacttttttttaagtgggataatattggaaataaattgaataccgagtttgagcggggttatagtttttgaccatcttacccctaggcttaagttagcttaagtttaagctaaaagggcattttggtcattttaaagggggattaggtggctgcatgtgagagtggcagctggccatttacttgttttcagccaaaagattaagtttaattaattaagttattcatttgagaaataaggaaaaaaacaaagaaaattagagaaaatcatcacccttcctctttcttccttgctcgaccaccacaaaccagcctagacctgggattttctggtgtaaattgaagggagctagctgaattcaaggagtaattagtgaagggcatccatccaacacgaggttttccgttcaggttgtccaactcacttgaattcgaaaatgaggtaagaatagtgtagaacatgtgatatatatgcgaatatatgtatgtgtgatatatatatatatatgcatgcttattatggttaatacactaccaacacttgtacgaaaatggtacagagtgcattgg

SEQ ID NO: 351387 - DNA, 700 bp, Cannabis indica
agaagtttttcaaagttaaagttattgaagtcctacttgcggtctaccatgttacaagaaaggcttaatggattagcatcgatagcgattgaaaatgaggttttggagacgataaaatatgaagagttggttgatgaatttgcttcaaaaagcgttcgaaggatggccctttttaaatagaatgttgatattggcttgaagttgtattggaattaataacaattttaataaaattgtttgagtttttgggtgcttaattatgtaaaatatactttcgtaatatgataatacgtaaaaatattatttacaatttatatttttttttttagttaagggcctatttttttaaaattagaacagggtctctaaaatatttgagacggtcctgatcatggtttatctttcattgtaataaaatctctaacaatcaaaagcttatccatttttcaatgaaagaagagataaatcaagattgtgagaatacatggataaaagattttgtatgaaaaccattcatgggtgagcatggtggtgtatattatgtgatttactattttatataatagtaatatatatgatatatatgagttatatatatgtgacatatatatgattatgtgtttgtattatattaatatatactagtatataatatgatatttgaatttatattatgttattatatgtatatatgagatat

SEQ ID NO: 351388 - DNA, 569 bp, Cannabis indica
acgattttatttatctataatatatgtagtatacttgtgcattatatatattgtaatatatacacattccattaatccaagctagctaccaatacaaattatcaaaccattaagaattagtatatatattaataaaagagtttaattaattcactactatgtatatacatctagctttatgataattaataaaacttataaattactttcataaaagagatatgtcaagactatattaatatatgtaaaatgtaatttataaattattgctttctaaaataatattatgctcaattagacacacaataattattcatgatatcttacttgagttttttttgtacatataaaatacatatatccaaatgatacactaatgtagtcgcaatagttaaaaaaaaatcttcaaaaaccaaaatctcgaaccctatttcaattttattttttaaaaaatacattacttaattaaaaaaaaattaaagtattacacttaatatcacttcacttaataaaaaaaataaataaacatatatatatatattgtacttaatatcacctataattaaaaa

SEQ ID NO: 351389 - DNA, 1347 bp, Cannabis indica
attttttaattattaatagggaaaaaaatagaaaaattccaaaaagggaaaaatattacaaaattacgggccgacccattcaacatttatacagcccacaatgaaaaaattacaaaaataccacctggtctataccttaagccgcacggaatgaatggagaagatgaagatacctccatcgatcaaatctgcaatacaaccagaatgagggtaagacaaccataaattccggcgaaaaatgattggaaaagaagaactgcaatgatctaaacagaaaattacaaaaaaaaaaaccaaaaaaactgggaagaaactgaaattaaacatttgatttcggttttaatcgttcaaaataactcactccagaatcgaaaatccagattcaagcaatgtagatctgtattaaacagatctggagctccccctcgaatccaaaacaaggtatgatatgaaatttttttcaaaaataaatctacgtcatatacagttgcattctggttgattcctggtttacaataggcaattcagattcttaaaaacaataaacaagatctgattctaattaaggaacgacatgttacgtataagcctgtttttatttttttgcgttgccttacagttgcaatatcattttaaaatagtttacaaattatgaaggaatttcacttgacgggtaccaaaaaatagcagatatacaaggtacgatttatgtaaatggttgcaaattagttttataatagctggaaattgatctgattcaaataaaactgatgaaaaagcacaatgaccacaactatgttaaattgagttaattgttatggtttttcaagttgatttacagtcgcatcatcattttataatagtttaattcaattttttgcaggaatttattttggaaataagaaaaggagaaaacactttgagaaatggttagtttctgaaataaatttaaacgtttcttgatagtttcattttagttttattatagtttattaacaccaataaaataaataaaaataactaaagcaggaataagaacaggaaatacaagacttgaacaaagggaaggaaatagaagtaagtttctactctatttcataacagaatcaaactagttttaatattgttgccttgcactaataacaatttcaaaatcacaggaaaaaaggacattccattcctagtcttttgcaatggacaatttgatgatcgaatgaattatcaaaattatgaagctagtggacattacatttcagtcaattgtaactatgaagaattacaatggaagctgaaagaggtcctggaatgcaaccaagaaaacactgttttgcaactgaaatatcaagt

SEQ ID NO: 351390 - DNA, 885 bp, Cannabis indica
ttattattaaaaaaatttgtgacataaatacttaaaatattgaatttgttgttataaataccgaaattcgaaaaatagtagcataaatcttcaaatttctaaacttaacagttttataattttattggtacccaatataatggtcttgatcggagaccaaatcaaataataaaaagaagacagatttgagtttggatttgattcatttataatgtaatttttattctgatatgtttgttaagttctaggttcgaattttattgtgtgtttttaatgtttgagttttagtgttttattgagattctactgtttaagtttgtgtttatgagatcttattttttaatttatttcttttcataaattttgagaacttaaaatttgatgttgttcctattgattattgggattgtttaatttttcatatgggaattaaagtttgccttttcgtttcattgattgaaaaatattagtagaaagtttatgaaatgagaattttgaatatatgaaagtagaattgaaaaatagcatttgaatccagaatcaaagtgttatcccaatttttgatctctgacgtggcatcgcataatggtgacacgtgaaatccacttggagtatctgctcggaggggacagtccgagcaggatgcctcgctggcatgcccagagcaaagcaatcagcaatccgcacagggcaaccaacacttagcgaattcagctttcgcattatgagtcatcaacgaaatccctttaacttggggatcagattacagggatatggcatacacacgatcccacaatcagtgtattctgcatcaatcccacgatctttgtactcagcattaatcccacgatcattctgtttatatccattataacgagaggggaa

SEQ ID NO: 351391 - DNA, 744 bp, Cannabis indica
gaatatattttatttttatcaaagaatgtaaatttgttaaagtaagcataacgttttttagtttaatttataacattttttttaaaataattttatattttaattgaatttttaattatttttctttatttattaaggtatgaatttataaatataaataagtttgatttttttttctttcaaaaaatcttagttcagttaaatttatttatttaatcttttttttattttttttaattaatagaatattataatttcttaaaaaaaaaaaagaataaataattttttttaataaaagggggcaaaatttgtattggcaaaagtttagaggataaaaatattaatttttaacggtaaaagaaacagaacctgactgacataattatgtaatcgttatattttaaggagaatatttaataagagggcaaaatcaagtagtgtctaaagtttagagggcaaaaatactaattattttattaaaaataataatattataaataatatattaacatttaaattaatatgtatagtgaaatgttataatatatatttaaattaatttaaaataaatgatattaatatttatatatatacttataacacccttaaatataaatataaagatgaagagatatcttatatgtaaccacttgaggctagctcaagtggccataggtgggtgtgtgagtcttggaggtcctgggttcgagtcccaggtaaaacatgttgtaatatataaacgct

SEQ ID NO: 351392 - DNA, 548 bp, Cannabis indica
aaatgtaacgttaacattgctcaatctttgagcttcatatataatccattatatttcctcgtagttaaataggattacccttatttacatctttgactaaaacaagtgttgttatagtgcaaaattttcacctagaaactcgagatcagtctcttatgaaattgacacgtgtatccaatctctgggggatggatgagctgttaattaatgactcctcgagagttgaccttgtttaacccaaatttgcgagatgatgtgactttgatagcgtctagtcgctaactatgtctcgcataaaataaaataagcaggattaagaggggtttatacaagtcgcacatatatcaaaatatatgcgatgattaggtagcgttctcttgcgatttggtaaagatcgcttccttacataatgaacttgttcaaacgacaaagcgtattcgatgacttgatagggactctcatataggggtgttcattggatcacatccaatggatttggacccatccgattcaatccaattatttattggatattggatttttccatc

SEQ ID NO: 351393 - DNA, 834 bp, Cannabis indica
ttaaataaatgaaaaggaaagacgagattataataaggtgacctctcatatgccatacatgtaactgccatgtaccaatcataccttgtatggatttgctgagttcagttaaatggatccaagttaaaaagttacagtccccacgccttaaaataatgacacttggaattggatgcaagtttattaaaggattttcaagaaggtaatgcattctttgttagttattgaaattactctagaaaacctcacaatctttaatcatgttcgactacaacatacttctctacaagccaattgatggcacgtgatatggttgcacctgttcatctcaaattactcattcccattcacaagtaagatgatgtgaatgcatctatcaatcccacattacgcaatagtagagcaagagtactatacttatagaaaacatgaaaaaaataaaactttcagaaactaaagcacttgtgctaatgtcgctctacacatgcaaatgactttaggctgagatgctataaaatttaccactgcaatccaatatagactaataaaatgaaaatcaaaccactgtggtagctaatgaccttttgaactccattcagtgtatgagaggaagccacactttgcttgccattctctagtggctgagcctgacaggaactacgaaatagaaatcaaaagaaatgggacaagtgagcaattgcgaaagatgtgaagaacttgtaaggtatacacagtcggaatcacaaaatactaaactaataaacatctgtgccaagaaatcccagaaaagcattaacacctgaattcattcccccatgtctcatttaatattag

SEQ ID NO: 351394 - DNA, 1664 bp, Cannabis indica
aaataaagatagatattacgatattcagaaatagttaagaattaatctccatcctcaacaatcattcaagatcaataataataaaaaatattctgatttctcaatcaaactattaaccccgtagaaaatactgaagcactcaattttttcaatctccccataacaattaatcaaggtgaagcgctcaataattaaatctttttaccaagcaatagatctaggaagcatgcaatctatttatcctatgaaaagcattaatttctatggagataagttaatctaggtagaaaatcaatgaagcataaccacttgaagctagctcaagtggccataggtgggtgtgtgagtgttggaggtcctgggttcgagtccttggtaaaacatgttgtaatatataaacgcttaaataaaaaaaaatcaatgaagcatataatttatttaacttatgttctatttttcatcacaattaataatacccttgacattactattaatcgcaaattatcaccctatttagaatctgtagacgctaaaatctacaatgatcggaatgagcgttagtgggcaccgacaacctgtggaacaaagacaaaaggatggccgtgaaaccttggaacaccggggtggtgtcggccgaaggcactctgacggtcatgtcagtaaatttatagtgcgaagtagaaaagaaaataagaaatgtaaataaatacttcctgtgtctatggttatgtgatgatcgacggtcaaaccttgctcaccggaatgagaaagattacgtcagatcgtagagaaatgataagtttagtcgtaaaactatagagagagagagtgtgaatattcgtatatctttcgatgccctcacccagtcccagtgtgggcctatttattatcttaggaaaacggctacctcttgaaacgtggtccgtccctagagaaacggtcttcccccacttctccagggatgagcgtcatcttttaggttcgttcctggatgagcgccctccccttagcgtatcacttagagggttgatattcttgctccgctatgctagggaagattgctattttcgtgggttagttgggaaacttaacgttcttcttcctccacgcgtcaaccctaacattacactttaagatcaagctttattgtgggttggacattcgaatatgggtatgacccaaaaggcatggattgggcgtggcccatgtgagccattgggcttacgggttccttgtttctgacttataagtgggcttcgtaagtacttcgatcgttgggccttttcgttgggcttagagcaatttttggccactacagtttgtcccttgctctttaagttgagttatactcaagttaaagagcattactcgtaggtgtgcatgattgactcagagtgcctgtagcgtgattttagatcgaaaatgattgggccggcataagttgaagtagttagactgaatatatctataagtaattttgttttgatgagggcttgttacatcagtgactttcaaggcaagtgtgttgtttatcttcaatttgttggtgcctcatcttgttcaatgtgaaattctaatatgtatacatcattgggatgagcgccactttgagagactaaaaaacttttgtaagtgttacaatacatgtatacataatattagat

SEQ ID NO: 351395 - DNA, 867 bp, Cannabis indica
ttttacttttctacactggttgtttgttcttctagagttacagagttattttcggtaactgttttcagtattagttttattattcggcatttaattaaacacttaattaaataattaaattgggaatattgaaataaggaatttcaagtataatggttgtaattgagtgttgtcaaaaattttaaacatgcctaaaataacaaataaaacaatgcaaaccaaataaaataacatgaataatataaaatttatccaccatcgaaccgcagtacatgtattcgcagaacctacttcactatggttgaatatataagatattcgcactcaactaacatgcatattattacactcatccgaccgcagtccaatatatcacaaaacctacttcactacagatgaatatttaagaaattcaaactccactaaattaataacaaaaagttagtgaatgtatatacctatggcaagctaaaattcgatcaacactaaattattcggaaccttaaaaattaactcacaaccaacaatatattaaaatatgataagattataattttaattatttaattacttactagttataaaaaaaagtaactagttaattcgtaaattatacacataaatttttaaaaaatttacatatacatacatatataataaattgtatctcacataaacaaaattttaaaaactttatttctaagctaattaaatctctcctatctctatctcattcacaatacatatatatatatatagacataattattacttagaatatatacaatacaattataatatttatataaataaaatgtacaatatatatacacaaaatacaaaatatatacacacacatattcaata

SEQ ID NO: 351396 - DNA, 623 bp, Cannabis indica
atggttcttttatcgtgtgttctcagtgccgttgccctctgtccacgtcacccgttggactcgttcaaattggttacttccctaattattagggagtagtaaccgtcttcttgactggttccatattaacttgatttcacccgtttggctgactggccgggctcaaacccggttgcgggacgatccggcttgtggcccatcggctcactcgttagtctatttcaaggcctagcgagtccgtctgactgtcttattgggcccaatattgttggatccattattgatgggctcgtctgacttgcatattggacttctcaaaaatatcataaatattaagcaaatttttacctctacagataataaaacagataaaagtgcatcaatatatccattttaagggggtgtattgtagaatttgccattaatttttatgacaatggtgttatattacttcagaaaaaatggtgttatataaccttgtttgtaggcttatgcttcttttattttggtatatttttagctcaactttcatttagaaaatgtgttaatattcgatttataacatcaccacttatttgcaaaattattaaaaggtaagagcatgtttggtattgttttttgtt

SEQ ID NO: 351397 - DNA, 642 bp, Cannabis indica
gggtccaaaatttttttttccctatggtccacttcgtttcaggaccggtcctggtaagactcaatatttaattatagtaatagtaagagaatattagatactagggtgctttttaacaattctcttaattacactaataaagatataacgaaagtactaaacatcaaaatattttttaataattctcttttataaattgattaatcacttcatcatgaaaataaatatcattaaaataatattaaaagttatgtttatatatatgtgcatatgcaatgcaagcgcatatactctcgaaagataagttaacatataaatttttttttgagaagaaaattaaaatataattaaaggcttctattatgtatattaataatatatgtttcttttatataaatattatatatatctatgtcacggtatatataatatatatataaagcttacaataataaagaaagggggaaaataaacaaagatataataatatagttaaagtgaagtttgattaccatacaaaaacgatgtcatctcttaaaagatgctatagataacaaattgtatatatataattaaggagattgagctttgaaattgcagttaaattttaaaatataattgtatattgtgattaactacaag

SEQ ID NO: 351398 - DNA, 853 bp, Cannabis indica
ggttttgatctgggttcgggtttgggtttaggtcctagtcctggtcctagtcctagttggattcacgttccatttgttattttgagtttgagtttgggtttgagttcaggtcggagttcgagtccttgtctgagtttgggttcgggtactaatttcagtctaggtccagatcaggctccgggtgttggttcgcgtcctgggtcatggtctaggttggtttcgagtcccaagttccaataccgatctaagtctggattcagttctaggtctcagtccttcgttctgatccttgtctgggttcgagttgggtccgggtccgggtctagcttttggtctgattctaggtgtgggtgtttgagtttgcgtccgagtctgtgtccgggtttttttccaggtctagaccccgatctgggtctaggttcaggtccaggtccaagttcgggtcacgagtgctggtccaagtttgggtctgggtcaggattacagtccagatctaggtccagcattacgatcacagtctaggtcttggtctaagtccaatttcgtatttggatccctatctagatccaagtctgtgcttgggatcgcgtttgagatttaggtccaggtccgggtatcagtttcggtctgggtacacgactgtgtccgcgcccgagttccagtctcagtttgggtctgaggcgaggtctgcgtttggttctaggtctgggtcccggtcctggtcacggtcctagtcttgttctagggtcctagtttggcgattcttgtgcatgttgtaattttgggccctaggtctgggttccggtttggttcttcgtgtgggttttggtcctagtctgagtcccagatctag

SEQ ID NO: 351399 - DNA, 613 bp, Cannabis indica
atccaccataaccctagaatccctgaatcccccaaacccagatcaccatcagacccaccaagtcccaagaaatcgcaaaagctctcttgatctcgatcaaaacgacgacgaagtcgacgacccagaagaccttccggctccatctcatcgaaccagcgagagcaatctcatgccttccacgagggccactgccttagctacacccagcattacctctgtctatcgtcgcggtacgaagcggaagaagattggtaataagagaaaccctaaaaaccctagccgactcgactccccacccagctccacgcacagccaacaccgatctccttagggggtaagattatacgagcaatcaacgttagcaaagtccttgagcagatcaagcccagccgcaccgagcttcccatcaacgaggatcgtaggattggcatcaagaccagcgaagacaatcaataccaggcgatgagactgctgccgccaccggggttgagcgagacagagaaagcggaggagagagggagcttggatgagagagaaagggaagcatttcctaaagggttgagtcggagggtttgagaagttgaggctgttggaatttattttaccaggatct

SEQ ID NO: 351400 - DNA, 458 bp, Cannabis indica
ggccggcccatagtatttttgtaattttttttccttttttgtatttttctgttttttccctatatgttattattattattattgctattattattatttctaatacatatttatgtatatctatttggtttttctctttcaatttcatcttctctattaattaaaattttttcttttttacaaaatcctataattcctaataggttataggatgtcatatatacttaaattagttaaatgaataatgttatactaaaaagataaaacattttgtaaaattataaactaggattattgtttaatgtttttaaataattaaatacttaaataataataatgggaacaaagatgattgttcaaactaagagaggtacttatatactaactaacactatatatatttctatcaattccgtacacttaaataggctgaaaatatcattttcatacaggattgt

SEQ ID NO: 351401 - DNA, 671 bp, Cannabis indica
cggcatcctcttttgccttctcgtcttccctctttgccttctcagcttcctccttcgctttctcgatttattgcttaaggcgggtattttcctattgggcgtcgtcccagtgcttattcacaaccttgcattgggataataacttgtggacctcgccctccaagtattcgagtcgctcaaagaatagtcgattggaaccaaaagaagcaaaagaagcctggagaattgcaaacagatgaatatgaaagaggtataaaaagaataatataattataataacaaagccaacgtaccatgaagttatattccaagctccttgaaagcatctcttttgggctcctaagattgagaaaaccccaatcagggggaataaaagtttgaagtttgcgccaacaagcgactccatatgcttgggcaaattcagaactgacctcccctgctgcggtcgacaaggtctcaatggccttgctcgaagaagcagtattgggggttgcctcgggacgaggagcattggcgttggaaacggccggaggaggaacttattcttagatcttattgtcagaaacctcaagatcgacgggctcggccagtgatttcttcttatgagcagtggttttcctttgcctcttaggaggaaccacctcagcggcagtagggactccagggttggt

SEQ ID NO: 351402 - DNA, 1084 bp, Cannabis indica
gtggcaacaagggctttcttcttttggagagtgttgccacactcggcctgaatgtgtccgaacccatcacattctctacactaaatgcccatgctcttattgtcactaggttgttgaccatgtctgaagttcccaagagggtttttttggggaacattttcctttccctcaaaaaaaatttcttgcacttctttttcaagaattttccatagttcttggtcagcagatctatagcttaatctgagaaaccaacagacacatctgggatagacttcttttcttctttgtgaattgttgttggaggaatttagacaacaccaaaataaataatataacaaatatatgagcagagaatatgcgagtactcaacctagaagggcgagtattcgagctaggaacacaaacatattggaaatataatagaaatataaagaacacaaaaggaatatagtggttcagtcagatcacggtctgcttagtccactattgcaaggattttatgtcttgtccatttcatgttggatcagtcctttatatacaaagcaagtgtcctttgattacacagagattgaattcatatcaatctgtttgtacattgaattacaacaattaaattaataaaaacataaatacaataaatgaaaaatagtttcggcccaattcactaaatacagcaatgtatgcaacttctatagtgcgagttgtctgttcacatcttgcataagctcacaggcttaagatgcatacaagactagtcgagtctaggatgtctgtgtcctgtttgagttgcttatacaaacatcttgtaataagtcgataacctaaggcatgcaagtccttattgggctattggggtgttgggtcatctagaccagctcgtagagtaaagaatcaatctttacaagttagaggagaatcttggtagtcctcgcatatatctcggtatatgcgagtcttgaaccgctccttggtcctactttatgcgaactatataaatgcgactagactctatcatggtcacatcatcccgctgagtctagttcaggcgaggtttacacttaagaggtctcacattgacatctca

SEQ ID NO: 351403 - DNA, 1113 bp, Cannabis indica
ggcacaaaacccaacacttcatgtatgaaaactcaggcgtacccctagcatacgtaagtccaatctccttgcacctccacataacttatctggatactatagctgtcaaacatgtccctctgtatgtctctagccttgtacttagttctatcttgggtgtactttgccttaataaggtggtcaaccacccatggtgatgcttgacggtgatctgaacgtttcgcattcaggttacatgtgtgttcgttgtgtaatacagtgacctcaaagttgtcaggatgcatcttcttcctccccctcaacacattgggggctgacttcttcaccattcactcaaaattgttattaagtgcaaacctacccaccacttgtctcagttcttctttgttttcataaaaattaccaagctcaaacacccatggttcctcgctttgtaaacaagtagttagctcatgattttccattatatcttcctctggccacataggagctttgaacatggtacaaacttcaaaagaggagaacgttgagaaggttgcatgacgagaaggagcatgttcttcgattttaccttgtcgactactgctagttccaggtgtagtgcgattttcattacgggcttgtcgttctcgctgtgtaccatggttgctcggtacacactctgaccttaaggaaggtaccactatggcttcattgactgccaaattatgttcatcgtccatattcaaatctatagtaggatcgttattatagaaggtagtatcaaactcctcaaaatgatcaaatcccgtcgcttcttactgttgatctacattactcggaacctctacattggtgggaacctcctcattcactccaatcccaacatctgtttcgggaatgaaagaccctaccacactccgagggagaggattagtaggcggcgtaggctccgaattcccaacttttctcaccttggtcacgaataatgacataaattttgtgttcgacattgttgccctcatctctaagaacgttctcagttggcgttctttcttaataacctctggcggaaccatttgtcccttctgttggaatttattttaccaggctcttagatctactcacaagtat

SEQ ID NO: 351404 - DNA, 849 bp, Cannabis indica
cccacgttataataactaagtgaaatagcataagatcatggaggacataattgtccattcagcaaggccttatggtcgaatagcagttcttaagtttgctcagtacactggtgctcatgccattgatggaatacgagtaaaccaagtcattcatctctgtacaaagcgagatgcctctagcgagatgcgtttatcccacgtccgtatccactactttgaagataatagtgataaacggttattcaaatctttaccaatacacgtgttaaaatgggacgtggtcaaagcccacatttcgtggaaacagttatgtatttcaaattcaaatgtaaataactgccaacctatattcctataaataggggcagattatacaaaaaaggggacacaaaatctttgagaaaaaaaagatcattgattataaaactttaattctgtatctagaaatatcctaataagatatactcgtggactatgcagaattaactggacaactacgtaaaaaacctggtgtcattattgcttttattattcttcccaaatttcttatagtttctgtatttaatttattacgataaatgcttattaattagttaacgaaaatctgcgttaacaaccataaaatccaattcaaagtaaaattaccttgagaagcgaccattatcatttatcatatgcattatcatatactcattattacaatctcatttgcgctttaaataatacattatctcaaaaaataccatagtatatcaataatcagctaatgaggaacaaaaacacactagcacgtttactatacagtattcagaatcggaataaattaatgaagaaatgtaatggaataaa

SEQ ID NO: 351405 - DNA, 793 bp, Cannabis indica
gatcctggtccaggtccaaatcttggttctagtcacgggttcaagtccagatccaggtccgggtctgagtctcgggttccgatttgggtctgggttccgagacccgggtcctaagttcaagtccggttccatgtatgggtttgggtcctactactagttccgatttcgatttcgtttcttggttcgggtttgggttcgggtctgggtcgaggtctgagtgctggtccgagtccaggcttgggtctgggtccacgtcctgatccctgtcagggtcttggttatggttcagcactggtttttcggtctagttttggcttcaggtccaggtcccggtcttggtttaggtcccaggacacaggtcccaatctgggtccaagtctcgatatgggttctggtctgagtttgggtttaggtttgggtcctgttacagtcccatgtctgagttctagttctagtcctggtccgatcacggtctgggtatgggttagggtatgggttcgagtccaggttcgtatctagatccatgtcaaggtccgagtttgggtctaacatcgggtcctaggttcaggtctgacctgatcccagacccggaaccggaattggaccaagattgggactagaactcggacatgggactgtagcaggacccaaacctaagcccaaactcagactagaacccataccaagacttggacccagaccgggacctgtgtcctgggacctaaaccaagactgggacctggacccatgtaacgccctgtccaacagggacgccacgtgtgtgcactttatt

SEQ ID NO: 351406 - DNA, 901 bp, Cannabis indica
gattaattaatttgtgatttcttcctatacacataataataatctcaccgaataactaataatattttttctttaatttttaattgtatcactttaaaataaaatagaaaaaaaatagcataaaatttagtatacgtgcctcgcacgtagctttttactagtatatatataaatgttgaaacccaatatcgcacaacgggctctatgtagaatattaagcattgaaaattgataaataaagaagaaattatacaaattaaaatactgcggatcggtattcaatgacgctattttaatgaataaattattctttgttatttttataaatatttctttaactgcgtatatatttaaaattaggataattataatgtactatattttatataaaaaaaaattacgtttaaagaattttttttatatttttacgatttttttatagaaataacaccaaaaacaacaagaaaattacataaaagtaacatgaaaataacatctaaataatatcaaaacaacaacgaaaaataatatatagataacaaaaaattaacaagagtataacataaaaagaccgtattttctgtaaatcaaattaaaaaaatcgtaaaaatatttaaaatttcgtaaaatcgtatttttataatttttttaatatttttgtgtatttgtgaaataatcccttttataaaagggaaatttacatggtatactagcttttgttatttttttacaaaaatactaccaggcggtattttttactttttttactgtgtttttttataaatttcatactgcagtatactgtgttaagttttcactggtgttctattggtgttttttagttgttctactgttgttctgatttgtattttactggtattttataaaaacacagtaattt

SEQ ID NO: 351407 - DNA, 1442 bp, Cannabis indica
tccacattactagagcggtcattacacttaggctttcgaaatgttcgtcattggaatgtagcagctttggggagatatgtttgggacatagctagtaaaaaagattgcctctttgtcaaatggatacacaatgtgtatctgaaggagcaggattggtggagttatgtaattccattggattgcagctgggcatggaaaaagatagttgctgtcaagaataagattaagcaaaaggtagacatgaatggctttgtgatgtagaaatataagatgcaacaggggtaccaattgttattttctaaatatgagaaattgccttggattaatctagtttaggatagactcattattcctagatataggtttattctttggctggtgctttgggaaagacttaacacgaaagagagaatcatcaaatacactcataacatggatacaaaatgtttattgtgtggaaaagaagatgaatccatagtccacctgttttttgagtgtgactatagcagataatgtctacaagagataaaacagtttctgcaatggaacacaccagcaacaaacatcaaacagctgctgcaagcatgtcaaaatacgaagaggttctctgcagcaagaaaaagtatggtgaaaactgttcttgcaagtcttgtgtattacatatggaatgctaggaatgaagtactatggaatcaacaagtgtggctcattaatactacggtgaagaaatctcagcaaatgagcaagctcagaattaattaaggggttgctccccaagaaggccaaggaagaagataaaacatggattttgatagcgtgattatgaaaaaaatgctaagttgtaagtgtaaaattgtcagcaaaatgtaaagattagtgatgtgaaagattggtttggagcaataaaaattcttattcatcaaaaaaaatatatattttaatttataaaatcactcttaatatatataagtatggaagaggtttcgatggttacatttttattgtaaccatcatggttatattttttttttaaccattggattactattaaatggttgtgattaatttcgaaattaaataaaaacaaataataaataacttgtaacctgaaagtaacctaataatttatttccttataaaactttaattaagattaattatattttaaaattaaattaattataattattaatttttttttaatttattactatagaaggatcttttagcaatttatttttttgcacttaattatttaaaattttatagcaaaattttttataatttaaaattataacatataatttcataatttaaattttattatacttgtaatcttaattttaaattattacacttaattatttaattttttttatttaaatatttaaaaaataaaaagtgaaataagttgaagaatttttaagaaaaaaaaaatggac

SEQ ID NO: 351408 - DNA, 578 bp, Cannabis indica
gggcataaaacccaacatgatctttgttaatacgggttgaccccgaaagacatgttctagagaagtggttcattttgtgctcatgacttctacttcaatgattattttaatatttataatttagattgttttactatttttctttaacattatttattttaattattaaattgtgtagtaatagagtttatttattattattttgtaggtcgattttgttgagggcatattgttaagcccaaaaatcaacaaagttgattttcgagattagtcaatgattagtcccagcggttgagagacatcaatcataagagtcggtcgaagaatgattgagtcaatgcatacggtctatggatcgttaatcttgaaaatccatgcttgcaagtctcagggtatatccgtccaactcggaggtcaaccccgtaacaactcatgagtagagttagtaagatcaacttactaagttacaattgttggaggattttcgtagtgatatgtttaaaattaaatctttccataaacataatattcaaaagtctctttctcatctgtaacgccctaatgctaaggcacgctac

SEQ ID NO: 351409 - DNA, 491 bp, Cannabis indica
aataagatgaaaacttacaaaatactcatcataagagatcgttacggtgttaaatgcttcaacgaataaccatccattagggggacgaagtctagcgtctcgaggttagattgaaaacataaaccatgtaggaccaacaatggagatcgaatatcctaataactaaagctcattattttaaagagttgtattttctttgatacttattttaatctatttatttaattaaaattaccaatttagaataaaattctaaatataaattttaatttaatatttataaaattatacttaaggaagatctggaaaaataaaaataaattattttccatccttagtattaattttccaataaatattacgaaaattattcaatttgagttgatccaaaattaattaaaaaatttcaactcaaatttaattttctataaatatataatgcaaaattcataatgtatttaaaataaatacaattttcgaaaatgctataa

SEQ ID NO: 351410 - DNA, 603 bp, Cannabis indica
aacacttagcaattccagaactttcatcgtgaagcataaaagcaatccctataatctgggatcatatcatagagatatggcaagttgtccaaatcccacaatttgtgtattctaaatatgtaatatatgttcttaccaactatagacattgtaagtaaaagggaaatcttccctcaagcatttagccctataaatagtgatccattgtcattggtaaaggggtcgaaagaattactttagagaaatctaagagagcatactcaaagatttcatcgtgagagcttcaagagaggaaacaatgtattctttgttcttgagttaatacaaattaaggggagtaggctattaccgaactgaacgaggttgaacctctttaaaaccttgtgttctttcttatttattcgttcatacttcactttgattttattttcttatcgcttattatttgactcattgtccttggctaaaagtgaggtcaacacacataattagcattccatttacatattaacatatagagctcaaaatgagctttccaacgatataaataatgtttataacggagttccaagtcaaaagttatggccaaaacaaaatcaggaa

SEQ ID NO: 351411 - DNA, 700 bp, Cannabis indica
agatcctggtaaaataaattccaacaatattttctcctttagatcgatcacccatgatcttgttagttctaccacttcaaacatgctctcgtttattggctttgcctacaaattaggttaatataatcaattttcaaactgtacaacaaacgaaaaaataactattaggaaactgtaatgcaacttaaagtttaaagagattttacaatttctgtcaatgagtccacaaagttgttgactagctttttctctgctctaggtgtcaaaaatgttgtggttgtctgtgcttttttcctgtttgtgtatgtccattgttgtatcaaagctctcaatgactccattgttgtgattggtagttctctagctgttaagtttgctgcatttagagattcagcaatgttagaagtcgtagttgaatacctgttgtgtttgttgtggtatcttgaccatttatggtatccaacttgttgtaaatatggtctaacacgaatgtccaagcgatccagctcgctcatatagtattcaaatttcctctctatgtatgctcttgttgctgcgaagaatgatttatcgagcttgcttgcattcttcttgaaggttgctttcaggttgcttaagaggtggtatacacaatagccatgtgttatttctggaaatacatgagcagctgccttaattatgctctcatgtctgtctgaga

SEQ ID NO: 351412 - DNA, 711 bp, Cannabis indica
atatgtagttcattttatttcgaactctagactatactcaatacaccacaatactctatggcacacatatttttgattaaacatggatgtaatataattagcaaattatttagaacttattcttgatcttaatttatgttccaattaatatattactgttgtaatagaaactgataccaataaaaattcttggtcatagtatcacagtaccttatttgagtgggagaattttaaaattctaagcccatcttcatttggatgacacttgtgataggaactttagaattcaactgagaaagtaaatctaaccattcatatggatagaaataacttatcaaaactttgagaataagatagtagaatttttgcatagtctattcgaatgacttaggcaaaaattcctaatcctcatgaaaaattttatggtatctctaatgattacttgatcttaagcaagtattgaacattaatgttaatactagattgctgtgttgatgacttagtctagaaggaacttacagtttcagactaagataatatgtcacaacaagatatccttgaaaaacaatagtaagaggttaaatgtacttctatgtatgaatttaaccagactcctactgttgagtgggagccatctgagaagtaatcaatcaaggaacattaaaagacaatcaagaaaatttctgaaagtgacctgtatgttagatgata

SEQ ID NO: 351413 - DNA, 565 bp, Cannabis indica
aaaaagaccaaaaaacttaaataaaactagcaatacgtggctcggcacgtacattcacctagtataataaaaaggatttatatcatgtttaataaatcatctactctaaaagactgaaaagccgcaacaatacaaaataccttaattatatttgaaggataagaaagtaattacatatttagtagcaattattcatacataacacttatcacatatatttcatcaaaaaaaaccaataatggaccccaaacactttaccctactaacttaataataattaccaacaatacaatagaaagaatacactatataataaaataatgcattaacataaaatataataaaattataattttacccttaacaaagccaaattataaaaacaccataaatagagatttaaattcaaatattcacatctttatatattaaaagtgcctatctaacggcatttcttagtttaacagaatatactttaaaaataaaagaatattctattaaatttaacgataggtttgatccttccgttaattttcaaaaatatataaataattaaacccaaaaa

SEQ ID NO: 351414 - DNA, 603 bp, Cannabis indica
aaagacctaatgattccaaaagatattgtcaacattagtggagaaaggtaagcatgcaagcttatgagctatcgagctatggaatagttggaaagagtaaaactttcataacaatggttcacgtgtgaataaattttgtggttttacatagtgttatgaattgagcatctgaattaattgttagagttagtaggattgaaattagagtttatgcaaggaagaaagcagagcatgagtcagcagtgtaatgattatctgatagcgtagttagttttttttatcttactcgggggcgagtaagaatctagtttgggggaattttgttaggttatatttagcctatgtttcgggtttgaaaagtaagcattttctcgtctattggcgtcttttggagcggttttacgcttgattttcattgtttcaaggggtatcaaagttcaagttcagtcaattgatgaaaagacgagacaaactggcaaaaaatcagaaaaatctgctcaagaggtgtcagtagtcgcgaccaccaatgagccaagtcgcgacccatttctattgtcgcgactctggtcgcgagttttaggaattggcagaaactcagttttt

SEQ ID NO: 351415 - DNA, 534 bp, Cannabis indica
aatcaaataaatatataaatgatcacatgaaacaagtaatgaaaaataaatatgtttctttattgataattgaatagaaaagattacattgaaatagagttttatttagggcacaaagcctaacaaactcccacttgcactaacaaattcagtctgtgcttttcaaatgtaatcccagtcaaaactttggtaaatagatcagctaagttgtcttcactatccactttctccaccagtacatcccctcttgccacttattctctgatgatgtgatatttcctctctatgtgtttgcttctattgtggcttcgaggctctttactgtttgttatggctccaatgttatcacaaagtaaaacgagtggtttttccattccaggaacaacaccaagtcatgtgaagaactttctaagccatactagttccttagcagcctcggcggcagctatgtactcggcctctatggcaaagtctgacattgcagtttatttagcacttctccaaacaactgctccacccccaagagtaaacacc

SEQ ID NO: 351416 - DNA, 731 bp, Cannabis indica
ccttccctttacctgcaccataaagtactcgtgagtcatagagactcagcaagaaaagtgaataaaacaataaccagtaatattcatcaattaaatctcatatcaacatgcttacacattaacacaatatcataaacacacaatcctggtactttataaagtacccctttcccactcgttaaccacgagctaaatatgtcactatcgttgcccgatgaagcaaacgataagtaagaaatctattcccagtttcaggtttaattactcataacggtaataactgcttccaaccctcggtcacaaccgagactcaacaaacatttaattagaatcttgataataatcaaggctataatcattcaaccgctaacatttagccacatacagtgcttaccacttttcttacctcgattcagaactcaagtgtgcaggccaacctgagtcgaatgatgcttgaaaatctcgggtcttatgtcacgacaaaagtaaatcaataagggtctattccaaaacactgtctaaaactcgcataaaataacctagggttttctaccgaatcttatggtgaaaacaccctaaaataaaatacatcttttggctctagtctatgtcttatactatagagctcttcataagcttcgatacgatatatagaatgtctaaaacgcacgctcgagtgaaaagttatggctaaaaatcgaaaattgaggattcttgaaaattgaccatct

SEQ ID NO: 351417 - DNA, 903 bp, Cannabis indica
atgtcaaagttcgagggaaaattgctaattagccttattaatattatatgtatttaataaataatcaaattccattttgttcatgaaaatttaattaaattctatatttttttaagaaagttaaataaattcaattaaatgtataaaataattgtgagaaaattacaactaatggtgcagaattaaatcaacaaaactttaaacgatcaaacgattagcaatgacaagattaataaacacaagcagtaatcgaaagaaaaacatggatgaacagattatggaaaacaagaaaaaattaaagtagtaaaacaataaaatcaacaccaagatctatactggttcaagttcgataaatcgacgtgatctatggctctactccagctttgaacaccaccaaattctctttattgattgagcaagaataggtacaatacagttgagatcgattctctgatagattctctcaaagtatttcaactttcacactcttatccaagaatcttcttcatctacagaagattcttcatacaaaaacccaacccctatctctctcttttctctgtacctttttctctctacctttcaatcttttgtctcttcatctctcaactcattctgaccgttgtgttcgaaatgataagtgttggtggtaggtatttatacgcttaggatgaagatcctaacactacaaaaaactgctacttttagcgacaattttttagtcacgatattatttatttgtgactgtgacttttaatcacaataaaatgttacttgtcactaatttagttttagtcacaataagtattgagactaaaaatacatttagtcacaacaaattataacttttgtgactaatacttttaaccgcgaactttttagtcacaacatagaaattatgat

SEQ ID NO: 351418 - DNA, 939 bp, Cannabis indica
aaatctcactataacacatgcccctagttatgcgatgtgacaagtgcggtcacaagggaaactatacttgagagacaggtgaaaggttatcacgaggaggtgacctttggttgtcccttcgagggtttcgaaaaatgacggctataatcattacttttattgcatttatggtgccacgtcactaaactcttctgttaggcgtggccatctttggccgttggattaggcgactctaggcattctaattgccacgtgtcgtgatcccaattaatgagggatttgggtatttaaaccctctgattcgaatcaaaaatcctcattttccctcattttctttaactcccttaactcccttgttccatctctttcagagaaaccattaaaaacttccacaaattgcccagatttttgcttttctttgtcggtttattctcgattcttcaatgctatcgagggcaattcgtgggaacggattactagaactaaaggttagttttcaaacattcgctgcatttcgttttctgtttgaaagggaacattgttttcttggttttaacatgcatgagagagtttaggaataaatgtttgtagggaatatgtataaggctacgttttttaggtaagaaactgggtaatttcagaaaaaatgacctaaaattggcataaccgtgtactgtataaaaaatgcttgaatagacactgcttcatgttttgaatacacgcgggtattcagacgaacacctcgaatactcgcatacttgcgagacttaattacttctgattgtcgcttagaactttaggagtttgtattctgtaaatctggttgtgagaacattggctaagtctttcaaatggtggatgtatcacagtattctaatggtcatatatgcagtcatatgctccttgagatactgagatcaacccagccatttgcgacat

SEQ ID NO: 351419 - DNA, 1177 bp, Cannabis indica
ttatttaaacattgaatttaaattctaagtatttatgtggtattatctctttacagagaataacataccatagattttgcatcaataataaaacacaaaacacataaaacatgataatcatataaatacaatacggtattggcatataagttaaagaatacgaagctcaattttataaaagcaattcataacgaaaattttgtaaagataaaattttattaatactctcaaaaatatcataatgaattctctgcataaatatgaaataggaaataaaatcccaaactaatatttgaaactaaattgttcataaactaaaataataaattcaaaattaaagaagattcgagcttcatcttcacttggataatctctacccttttttccaaccattcgactcaactcgttaagatagcaatccaagtttaagcagctggagctgaaataagaagaaaataaatatggtttgtagatccagaattaataaccaaagaggataataattctctaaaacacatgagtttatagcaaagatagaaatatcttatttctttgccaaaaacttaggatactggggtttagagtggcccttttttgttgcaatagaagcaatttccttcttgctttgcctttgaattagcaacctttttattcttattagctgtgttaacagctttaagaggcttcttgctattcttccacttcttcttcttgctgggtttcgaagtagaggcactgtttgcctcagccttgaccgtaccattagcagtgccagaactaggatctttgtttcctcctttcggtggatctccaatcaaattctcaaatgtctgaaggttgttgattaactcgtgaaagtcaaaagtcaaattgttcatgacataatttgaggtgaagggcagaaaagctggagtcaaattatttaagatcaaactcacttgagtttcctgatctataatagctccatgattctcagcttcctggaagtaacttgcaatctagagcaggtgatcacgcaagttctgatgaggcttcatccgtgcattgataaaattcttggtcgcctcaaaacgagcttaatttgacgccatcctgaatagtttagttaactggttcatgatatctgcaaccataagagtattggcaaaccttgtcttcaaggcgtcgaccatgctag

SEQ ID NO: 351420 - DNA, 623 bp, Cannabis indica
gcatgcttgatgattttgatgatcgtagatgctgtgtatgtttgttgttattttctgaagtttagatatgtttatttgagtggattcaagctggttttgttgctagttagttggatttaaccttgtgtaaagctttgaactcaaaactttggattttaatggtaaaatggtgtttttgctgctgtgatcattgtttgtgtttgagtttggtttctggttgttgcatatgttgttttaggttgaatttagttggttgtgatggctggttgtggtgttagccaagctttgagctttgaagctcaaacttggagctcacatggtggtttttgtttctgtgcatgctgggttgtttggttgcttttgaaatgttatttgggatatttggagcaggtctggagagttttaggtggtttggggttgaattggttgagaaatgaatttttgaaaaattcctgcactgaaccggaattccggttcagggaggcctgtaggaaccggtctaccggttggcttccaggaatttttcccagaaccggaattccggttggggaaccggtctaccggttgggggaaaatttgggaaccctagttcttcccatttttgtgttatttagggtattccc

SEQ ID NO: 351421 - DNA, 643 bp, Cannabis indica
gagttatgtgatttctaattttttttcggataaatgagatatcaacttaatattatctaattaaatgaaatttaaaatcagaatatgacttaatctatttcactaaaggacaaaaataagaaaggccaaaaagaccattttgcccttacccataccaacaagcacacttatcacttaggagcattttggtcatttctaaaacttcaactatttctgatattcccaatatctaactatattaccccgctactagtaaatactaaaatgtgattttatatgtcatatataatacactctggatttaaataaatctccataaaatgacaaatcataattaatattctagtttataattaaatcctaattatctgctaattctcatatcaaaattaaacggtctttacactatctctcctttgctttttgttcttataatggaatacctaacgagaagtcttcttttggctgcagataactctccatttagataccatccaatgtgcaagaatctaagattattaatctttgttttgctgatgatctcatcttattcatcaatggtataacagtttcgataatggtgatcaaacatactctggatgagtttggcatgacttcaggtttgttcttaaataccaataaa

SEQ ID NO: 351422 - DNA, 574 bp, Cannabis indica
tatgccctaaataaaacccattacaatctaatatgacttgtcaacaataaaagattagaaatcatttatgcttacatgttatattcatgttttatggtttaatttatatacatatatatacacaaaatctgtaaaatccagaacatatagtcatacacatttacagtgttgtcaacacaatggaatgttattgtaatttatctgtttcgaaagataaagtccctttttcattagtgcatttgatttacactgatgtaataatcaacgatgaattgtacttacactttgcataagtgttatgttctttccagaacattggtaaagtacactagtctcgaatatatggagtatacattggactggaccgatattgatcttagtaaagatattataatacttaccgttatatctttccaagtcaatatcactagttgatcttagatcaaaagatcttaatcctgatatgtttaggttcaatattaggagtactattcatgttctttgatttgttagttaaaactactttcgtgtcagagtaatacgtacatattaggaacatgatagtatgattgag

SEQ ID NO: 351423 - DNA, 1024 bp, Cannabis indica
taaccatctttattacatcacattgcccaatcaggcaagcccgtgccatagcttggcaccgtatatcgcataactgcatcacctaatcaggtgagcccgtgccaaaaacttgcacccatatatcatataattacatcacctaatcaggtgagcccgtaccacaacttggcaccaatatatcgcatcgcctactcagacgaacccgtacctacgcaagaaacttatcatatgtcactgatgcctgtatctacacgtagccaggaggaaaccctacaatggtttcattatatgcaacaacctggcaattttcatatcactgacgtcgtatctacacgttgccaggagtaatcgcctaataacacaagctcatacctacgccagatacttatcatatgtcactgatgcttgtatctacacgtggctaggaggaaaccctaaaacagtttcattctataccataacttggaaattttcatatcattgacgcagtatctacacgtcgccaggagtaatcgcctaatcagacgagcccgtacctatgcccagtgcttatcatatgtcactgactcccgtatctacacgttgccagaaggaaaccctacagcggtttcattgtatgccataacctgacaattttcatatcactaatgtcgtatctacacgtcgccaggagtatcacatcacctaatcaggtgagtctgtacctacgctcggtagtcatatgtcactgacggtcgaacctatgcccggtaagtcgccaggagtatcgcaccacctaatcaggtgagtttgtatatcacattcatagtataatacattaccattgcttaaccaatcaatcttttcaatatattataatattaactatatctcaatctcaatattaatcaattcataacattataaattatattacaatataacgtactatgcagtacaatatacttctttttacctttaatccagattcaaacatatcggccaacccaagtggagaactattcccgatgatctcggccctatg

SEQ ID NO: 351424 - DNA, 2122 bp, Cannabis indica
tgggatcctgaggagttttagacgtatgtggcttgggaggtattatttcgaaatccaagtcacctggttcaaaagcaattgcgacgttgggtaaaaataaaggctttgccacaggaataaaggacacgctgggtggttctggccaggctacttctcgcaagactcggcgtctgccttcaaatatttcttgcaagaagcgcctgtagagactagaaatatcttcctgttgggttctcactgtgtgttccctagccctagcatcatttagctctaatttggaggtgggttttgagggattaggtttatatgggatggcccattctataggaaactcaaactttaaagcttctggacgataaatttctgaaccagagtgggacattgctaccagcaaaaagcagtcccaatccatggagagaattttatcaaaccagaaggtaattagttggagatcttaaaacaacctacgtattgcctgaaccctagtatgaatggttttaaccctaaaagactaccaaaaccagatgagatgataacgatacaaacgaatcaagtaactgatctacactatgtaataaacatgagaaaggagaaagtaacttaccacttgaagttagggcttggggcaatgcctgggaatttcgtctacaaaccttcgaacgaagcaaggattgctttgagaaaatgaagtcggaggaaactcacaggaaaaaggtcagggacaaggatggcatgcaagtctttgaacggatttaatggtgatcattggtgaagaagtttaagggtttttctcaaactttgtgaaatggtgcaaaggtggttccttttccttattttatacccatgataatgatttcaaaaaagatttgatccaatggacgtgattcgaagcggaagtagaaaagatgatcatttaattctaatataccttgaaacttcacaaccgccaaaatcagagggaatgcgtcttttcaaaaatagaggaacatgacaaaaataccctttgtaatcattaaaaagatatttttaattaaagtgatcttgactccctcctcggcgaggcatccctatgagacatgggttactgtatatctttaattacgcattcatctcggctcaataaaggcgggatattcacagttgtgtaaaaacctcatttatttagcttgacttgtaatcagatcccacaattttagggataatggttgtaaatgtattttggtcaactttgtaattaactgccactatgcaattataaatagtggcagacaagataaaaaagggggatgaaaaacctcttatgcaagaggccctgaaaaaaatactctgaaatctgaataaaattgactcgtggactatgcaaaattttaactacaaaaccacgtaaaaaatctagtgttcatattttatttttctatagcttttatattttctgtgtcgaattatcattgtgaggctcaaatttggttaacgaaaattcgcgttaagaggaggtattgtagataccattttcaaaaataaaatatttttgggttcgacagccgtggagatttgacggagtggttaggaatgtcacaacaataaaacttgagatatattggaatataccaggctagtttggaaagtggagttattggttttatcgggatagttagaaagtgaccaaaacacccttaagctttattttaattaagtgtttaattgaaggggcaaattagtcttttgttaagattgattttttgtcttatatggtttgatttaagctgaaataggatcttaatattaagtttattatttttagatgattgattagaataaataggagtaaaagccaaaacaaatgtgagacaagtcattcaacttattctcttctcttcctccccttcgagccctaaggagcccgctgctgcaagttgatcttcttaagccaatccttcaatttgtagtagaattaacaaggtctaggatttgttctagctctaaggtaagttcttcacctctttcttttaatttcttcaaagttttaagttaggttttgggttaagcttgtatgatttcggggctgagatacaaattgagtttagacatgtttttagatttgatttaaggtttgtttaagctt

SEQ ID NO: 351425 - DNA, 689 bp, Cannabis indica
tgatcactcatgatctgtagccttatgccccaatcttctatgccatagaacaacttttaggtcttctggattgctagtgattgcagtgttgcattgtgtcactggttctccatctagatagtatagcccttcatgtttgtggcctttaataattgtcatagctcccttacttagcttcattgaacctgattcaattttgctaacaatacccatgtcatctagaacacttatagaaattaaatttctagcaagattagggacataccttacaccagttagggttctaacaattccatcaaacattttgaaacttacattacctgaaccttctatgttgcatgtgttgttatttcccaaaattactttgcctcctttagaatctctgtagtcagttagaatttccctagagtttgtcatatggaaagtacacccagaatccaatatcgaatcatctttgaaagatgtggatgcaacatagacttcaccactgtcatagccatcagagtagttagcttcttgttgtttgtcattttgatgtttgttttgatctgttctttctcgaaatctgcctcctttcttgttcttgtatttattgttgtagaaatagcaatctttcttatagtgtccagttttgccacaatagaaacaacctgtagaatcaccagattctcttgatggtgatctactct

SEQ ID NO: 351426 - DNA, 721 bp, Cannabis indica
caagtaaaaagtataagtaaaaatgaaacaatcaggataacgattgcgaactttaaaactaccataaacgttaattaaaagtcttgatagttgggtgattcatgcaatacaagcttaaccacccaggcatgactggtttgcctttaaccacatatagtttgcaatgatgccacccttcggggaaccccgatagataaaagagaacaccatccctttgaatgtgttcgaacctcctctagttcgctaccttttcatgttaaaatagtttcatacattccctttgctctctttacaaaaagtgacggtattcttaactccattttgctctcaattggatgacttgacattcaacatcaacaataacacgaagggggatgttttgtcctttgttagcatataaattgtgtagccagtcttcatcgaatagcgtatcgctcctaggcctagccagataacgatccactaatctacaaaactgctcgtaatggcttggagaactagaattactagacatgtacaacttaaaagagaagaatactctagggttaaagaaggagaaagatatataacttgggaagtataagttttcttttatagaccagaaaagttgttaggaaggtgggataataaattgttatgaaattgtttctgatattagtaggctttgaattttgaaaatttgatttctcacaaaggagccttatggttaattttgaaattt

SEQ ID NO: 351427 - DNA, 1860 bp, Cannabis indica
aagagttttcgtagtgtcctattccatggtggatcgctcctttatatacaaagcaagtgtccagttagttacacaaggattgcatttattttcaatccgtttatacattgatttacagtgattaagctaaaacgtaaacattaataaatgaataacaatttctattcactaaatacagtaacgtatgcaacttctaatgttcgagttggctgttcatattctggtgtaagctcgctggcttaggatacacctaacacttagttaagtctaggatgtctgcattcttagatagtcgcatttacggacatcgtataacgagtcgatagaacctagatgcacgagtctatattggtttatcgaggctgttgggtcatcgggaccagctcgcattatagagattcgatctctatgttctcgtaagaggatggaaaggatactcgcacatatcctagtacatgtgatttaaatccgttctttggtcccacataatgcgagtcacacgaatgcgattagactttggtcatattcgcatcatctcgctgattctagctcaggcgaggtttaaactcgaggagtctctcttggacatctcagcttttcttggaaaactgaatacatgtgtcctccaaacaagagtctggtctcgagtttctaggagagagaaatctcactataacacatgcccctagttttgcgatgtgacagatgcggtcatgagggaaactatacgcgagagacaggtgaaaggttgtcacgaggaggtgacctttggttgtcccatcgagggttttgaaaaatgacggctgtaattatttcgttttatcctatttatggtgccacgtcatgaaactcttcgattttcgtgtaggcatgcccatggctggccgttggataggacgaccgtaggcattctggctgccacgtgtcataatcccaacttatgagggatacgagtatttaaacttattgatacgaaataacttcctcattttccctctcattcttagaaattcctatactctcaagatttctacttctccctcttgaatctcttcagtttcagaggtgatcgaaactagccgcagggagaatcatcaaaactaaaggttactttcaaatctacttgcgtttttggtttctaattgaaaaggaaagctgcattttctgggtttttatgcttttagaggtttgaaaatacatgctcgtatacatagggttatatatttctgtgtagaactggctaatcccagcagaaaacagacctgaaatttgcatagtcgtgaactttaggaagaatgtctgaataatcgcacctttcttgctcgtttatttcttgaatacacgcgggtattcagatgaacacttcgaatactcgcatacctgctttccttaggttttacagagactttatcattcctagtcgttatttagaacctagggttttatatcctctgtatattttgttgtgggacactggttaactctttcaaatggtgggcgtgtcacaatattccaatgcccatacgtgcgatcgtatgttccttgagttattgcgatacgcccagccatttgtgacatacgccagtgttccaatataagcgtattctccggctagtagatttgctcgaaacgatgggtgtttcccagtaacttcagggtcatgctcgaaaatgcatgctccttgggtcactcggatactcccagctgtttgttgaggtatatcgctagctgcaactgcgtgacacatccgcaggttgtgattggttaggttcctcgaaacggtgggtgtttcccagtcactttagggtcatgctcgaaaatgcatgttgcttaggttactgggatacacccagccgtttt

SEQ ID NO: 351428 - DNA, 582 bp, Cannabis indica
catactttatatgtgtttattaataatcgttttagaagttcatatttagggtgttaatcaacatatttgtgagtagattaagatcctggtaaaataatttccaattaatttttttatttaattaaacaccatgactatttttttaacatgatttatctaattttctaatactaatacactagtgatgtaccctttctgccacgcaccctaaaattgaaaaagtaattaaatataaatattaaaaagtctattggtagacgtggatttaagcaaatcagttaggactgaacattttgagcgggttcgacccggacccgggcaacccgcccggacccgaccaggtcaacctgcaaatttttttttaaaaaaagtattcgggcaggtcgagttcaacccggtaccgtttgggtgggttcgcgggttaagtttttaggaccaccgagtttcgggttgaacctgaacctgcccgccaaccatcatatttcatattatatatattattacatattatatattaattaaaaaataaaaactaaaaactaaaaaaccctaaacttctctttaccttttactatggatatg

SEQ ID NO: 351429 - DNA, 501 bp, Cannabis indica
aattacaatccttcaaaaccaagtcagtaaatataatccactcatccaaaatgcattgggctttagctaagatacaaggcccaagcgagcccagtagctacaagaccaatcaaatacaaagaataggaatgagtctataacggatccaaaagaatcgatccttcctcttggaaaaggggaagaccacttcccacattcgttcttcataacggatgaattggacgatcaaaagctctataaaaggagaacccaagaatcttgaaggatcatctcatcttcatttactgaacacttactcaagcatttacgaaatacattactattattattaccagtcattctccatcaccctacagtggaaatatatattttctatcttctttatttacattcagatattctttatttgaattgtttgctgacttgatcgtcgaagtcccttcggctggcaccatcccagtgtcccaaggtctcaacggtccttttttcctttgttctaca

SEQ ID NO: 351430 - DNA, 781 bp, Cannabis indica
atgtcctctccttcaacaggaagaggttgtaacccctggttatttgagttatttggcagactgggctggttgtatccatggccctgtcttttcacgtactatttaaaatggtctcgagcgatgagactttctatttcatctttcaattggcgacatttttcggttgtatgcccaatatccttatggaatttgcaatacttgttaggatctcttttgctcctcattcctcatgggctcaggcttgccgaaggcaacctattgctcatgtgcgaggtaaatattctcccgagtttcattaagctcagtataaatagtatacactggcacatacttatcatgcatcttctgcttctttttatcattcggcggttccttaactccgtcctttctctttgaaccagaagcccccgagttatcaattctcgtggaaacagtatctgttgaaacattgctgggtttgcttcccgagctttttttcaacaaattcatttcttttcggacttcttcctttcgaacgaacacttgagccctttcgttgaactcagtgatgcttctcactagacgtccttgtaagtcatcccacaactcgccctatacggttaatggatcagtagagattcccgcctgaagggttgtgaattacgtgctatcatccaaattcctaaccctagtcgcaatcgtgctaaaatgacttaagtacgctttaagtgtcttgtcgtgctgctgctttatattggtgagcgaggccgcttcgggtcgcctatccctagcagcctggaat

SEQ ID NO: 351431 - DNA, 567 bp, Cannabis indica
tgatattacacaacatcacaagagtgttaggccctttttttttttgttctttaaaagagagagagagagagagagagaggagagacggtctcttcatttagcatatggctgacggttattttttttgtccaaaaaatttatagttcactattttgtaatgtaatttgttttgtgtatcgataaattagtgaattttctttttaaattttgttatttaccattcacttctaaaattttacaaaaaaatccaatttttctttaatgtgttattagttagctgagtgcttgcattacttcttgtattacttataggggatgtttggtatgcgataatgagagaagtgggaatgttaatctgaaagtttactgtgtttggttaggtttttaatattttaatgttggctaagtaaatgtagtgggctttagtttggctggcaaggaaaacccaataaaaatgtagttttcatttaacttgcaattgattttctaatactattggctctttgacacaaacttttgcattataaaattattttttttatatatgaatactaatgtatataaaaa

SEQ ID NO: 351432 - DNA, 649 bp, Cannabis indica
ggtcttaaaatgaaataactcataataattttacaattaaatcatataataatataatttctcattaacacttaattaacttagttagggttgctaatccggttattaaatcttagggtgttacagatctaccagaaattgtaggagcttcaacaatcgtagctacaccctataatataggaatatttgctttctggttactccttttgcggagctaattgtagctgttagtttttatggtccatatcagagttataaaagtggaagcaagatttgataaaaatagtttttatctaatatgaaccatgagcccaaggatctcaacatatatatatcgattaaatcaaaactaatgaaagaaagattatagctcttgaagtctatcagagtatccttgtttcttttcgtatatttatcgaacattcaatccaagagttttgatgaagaattcacaccttgatccttcaggccaacctcaacacttaggagtagagtgggctattagatcttatttaaatgaataaattaatgtattacaatgtgtacttaactcatgagacattgtaattgagttagaattttgatctcgcaacagctgaataggtgtgtacacgtgtgagacaaagtgagagagagagggagagagaga

SEQ ID NO: 351433 - DNA, 636 bp, Cannabis indica
aagtcaacccgaaagtcaaagtcaaggtcaactctcgggaaaagtcaacatgggatcaaaaacatgcaaatcaagctaggaggctcatctacatcaagactactcaaaatcaaatggtataaatttactttagtcttgttaaagtgatttgcatagcacactaagttttataaatttaaattttggcccattcactaacttgtgcaacaagttttctcacacgatagttcaaaatttttttgattgaatttctaaatcacattttgtttaactaagagaacaaagttggaatttctgaaatcggataatcgagtaagaagttatgcgcgtttaagtcccgaaaaatggcatttttgcctctgttagccattcaaaattccggttgtcatcaatccgaaattccgattcccattcggaattctggttcacggctgacttcgtctcgggaaacgcgctaacgactataaacaactatttttatcttaaacactatataaagtcgatttttctttcaaaaagcaagttggttgagcatttatttcaaatatctaacctatctaagtgagattaatcagcttccaagtttgaaatccaacaaacacttttcacacaccttgagccaaaatttgtgtttat

SEQ ID NO: 351434 - DNA, 729 bp, Cannabis indica
tccccgagcaatcataagcgatgaagggagtcacttctgcaacaaacagttcgaagcactcctttcgagatatggtgttcgtcatagaactgctctaccttatcatccgcaaagtaatggccaagctgagatttctaaccgggaaataaagacgattctggagaaaacggtgcagagatcaaggaaagattggtcaagaaagttggatgacgcattgtgggcctatagaacagcgttcaaaacgccaatcgggatgtcaccatatcggttggtgtttggaaaggcttgtcatctaccggtggagttagaacacaaagcttattgggcaatgaaaactctgaacatggatttaaaggctgctggacagaaaagattactacagttggatgagttggaggaatttcggaacgaagcttatgagaacgctaagatttacaaggaaagaactaaaaggtggcatgaccgaaacttagtcaggaaggagtttcaacctgggcaacaagttctacttttcaactcaagactaaagttgtttcctggtaaattgaagtcaaggtggtcggggccatttacagtggtcaaggtgtttccttatggagcggtggaactgaaaggtgaaggccctaatactttcaaagtgaatgggcagcggttaaagctctacttgggaggtcaatttgatcaagccaagtccgccatgattctggcgccactatgaagaactcgatc

SEQ ID NO: 351435 - DNA, 564 bp, Cannabis indica
caaagatgactttttccagcacataaatgcgctggtaaaagttagattttagccactgtaaatgtacgctgataaaactatgacctctttgccagcgcagtttgcaaaatgcgctggtaaaagttatttttaccagcgcagtagcgaactgtgctggtaaaagtgacatttcttgtagtgtccgtctatttaaaagcgccacaaataatatataatttgcgtctattggtaagtgacggtaaaaaacaaacagacgaaataatctaatatttttaaaattaatatttatagttaaattgcttagtaaccattagtggataatatccataaaattatttcatatatactagatagatgttacgtgtcaagtcacgtatgttaattttattttagtttttatttttttaatatcataattttaaaattaataatattcaatatagggataatcattgaaatttgaaagtataatagtgatttcaataaaaacaaaaattattattatactttgtaatagtaataaaaaaaattattattcgtcctaaatttatcttcgaaattaat

SEQ ID NO: 351436 - DNA, 597 bp, Cannabis indica
tatgatgctattagttctttccttcacacaggtcagcttttgaaggaagtcaacactatggttttgaaagttatccgcaaaattaagtgtcctaacctagtgaatgattatcgacctattgcatgttgtaatgtactttacaaggtgactaccaagctgatttgtgcaaggctcaaatctgttcttccggatttaattgcccaaaaccaaggaggacttgttcatggcagattcattcgtcgcaacattatgatctgtcaagacctcatccgtcactatggaaggagaactaaaaaagtaaattgtatgtttaagctggatctccaaaaagcctacgacaccattgaaagtgatttaattgaagagatgctttatgcttttcagttccctcaaatgttcattgggctaatcatgatttgtgatcgaactccaatgttctcattgatgtttaatggctctttacatgggttctttgtaacgcccttactaacttaaaataaaatgccacaaataaactggcgttaagatactaatgttgtctttattttaaaaaaaataacaattttcaaaacatgggtacccagttgaaaataaagt

SEQ ID NO: 351437 - DNA, 894 bp, Cannabis indica
cttggaagtatttcttgcagaagttaaaggaagccattggtgaggttgaaaatcttatgttcatatcggataggcatcaaagcattgaacatgctgttgaggttgttttcccagaagcatgccactgtgcatgcttcaagcatattactatgaatgtcgttcacaagtttaagactgatgtatgcaaccagcaaatatggcttgtagcttacgcatggaacaagacggaatgtgatagacattttgaggtgctgaaacagatggaccctgccattgctacatacgtcgagcaaatagggtttgaaaagtgggctcgtccttattgtccaggcgatcggtacaacataatgacaagcaacgctgccgaaagcttcaacaaggtgacagaagaattcagaaaatatccagtaactattttggttgacttcatcaggttcacacttcaaaattggtttgcttctcgtctcgaaaaggctagtaagtgcgctactcctttggctactacttttgaaaatgatttaaaggatcaacacaaagatggtatgttcaggagtgtccttcgtaatggtgcccaattgtttaacgttggtacgagtcctcaaggtgagagaggtggtgatgtggacttagtggagagaacatgcacttgcggacttttccaaatgctcaaaatcccttgtccccatgcatgtgccgcagcagttagtcagaatgtgagcgtgtacgcactttgctctccatattacacaaaagaaacgtggaagaagatctacgatgccacaattaatattgttggtgaggaggatgagtgggtactaccggaacacatcaagaacataagaatcagggtaccagtggagaaaaaaccagtaggtcggcctaggaagagcaatg

SEQ ID NO: 351438 - DNA, 612 bp, Cannabis indica
ttgatgatagtgacgatattgatgatagtgacgatattgatgatagtgacgatatcgaccgtgactttgatacggagctggagcttctaactatgatgaatgcgctaactatggatatgatgccggaaatagaccggttttatatcacccttcaattcgaattagcaaaagcaatgtctccttgcataatatggattccaaacattcatgatctggatgtgaatgagtcgaattacttatccctcggtctattattgaactatctctccagggattgtgaaagatgttccactagaaatattcttgttattgcttcgactcatattccccaaaaagtggatcccgctctaatagctccgaataaattaaatacatgcattaagatacgaaggcttcttattccacaacaacgaaagcactttttcactctttcatatactaggggatttcactttgaaaaaaaaaaatgtttcatattaataaattcaggaccataaccatgagttccattaatgtacaagatcatgtaacacttattaatgaggctttatgaattagtattacacagaaaaaaaaaaaaacaatatagacactaatataattagatttgct

SEQ ID NO: 351439 - DNA, 551 bp, Cannabis indica
tttttgtgagcatggagaagagctttggtgaatatgtcagcgaggttgttttgggaagagacatgaagtagcttgatggaaccttgttgaaccttctcgcgaatgaaatgacagtcaatttccacatgcttggttcgttcgtgataaaccggattctcgctaatatggattgcggcggtgttgtcacaatagagcgaagcaggagtggaatgagtgatgccaaaatcctttagaagagcaataacccaagtaagttcagatgtagcattggccatagctcgatattctgcttcagcagaagaccgagagaccgtttgttgtttttttgacttccatgacacaagagagctgcctaggaagagacaatatcccgagactgagcgccttgtgtcttgacaagtaccccaatcagcgtctgaaaaaaaagatatttggacatttgagggggaaagactagtctcggcatgagcagatatagtgggagttgtggtagatgaaaaaaataagccttggcccggggtagtttttaagtattgtaggatgcgatgtgc

SEQ ID NO: 351440 - DNA, 801 bp, Cannabis indica
attgtggcattcagtcctctcacatattttgttttctggtgaaatctgtaggcactagatcaccagcaaatttggacagccaatcaaactcccgagtgtattcgaccacagacattgtcccttgagtcagttttacaaagacctccatatgtgaggttctcacagcgatgttataaaatttttcctcaaacagactcttgaactcttcccaagtcaacacattgacatcacgagtctggcccaccatatcccaccagacgcggacatgatcttgtaacataaaagatgcacaatttactctctttgtccctatcacccccgtattatcaaggatacaggtgattatgctcatccactgctcagctttaattaaattagtacctcccagaaaagttggaggttgcagcttcacgaactgcttaaacactgagtctctatgcggcaacataaacccctagttacccaccactggcacaaaagctggtggtaacacttgctcaacaggggcagccggtgccaattgcctcaactgacgttattcttcctcttgacgaagtatgatacctcacatttcttgaaacatttgctgcaagttagcaggtgaattagcattgccaacccccgcgttatcccccagattctgcagaggtggatgcggtgcctgtggattggtcttgtctgcactaggctctaattgcttgccctgtggtctagatgattgcggaggatccatttttacaagtacccctgtaatcaacaaccccatcgagttaagcaccaataccacacttatgcacttat

SEQ ID NO: 351441 - DNA, 648 bp, Cannabis indica
aaacaaaatataagtgtgaaaagcagtttcaaacctaaaaacaaaataataaaaaaaaacttaaaataaaagatatacaataacatcataaaatagagcatcttcgacgactttttgagcaccgaccgctacttcagtgacttttccggcaccgacagcaaactccggtgacttttccggcatcagtgacaaataaaatttcctaaacaaataaaaacattaaatatggtatttgaaaacctaattacatatatatgacatatcaaataccataaaaagacgtaaaaataaaaaaaaataccttataaattgatcaaacttaaatgtgccatatttatcataagaacctttaaaatcctataataaatgtaatttcctctattaaaattattgtaagtgcacaatatctttttattatcaacatgaaaggatatttatgtaattagaaagtagagttttgaaagaaacttgacttcaatttatgattgtgaaggaaaagacaaaaaagaaaataaaattgtaataaattaaacttataaagggaaaatagtcaacaaatatcatgttaaaaattaagttgaggggggcaacacttttttttttataagtgagggggtgcgtcttttttttttctacattgcataacat

SEQ ID NO: 351442 - DNA, 522 bp, Cannabis indica
tccctacaaatatattttacttccattcaatatatatttatatattactttgggtaattttacaatggacactccaaaatcaaatatatcaatgcactttttaaactcttaataataattgggtctaatatcaagtccacacactatttggtggggtacagtacaagaaatattatttacttttcaatcacacacgttctacaaactctagaattatgtgttctgttatatttgtaaacacattctgttatattaagtccactcacccacccttctctattaaaaaaagagtcggatcttctttacaaaataatagtaataattctttcaaaaaaaaaaaataatagtaataaaaaaaaaagagttgaatctcatataaaacaagggagagagatttttaaagcaaagaattagcattgattatataagactgattacactgacgattatttttacattgcagttgcaagtaattataacttaattgtacactctttttttcttcttgtttcattgttgtat

SEQ ID NO: 351443 - DNA, 562 bp, Cannabis indica
ttttatattattcaagtatttttattttattattttaattatttattaaataaaaaaatatgctcaactattttattatatttatgatatatatttgattatataggatatattatagcaaacaccaccttaaactttgttatatattattacttctaatacttaaacaaatgtgtattatatatatatgtgcatatgtgtattgcaattataccttaagaagtataagaatatggtatttattttttaccataattattgtataccttttgggtttaatttttatggtagatggtatatatttttaatcattcatatcacttattcaaaagaactaaggaaataaaaataaagtaaattatggtgatttgttgttatactaattatttaaatcatttttttatttttttttattaaaataataagaagaagaattaacaagatataaattaaaatgtaaaaaaattaagtggcgtttagtaaaacttttttaatcagttttctatttttaaaagtagaaaagtgaatttttttttcaaaaacatgtcctataaaactgttt

SEQ ID NO: 351444 - DNA, 1109 bp, Cannabis indica
atggtattggattcatgagaataatggttgttattcggtcaaatctagctacaaatggattcaagaaaataaagggcagtggtctactgctatggaatcaagcttctggcgggttttttggaaaactaaagtccctccgaaggtgttgcactttgcttggaaagctgtttgtggctgtctccctacacgggttcaactccaaacaaaacatgtccctgtccagttgcagtgtgttttctgcaacagagaagaggaatcgattatgcatgttctggtgcattgccagttcgctcggtcgtgctggtctcggtctgctgtttctctcggacaagttgcagctgcaacttttggtgattggctccaggaggtgttgagccgtggtcatgtaggcctgtttgaggaagcgctcatgacttcttggtccatttggaaagcgcgaaacgacctgctatggaataaaaaggctcaagttgctgctgatgttgttttttctgcaagaacagtccttaaccattggaattatgctcgctcaaatcgttttgagccgctgcctgctttagttactacactttgcaccagcgagcattggattgcaccagagatgaattgggttaaggtaaatgtggatggggcaacatttgcatctacacagtcctatggcgttggtggtatagcccgtgggagtgatggcaggcttattgaagctttttgtcttcacaaggccggctgtgtgcaaccttctttagtggaagcaattggtgtgaaagaggcgttgagctggataaaggaaaaaggatggcaacgtataatactagagacagattcactagtggtggttcaagcccttgaaagcaatgtcgaaatgcaatctgtttttggttctgtgattattgactgtattaatcttcttaattctttggtcaatgtttatgtccgttttgttaagcgatctgctaacaataccgcccattgtctggctcgcggtgcttgttattggtcagattgtatttttgttagtagcaatgttcctagtgctattaacactgctgtaagtgccgatttggcatttcaattttaatgaagttatctactttcattcaaaaaaaaaa

SEQ ID NO: 351445 - DNA, 1133 bp, Cannabis indica
tttattaatcaagaaaaataccaaaacttttaaaattatccttagatctagtcgatgaaaaacaatgttgagtcgcagattactaatgcagcatgccaacacccacgtaacaagatacatcaacatgttaacgtagatttcgtttaactaaatttagtagcctaaccgtgaaaatactcacacagaaaaaataaaagttataaaataaaaagtataaacacacaaggttttttacgtggttttgtagttaaaattctgcatagtccacgagtcaatcttatttagattttctgatcatttttcagggcctcttttgtgtgagtttttccatcccttttctgatcttgtttgctactatttataattacatagtgggcagttaattacaaagttgactacaatctgttgacaacgatcatcccctcaaatcacggggtttgattacatatcacgtagtgtaaatacagttatgatttgaaaatcatatatctgtgattttcctgcttttactaggtcaaaatgatcgtgtattaaacacgtctttaattgttgtatctggggacgtctcgacaaaaacttagttcttgtgatctcaatagcaagccggggccatttttccttccgaggtcgacgatgcatgtcttgtgacgattgtggttcttatttacaaagatttcttcaaagcttgtttgaatgttagcttatgactcgtcagggctgtaagcctcactgacgttaactggatggagttacaggaatccttcccatagcgagatgggcacctcgcttacttggtcttgagtcgatccgactgttgcacttagtttgtacattatatactaatgtgtttcgcatttgatatgtgtcgctttcgtcttcctatgtatactgtcctcgatgcctggctattcgctttcagcgacatatggtttctcgttaatttactgagcaccagtttgtatattgattccttgcctaagaccttacagtcaacaggttacaaatatactctgatacttacacaattaatttgttattccataaaaagtgattgcctcgatccatattccctttatcttgacacgtgtcctccactgagatggcagccgaatttcaggtataacaattgcccc

SEQ ID NO: 351446 - DNA, 712 bp, Cannabis indica
taaatgtaatgtatttggacccttcacgtgtctatatttatgagttaacggaaatgataataacggatgtaagagaattgtaatattggatatttttgcctccaaaaataaagataaaatatttaaatgtataaaatctaaaacattaggtgacgtttggttagaggtaatgaaatagaatggaaaggaaaggaaaggaaacaatttttattgtattcttttgtttggttgcatattaaagtcttggaatgttattccaatgaatgacctttccatcattttggtataatgactattctattttgaaatgaaagaaaagacaattccaatgcataatgagaaaaaatttaataatttttttatcaatttttttatgcattttaaatttgattccattccattcctattcttattccaattctcattctcattctcattcttatgttttcatttattccaaccaaacgccacctaagtcactacaagaaatgttacttttaccagcatagttcgctattgcgctggcaaagagatcaaagttttaccagcgtacatttgcagtggctaaaatctaacttttaccagcacatttatgcgctgggaaaagtcttttttgccagcgcttttcattttatgctgacaaaagttctaattccaacattaatttgtcaactcccttttgccaacacatcataggtaattctattttacc

SEQ ID NO: 351447 - DNA, 921 bp, Cannabis indica
agaattattgaagcttttaatttgcttccgaaggaaaataatattccatcaacttactacgaggcaaaaaagagattgaagaaattaggcttgggttatgataatatcgatgtctgtttgtataattgttgcttattttataaggagaatgcatccaaggaggcttgtccagtttgcggaactagtcgttgggttacttccgagaacgggaaaggaaaaaaagttccttgcaaagtcatgcgatactttccgttgacacctcgacttaaaagattatatagttcgaggattacagcgaaaagcatgatatggcatcatactggaaaatcaaaagatgatggggtgttgcgacacccggtcgatggtttagcttggaaagactttgatgcaaaacatcccgagtttgcaagggacccaagaaatgttcgacttgggttagctgctgatggatttaatccatttggcaacatgagtcttgcatacagcatgtggccagtggtgttggctaactataatctaccaccttggttatgtatgaaagataattattttttgctatctaccctaattcctggtgcaaaatctccaggtaaagacatggatatatttttaagacctttggtggatgaattaaaggagttgtggaataatggggtaccaacgagagatagttcgaccaactcgatgttcaccatgcgtgctgcgcttttgtggacagtgaatgattttcctgctcgtagtagcttgtctgggtggagtggtcaaggttataaagcttgccctacttgtaatgaagacacgacgtccattcgagtgatcgggaagacatcatatgttggtcatcgaaggttcttgccaagtaaccatgcaatgagaagggatactcgatttgatggtaaagttgaaagaagacctcctcca

SEQ ID NO: 351448 - DNA, 717 bp, Cannabis indica
caattaggttcttctcaagcagcttgactacataatttggactagtttcaaatcatgcataaacataacgtgaagaaatcaattaatcctgaatttcaaaacaagaaaaacaaaataattcataaacttggaagcgaatatatacttttctacagccaatgaattttaattttattacaaagtttgcgaaaacaaagataatctttgatatttatttgacaaatgaactctgtcaataaaaaaaaatgcgaaaagtgaacatagatttcaaattcactgacaacaatttaggctcagaattacagttctaaaatttatagtcaaagtgtgggtgtttgtattaacatagcatacctgatagggatgaaccgcaaagtgcgtaggctggaggttccaattgttgcggcggaagagatagaatttagggcttctgagtgaatttgagaaagaaaagaaaagctttgccggcggaggcactgcctgtattatggtttacgtgatcatggaattggaatcggtaatgaaactccttcaacttatacatttaactttttttttaacaaaaagtttaccattttttttttaatttggggatcatttaaatgtcatttcttaaaatggtatattcagtatatcaatatctatactaaaaaaaattaagagatttttacactttgtgtcatattttgctttttttttttttttttactttatttg

SEQ ID NO: 351449 - DNA, 818 bp, Cannabis indica
acataatctaaatattcaagttgaatcatagccgaatcagattcgatacaatcaatttacactcttactttatataaatagatgcatatatacatagatattgatacaaaatattgtaacagttctaaaatgtttttatcgatatttttttttgttttttttttatcataaacatattatatataaatatataattatataaataaatgaaaatatttttaatttattgtgcatattttattctcataaaatattatttttttttacgtgtatatcacattttacaactgttttttttatttaggaaatttgtataaaagaaaacaaattctttttagggaaagttttgtttaaaatattggtctatttctttgtataattgatactaattgtatatggcgattaatctgattaattttctatgagaagaaataaagtctaaatcgtgatcttagacttatttagaaagttttctatttcggcctaatttaccactacaaattccaatcttatcgctacaaattcagagattattttaagaggatattgtaaacatttttgtgtctgtctctagagtatctataatctataaatatgacctaaagagcagcccaacgttctcatctcttttaagttcattttgcatatattttatctttatgaggagagaaattatttttttattttttttttggtgaaaacctagagtgttcaactaaattttagtctttgtttattgttcttaaactattcttagaatatgttgaagagtttcattgaacaagagaacggtcttcgagagaagacttgtcaaagcc

SEQ ID NO: 351450 - DNA, 700 bp, Cannabis indica
aaagattgctgcaaggaatatatgagaaagtttttaagtagtaatattgttatgaaactggagaaggaatacaagaggggatacattcaattaccttatctatatgagaagttgcaagtagacatgagctatatgtgcttaaatgctccatcgccagtatcatcttcatcgacgtcttcctatgatgccccatcttcccttcaattgtgatgattcttcttttattagtgatgctcatcttcctaatgaagagtaaataagagttgtgtgttatgtaaatgttcagttaatatgtaaatttatttattttattattttgtgtttatgtaaagatttgattaatatgtaaatttatttattttattaattttaatggaaatgtttaaataaatttaaaatttaattatatgtgaggaattaaatttaattagtacttcaaacagtcttcaatagtgactaatgtacatcatcactttaatctaagaaaataaattaaagtatatgtaaataaatcttagcattttgccttataattataaataagttaagtttgatatgatcatgcctaataacgaaggccatattatatctccaaggaataaacatagtaaagtatttttcgatattcaaaagctatttatttagccaaattagtatactaaaaaaatttaataaacccaacatgttcattttgagtcta

SEQ ID NO: 351451 - DNA, 1508 bp, Cannabis indica
ggcggtatgcccagcagcaatttcttttgtaccgcccagtgggatactggacgtagcagctggttgctgattagcaacttgatagactctccatatcagtacggtagcttgtcttgttcggtcatcgacggctgcttactgaaatttcaatgtttccatttccctatccctccactcaatgaattggcgtcgctgctcatcgaacacaagctttattgcagcatggagatcctcctgatcatggtgcatggtgttagtatgacattgcataagcccaagggcatcacagaggttttgaatctctgtgtcatctcctatcatcctctgagcattggttgtggatgggattccaatgctgggagtgctttgattcggctgcagaactggtatttccagtctcttgcacatccagttgatcccaaccagaggggaagtcacaccttggcccacagtaggtgattgtgtgttaggctgctcgggatttgttcctggtaggacccttgtattcccaggggtttgcatagcaggatctatcaccattgggtcactctgatcaactaagcctctgcgagtttgcaccaccattctgtgtgcctgttgaaacttaagacaaagaacaaacttgaatttttgctctcaataaaagcaccaaaatgttgacctcgcttttagtcaacgacaatgagtcaattatgaagcgattagaatataataaaaatagagcaaaaaccaataagcaataaagaacaccaggttttgaagaggttcgacccctttagttcggtaatagcctactccccttagattgtattgacttagaacaaagaacacagtgtttcccctctcaaagctctcacaataaaatctttgagtgtttctcttagatctctctctaaagctattctttcgatcccttttacattgaagctagatcacattttacaagggcttaatgcatgagggaaggtttcccttttgcttacaatatctataattggaaagaacatttattacataattagaatacatgaaatggggaattgagacagcctgccatatccctctgatacaatcccatgactgtagggactgccttagtgcttgggcttcacgataccattctaaagtagttaagtcttggtacacagctcggagaactaacctcattctttgctcagataagcagactttgtgcgtgcacatatgttgcttaaagtctgttcggaatatctttctgcccaaatgcaaggaatgatggacacatgtcactcgtacatgctgccacatcatagtgtaaaaaattggataacaatatataatactagaagtataaacccactataatttctaaaccatgtgagactttttaaaagaggtcaactactatgaaaagtataaaaattgttgaaaagtagaaaataaaataaaaaagttagaaaaatctacaaattagaaaacataaattattagaaggatataatgctacatcgtcttcttacgattctcct

SEQ ID NO: 351452 - DNA, 1209 bp, Cannabis indica
gaaaagcataatataaataacatactaaatctcgggttctaatcaagcgcccatatacctaaccataaccctaactgaatcagggacgtccaagacaaagtatgattaaccccgaatccatcctatactcggtactctagtcgtaccgatgtcgtagcagttaatccatactatttgatagcctagcaaatatctgttggcatcttggtgaaactctatgtacacctcactgttgccctgatatgctaatctgacggctatataaaatttgcctaacatatatctaatatgttaatctgatggcaactgacatgtacgctaaacatgtctaagcatatgcataacattatactaatcttacctcgattccgaattcaggtgtgccggtcaacctgagtggaacgaactgctcaccaaattacaggctcctaaaccataataatcacaacactgataagtgacacgctaaatcacttcccggggacttaaactagaaactaaaagttttcctatcgataaaaagtatggcaataccctaaacaacataaaaatgggaagaactagggttcccaagtttttcacaaccgccagaccggttatacaaccggaattccggttctggaagaaacccagaacaccaaccgcaattccgttcctacaggccattctgaatcggaattccagttcagtgcaggaatttttcaaaattccataactcgaccaaatcaaccccaaactaattcaaactttccaaacctgctctaaataccccaaataacagttccaaagcaataaaacaacccaataagcacagatacaaaaattgccattaaagctccaagctttgagttcaaaactcaagcttggtgaaaccccacaacatgcatcaaaacctgcttgaatctactcaaataatcatacttaagcctctgaaaacaacagcaatcaactacaacaagcacaacaacaaatttatcatttctccataaaaaacctaagtttcgggttaaaattcaaaacttgaacaaaaacaactagcatgcatcaaaacctatcctatttcactcaattaaacatttttaagttatagaaaacaacaacaacaactaacagcaactattactatcaaaatcatcaagcatgcaaatattttctttcttaaaattcaagaacacaacaagaaaagtttcaagaaccataccttagctt

SEQ ID NO: 351453 - DNA, 520 bp, Cannabis indica
tagaaaattagaaaaataagtataagtccttagtttgattttttttaatgatttcttttaatttagtgtacatggtaattattttagaatactataggtctttggtttgatttcttttaattagtaggtattaatttagtattagttattaattacatactaattttttttaaaagaaattagaaaattagaaaaataagtatttgaaaaaagaagaaggttaagcatgccacataaactccttaaaaccttcatttatatatatactaggcaacataaccgcgcatcgcgcggttattatactaatgaatagatatttttttttatttttttttaccatttacggttattatattatgttatgctgcaaatatcttttcattgtattattaaaaaatgtattaacttttgtgttaattttaaagtagtaactaacttatacactataacttttgtgttaataattttattagtaattttaaattttatatttttatcataaatttattacatgaaaata

SEQ ID NO: 351454 - DNA, 794 bp, Cannabis indica
ctaattaattatatatatatgtagaaaagttaatagtatatattttgaactacaaaaatattacatacatggattattatttttaattataatattttaatgtcaatttagaaagattttaattggttaagaaaaattatctttggtgctcatagaatattacatgctaaagcttcaatgttgtttaggaaaataagaaaaaaatgtatataaatatgggttatttttcaaaatgtaattttagtaaaaaaaaaaaaaagttaaaaaaaaaagaagaaagaaaatatgaaaaatgtggattagtagagattttacttacaaaaattagttttgtaatatgtgttatatattttacatatctactttgaaattaaagaacaaaaaatgttggtactttttcttcaagttgtcttgtacagggccggcccaatcaattgaatcttgggcctttaaatttcaattagcaatttctaagaaaaacactattgttttaaatatatatattaggggtgttcattaaaccgcccaaactgctcaaaccgcccgcaccgcaccataccacaaaaaaaaaaaatgcggtttgaaattctttgcagtgcggtcacggtttgaatttttcctaaaccgcgtggtgcggtttgcggtttgcggttttgaattgttaatatgcggttcaaaccgcaccgcaccgcatattatacaaataccaatttttataattatttagatataatatgtcatgaatgttcaacttaaagtctactattcttttaaaaaaacttaaagtctactaa

SEQ ID NO: 351455 - DNA, 519 bp, Cannabis indica
gcgaatcgttctttgactcatcctcgtgcgataattgaagatgtactgatgaaggttggtaagtttatctttcttgctgatttcctaattcttgaaatggaggaagattcaactattcctattattttgggaagatcattcttagccacggggtgagcattaatagatgttcaaaagggggagttaaagttgcgagtgcaagatgaacaggtcaattttaatgttttttccccaaccgaaattcctacctgttgcaagattgagatggtaaagggctcttttgttaaagttgataagaagagagtaaagcttaaagagcgactttgaacgattcgacatcattgggaaagattgatgtgtggtacttctcaaggtgaacttactcttgtgcaaaactctgaaattcacaacattggaggtcaattcttcattcggtacgagggctctatttgaggcaaggggtggacttgatccaatttgaagaagtattgaggttcaaccccttctgatgggggtgca

SEQ ID NO: 351456 - DNA, 513 bp, Cannabis indica
cttgaaaacacacaaagaatccctcaaccctagctgctcaaggccgaagagagaaagaaagagagaaaaaagagattttgcttttctttgatatttttccaatttttgtaaaatgagtgacaaaagtaattttaataacttatttcagccaaatgaacatatcatacatcacatagtcacataatactaagtccactaaaggacaaaggcttatggggcaaaaagaccattttacccctcccacactaaaagggttaaaaagcacttaagggtatttttggaaaactctaaattcccgaccaatcccgacattcctaatgtctaaataaaccgtcccactatgctaaaatattagattgtgattctactgagccatacaccgcgttccatgttgccgagcaccgaaaatgcaaaattatgaaatgtcactatatgacgtaaaaatgcattcagaattcaaatataacaacataaataattattgaaatatcaatatataattttcataattaa

SEQ ID NO: 351457 - DNA, 1012 bp, Cannabis indica
tcttgggaaattcaagagtctatttgaggaaatttttttataatattgccattagaacctcacacatggaagattttgtaaaatggactcaagagaagagaatagcaggtgagtatacactggaatttgatcatttatccaagttcactagcgatctagtgccaacagacttcactcagaaacaaaaatatgtaagggaactgaatgccactatcagtcggaacttgaaaattaccaccaatcacgatacattatacaagaaagtggtcaagttagcgttaattgctgaagaggcagaacaacatgtgatcaaagaacaggctattaaggatgtcgtcacgacatcaagccctagtgtgggtggtagtgtcagtaaggggaccgacgacgacaactcaaaccataagcggaaggctaaagcttccaaaacaccaataagtaataaaaagtttcgtgggaatagaggtggccgtcaaggtcatgggtcttcatttagaacttacccgaagtgtcccaaatgtaaaaagcaccatcagggtgagtgccgagctaaaacatttttccagtgtggtattgtgggctattttatcagagactgtccacaatccaagaaataagaactaaagaagtacaataatcaaaacctagggcgtaggggtgagcataaaattcagagaatcgaaaaaaaccgttcaaaccgacctaccaaacaccattagaaccgaaaccgacgaaattgaaaaccgaaaaaactgctaacggctaaaatcgccattgaacgatcagttttttttcaagtaataaaccaaccgaaaaaatcgaaatcgaccgttatacatatatatatatattaatttattaagtttgttttgcatgtattatagttactaataatatataaagataatatcttattttttttattaatattaaagttaaaagaataagataattaatttttgaacaattaatttgtatgtttgtagttgtaaaatgtagaataatgtattta

SEQ ID NO: 351458 - DNA, 759 bp, Cannabis indica
aaaacaagatgcaccttgttgatataagtagtaccaatcaatctatttaagcctttttcaactatgtagtcccatgcctacacagtctcagaatcatcccacttgaccttccccaggcgatgtgggattgcacatcttaatcggtatttccccttacggatcacgggactactgattgtcacacaatccaacttaaagcttctttaatacctatgatctcagcaatttcgggttggacatacccaacctttcccttcttgaaagcttttaccatggtcccatgatgatctcaagttacacagcccactccgaaccgtccctcttgttcaaataaatccctatcaacattaactttaatcttgtttaacacaggtgcaatccaacgctcacagttccgccccacatcattcaaaggagacaacgaaaggccctttctttcttgagcaaatttgtattaatcaagcatgtttctagctgatgttacaatatttgaagcaagccaactcttctttttgcaaacaaagtcattccgcgcaccccaaatagcccaactcaccatcgccacttcctccatttcaccttcgtgccccctggtgagaatttccaacaaccacctgctgaacgttgtagccccagccccgacgtccactatgctgcgatgccaagcatcctttgcaaacgagcattccaccaatgcatgttgaatagtttcagtactagagttgcacaaaggcaattggcattgacaggaacatgacg

SEQ ID NO: 351459 - DNA, 632 bp, Cannabis indica
gcccaggaagggtataagcctcgtgctacggggtgggaagcggccgagcttcactcaacccttacttgccctcatcagctggagcacattgtgctggtggccggcatcaagcccgccacttccgggacttaccaccggccgccccgggacacggagacgcccaatcacaattacggaggcttcagagcttggagccaaacgcatttgatgaccggggctatgcttccccttcaggattacttcattaatttccttgtatttgtcggccttgcgccataccaacttattcctcaagcttaccgcctgctttcaggcttgtttattttttactctgcccggggctggggctctcccagtccggcagagatattgtacttttatgaacttgtttctgtccccaagaagggggacaaacttaaggacgacttttatggtttccgggcccaccctttgaatgagggcccggtccccttcaaccagcaaaaacacgtcaaggagtatcgtcaccgcttcttcttctcctccgggttccaggctgtggaacatccggagcttctcacggagtgggttaggatccctccttatgagcggactgcacctactcagctcttccttcaacgggccaagacctt

SEQ ID NO: 351460 - DNA, 594 bp, Cannabis indica
ttaaacaggacacatataagacccgaattttagattatttggtctggacgaaaaatatgtagtatcatttacttccaaatcttttttttattaaatttaaaatagagtctgtactgacgaaaatagagaaaaattacagttttacaaacattgggtacttatgccactaaaaaaaatcattgggtttatgccacttacaaactcaaaactttgggtacttatgcctttatttatccttatttttatactttgatgtttcaatacaattttcttaacattctttttgggtattcaaaacccactataaaattgaatcactattaattatttttaataattctttagttgtattcacataaatacaatattttggacaaatagaaaatatttacttcaggaaatatttgccaaaatctatcgatattggattacttttcattgttcttaaaaaaatacaagaccatatatatgaatacatattcttctcttttattatatttcagtcagttatatggcgaatattatatttgcataatctttaggatatatacaagattttattgaggacgcataatctttaggatatatgcaata

SEQ ID NO: 351461 - DNA, 376 bp, Cannabis indica
aatttctgagagcaaacctagacgttttcgcctggtcacatgcggatatggtcagaatcgatccttctattatttcgcacgtcctgaatatcgatcctaacatccggccagttcagcaaaaatgaagattgctagataaagaacgagcagtagccctgaaagatgaagttgaaaagattcacaacaacaacttcatccttgaagccttttacccggcttgggtcgcgaaccccgtactcgtacctaagccgaacaagaaatggtgagcctgtattgattttacagacaacaaagcatgccctaaagactgttttccacttctaagaattgatcagctcgtcgatgcaacagctgggcacgagatattaagcttcat

SEQ ID NO: 351462 - DNA, 423 bp, Cannabis indica
atccctgggaagcgtagaggacaaagagagcggacaaatacttaatgcccttgggagtaatctgagccgggcagaggccaaagaagtcagccacatcccggaagtacttgtgcaagggcctcagcgccccttactggtcgtgagcccccaaccaggcgcacatccccttatcagggtttgtagcgcgattgttgtgggccggaatgaagtagtccagcccgccctggtatccgtcctggtcgagagagtagaggcgtgcctccaaaatcttggacggaggactcacccacctagcgcccaaggcaccctgcctcctatgaggaaccgcctcagcaagctcctcagagacgtaatcgatgcccgcaaccaagacgtccccgtcagcatcaactagttgcccaacctcattgtactccccaaagt

SEQ ID NO: 351463 - DNA, 723 bp, Cannabis indica
atgcgcccaacaacaaagcgataaagctaatcctaccccgactctctaactcaaccctagtgaagtcttgaactatagtgttggcttcgtcatccccaaggaagttgtccgaggggagaaaccagctggaggacaagtgggatgaatgatccaggggaatgggtacaggagatccagagcccatccaggatcgacccaggttagggcccaagtgggaaaaatagaagcctttggcatgatccccccatcgagtggaaggcatcctaaacttacaaaggcgctcatcaaatcctatgggcctacactaggtatactctcagacagaggggacatggtgaattattaaaggagacttaccagaacctgaagtactggcatctggcgcaccagtgttaggaaccgggaccaaaggcttggcctggaaggcctccgattcatgcccgcttccaggcgaagggtcctcccgactgcagcctgggccttgatataagctagctcttgctccctcctaaagatgtatttctggtaccagtcctctgtcgaagtggttatgtccacccagagcgtcctttccgcagcaggagtcctgacgttcgggcagatgacctaggaaaggttaaagtcatgggattttttcatatatagccttattagggtcaaattttacatttttattactataagagaaaataaaccaaattagaaaaactaaagttttttttt

SEQ ID NO: 351464 - DNA, 606 bp, Cannabis indica
tgaaggccaatccataggagtggcttgggacccgagtaaagaggaacaataggggatatcttttattatgggcttcaatactgggctgccactatgggcctcaagttgaggtgatgcacgaatggtaaaaccctcagaaggctgctttaaattctcagattccttttgttcaacagaggcattctgtacttcatcgtgtgcaacgactatagcatgtttacccaattgtggaagtttatggggaggagcttgaggggtccttttcctaacccaggtggattttggactgttgcagcttgcctcaggcttttctgtcatcctcacaacagccggtttgccattggaggattccccatcatctccagcagccactttcttgagtttctgcaactcttggatggaaacctcctttgtgttgttgccaaaaggggcaatttcgcctatacccggcaagctaaccaatggtagttgggtaatagccagcgggtcttgagatgcctcctggtgctcctcatcagaaacaattctcttcttgcccggaagttgtcttctgcactccctaaggtccgccgattcaccattacgcaacgccttttgaactttcaa

SEQ ID NO: 351465 - DNA, 548 bp, Cannabis indica
gcatttctaatggtagcatcttttaaggatgctaaaaatttatacatcatctaaaactataatattttattttatctctcttctacgtcattttcgacactcttacttctaaaaatacttcaatgcacaacactctttaaaaatatgataattattatttcacacattattatttaatatatattttaatttttagctacaataactttttagttttaattttttattaaaaaaaataaatagcatcaatgctacaatataacattcctacaaatttctagaatggcactattttctctttaatggtatagcatctcaatattttgtcacataatatatccactttactaagcatcctctaaaattttaccattagagatggaatttacaaaacttaatataataaattaactctcttttattactaagaagaaaattataattgcctacaataattaagttattaaataatatagttatatatatatatatatatatatgaagaggtcttaatagatacattaaatatataactatgatgattacat

SEQ ID NO: 351466 - DNA, 476 bp, Cannabis indica
tgttatatgtgaattatgctatttttataatttttgctcggcgacaacagaaaatacgatggatggctagtttgatcacatgggtaggtctagaaccttattttttagtgggatgtatgttggaggaaatagagtagtgggcttgagcggggttatggatttcaaccattttacccctagtcttgaaaatgcctaagttataaaagaaaaggcattttagtaatttgccacatgggtgatttggtggctgccctagatgttgacacctagattctactttcatccaagataaatgtaattagtcttatttttcatttgagggaaaataaagaaattaaggaaaaaaagccaagaaattgaagaaaactctctttcccttctctctcttcgaaccagccaaaaaccaagggatttattactaagttttgtgttttgagcaaggattggaggaggtttaatcaaggtaagccctagac

SEQ ID NO: 351467 - DNA, 666 bp, Cannabis indica
tagggttttcagtttcaaacttttatattattatttgaggacttatatttacacccccacaaccacaaaattataattacacctctataaatataattgggtagttatatttgcatcccacagaattataaatacaccccattattaaaaaaaatataaacttgaataatttttaaaaattactcttaatatattttttaaattttttcctcacattattttatgttaattttaatacttattttaatttcatttttataattttttctaactcatgtatatatttttttattttttctaagaaaatttcatatgatttttaattttattttttgtcataattttttaaatgtaatttaattttgtttgataggtatattttttaagaatataattgaaagaaaaaagttaaaaatagttagtacaatttgttgaccgaggttttcggcaaccaataaaatattataagtttatggagctgtaagaaaattagagaaggatttttacgtggttgggacgttaatgagccttagtccacgagtctatcttatttatggatgtatttaatacagaatgtatttggtgagtgtttcaccctggtaaaatacagagaatgttcttggtgagtatttactcttcttactcttatgcaacccaagattctcg

SEQ ID NO: 351468 - DNA, 576 bp, Cannabis indica
aattaaaaaaaaaaacataaaaacaaaaagataaaaaaaaaatggtaaatagtacaaagattattaaaaaaaagttactaattatttacaaaaaataatagtaaatagtacaaaaatcaatacaaaagataaaaaaaaaattacaaaccaattattgagtactatatcaatatgagattaagcacattaaaaatatcaatagcaagtacaaaaaattatttaccaaaaaactagaattaaaaaaaatttaaaaatatacaaaaaaaatggtaccacaccgatatgacattaagcacattatcaatatagtagagcatattaaaagcactaataataagtacaaaaaattatttatcaaaaaatagaattaaaaaacaaaacatagaattaaaaaaaaggagtaaaaaataaacttaaaaaaaaacacaaaaaaacaattgtgaatttatattgtaaaaatgttatagatatacataattttaaaaatttttgctatgatttgatatgtaagaaacatatttctatatatatatatatactagtaaaaagttacgtgcaaggcacgtatactaaatt

SEQ ID NO: 351469 - DNA, 1173 bp, Cannabis indica
agttttagttaggcaaaaaacccaacaaaagcctaccaagctgttaggcaaaaaaccctgaatgtcatccccatgggtgaaacaaacgaagatccagcgatgaatacttcccagactataaatggtcagccgccaaatctccaatcacaggttctgcctgtgggccttccagtaggtgggcagaccttgtctagtaatacctcaggagaagtcatacccgatggttcaaaccaggcgaatggtgccattccacctgtcaaccaagtgcatcaatcactgagacagccatgcgtttctgtattcgaaaggttggggacgactcgtgatctcagaaacgatctgaaaagaaggagaggagtagacgatcaacttggcacaacgatcgtacaacccggaacccgtgctcaaattcccactcagaaagatactgacgtgactcaaattggccaaaatgccgaacatgttagtccagctgtgcaagcatagctagacgaactaaagagtatgttctaaggcatggtcaggcagagaaacaatgatctcgagttggaccgagcatgtggaacccttttctctcccgagatcaatctcctggcgttgccccacaagttcaaaatgccaacctaaaaaatgtaaactagaagagaagatcctctttcccacctcaagtatttcgagatgcaaatggatcggcaaggggtacgaggtgacgtatgttgtagaatttttcctgctaccctctcggaagctgcccaacaatggtatttccagctggcccctggaaagttcaactcatggaaagccttctcgtcaaaattccatgcaaaactctcctcctctcgccaactttcgttgtatttaggagacctggtcgaagtcaagcaaagaccaggcgagcctctccgatcatacatcaacagattcatgacggaggcgaccaaggtttcacgggtaactgaagatggaaagttatccgcgatattgggggcattgaagtcctcggtgaactttggaaggacataaggaagaacggcccgatagactcaatgagtgattttttcgaccgtgttgaaggcttcattaaactggaagaagctattcaatgagcaaaaggtgaacaaaagcttggcaaatcaaaagctccttccaatggaacgtccgcccaactccccc

SEQ ID NO: 351470 - DNA, 751 bp, Cannabis indica
ataccatcacttgtgttaccgctaaagaaaattgaagtttttagcttattaactctctgaccagaccaatcacaaaactgtaccaagcaatgccacatacctcttgcttcttcaaggtttgccctgccaaaaggatcagatcatcgacaaagaaaagatgggagagtttggggccctctctgctaagttttataccactaatggtaccgttatcaagggcgtgctcaaggatgcgcgagagaatttcaatagcctagataaagatgtacggagataggggatctccttgtctaatgccacattccgaggtcaaactgttaaatttccttccattgagaaagaggttgaaggaagttgttgtgatacactggcgtacctagtggcaaaacttgtcaggggccttgaaactacataaaacgtggtcaataaattgccaacttagtttgtcgtacgccttaaccaggtcaatcttgattgcaaaaaacccctctttcccttttttcctcttgaaagagtgtatgatctcctggattaaaatattattatcttggatgttccagcacgagacaaaagctgcttgagtaggacaaatcaatctgggtaggaacattttgattctattagcaatgattttcgagattaccttataaatcacattgcacaaagagataggtctgaactgggatacttttttaggattggggaccttaggaatgagggtaatattgtagcattaaagcctctatgcata

SEQ ID NO: 351471 - DNA, 743 bp, Cannabis indica
tttatttatatattattaattgatgaaatttattttttaaatatttataatattaattaaatgtgtaattactaactatcatgccaaacatgatattaggaattcacatgtaattaccacttgacatccaaacacaccttgtattttaaaatactaatgtaattactatacagtgtaattactaccctagtaattacactacatagtaattacacagttgttttcaaacagacccttaaagttttagatagatactaccgtaaatactaactgaattactacaatatcaacttcgagattttgccgttacaaatacacaggtgtatacagtggtcatccacttgatatttaacagtaatatttaactagtgtctcaaatttgcaaagaaaaataaacataaaggggttttactacaaaaaaataagggagttaagtgtataaacattaaaacataataagagggttttgcaacaaaaaaaaaaaagataagggggttaagtgtataaaagttaaaacataagaggattttgccacaaaaaaaataataaatgagctaagtgtataaaaattaaaatataagtgggtttcaccgcaatttgctttgacaaaagatatattaattgaaagagcatatatatatatatatattaattttctattcaaattattataactatatctatatataaggagaagtatgaagtggtgatgtttcactctaaaatcactttaatctcactat

SEQ ID NO: 351472 - DNA, 974 bp, Cannabis indica
tattactttcatgtggttttcttattgtttgttattttcttgtgtttttatagaatatcgtaaaaatgtaaaaaaaaatgaatgtaaaagtgtaaatattttaccaaaaatagcagcttatgtaatttttccttaaaaatgtataactaataacaatttagatgttattcttatttataattgatctaaattggacttaaattttttataacaaattaaagttattcttaaatagagtatttttagacaggtgctctattgtactatctaaaaaaatagaaagaataacgtaatatctatcattttaatttattttcttacttttcaaagataaattttcttagtttcttcaataatattcagcgacgcacatgcttttatgtaaggatcttgagaaagaaaaaaaaaatattgtgtatacaaagatttatttataaatagatcgttttagttttcatgttgttcactttacattctcatatagtcattctgtaagagtagcaatttaggtcttgaaataataatatgaactcgatacaaattataatgagttagaatcacataaaataaacacgcatcagaattgagttgaatcaaaataacacaataattatttaggtagggtaagatcaactcatgcaatataaaatttacatgaattaactcaattatatctagtatattattaaaattattaatttataattaaactattttttcaaaaaaaaaagaataatagtaaattaaatagatctaaagtagattttttactaagaatataaaataacttatttacttttgatattaaaaattttgttcagtgtattgatagtttatttaattaatcaaatcttatttatttggagctttatttatttttgtgtaatagtcaaacaaattgatacaattatttacatgtgtataaaaatcaaatataattacgattcctctttattccctccttctcctgatta

SEQ ID NO: 351473 - DNA, 554 bp, Cannabis indica
gaggatgatggccgtgaattgatccaagagggtattggactaggaaattctttgattaatggtggctctcaacttaatagtggcaaagagaatttggccgagtcatcatgtgaagaaggtaaagctttgtcaaaattttttaaagctcaagaggagttgattcatgacttgaaacattttgggaaactagatttgtatgagattaagagcttgggaggggacattggggtgttgaccacttcggaaacaaatgaaaggactactcctttcaagaaaagaaagtttgaaggctctgcttccttatgcactagacctcacaagactatcagaactcatcctgatgtgattcgagattttccttgggatactgaagagaaggaccgggaatcaaaggtgatttatgatgatccatctgaagaagagtctgattctatgagctgcaatgaaggaataatgaagaacccgttgattggatcctttgtcattgaagactctggttctagcttatctgtgggcccgctaaaccccgtggaggagaatgtcatatctcctcc

SEQ ID NO: 351474 - DNA, 733 bp, Cannabis indica
ttttatggaaaaattttgtaatttaaatacaatcattaaataacacataaaccaacatgaacacatccaaattaacaaattcatcgttttaatccatatttcatgaaattaaatcattaccattgctctgaggccagtagttgggaatattttactaggatctagatttactaacaagtatgttgaattatcatcctaaatataaatatctctaatgcgacgaaattaaacacataagagtttagaaaaccttacattgattgcaacagaataatatgaatccttccgcttccttccgctcagatctctaaccattgttcctttctctcgcggagtaataacaacatctgagcctggatctccttctctcctttgaattggttaccaccatcttctacactatgattgagtacttagcttgctatgtgtgggcatgacattctatgactaagggtcgattgatgaagaacaatgaaggaggctcgaaatcactatagaaggaggctcaaaatcactatagaaggaggctcgaaatcactatagaaggtgtctctcatctactagttttctaacagagttagaaactagatttggtaggttgaaagtgttggatgagacgagagcatcatgttccttttatagtgtttcagctagggcttaagcttgaattatatggattaaaaaagaataaaataatgggaaaaaatcacacatagtggccgggcactaaagg

SEQ ID NO: 351475 - DNA, 739 bp, Cannabis indica
agtggaacaatctgctcggcaaattacaggctcctaaatcacattaatcacaacactgataagtgacacgctaaatcacttcccagggacttaaacttgaaactaaaagtttccctatcaatgattagcatggcaataccctaaataacacaaaaatgggaaaaactaggggttcctaaaactgccccaatcggtagaccagttccccaatcggaatttcggttcctagaaaaaatcctggaggccaaccagaattccggttcctacaggcctctctgaaccaaaattccggttcagtgcaggaaacactaaaaattccataactcgaccaattcaaccccaaaccataccaaaccttccagacctgctatatagaccacaaagaacatattccaagtgataaaacaatcatccattcacagaaacgaatttcaccattaaagcttcaagattgagttcgaaaactcaaaacttgactaacccttcaaacagcctctaattcatgcataaatcaacataataccccatatctaaacctcagaacacaacaacaaattacagcagctacaaccacaatacttcaaagcatgcaaaatttcatttcttacaacttaaggaaataaggtgaaagctacaagaatcttaccaggaacttgagatcagtaatcccttgctaaaaccagcttgaaatgcaaaagaaccaaccaaaacctagctgcctctaggtgggttcgaaaga

SEQ ID NO: 351476 - DNA, 628 bp, Cannabis indica
tgacaattttatttgataattaagttaattattaaataaatagttttggcatttataggattgaaagtgcaaaaagtggtatttatgaagaaaagtggcaaaaatctaactagtgatggacccacataaggcctgccactaggtcatatttttgctcttattttatcatttgtttttattccaaattattcaatcctaaccctaagagaattaatataaaaagaaaagagaggtctcactatccaactaatgcttctatagcttttaaacctagtttttattctgttagacaactagagttttgagacttcttcttcttcttttctctctactaattttgaaattcttagtgctcttcaccattcgagcctaagtgattgagtgcatgcccacccatagcaagttagtcctcaatcatagtgtgtaagactgaggaatccaaacaactgaaggagtgtcgggctcagatcttggtgatactctgcgacagaaaggatgcaagagttagagatctaagcggaaggattcatttaattctgctgcaaccaatgcaatgtttctcatatcttttatgtgtttaattttatatcgttttagaagttcatatttaggatgttaaaaatatact

SEQ ID NO: 351477 - DNA, 442 bp, Cannabis indica
gcttcctcttttgttggtaatcaaggcctttgtggcgagcccctcaatgtaaaatgtccaggcgataatggtactgatttcgataaacaaccaactccaaaagatcacaataatgatgatgacaattttattgataagtggttttatctgagtgttggattgggatttgcagcagggcttttagtacctttcttcataatggcaatgaaaaaatcttggagtgaaacttattttggctttgtggagaatgtggtagaaagatatccattctttgagcgaagaatgagagcgaaacgacaatggcctaggggacttcatcattgagaatgatacattcatgttgcacctattttatttttagcaagtttgtgtgtaatgtaacaataatgccattatatatctttgaatttctgtttttttttctttgttttagttcagagtt

SEQ ID NO: 351478 - DNA, 819 bp, Cannabis indica
ttacaacttctgttttggaaatctaataatgttgatggatgtgaacatgatctacaattatagaatcccgacttttctaacggatcgaatattggttccctttatgtgttaattctagtactagaaagttgtgcacaaattcaaatgggatcttcaattatacttccactagtgaattaatggaactaaaagataaattgattagaagggtaaggtagtaattttaccaaaactaattactaaccaacacatggagagtcaatcactggaattgattatatcaatagacactgtagttaaactcagtaaatataattctataattactaagagttcaattctatatttataatggagtaatcaaggaattaataaacaagggattatttagttgatgtgactcaataaataatctagtttattggagcttagaattataggtccatgatctccaaatcgccatccttaaacattgtcaatggtaggtataaagatattcaaaaaaatctattttgaattaacaaaatagtaattatttatttttacaataattaaatagttttttaaaattaattgaataaggaaaagacaaaaattgttaagacaaaatttgtcaagacaagatttgtcacgacaaaagttgtcaagacaaaagacattgtccttgtcctaaacagacaaggctaggcgcctatagcattgtcctgttcctatggagtttgtctttttgggctaattaattcaattaggtaaatatctaatttgaaaagtggttatagatatttcaaggttgttaagatattctctaagtggttgaga

SEQ ID NO: 351479 - DNA, 508 bp, Cannabis indica
tcatcattttctgctacatttgcttgatccaccatagtgtttccaagcaatatgtaaattccattttctttggagcctttcatcagtaacatggaatccttcacaactttcatcatgccattctcaattcttacagtatagccttcctgatccagcattgccacagaaatcaaattccttttaatctcaggaacatgtcttacatgtttcaattctgcaactcctccacctttaagttgtaatttgatagtacctataccagttatagggcatgatctattatcaccaagtctaacagtgcccccattaattttcttgtaatcactgaattgagactgttctggacaaatgtgaaaggagcatccagaatcgagtacccaaccagtctttgagccatctttagatactaccaatacccctgcacttccatatccttcactatcacaatcagagaccaaatcgacatctcctgatgactgtttctggttgtaattcttgagaattggac

SEQ ID NO: 351480 - DNA, 844 bp, Cannabis indica
tttataatagtgctcaaatgcatttagggtaaaattaaaccttcttttagaaaggtgtaataaagtttacaaaagcattaaatttttattgaaactatgtaaaaattctattaaatatatacaaaatgtaaaaaataattaattacattaatatagtggcaaaagaataaataaaaaggtaatatttattttggtgtaaaatgtggaccatgctttcataaaaaaaaaattgacccattctatattttgtgtcaaatttgacataacttttagcatgtgctaagtttggaccactttatactaggactgaacattttgagcgggttcgactcgaacctgagcaacccgctcgaacccgaaccggtgaacccgcaattttttttttaaaaaaagtttcgggcgggtcgggttgaacccggtacccttcgggcgggttcgcgggttgagattttaagggtaccgggtttcgggttgaactcgagaacccggctgccaacccggtatataaatttattatatatattttgttttatttttttatttacagtttttatatatgtatattttaaagtatcaagtaaaaaaatcaaaaaccctaaatttgtaaatcatttacatttcaaagcagccctaaatttagcctccacagtccacgactccacacccacacggcacacatccacacaccacttcagaccagacctcacctcacaaacgatcagccaccaccagccacctttctctagcaacgtccactgaaaaaccgtgtttttacaaatgtcagttgtatataagaaaatataaaaactgtaagcgtttgcagcagcagaaagtaattctgcta

SEQ ID NO: 351481 - DNA, 830 bp, Cannabis indica
tgaagcagaggttaattacagctcagtgttagctctgccttctgagagagaaaattttttggtttattgtgatgcatccagacagggtctggggtgtgttctgatgcaggccgatcgggttattgcctaagcctcccgtcagttgaaatattatgaacagcgatacccgactcatgacttagagcttgtcgcagtggtgtttgctctaaagatttggcggcattatctctatggagagagatgtgaaatttacactgaccgtaagagtctcaaatatttctttactcagaaagatttgaatctcagacggaggcgttggttagagttggttaaggattacgattgtgaaatcctttaccatcttgggaaagccaatgtagtggctaatgccctgagcagaaagggtcccgggcaggtagctagcatgggtctaatttcgtcttagttagcagaagatatggtcagatcaagcatcaagtttgttgtaggcaaacttcataacttgacgctgcaatctgatctgttagaacgtgttaaagctgcttagctaactgatccagagttagtaaaagtcagagaagaggtttcggctggacaagttaaagactttacagtgtaaaataagggaatgctgttgttatagacaagagtctgtgatcctgatagtgtggaacatagaaatgaaattctcgtagaggctcataccactccatattccttgcatcccgacaccaccaagatgtatcaagatcttaaaccttacttctggtggagtggaatgaagaggaaagtggtagaattcgtatcgagatgcctaactgtcagcagat

SEQ ID NO: 351482 - DNA, 585 bp, Cannabis indica
ttttatttattttttaaatatttaaatttttctttttaaatgaaatatttataaatattaatattaatatttgaaataaacatataaaaatttgagctaaaataaaaaaagcgttattttagttatacattttaaataattgaatagaaaaactgatggaagtacggttaagaatttcggtttcaaaacaataatattagaaattaaaaaacaaaaatttacgtgccccaatttttatattttcactatatttttttaatctttattaggttgaagatgtaagatcattagatcacctttaaacaaaagaatccttaaataaggaaggatagagaaaattaatgaataaaaaatgagataattaattttctattcttttgtttgagattagaagaataatttgaagaatgttaaaatgatttatttgctggcttagtttgttcgaatctttgcactgtgcgaatctcatgcgaggatcgaaaatctactaggaatatatgactacgatacaatgttaagtagagctgttcattcgatcaaatccgcacttttttagtcaaacaacatccaatctgcactaagtgc

SEQ ID NO: 351483 - DNA, 621 bp, Cannabis indica
cctgacataagagagtcacatggagagtatcttgaagtgacaggggcaaaattagtacaatgttttaaaaaagaggtaaaaataatagaatttaaaaaagaggataatataaagatagtatagagtgtaatttcctctctatttaatgggatgagaattatagtttctttaaatatattttgtttacacaaagagaagactataggacatagattaatgagctataggacatagattaatgagctatatttttttatcattatctgtttgtaatattttttttaataatatcattttgtaatatatatattccacatttgataatacaaacctatgtatatttatttgaagaaagaaattttaaaaaaatgaaaagaaacataatgtatatcctaatttatagagttcctacattttttttattattttataagatttaaataatttaattttaataggtttgtattatctaatttttattttaattttaatagatttaaatcataagatttactacaaatctaattttcacatttgataatgaagagaggtgaaactaaaaatacatattttcaatgctatgcaatattttgataaattttgaataatttattataccaa

SEQ ID NO: 351484 - DNA, 620 bp, Cannabis indica
gctccctaatgcgaattgcatgttcaataggcctgggccgggccggaggtttcttcctcttaagcgaagtcacctgctcttcctcagcttcatcttcaggattcaagggctcctgagcatactgcttggcccttgcacctcctttcaacttagcctcaggcttaagttgaatcagctcattctccttatgagctcgttggtccgtccagcacaagatttcctcttctttcccgtcatgaacttaggaatgaagtccttaggatagagcccgtacttcacaaaacaatcctcggaggtcaacaggataatattccggtcttcccccggtagacgagcaagcttttgagctctatccctaagagcaagagtgaggggagggcggtgatatgtgggaatctgctaaaaccgagtacgactgatgctcgcgccgtccaccatgaagtaatcatcaacaaaatgcctaattttgttgatggccgagtcgtccgtgcacgccaaccacttgaagcctggttgagagaaatagaagtccccgacctgccttgcttgggggtggacttcaatcaagaaccagccaacctcatggggcgaaggcatatcccacttctgggaggcataaa

SEQ ID NO: 351485 - DNA, 921 bp, Cannabis indica
gcattttccgttgtcgccgaacacaaattacaaaaataatataattcacatataagccaaataatacccctagagtttaataaaatttttgaaattgaaaaattataactctaatgctcatttctaatactggggtccataaataattaaattcacatataattataaaaatatcagaaattagtggtaattgcctttactaacccaaattactaaagtggtcattacaactactcattctttcattgcaaatcaaaagcaaatgaagaattattttgattatctaaaagataaatatcaagcttggttgccaataactaaaaaaacaagaaatatttatgatcctacgactaatacaatttgtatgtcaaatatcgaatggaatgagtacattaaggttatttttctatgactatcattttataatttttagatatttaagttgcacatattaatatattctctttttgtattggatataggcgcacccaaaggaaaaagtattaaaaacctctcctttaccatttctggaacattataagcactttttgatggcactactgcaactggagtttatgttatttatcaataaataacataatgtatagattaaatatgtacatgtaacaaactaatatgtaacatatgacactatatattatgtgtcatcattttgtaatatttggaggagttacttgttactatgagtaacttccaccattatcaccaacattaagagtgtaaaaggtgttacacatctttatttgaaattcttaatggtataggagttatggtgtgcatgagttacatctttataggagttatggtgtgcatgagttacatctctttattgagtccataacatccatggaagttatgacttatgaatttaaatttcaaatggtgatatcctaaacacta

SEQ ID NO: 351486 - DNA, 485 bp, Cannabis indica
aattattttttcttaaaagaattattagtttggccaatactatatttactatgtggcactttattaatcaactaagagaacgataaattgagtgttaagtttagaaatttgaggatatgagctacaataatgacatcaactttataagattgtaatataaaaataatgcattatgaaaaaatttaattcataatctcgcacatgttttttcttctacataatatcacacttgcttttttttttttgttcaattcataatgtttaattcattataaattttttctattaaaaaaatactttttctatattcatcaaagtaaaaaaaaaaaaaaaattcacacgtatatatagttataaatacatatatatattattgaataattatttaattttatattattaatttagtttatatttattattatatgtttttgaaaaaataattaatttaagatagatatttttatagaaaatttattaaaata

SEQ ID NO: 351487 - DNA, 778 bp, Cannabis indica
taggttaattatattagtctaacctaattaaaattgaattagcaacataattaacttttaaaatatatgaaatttatttttcattgaatattttaaagttaattttagaaaaacacttagttaattgaaatatattctagatagtaatttctagtactagttatattttctaatatataattaggaaaatattttaaattgaaaattaattatttattaattaattttggatcaacttaaataaagaatattttcctagtattaaataagaattaacaattaagtttcttttatacttgattatttaattcttgtatttaatacatttaattaaattgaacattaacattgctcaatggagctaactttatcaaatggagagagaacattaacattgctctcatttgtgagaatgccctgtttgtgttgactgaagaggctcctgagcagccaaatgagaatgcaatcaacgcagtgaaagaaaagttcgagcgttggcagaatgccaacaaaaaagctcgatactttatgctgtctagcatggttgacaccttgaaaacaaggtttgctaacactctcacggctgcagaaatcatgaaccagttaactgaactgttcgcgatggcatcaattcaagctcgctctgaagcgactaagaatttcatcaatgcacggatgaaacctcatcagagcgtgcgtgatcaccttctccaaatgactagttacttccaggaagctgagaatcatggagctgctatagatcagacaactcaagtga

SEQ ID NO: 351488 - DNA, 654 bp, Cannabis indica
gtaatattacacctcataagtgtacgatgaggaccacactaaagagaactcgcagaatctaaatggaccttacaataataggtaaaataagtacctcacgatatcaaaaaggaccttgcaatagttgggcaaacttagattatcgaagaaaataagcgaacacaccaatcaataaaaataacagtcaagcattcagaatgcaactataacaaacgttacatgtattttataaaagatgtaattgttaaaattaataaacttattatcatttgtaactatctatcataataataattatttgtagctattatctaatccctataagtaggctaactccttataaatttattctgtattattaacataccaacgtatgttatatgacattttttgagtactcatctattttaagtgaggactcacaatttttagtatcaagcaatatatatatagatgagaggaatgagtcggtgacatgtacataataaaataccattcagccttgagcccgaatctttaattaaaattacattgaaagacactcatcaatggaaactagttctagaaagaaagtgctagcagcagcaataacatttaaaattgactctcattcatatgacacattatcttgcaatcataaactgtacccaagct

SEQ ID NO: 351489 - DNA, 1087 bp, Cannabis indica
tataaaaatatatagtatatattaatgtgtatataatttatatatattgtatacagtgatatatatattgtattgtgttattttgtagtattttttaattaatttcagtaattgataatatgttatactttttgtttttagattgaacaaaaatatttttagcactttggagaaggtgtacacaaaagtacttttgtgaaatgtatgtttttaataatgtgcatttgtttgttttatgttagattttatttaagttaaataagtttgttggtaagtttagtaaaaatttaaaaagtaagttcagtatgtttagaatgatgaaaaaatttaaaaaattagaagatgaaatatattagtttatagtttaatatgtaaaatgaatttttatataataatatttgttttcattaaattattaatttatatttatataattttaaaaagtttagtaattttttagtttttgaatagattaataaataatttaaatattaaaaattgaaaagattaattagaagatttttttttttaaaatttaaataaaaattgcaattaaatgaataaaacttttatttaagtttttaaaaaataattgttattgtatttttaaggtggtataaaaaattaaaaataatgaatgaataagaaacttttaatgaatttgttttataaagataaatttataaatttaggaattaagtatataattactttaaattttaataactaatataaatttttaaataataattcatttaaaaaattaatgattttatatttatttaaatttagaaaataaatttgttttatataaataataaataactcaaaaattaaaaaactaaaaattaaaaagttagtaatttaatgaataaaaattttatttaaatatggtttaattcataaaatattcataaaattttataataataattaataataaatggttgaaaagaatatatcaatgctttggtatacttataaatatataccatagctttgttatatttaaaaatatatcatagcttttgtatagttacaaataaagtccaaaacaaattgttctgcactttttttgcaatataca

SEQ ID NO: 351490 - DNA, 853 bp, Cannabis indica
aaaaaagaatttaaaaaaatggttgtacagtaattttaaatatttttataatttatttatagaaaatatagtcttttaaagttattttttatattttactcttgttaatttattgttatttgtatgttatattttgttgttgttttgatgttatttttctgttacttttatgtattgttttggtgttgttttataaaacaaccgtacaaaaaaaaaaaaaaaactcgaaaacgtaaaaatataaaaaaattaacaaaaaataatgtattatgtaattatctctcttttcgctaaaagttattatttttgctaaattatatcttgtattttttaagatgatacaaactaatatgctatgctgatttttttgtaaaaaataaaacttaattatagtctaatttaactgtgttaaggcaagactttgataatattttatgcattttgaaatttttttttttttgttatattaaaaaaaattatataaaattagatagaaatactattttataccatttttaaaaatacaatatctatttcgttatttaataaaataataaatttgattaataatttttataaatataggatttaatataatattaaccttttggttatcaatgtattttcttgattagtttaatttaagtgtgttttaggtgtgaggataataatttagaaggtgataataataaaatatataagatttgatcaaagactcatcaaaacaacaactggtctctataaatttatgggttgttccttccttcctactagtctgagtgagcaaagagttttgactttttttaactaaaagctcatctatgggtgttcatccgatccaatccgcactttt

SEQ ID NO: 351491 - DNA, 584 bp, Cannabis indica
aattctaacttaaacctaggtggttacctataaatagatagtgatggctctcattcacacttaacttctgtcagatgaaaactgagcctctatcttttctctataggccagacctcttctctcttcttttcttctcgaaatttcgaattcgatgttaatgaaacatacttgttaataaatcttgatcctggtaaaatatatctaacacttttagccaacgacggtgagtcaattattaagcgattagaaatataaataaaatagagcaaaaacaagtaataaagaacactagattttaaagaggtttgtcccaataagtgtagtaatagcctactccccttagattgtactaacttgagacaaagaacaaagtgttttcctctcttaaagctcttacaatgaagtatctgagtaattctcttagatctctctctctaaagcaattctttcgatccctttcatagtgaggctaagtcactatttatagggtcttaatgcttgagggaaggtttcccttttgcttacaatgtataaaatagtaaagaatgttcattacaaaattatgatacacaaaataggaaatt

SEQ ID NO: 351492 - DNA, 1293 bp, Cannabis indica
ttggatcacattcaattgatttgaactcatccgatctaattcaattatttattggatattggatttttccatccgatccaatcaattgaactgagtcatctgatccaatccgatccaatccaatggatgtattggattggatcggttccatccattagatgttaaactggtttttaattagattggattggatccatccaataaatctgatggatgaatccaatccattttagccactatttagagtgatttcattaaaagaaaaaaataatatgaaaaaacataatttaaaatttgcatctgatccgatccaattagatttttaaaatttgcatccgatccgatccaattagatttttaaaattttgcatctgatccgatccaattacgattggatatccgattctattagatcagttaagattagatcggtcggttgagattgaattgaatgactttctgcacatccttatttaatatgtagccatctaattataaatataaatatatatttatattattgggtattaattaaatctcacgcacaaaaaatataagttggagaatataaatattttaactactttattagtatgagaatttttaaaaagtaattaaaaataaaattgtgaaaatttaagctcaaaacaaacaaaaaaaaaaaaaaataacactaaagatggtggcgtggttaaaaatctatatgacaacatacattataattattttaaatcttacacaaatttgtaagatattcgaatatttataatgctgaaaaggtaaaatatattattttaaaatttattttatatgcttatgaaataaattattttaatataaaattttagcattatatattattaaaattaatttgaccgaaagtattagtgatatatcctaaatgataacaaagtatatcattacatacaaaagaaattataaattaaagtggcgtttggtaacacttttaatccgttttctatttttaaaattgaaaaactaaaaatattttcaaaaacatattccataaatctgtttttattttaaatttttaattagaaatcaaaattttaaaagcaaaaaaaaatcacttttaatatttttttaatcagttttttttcttaatcaatattttagatttcgaccagatccggacctaaatctcctctccacgaccatggtgctgagcccgccttctgacccgaacccgaatcccgactccgaacccctagaacccgacttaaaaaaaaacttaaaaaataaaaaatgaaaagtgaatttttaaaaaaacac

SEQ ID NO: 351493 - DNA, 738 bp, Cannabis indica
attttgaagtgtttgacaagtagtatgccaataaagaatcgtgagagcaattttgaagtttttctaggaattttccaccattattatttattatttattatataataatattgtaagcatgtatagatatgttaatttccgaccatgacaaaaatctatcaactacttcattattgtgtggaatagagtcgactaatataaccttctagtaacattatgtatatgtaattgctgacagccattcttagaaagtactagacactattagtattaaaagacattattagtatattttttattttcatatcgttattagtataattaagtattaaatcttttatataatataatataatataatattttttaagaaaatattgttaatagtacgagtgtctaagagcaatgcttatatatttgagtaatttgcggtaaaaacccttcaactattaatttacttgcaaaaaaccatccaacctcatattttggtgggaaaaccctccaaggtactgttccgtttacatttttaaggtgtcatttgtccagcctcgttaagtcttaattttgcccacgtggcaatgacaggtcactaaaaaattatcctacgtggccatattttacaaaataaaaattaaaataaaaataaaaaatttaagagtaatttgcggtaaaactcccccaactatcaatttacttgcaaaaaacatccaaccttaaagttttttggatggttttttg

SEQ ID NO: 351494 - DNA, 542 bp, Cannabis indica
aaagaagataaccttttggagaaaaggcaatttcaatactcagaaaataacgcagagaacccaaatccttcatctcaaactgataagctaattttgactttaacatttcaattccctacaaatcaaactctataataatcatatcatcaacatacaaggaaagcagaataagacctgtagatgttcacttgataaataaagttgaatcatgatcacttgaaataaaaccaagagacaaaataacagcagagaacttctgaaaccatccacggggagcttgtttaagaccataaaaggcctttttagcttgcaaactttgccatgcttatgagaagcactaggaggaggaatcatgtagacttcctcatgtaagtcaccattcaaaaaggcattcttaacatccgtttgagatatagtccattgacgaattgatgccactgctataagagtacaaacagtagtcatttttccaacaggagcaaaagtctccttaaagtccataccatagtgttgtgaaaaacccttagccactaatcgagcct

SEQ ID NO: 351495 - DNA, 558 bp, Cannabis indica
tcaattgtactatcatgtttccaaaatgtaaatatcactcggactaaaaggtaggctttactaacacctcaaagaacacaaataacactcttgagatcgaacctaaccatgtcaagattaagatcatttgatctaggatcaactaggtgatattgaattggatagatattacggtaagattatcatatctaatccaaattcaatatcggtctcttccgatgcatactccatacatcatacccaaccttactctaactaatgcccttgaaaggacatagcacttatcaaaggtgcaagtaaactacgttgtagattatcatatcaattaaaccctgtgtactgataaatctaggactacatttaatcacacaatcttgattactttccactgtgttgacaacacaataaacaagaatattagtgtaataaggatttgaaggaatttattaatcaaataagttaataaatgatcacatgaaccaaataacttattaaacaagtaatgaaattaaatctgtttctttattgataattgaatagaaaagattacattgaaat

SEQ ID NO: 351496 - DNA, 502 bp, Cannabis indica
ttaacaaatatttgtacacaatagagttaaatcttagttttgacaacatataaaatacaaaacataattattttgtcactacccatatctttaacgaaatataagttggacaatgatgaaaagacaaataaatatgataaatattaattttttaataacattctcattatgtttcttatcttcctccaaaatcctgatttggttacgcaatccaggtgtagcatctgtagattttttaacttgagatttatcgatccaacaaaagtaatcacatcctcggctttcatcattctcctgaattgaaaataacctacttagcttattgtggaagcctaatttacgtaaatatataaaaagtacatttgaatctaagaagtcaaaactcttacatagtgtggacatccaaaattgacgaccaagatttgctctactactagtagtccaaaacataagctagatcactacaatagcaatgggggtgtccctgaagtgaatttttcca

SEQ ID NO: 351497 - DNA, 959 bp, Cannabis indica
cttttgatatgaaatttggaaaatggatgtcaagatagcttttctcaacgaaattcttgaataggccatctatatggagcaaccaaaaaaaagattataagcttctaggacatgaagagaaagtttgcaagctcaataggtcaatttatagacttaagtaagcttctcgctcttggaacaaaaggtttgatgaaataatcaaaacccacgactttcaccaaagtgaagatgaacctgtgtttaccaactcaaggataatcaagtggtagtagtcttgttcctgtgtgtcgatggcatttcgattattggtaacaatatcaagaaaatgactgacattaaggaatggcttaacactcaattctaaatgaaagatttgggtgaagctacttatgttcttggtattccaatcattagaaaccagaagatcaaatcacttgctctctctcaagcagcttacattgataaggtgctagagcgattctcaatgactaacactagaggggcagctatgccttctagacctggtacccatgtatctaaggaatagtgtcccattgattccaaagagatagaagacataagaagggttccttatgcttcaacagttggaagtctcatgtatgcaatgttatgcattagacctaacatttgctatgcaataggaattttgagtacgtatcagacaaacccaaaagaggaacatttgactgcagttaagcatattttgaaatatttgaaaagtagaaggcattatgtgttagtctagaagggtggtgcttttaatcccataagctataccgactcaaatttccaggcttctcttgatggtaggaagtctgcatttgggatggtatttactcttgggggtggagcagtcgtttggagaagtgctaaggaaatcgcaacatcaagctctaccatggaggccgaattcatagttgtcactaaggttgctaagg

SEQ ID NO: 351498 - DNA, 621 bp, Cannabis indica
ttttttttttaaatttatgtttagatcgttggatttgttcgtttcctattgaaattcgacgggatttacagttgttttacgttcgatctggtttcattctggttgcgtggccgactgcatcgatggagcttcattcatcctctccgtttgtgacgtgcggctgaaggtaagggcaagtggtatttttgtaatattttcattttgggctgtacaaatgttcattgggccggcccacagtattgttgtaatatttttccatttttagaatattcctgtttttttcccatataaataattggcagttcgaaatcactatatataaaaactttacaacaattaagctaagtttcaatgctatatacagtttttttttttttgacgtggaatgctatatacattttattttaaagattttttcaataatatacatgattagtaaactatttacagaaataggcttagacaaaaaattatctaatactaacttctctactttgaaaatcaaagaatcaggtgcactccttgcactttatttatttaaatttgtttttttttaaactaaaacatgtgtttttttaaaaaaatatatatatatatttatattcatttccttctcttaat

SEQ ID NO: 351499 - DNA, 605 bp, Cannabis indica
gtgttttatcaacatttcctctttttaatcatgagaaagcaaaaattcagttagacgctcataccaagcacgtggtgcttgtttcaaaccatacaaagctttgtctaacttataaacatgatcaggaaaatgaggatcctcaaaccctttaggttgttcatacacttcttccttcaacaagccattcaaaaaagcagatttgacatccatttgatacaatttaataccaagaatgcaagctatggaaagaagtaacctgatagattccagtcttgctactggagcaaatgtttcatcaaagtcaataccctcaacctgagtgtatccttgggcaaccaaccttgccttgtttcgaatgatagtcccaaactcatcactcttatttttgaagatccacttggttccaatgatgttcacaaatggtggtcttggaatcattttccaaactttgtttcgaacaaactgatgtagctcatcctgcatagcaagaaaccaatcttcatccattagtgcttcttttacagattttggttctaaagaagaaataaaacataaaaattgaattatattagcatattttcttcttgtaaccatgctctcatcca

SEQ ID NO: 351500 - DNA, 787 bp, Cannabis indica
ctataatcattaacaaatacatatcttctggacttaattgcatttatacattatatataatcatgaaataaatcttgtgaaccatgcaacataaaatattatttctatctttattaataagtaaatctgattatatatttaaatgggttttatttagggcacgaaacccaacaagtggaagaagctataattgtttgtttaacacttttccaggatatagctcttctatccaacaagaaaatgtagcttgatgaagaccttctgctatcttggcatccagcaaaattagaatcaaaataccccgtgacctccaaatgatctgatttcatgtatgtgagcatgtaatattttgttctctgaagatacctcataaccctcttggctggtatccaatgtctatacaagggttggttaaacatctgcctgacatcccaacaatgtacgcaatatctggacgcgtacatacttgaagatacattagacttcctacaactggtgcatagggaatctttttcatttcctaaatttcaaggcttcttgtagggcattgactaagactaaatttatctcctttagcaacaggggtatcacctagtttacaatctttcatgccaaatcttttgagtactttatcgatatagctcttttatgataatctaagaataccccaagaatgatctcgacgtatttgaattcctaaaacaaaagaggcgtcaccaagatctttcatctcaaattacttagataaaaatctctttgtttcgtgcaataagcctatatcattagt

SEQ ID NO: 351501 - DNA, 716 bp, Cannabis indica
ctctaaacccagcaaggaggtgggtgttttctattgaaactagtgaaatttagcaaggtttcttctcctttgaatcaaggtaatctcatcctagctttcctatttgagtttcttagtatttgaaatagatttcatggttttaggcttgatttaggggctgtgtgtttgaaattggtatgggttcttaatttgaagttagattattgtaagttttgttgttttaggctaagtttgctagctaatttagtgtttggttggaattcaagttcaaaagcttaggttggagctttaatggtgaatttaggttttatgttgctgtatgaatttagatggtttgatttggttttctggaggttgtttgatgttggttgagttaatttgaattgaatttataggctgaaatgaggtttgggcaaagtttgagtttaggaactcaaacctagctctctaatggtagattgaaaatttgtgtgttttgttggattctattgcttgggtttggtttattataatgcattcaggtgttctggaaagaattggaaagtttggggttaatttgaattgtgggggttggaattttggttcccagaccagaaccggaattccggttcctgggagcctgtgtcaaccggtcgaccggttggtcccaggaaccggacttccggttgggaaccggcctgccggttggggctttttcccaaaccctagtttttccc

SEQ ID NO: 351502 - DNA, 618 bp, Cannabis indica
aaaaatacaaagtaagtgtatgaatattctcaaatttagagttgcattggatagatactccatatctttttgttgttgcttgctaaactctagattgagaagttttactccaaatgaaataataataagaaacctttctttcttattaaaaatagaaaaagaaaaagaaaatgaaaaggatagatgttttgaaaaggagaaagtaatagtattgctcaataattgattatcatgatgtaaaactttgggagcttctacataaaatcaactctttaaaatggtgtactcaagggtccctaaatataggtgggttaagtttataattagcactcacattttttgaaagtacaaaataaagaatgaaaagtttatttatttaagtaaaattaagtatattttaaataacaaatatttataacttaattagttggagtatatgacacattatataataatagtggggatttgagtccaaagatactttttttttaatatattttttttatatatatttttagaaaggtcccaaaatttaattttaattttgggaaattgccgtacatatttttttttaattttttttttcaaatttacggtttgtgtttctaaagtggttgc

SEQ ID NO: 351503 - DNA, 524 bp, Cannabis indica
tatatttttagtagtcatataaattatatgatatataaatatataataaatatgtatatatgaaccttcttaatgtggatagttgagttagttcaggttgattggacgggttggtattattttcaactcgcacaatataaaaattggatgggtcatattttcgtcgggtttttcaatttgtatttttcgtcaggttatctcagtttggtttgaacggattattcgagtttggcggtttacaaaagtttatgtacagccctagtacccgtaccttgacctacacggacctaccttaagagagagaaaataaagagagataaagtaatgagaaagaaaataataagatagagaaagttatgagagagaaaataatgagtataatgatgtgagataaagtggaaaaaaaattgataaaagacgaattattttttaaaacaaaaaataatattatgttgtttttaaaagggtaaataccatgttggaccctgtgttttgtaaaagttaccaattggaccttctgtttt

SEQ ID NO: 351504 - DNA, 546 bp, Cannabis indica
acgtaggtctagatagaaggtcgaccaaaattatttttttttttcaagaaggtgttttatttcaaaagaataatgatcaaaccatgttcattgcctctcttcttgaacaatcatagcaaacaccctaaagagattaggaataggttcattgagaagaatatgaacccgtactaaagcgtacgactcattcaaaccaattaagaactataaaacttggttttgattgtaatagtcaagaaacaatttcatggcaccacaggtgcaagtagtgttgggttgaaattcctttaattcatcccaaattgatttgagcttggtaaagtaagaggtgacatattgatcaccttgctgcaaacgtgtgagctgagtttgcaactgaaagatttgaggtccattaccctcattgaatcttacttgaagatcatgccacatatctatggcaagatcaaagtacatgatgttagaaaattgataatatacccaagatctatttgtatataacatagaacacaatagtaatatataataattaggtatgtgtacctg

SEQ ID NO: 351505 - DNA, 942 bp, Cannabis indica
taaaagtgtcatatattttttagtttgaaatgtattggtttaagataaaatattaaggttttttaagtgtagaaaatcaaattttcctttaattatactaatagtagtatgatactaaaaaagatacttaacactaataatactcttcagcaattgtctaaataaatatatataattttttttaaaaaaatatatttaatatatataaaaaattgtacattttttgggggagagctgtagcctgtaacctcatattctacaagtgcgttattagagctaacttaacctaacaaaattgacttattaagtgagatttaccattgaaaattgctattgggtactagtgatatttatcactttctagacatatcactttacaattagtaagcgatactccttaaaaattattatattaaattatataagacctgatacttaattgcgctaatagtgatattgacacgtaagagggtgttagacaccactcactataaaaaaaagacattttttagtcacaacgtaaaaataacaatttataattagtcacaaattttttactactaaaagtaaattttcttatagtaactgatgttttttaacatttctctttgccattattttattaagtgattaagtatatatcaccaatggaggactctaataataataatgttaaaaataaccaatattatattggcctatatatagtgaaaatgctaattaggatttttgtcccttgaactttgacatgtactaaattatgccccctgaacttttaaggcaattgaaaatgctccctgaactattgagattgttggatttaaggacttttgtctaattttattcaattttactatttcaatgattgtttatgtactaaaccatgttccccagacttgtatatctaccaaatcatgcccttcgaactttgacatgtattaa

SEQ ID NO: 351506 - DNA, 602 bp, Cannabis indica
caatatccagagttattcaggttagattttgaggacgaaatccttttaacgggaggataattataatgaccacatgattagatatagattagtaaaggcgattaagcattaatttttgatattttatgattatgaatgattttatatgttgtgggtcctgtcttcagaaaatggacattagaattataatttctcaatttcagagatcttattaaactctaagtgtattatttatgtcatatgtaaaatttataataatttttatgattttgacttgttgataatggaaaatgtgacggatggccaataaagttacatgggtgagtttagaacctttcatttagtggagtattcatatgttgatatttggattattgggattaggcagggttatggtttcagaccattttacccatagacttataagttgcttaagtgtgaagcaaggggcaaaattagaattttaccatttagtgagattttgtcctttagtggattttgttggaatttcatttctgattgtgtataatagaaaaaacctaagtttatatttactagtcaaaaaagagaaaaaattaaaattgaagtcctctctctctctc

SEQ ID NO: 351507 - DNA, 893 bp, Cannabis indica
aatctatatattattacttttttttattattttattcaattatttcaagtttactcaattatatttatctcatattaaagtttttaaaataaatttagactatagcattttttaacttgaaatataaatatgtatttttatcttcttaaatctattttcttgaattagaaactaagaataataattataaaaaaaatgaagaacggtttggacaggttaacccgactaaaccgacgaaatcattgggcgggttgaactttttctaatttttaattgggtgggttacaattcaatatttgcaacctaatatttatattgggttggttaaaatatactataacccgactaaatcgaccgacgtacacccctgatggtgaacaaaagaagaactcatgtcgcaccatctgcatcttcgggtctccctcaagacccatagattacaaatctaggcactcagattctagtcacaactgggatccccatgagtactgtagattgtgtgaatcctatcaccataataggcgccacaagcctagccactacaactggccaaactgatacaagcaccctgatggaacaaatggcaggcccttgcctctaagggtagacccaccattggcgacgcccactaaaggaaggacccaggggcgacaaccccttggaataacaaccggatctcgactctagttctatgctggagagacaggcccaagagttggcgagcttgcaattggcaagccccatttggacctaggagaagatcttgagttggctagactcagggaagctataagcagtgcaggcgtaactgaagaaccacgcgctgctgattgagaagttttcgctcagcagagatgcaaattcctgaaatggatggatgaccaggagtacat

SEQ ID NO: 351508 - DNA, 608 bp, Cannabis indica
ccaaccctaggtcataacctaggctcaacaaataactaatcaaagtcttgataataatcaaggccataaccattcaaccattaatatttaaccacatacggtgcttaccacttttcttaccttagttctgaattcaagcgtacgggccgactcgagtggaaaacaagctaggcgatcccggacctatgtcacggacaaccaaaactcaataaaaaccttaatcaaatttctgataacaaacttttattcttacaattgaacacaccctactttcccccggatcgaactagcttaaccatctctaaaacaccctgaatttcactccgaaagacaccccgaagcagattggacttgagaagaaaaacccgaaatttccccttactgggaaaaacggtcgcccgtttttctgggtgcctgaaaaaatggcctgctgttttttcctgacagctatgaaaatttctggtttttcaccgcaaaaaccaatccaacctccaccaaacctagccaaactttccagaacagtataataatataaatataacataacccaagcttcaaaacacaaaaattcaatctctaactcaaaatcacatgttcaagtgaagaaa

SEQ ID NO: 351509 - DNA, 600 bp, Cannabis indica
ctatttgaaaaagcactgtctccactaaatttgataactcaggggcctctggctcaaagaggaaagacaactctaaggggtcgtcaaaagataagaagaaataaaagaagcacaacaagtacatgcaagtttatactatttataccgagcttaatgaaactcgggaaaatatttacctcgtgcatgagcacaagggtgccttcagtaaacctgagcccatgaggcacgtgaggcataaaagagatccgaccaggtactgcaagtaccataaacactttgggtacacaatagacgagtgtcgtcagttgaaagatgagttagaaagtctcatcgcgtgaggccatttcaagcaatatgtgaagagacagggcaatggacataaccagcccaatctgcccaacaaccgaagcaactaggaattacaaccttctcctgttgaaggagaggatatccttgttatctcggggggggggggggcgcatattgcaggagagagcatcaatgtaataccctaagaatacgtatatggattagcaaatgttagctagttaaatgtgtattattatggaattatgttattatataatttattttatgtga

SEQ ID NO: 351510 - DNA, 693 bp, Cannabis indica
taattgtgaagaaaaaaagtttttggatttatttattaattgagagactttgtaaggttcaattaataaataagttaaatgcaaattttatttgataattaattataattattaaataaatagttttgacatttataggattgaaattggaaaacatagtattattgaaagaaaagataaatggttgaaataaagtggtaaaattataactagtgagatccactatgtatggcaagccactagcttgatttttgcctattattttatctttttaatccatataattaaatccttaatcctagtttaaattctataaaaggaacatgatgctctcattctcatccaacctaataacctagtcttctaactctgtcaagcaagtactagtaatgagagtttccttctatagtgatttcgaacatttccatgctcttcatcaattttgagcctttagtgatagagtagcatgtccactcatagcaagacaagtactcaatcatagtgcggaacacggtggttaaccaaacgaaaggagagaagatctaggttaacatcttgataatgctttgtgacagaaaggaattaagggctagagatctaaacagaaggagtcatattatcctgctgctatcaatgtaaggttttctaaactttatatgtgtttattttatcgtattaggaattcatatttag

SEQ ID NO: 351511 - DNA, 779 bp, Cannabis indica
acagctagtggtaaatcatgtatgccacgatacgaggctcggggagaaaaaatgattgcatatctgagaaaaatacatgattttctcgcacaatttgaaagctacagcctcagacaaattcctagagaagaaaatacaacagcagatgcgttagcccgattggtgagcagcaatataagtgacaaggaaaacctggtcccgatccagtttcttcaagagcctagcatcaccggcacggaagaaatcgaaatgattgacacatctctgaactggatgacgccaatagcagcctatctcaactctggggaactcccagataacccaaatgaagctcggaaaatgagaagaaaggcagcacggtacatcatcgtagaagggatcatgtacagaagaggattctcaatgccattgctcagatgcgccacaccaaatgaagctgcacggcttctatatgaagttcacgatgaattctgtggaaatcatgcacttggacagtggttatcaaagaaaatcctaaggcaaggctacttctggccgacgatgattgaagattcgaaagcttatgtcaagaagtgcgacaaaggtcaaagattttcaaagataccaagagctccgcccaacgagatgacacaaatgtaaagttcgtggccctttgccatttggggaattgacctaatcagacagttaactaaaggtaaaggcggagtgtagtgcgcagtggtagcagttgactactttactaagtggactgaagcggaaccactcgcaactatcacatc

SEQ ID NO: 351512 - DNA, 1070 bp, Cannabis indica
atagtctatagtctatagatatactatatatataggcatatatatatatatctccatcatgatggaggtgttagtgtttgatctgtatatattggggtcccgcttaattataagtgcctgaagaaacttccagtacgtagtgtttacgaggacaaacgaaactcacgccatgtgagggatgatcatcacattaattaattcatatatatatttatataacacttgtatatatatatatgtacacgaacatatgcataataaatgcccataattattcaccacataacatgcagcagtatggtcttatatatatatatatatatatatatatataaagcttatgtgtgtatattgcatgttatttgcgtacatatatcgtgtgtataattttatatatatatatatatattatgttatgctaagcttaaattgaataattaaatggttaaaaaaaaataaaaaaatcaataattatcaataaatatcagtaaaaacatagaaatatataatgaaaaaatgaaaaaattatacctactatacctaatatactttatatgttttaatttttaattttattttttttaagatataaatacttttatagataatgtctttattataccatttacattaaatatatatgtattctgtcatcttaaaaaacagaatacgcatcttagaagtaaactaatgcacctacttaagaagttcaatatatgagtggttgcttggtatatatattaaagacgaaaaatgttaagttaaggtactgtaaaatactataaatgatatgctgttattaatgaattttaatatcggattttaaaatatttttattcaataaattacaatataataagaaatttctaataaattataggaaacttttgtagtagacccttaaggggtcattctagtagatcctttatttattttggtattaagaaaaatattttagttatttatttttttatgatcgcatacgttatatttatttaggattatctgtaaatttttttaaaattctaaataatttacagtatcaaaaattaaatttaaatagttactta

SEQ ID NO: 351513 - DNA, 795 bp, Cannabis indica
tccgatgctgttttgttttttttaaaaaaaaaaaattttaggctctgggtccggtgggtccgatgctcattcggttgggaatttttttttgggttttggtccgatatgcgatggtgagggggtgacaggagtgggtcctacgaggtggagagggggctgggtccttctgtcgtacgcagtggagaggcgcctgggtcgggtcgtaggcggtggtgagggggtgacggcgcggtggtgtgttggggtttgaatggtgtggggtgtaaggttgagagaaaagctagagagatagaggaagagagagagttggggtgttagttatgtgagggttatttttggggttttcataaaagtgtcatatattttttattttgaaatgtattgatttaggtataaaatattagggtttttaaagtatagtttttcaaatttccctttcaaatttaatattaattatttattttatctccataaccactcaaaatcacaaagcctctatataaaccataacctaagcttttcttcttcaagcatttgctattctgctactatcaaagcttagatcgctaggtttcgagttgaaaataaaaaaaaatagatatgagagaagatggttttatcaaagagagagaatgaaggtttcgtttgttcgtttactgtttactgatataacttataatatatatactaaactttacgataagttttatacatataaaaataatattataataataatataatattaataataatattaataaaaaatttattattaatagttatcttatttct

SEQ ID NO: 351514 - DNA, 562 bp, Cannabis indica
gaattactaatacttctgaacaacttgaaaattgtaaaatatacttactttatatatatacaactttttattatttgatatatatatttcatcatttatttgtcattgtcttgataaatattcactctatactatttgatcttgaaaactccttatatataaattttattattactattactttttaatagctgaagaaaattatcttgttatgatatatattttatttttttgccagagattataactacttctagcgagcatactaaatgatatatagcgttgcaaatttaaaatggtttcattagaggttaaggtttgttattataatatgtattgtaatttaattaatattaagttttatttatatggtaattattttatttttattatttcgccagagtttttctatttggtagccaacttttgaagttcacttttgtttaattatgagctttatgattatattaacttagattgtattatggacttttttggtattgttatgaacttgtattggacgtttttaaagtatctttttaagtattgttatggagtatgc

SEQ ID NO: 351515 - DNA, 611 bp, Cannabis indica
cttcttctctcaagaacacagtagggttcctagggttcaaaaattcttcaagcttcttctttttctcctttaatggcagctagggttcttctaatatttttcttttcttctttttcctatttcttgctacagccgaaaacactaattttgtaactgtttttcttttctattctaatggcagtaacgaaaatggttaggtttctccaacagaaaatgcaaataaaacccaaaaaactccccctaacaaccagcttcagcccaataagtttcagcccaagaagaaactagcttttgaagaaccccaccaaaatttggatataacactctggattttgaggcagataactttagggatcttaaaacaagacatggcgaaagagggaatggcttggacaacttccttaataagggtttccttaccagctccggaaaaaagttttatcattccaaacatcaaatggggggaaacactttggataagataatggaaaaccgaattagtaaccctgcccacacagtgagggactccaagatagggaaatttgattttttatgcttacatttggttaaaattttttttctaaacaaataataactaatatttgtaaaat

SEQ ID NO: 351516 - DNA, 1742 bp, Cannabis indica
atctgagtaaggagacattgtattccgctgcaaccactgtaaggtttctcacactttatatgtgtttatttcatatcgttttagaagtttatatttaggatgttaaacaacatacttgttagtaaatctaagatcctggtaaaatatttccaacaataagtacatggctatccaaaatataagtaattggttacttaagttagtataattatccaaaatataagtattttattatccaaactataagtacctagttacctaaaataaaagtacttagttgcccaaaatataagtacctagttacccaaagtataaatacccagttactcaaaatataagtaattggttatcctaaatagtacctagttatttttttaaaaaaaaatgtacctagttacccaaaaatataagtacatgttagaattctttatcactcataaaatatgcaataacaagaattatttccatagataaacatattatatattattataagtgtataaatataatctatagaatatctttgttgattcaaagagaagaacgcaaatagtgaaagcgtaccttaatccataaatactgatgatctaatccatcttgtagaaataatttttgttgtgattttgggtaatgatctttcaagaatacaagacttagttaagttctttagttttcactcttgatgggggaaaatgagagtagagtggctcttgtttcttggagaccactaccaatatataaccccataggttataattttaagtatttctaatttaacccctcaataaattaaaaatatctcttaaggtatttacacatttagcccataacactttaatacccaataacccacaattactaaaatgatcactttattttgggtcaaatttcaaatatcaatacactaatatacatgtgagctcatattgaggattttaatccaacaatctcccacttgggctacatatgtttttcagatagtatgaaccttataagcgcctaacttttgctatcataattataggtatttcaaaacaatctcatccaattattatactaacataggatcaaaacgactttcgcaacatttagcgtggctaaacccatcaaaggtcacatatatcaatacaaccaaatgacatagatcaatcatggatgtatagcatagaaattacatgcaaatgtgatcttagcatgtctatctccaattggtcttccttaattgagatcaattctttattcttactaactttataattaaacctcaatagaaagaatacattcagagtactcaaaacttaaatccatactttatctgcagaatcaaaccataaatatgtgtcaacttgatagaacattccaaatacaaactcccactaaaccaatacaattttaaaaatatcacatccatatatgagaaacaagctcttgaaaagccttaagtggtatatccttaatgatctagatcagaaaatataaagtttgtccttatatattctatagagaccttattattttgaactttattttaataacaattagcttgaagtcaatgtgcatttgaccttgtaaagctcatgttgttactaaaaatataacctgattgatttattgtcacaacatatatctttaatagtttttaataccattcctaattttatagtcatatgtgataaaaaatttcacaattaaaatctttataagatcagaatcagaattctgaatgatctccaaaatttttt

SEQ ID NO: 351517 - DNA, 901 bp, Cannabis indica
cccaatctacccagtaacccaagagaccaggaaccataaccttcttttgtaggaggaaagggtaccttaattatctcgggaggagaacatattgcaagaaaaattggacaagggacaattagttcggtcaagcaattaagtaaaagtattgtaaagtaatcaaataccggctcgcaatggctgccgtatagagctgcaacacagaaaagccagtcgacgaccaatggctgttcgagcagcaacaaataaccaagatcatttcacctggaaccgtggggatatggcagggattgaccctgaatatcaaaacccctgtgggaatatgctagggattaaccctgaatattaaaacccgttttatcaaaccagatgcttctgaaagatcgataaaataagcaattgaaccgggaaaagtctcatgggagtaaatcgatggtaaattaatgattgtaaattgcatcgctgatgtaatattttgaacttccgtcgtgaataagataattatttctttcgacaagtaattatatagcatggccctttaaaattacttgaggggcatatatgtatatttaaccgaaatttatctagaaatatatgacataatgaaaacccactactttaaaaataaatttttttaaaattttttagaggttcctgaccaaatctttctgacgagaaaggggtccaactattataacttcttgactaaacctttttgacgagaaaggggtcaaattgttataacttcctcttgaaacctttctgacgagaaagggatcaaaaaattataattttttgattaaaaacctatatgacgggaaaggaaaattaaaagttataaatgagatataactcataactcacgtgtaaatgtaaagctgaatactaatggctagcacta

SEQ ID NO: 351518 - DNA, 591 bp, Cannabis indica
tgtcacctattctccccattatttgagtgaggtattccattcccaaaacgaatagaagaggagacattggatccccctgtcgaagacctctttttgactcaaaatatccatgtaaagtaccattaaacatcagtgaaaaacgaggtgttctcacacagttcatgactagcttaatgaactttggtggaaataaaagcccctgcaacatttctttaagaaaatcccattctatagtgtcatatgccttctgcagatctaacttgataatacaagaaggtttattattcttcctcccataatgtctcaacaaatctagacaaatcataatattatgtcctatgaatctccctttaataaagcctccttggttcaaggagactaaattagggagactgagtttgattctagaacacaaaagctttgttgcaatcttataaataacattacaacaagctattggcctaaaatctttacagtgttacgacatttcattttagggactaatgtcaagattgtagcattgatctctttaagaagattacctgattccagaaaagaagtcactgcctgaaatatgtcatctcccattat

SEQ ID NO: 351519 - DNA, 540 bp, Cannabis indica
tttaattaaaatattactgtattttctgggatattacaactagactcggctcgatgaggaatacaacccacactaagctattttcccaactcactactttttctagtgacatttttgtagctccgcccctttctggtgacttttcagcaacatcgtgtactattttgacaaacagttggcatgggtgtgatctactcgtagaggtggtcgttttgatatacactactcctattttcagcgacatttccggtagactaatttttaccgccaccgatagttaatgtacaccacttaggtgaggcttcagaaccctaaattttaaatatagtcatattatatgtcttcagactcagttttggatgtagaatgcgataatgataatgatttcaccatttgattgtataggtgagagtaatatctaagattggactaaacaattagagctcgggacttgagagcttaagatcgtcttttggacaaagtttaatgacttgggagaggtagagactcaacttgattattggacttgatttttagatg

SEQ ID NO: 351520 - DNA, 745 bp, Cannabis indica
aaaatgagattgcaatctataaatatcaaacatatagaaaaaaacacacacacaagcccaattatcaaattagtaaattatacaagtcaatcacaactcaagaaacaaaagaaagaaaagttatgaagatcaagaagtgtcattactggtctttgaaaaattcatcaactcttttcctttcattggcaagttctctttccagatcatcaagcctttttctatgagcattatatagcttaatcccaattgcaaatctcaaaaacaataattataaaccctaaaaagattaaagcatagactgactcacactcatcaacctccgaatccgtatagagtacgaccttgtctcttcaaagcatagacgacgtccatggcggtgaggacttccgccgagcgtgctcagtgtaagtaacggcgtcacggataacgttctcgagaaagatcttgagtacaccgtgagtctcctcgtagatgagactgctgatacgcttaactccgccacgtctggccaaacggcgaatcgcgggcttggtgatgccctggatgttgtccctgagaaccttgcgatgcctcttggctcctccctttcccaaactctttcctccttttcccctgacattttcggttgatctaactttctctcaaatcgcaatggggttttgttaaagaagagagaggaatcgcaaaatgtattttgattcttctacgttaaaattaacagaatattttattatttttaaagtat

SEQ ID NO: 351521 - DNA, 523 bp, Cannabis indica
tttaattttgtaatcattgcttaactattttcatttttttcttttacttttaagttgtaattagttggttttacaatatatttttgtttgcaatccatgtggatacgatcttacttatcattttattacttgtttgattgcgtacacttgcgtatacaattttcacaacaactatctcgttactatcgaagcttgaattattaggtttcgaattcaaaattgaagaaaatcggatagtgagggtgagggtttcgttgcaccgaaggaggagaatttcgttcgtatgtttatatttttaaaaacataatataataatatatattaaattgataagaataacattaataataataatattaataaaaattttattattaatagttatcttattataagaagctattaaatttttgattttactaaaattaacccatctcaataatctcattaatattactaactaaaaccattgtgatatttttggcctccaatcgggtctctagggttgccgaacctgaaaata

SEQ ID NO: 351522 - DNA, 661 bp, Cannabis indica
tcttatgatttttattacaaaaaaaaaaaatagtatataatattaagttttaattttatatgtaaatttatttatatgattttaagatttaatttcacattgattaaatatcataataatagtacattgacattattgttttatttttgcttgttgatttttaattggaaaactgaattctaaattgaaattctgaatttaatgattgaaaacatatttatgaaaatatgattaatgggttcatagcatgattttttattttaaaaaaactaattatgtgattgttagagaataaaaaatataacaataggagaatattcaaaatatacttatttaaactatgttttatttgtgtatttttttcaaaaaaaaatatataagtataaaaaaatatatataaaacaaagtaactatatattatgtaaacaaaagtcttttattattgaaaattacaatcaaattatatcttagtttattattttacagttacagttataaataatccaacaatacaattgtagaaagaagaaaaataaatcacaaatagtctaacaatagatgtagaagagaaaaggaaaaaaaataaagaaaagaaaaaaatagaatccatttaagaaataaatgaaagagaaaagaaaaaaaaaacaataagagaaaaaaa

SEQ ID NO: 351523 - DNA, 647 bp, Cannabis indica
aaaaatgtttatatctcgtaattaatcataattaaaaacttttccatatattttgaaagggttggaatattttgggtcaattatttgactagctagctgggtggtatggtgtgtatgtgcatggaattttctgcttactcgtttaatgaccatatagctatgacatttcaacgtgtagtaatattaattaggtccttgtttttgtttttatttgtgacatttattttggatttaactgttgtttgatggaaaaagttagaagcttttaatgactttggtatataaatatattctgtatattggtattaatgattggattttttttttcctattttgtataggctccagaaatatggatgagaccaaacagtgacaattttcacaaatgcattgctcgacccaagaatcgaataagtatgtaaaatcaatgtataatcaagcacaagaggaattcattaaaaagattcaaactctaatgtttttggaatttgaattcacttcagggacaggttctaaaacaaatggttatcttcttgttcatgctaatggtggactaaatcaaatgagaactggggtaagatttttatttatgtttttttctcagaaattgcttcttatttattgaaacttctgagtgactttttttt

SEQ ID NO: 351524 - DNA, 516 bp, Cannabis indica
cgtttaacaaaatataaagaaattggcacaagttcatcaagtaaagccttacaatccacaagaatatagccataaggagaggtcatatgtttaaaacaattaagatcattaacaagcagaagacaatctacttcgacaataatatttgaccaagtgtggcgcttaatccaactcaaagcttccttaaggctaataacttccacaatcataggctgaaacatttcacaacaactcatttgtactgcttccaaaaccaagccagctgtcgttcttgccacaaaaccaagacctcgaggaatattatctatcaacgagttcagaatattatccttatctcgcttaagactatatattcaacgagttttgaatattatctatcaaacttttatttaatagtaacgagttatttaatctgcatttaatgatataacattattatatcctcagagttgattcatattccttctgtaggtcacgtgtcaacttctagaatattgccgaattttgagtataaca

SEQ ID NO: 351525 - DNA, 841 bp, Cannabis indica
ggtaataaataaaagatttggacatccacataattaatactatttataataattttaaaatattttttattattgtattttaatgtataattgtaaattttgatgtaaaatttaatatgttatttaataattattaaaaatataaaataataataatacaaaattaaaagtaaaatttaatttttgtatatatgagaagggaaaaaataaataaatttttacatcaaaaatacaaaatgttaactttattactaaaatatcactacacggttacccaaacatttataccattttcctttaatcttttacatttgtaccacatgcatacacaataaatgctttgttgacacgtgagtgattgatgtattacatcaatctttctatatatcatttccctctttttttttttttctctttttttttttccttttatttttcatttcttttcagtttttttttttaaaaaaaatattaacctccatagctaaacacttccccctccacgatcccaactcgatttccctcttctttttgttcttccattttttttcaactctcattaccgaatcccataactgtttcctctctttttatttttctcttaatccatatataaatatggatgtaactcgtccttcccctattcaaaagaaaatttaccaaaaatagagttgaggaagatgactctgattttgctcctccatcgtcgaaatgtgggtgagctcctccaaagaaaaaaatcaaaggtggttgcccaggaaaaaattacatcaagatgatgctcaaaaaatagattaagatggagctggtcttggatctcaggtttgttttcggtttcttt

SEQ ID NO: 351526 - DNA, 793 bp, Cannabis indica
aacatctcaaatacagtgctcgaatcatcgacaattataaatttaactttcttattttttggcgatcacttatatgacccatgttcatccttccactccccatcgtactgaacatagattactattcgagtcattactgtataaaaaatagaaggttgatattaaaaaatagttaaatatattaatttaaaattataattaacaagtttaattttcaactaaattcaattaagtgttatcaatgtgtccatcaaagagtttaacaataattgagtattaatactatttttaacaataattgagtattaatactatcttgaccatgtttggtcgagctagttgagctctattagaattatcatatctattgaatgtcacttttttagcaaacatcgatgaaaaaagtttaacaattaaaattataatttaggatcaaatctagttgagctctaccgtaacgtctgccatctcgactgacaacactcgagttctactaaaactgtaatctcaactaacatagttgagctctactaaaaccaccatctcaactgacatagtcgagccccctgtaatttcaacctcggtttcacttcgcaaaaataggattttcaactcaaaaactacaaaatagtaataatatggctagtatgatattttttttattgttatttctatcacatatatacatgaaaaaacaagaatcaagctaaaaaaaatataatttttactattttcttacattcaaaataaaaaaaataaaaaattaagggttcattcacttaccttgaatgta

SEQ ID NO: 351527 - DNA, 559 bp, Cannabis indica
tttggttgggttttggagcaacaaaccagggttttcccgtttctgcagtagggaaaaccggttaaccggttttggtaacagaggaaaacttagttcaaggcttcgaaaccgattttgttcagggtgttttccaaaacttagaataggatattttaatgatgtttgaattaaatagaatcagtggagagttagttatctccggttacgaagttaaggttattccaaagtttggaataagttgttaattgagctttgttgccgtgacataggacccgggatcgtcaagctttgattccacttaaggtcagcatgtacgttaaatttctgggctgaggtaagaaaattttaatgtaccgttaagtagctaaatatgaattggttataatcgttagtgcctcgaataagatcaagattaacgatatgtatttgtagtgactcgatcttgatcgagattaataatatgcagttgttgtgacttgatggtaatcgaggtaatgatgagaaatgattattgttgtttatgaattgtttatgattgagggaagaacacagttatcat

SEQ ID NO: 351528 - DNA, 1073 bp, Cannabis indica
cgtgtgagcaatgctgaatgcaaggatcgtgggattgaggctgaatacaccgatagttggatcgtgtgtatgccatatccacgtaagttgatccctgagttgtagggattgagctggtgactcatgatgcgtcaagctgaatttgctaagtgttgatcattctgcacggctcgttgaatgtttcattctggatgtgtcagcgaggcatcctgctcggcatattgctccgtgcagatgctccaagtggaatccacgtgtcaccattcttgtgatgccacgtcagagtgccaaatttgggataacagtgactaaatgtgacttttagtcacaacaaaatattgcttgcgactaaaatatagaatttagttacaagttgtcattaatttagttttagtcagaacaaatattgtgactaaaaatacatttaatcacaatttattgtaatctttgtgactaatacctttagtcatggatcttttactcacaacataagattgatgttttataattagtcacaaattttttacttttagtcacaaaattttgttgtgaataaaagtaagattttttgtaatgattgtgcatccaatttgcactaaaggtggcatttggttggaggtagtgaaatagaatggaatggaaaagaaataattttcattccattcctttgtttggttgcattttaaagtattggaataatattccaatggaatgttctttctaccattttggtagaatggctattccattttaaaaaggaaggaaagaccattacaatgtaacaagaaaataaaaattaataattttttttatgcattttaaattttattccattccattccttttcttattcccattctcattcctattcttatattttcattcctcccaacgaaacgtatttcatatttgcatctaatccaattcatattataactcaattaatctaatccaactcaacctgcaaattcgacttgttactttttagtattaaattattcaatatttattattttttttattataactagcaacaaataaaatctattattgttattttatgtctctaataa

SEQ ID NO: 351529 - DNA, 614 bp, Cannabis indica
gtaaccttggatggagggctcagccacttggcacccaaggtaccttgccttctatgacgaaccgcagcggtaagttccttgctgacgtagtccacgccctcaaccaggacgtctccatcagcatcgactggctccccagcctcattgtatcccccataatttggcggtgcaatctcttcctccgcctcagacggactgctaggacagacatcgtcctgctccttaatttcctggacctcagcgtccccttcatgatccccctcctcatggacggttagatcttgttcggcactgggcaaagtggcgtgccgagccacttaagggtcagatgcatcgaccatgcgctttgtctttctggtgcgagccatcattctatggctgggcaaaagattcaagggagaatgtctttcactggaagaaggtgggctagaatagagacgagggtggtcctcgtctaagagttgaagcaagtcctggtcgattcaatgttcgctctcccaaaactcacctgggttcatctacaaaagacaacacacaagatgagtgtttggtcggaatatcaaacgttaaaactagcaaatataccgaccatgagtactcaacaaattaaagaa

SEQ ID NO: 351530 - DNA, 516 bp, Cannabis indica
aataagcaagatgaaagacatgtgttatgcaattaaaaaagcaagcattatggactgtaaaatcgcatgaaaccttgacaaagaagaatcgtaaactttctaaacctagagtttcctatgtattttctacagcaaagtcgaaggtgcattcgaaaagtaaacttgcaaaaataagcataaaggaaatcgagaacttactcaagagttagttgtctggattcaagcaacgtcaaaccaacgagaagttttgatgaaggcacttcagccaacttgaagccaaaaaacctctcttttcggtctgaactcacttagcaaagaaggatggtgaaatgagtttgtgtacaaatgcttgttggtatttataggcaactcatgaaaagaggtaatcatttcaaaagaacctcagacgcctcagttcccccttaaaagcgaatatgggaaatcaaaagtaatcaagtgcagccgtcaaccgtggtgagagaaattagattttgaaatattaattgtcagagcatt

SEQ ID NO: 351531 - DNA, 564 bp, Cannabis indica
tataatacaaatacaatacaatacgacctatacggcgttccaacgagcccttaatgtatacgtgttttgcttttggagtgaggtgtttcatgtgaaacagtcaccttttacgtactgtcatatatataataggttaaaaatattatttagtcgtttttttttttttccaatatcatgttattattggtataaataagtattttggtcacatataagttgagaaaataatttttaaataatattactaactaattattagatacaactgtaaaaggtactaataatattttggtgtaacaatgcttatatattattggctaatatttgaaaaatactattgaatatatataggaattattttatatattatttttaatttattttttttaaatttaccgtttgtgttgtttaggttgttatgtgtaaaaaaattaattttaaaatgtaaaaatttcaatatattattcaatataatattaaaatccaatttacactcatatatatatatatatatatctattttggatcctctgtttgcaaagttaccaattggaccctgtgttt

SEQ ID NO: 351532 - DNA, 1398 bp, Cannabis indica
gtggttcgtcgtatttcccctattagtgtctgtatgattcctcgctctatgggtttgggaagaacgttggtgatttctcataggtgacctacgttctcttggttgagtcccaagatcatcctcattgtcatgaggaatttctcattcatcagtttctggttgcctcccatcctcatttcagtgagagggttctggctgatcatttggatttttagagggtatctcattttccttaggttgttcttcccgggcattttgttcttcccgggcattttcctgtctcctggttcgtgagccacgaggtctgtctcgtggtcttctcactccagtttaggctgattttgagcatttttcccctgtgccaccccagtgcggctgcatcacgttctaattccgcgttctgccactacgcctcttctaggcggcgtcttaggcggtggttttccgtttcataagtaccttctcccataggctgggcacctccacgattgggctcttcatccctcatcccagggttttagcaactcccacactgagttctcctcgggcgtgttgtctgcgtactaggaccaacgtcgggtttggttctccgtgaacgtgtggtccgaatgctggggccaccctcaggctgagttctcctggagcgggtggtccgtcgagaccgtgggttggtagaccttctaaagcccatgggctctttcccagaacgacgatgagtttcctcatgtggggtatcaacattttctgggttttcaaccatgaaggaggtggtttttcttcaaaagaaaagagggttttttctgagctttttcacaaaggctctcaatgaaaccaccaaactgttaacacagatttctgttaaccaaatttgagcctaaccatgacaatcttacacagaaaaaataaaagctataaaataaaaagtatgaacacacagggtttttacgtggttttgcatttaaaattctgcatagtgcacgagtcaatcttattcagatttatgatttttttctcagggcctcttttgtataagtttttccgtcccttttttgatcttgcttgccactatttataattacatattgggcagttaattataaagttgactgcaatctgtttacaacaatcatcccctaaaatcatgggctttgattacacatcacgtagtgtaaatgaggttatgatttgaaaatcatataggtgtgattcttccgcttttatcgtgtcaaaatgatcgtatatttatacacgtctttaattgctgtattcggggatgcctcgacagaagcttggttccagtgatcataatagtgagctgcggccatttttccttccgaggtcgatgatgctcgtcttgtgatgatcgcggttcttatttacaaagagttcttcgaggct

SEQ ID NO: 351533 - DNA, 530 bp, Cannabis indica
atacatgtactataatttgaaaaaattattagttctacacaaataaatttataaaatatatgtatatatttttttaagatgtaattattcttatataaaggtatattttattaatacggaacttaaaaaatgtataactaattacaatataaaggttattcttatttataactggcccaaataggtatttcattttttttataacaaattagaagttattcttgaatagagtattatgggacatatttatagtgtacgaaaagtttttacaatcaatagataataaatttaacagtaataaataaatgaatagataacaatagttgatattctgactagattatttataaatttatttcttaacaatatttttaaaaaataatttaataaatcaatcaaaaactaaattagcctctttactctctctcacctcttctctttctagtttattccattaaagcacttgtatagctaatattaaaatattttatttatggaaataattttctatttaaggaaataaataaata

SEQ ID NO: 351534 - DNA, 645 bp, Cannabis indica
tttttttttaaaaaaatctataagaattgcccataataacaagtttaattaatatactatttatggaaataccgacaagtagggaacataataacggttctagtttatagtcattcctttttatggttgtcccatgtggatcaaagcaagtaccacaagcttgggtactcctagttatcaaaagtttggttactcctagttactaatatttgttataggaagttttcccttcaatcttaatacgatactctgttgtgatctaacaactgtagttttcttatttgtgtgttggaatataaaggaaaatcgaaagggccttctgggaatgcacggttttatctctccggtcttgtggtactagacatgtcttccggggacaaattactgaaggcagaagggtttacgactgcggaaccaagatatgttcatggaaggacatatccaagtgggattggctcacttctcctttgctgagggtcccactgataggtctgcggtgctgacttggagtctgacttggagtccacgtgtccaataccaaaaatgagaataatagttacaatttagttcgcacgtcatcaaggccgaaatttgggataacaattatattgtgcaatcgttatattttattgtatacaacaatta

SEQ ID NO: 351535 - DNA, 594 bp, Cannabis indica
ccccttaccctttcttttcacccatcgtgattcgccacatacagggcaaaactccttcttctcattctccttccagaaaatagcacaattatacttgcacacatctattgagtcgtaacccaaacctagattgcgcaatcgcatcttcgactcataatgcgacttcggtaattttgtcccctctggaaatagatcaatcaagatggacagcaacatatcgaaagagtggttgctccacctattcaaaaccttgcagtgcataagctttaccagtgcattgagggctgattttttgcaacctggatataactcagcctccatctccttaaacaagtcatcaaacttgttgtttcgttgatagggggttcattgaaagaatcagtagtgttagcagattcgtcaaacccagggtcccctcttaacatgtccgccaacacatctgccatttcctcttcgtcattttcaggaagttcaactgcgggctgagaaaaagtctccccgtggaaataccaggggttgtacgaaggttggatcccgctgagaaataaatgaacccttatagttgcaagtgttagattttatgccctaaataaa

SEQ ID NO: 351536 - DNA, 847 bp, Cannabis indica
ctacttgattgcgtgcacttgcgtattatttaataatttttcgtaacagtagtaaccaaactcgaaggagagaaagagatccagattcagatcttaataatgctatgcgatagaaaggaatcaagggctagagatcttgaacggaatgagtcattatattccgccgcaaccaatgtaaggttttcttaaactcttatgtgtttatttcaatgttttagagaatttatatttaggatgttaatcaacatacttgttagtaaatctagatcttcgtaaaatattcccaacaactggtataagagcaattgtttttgtgtaatagggatttcaaacgatgaataatgttttagtgttgatttgtatgtgttcatgttggtttatgtattaatttgatgattgtatgtgatttacgaaatttttccatgaaaataattttattttcgttctaaaaatattttatttggattccttgtgaaaaattaggcaattttagtttttatggaactcgatttcgatgaaaaacgaaggagttatgaccaattgaaaatctgggtcaattaataataatatttaattttttgatattttgaggtttaaatttaaaaattgattattttattttttatttattgtcagattttaaaatttagttaatctctttaatttttatatattatttaattataagatcagatattttaatattaactatattttaaattaaaagataatattatccttttaatttaaaatagtatattaaaattatcttataggattaattaaatatttaataaatttaaaattaaccaagatatttttatagatattctaaccataacatttt

SEQ ID NO: 351537 - DNA, 758 bp, Cannabis indica
ctaaatcatgatatcctcaagcaatactacactcatatgagcagtttgcccatgaaagaccttgggtgtaatccttttgtgagcagatccgttatcatggagtttgtcccaatgtggtctatggatatctgtccactctgcacccttttttttcacaactagaaactttatgtcaatatgctttgacttggatgagctcctattgttattggaatacaacaatgttgattcattctcacaaaatatcttgagtggtctttctacattctccaaaatacacagcctagtgacaaagtttcttagccgtattccctgatttgaagcctcataacatgctacgaattctgctgccatagtggaagaagctataagtgtatgtttgacacttttccaagatatagttcctccagctaacaggaaaatgtagcctgatgtaaaccttctgctatcttggcattcagcaaaatcagaatcagaataccctacgacctccaaatgatctgacttcctgtgtgtgagcatgtaatcttttttttttctgaagatacctcataaccctcttggttgctatccaatggtccataccagggttgcttaaatatctgctaacatcccaacaatgtatgtaatatttggacgcatacagacctgacgatacattagactcccaacagctgatgcatagggaatctttttcatttcttgaattttaaggctgcttttagggcattgacgaagactgaatttatctcctttag

SEQ ID NO: 351538 - DNA, 787 bp, Cannabis indica
gcataaatactcgaagtttttaagtttgtaagcggcataagtacccaatgtttgtaaaactgtaattttcctctaattttattagtacagactctattttaaatatattaaaggaacatttggaagtaactgatactacatgtttatgtctagacccaatgatcaagaatctggaccttatatgtgacctgtttaagaaaataatagaacttgtactgacaaaattagagaaaatttacagttttacaaatattaggtacttatgccgctaaaaataaacattgggattatgccacttacaaacttaacactttgggtacttatgtcactatttaccctttaatttactattctcattactctaaatctcataccaaacacctattggtaaggagtacgggtaatacttaatactaatttattaaatgaagggtaaatatcgacacaagtacccaaagttttaagtttgtaagtggcataaatccaatgtttaattttagcagcataagtacccaatgtttgtaatttttctctagttttgtcagtacatactccgttttgaatttattaaatgaacatttggaagtagatgataggggtgttcacaaagtatccgatccaatccaatccgcacgatccaatccaatccaacccgcaaaaatgcagatatacgcacttgtgagggattggattggattgagaaatccaaaaatctgcacttgtgcggattggatgtgtttgacctcaaaaagtaaccgatccaatctaatccgcacttaattatata

SEQ ID NO: 351539 - DNA, 667 bp, Cannabis indica
ctagagcggtcattacaaataattggattggggaataagttaggattaaaatttattgttaggcttggtttaaagcttgtctaggtttgagttggatggatttaagggctgcttaacttggaatgagttgaatgaagttttatgagttctatttcacttggatatacaattttgagtaaatggatgaattgtggtggtttgatgcatttgttatgttgtggttatgatattatattgatctggagcagttggacaggtttggtttagttttggtttgagtttggaggagaaaactcatgtttgcaatcctaccagaatcggtcgactggttggttctggtgtagcagaactggtcgaccaatttgtctgctggggaaaattcttagtttttgtcagggccgattttagggctcgaggtgatttccctgtctggtatagattgtttagaagttgcaaaaacctattttggagctgatagacgttaaggtttacggttatggaaattagggttattcccataattatggattaaggtatttattgaatgttgttgttgtgacataggacccgagatcgtgaagctttctttccacctaggtcagcatgtacgctaaatttctagactaaggtaaggaaaatattacataccgtatatggttaacgttat

SEQ ID NO: 351540 - DNA, 582 bp, Cannabis indica
taataataagtccacgtataaaagcaatccaacaagatcacaatatttaagattgatttgattgtatagtttaacactttgtgtccatacaataataatatagtttaatatgtattgtttaattatattgtgaaagtttataagatttgccgacacttttaaatcataatcatgtacaatttttaatcataatttctattttgttaaataataaattagagggtggtttagtaatattttttattttaaatattttaagtaattaaaaaaataaaattttaataaaaatctatcctgtaaattttatttttatttattgattttatttaaattgaattcaagtccgaagttgggatcgagggccgggtccaattttggggtcaaaggcaattcgtgttccaaggtctagattgaatttagagtctaaaatattacttaaaaaaaaaaaattgttaaaaaaaatttaattttaaaattttgattctcagttaaaaaattaaaaagtaaaaataattttataaaacataattttaaaaaatattttcatttttcttattttaaaaacaaaaaaaaaaaatgatt

SEQ ID NO: 351541 - DNA, 509 bp, Cannabis indica
agagttgatgcgtgagattatttgggacaagttttaatgtactttatcaatggaaatacacaagttttaatctgatcatgcatatgctgataaataatggaaattcaaggcaaaaatatacaagtttccatgaagtttattatatttatacattaacaaatagaatttatacattaaataatcatgaaataaatcatgtgaaccatgtaacataaaatattattttttatctttattaattagtaaatctgattatattgaaatgagctttatttagggcacaaaacccaacactagttcagttgcattatttgtgttattgaatctattagttaaagtcgaccaaatggttcttcccgtgacgtataggtgaagaatatggtagttcaattgagtgggagcgccaatcatagatacagaatctatagtttctattcgaatatagaagtcaaattatgatttctgtcgagtttggcttaacagagataattggttgagtactcatttca

SEQ ID NO: 351542 - DNA, 526 bp, Cannabis indica
aacctaatttggattttttatgttataattttttgaagttgaacgaaaatatcaggatttgaaacacatacgcgcgcgcagacgctcggacaaacccattcagacaaggcactgactgagtttactcggacatggctcctgtctgaagggcagcttgcagcctctgtcgtcggccaaaaccttgcttccgcgcgcgcaggggtacctcaaacttgttttcgtcataacttttgattcaaaaatcgtttttcattgaaacaaaagccaatttttggtagaattttgtgtggaatctgaatttttaatcaaaaatctaattgtcagaataaaattaatttttattaattttttaattaattaaaattagtttatgatattagtaggctttgaattttgaaaatttgatttctcacaaaggagcgttatggttaattttaaaattttagattattttatttattttaattataagatcagatcttattttttattaaatttgaataatcttactttgatattaaaatat

SEQ ID NO: 351543 - DNA, 285 bp, Cannabis indica
gggacagataatccgggaaaggttagagtcctccacagattggtgcggaaggatgagttttgccttcctgcagttctccgtagtgaccaggcccccgacgttagatcagcccggtcataagaggcaaaggcctgggctctcaaaagaaagacctgagtaggtgcagtccgttcgtaagggggaatcctgacccactcactgaggagctcttggatggtccactgcccgaaacccggaggagaagaaaaaaatgatggcggtactccttaacatgagtttgcatat

SEQ ID NO: 351544 - DNA, 547 bp, Cannabis indica
ccaataattttattggtattttggtcttattttttaaaaaaactgttattaatagaaaaaatttaatttttatatttttatgttttttataaaaacacaaaaaaattacataaaggtaataaaaaataacatcaaaacaatataaaaaataatagggaaattctacaatgcaccccccttaaaaaagatacattgatgtacccttgtgtgttttagcatccgaaataatttttttgtcaaattttttctcatggttatgtatgttatagttatttaagacatcttgtaaaattttaaaatttttggaaaagtttaacatgccgaaaactacgttcaaacagtgtgttgcacgcgtgactattttattttatacgcgtgtaaaatagactgtttgaacattgttttctatattgtaaattattcaaaattcctcaaaattttataggttatcttaaatagctataacgtacatgaatataaaaaaaacttaagactaaaaaattattactggatgccgaagcaaatcaagggtgtatcaatgcatccc

SEQ ID NO: 351545 - DNA, 525 bp, Cannabis indica
ttttcccgattacggtctacaatagtttaaatttgtggcggtccgaatttaaactgcaattttccaatttatatgaacaaccctaatatttgttcaactacaaaagtttaataattctaacaacgaaagagcaccgcctttaatatgtagttgagtttcatgctaaattggttgtagtttgaagcattagtcaaagcctaatatctctcctaaattaaagcctttaaaactgtagtaataataaattttggtgatcgactgatcgtgtgaagaaaattaggaacattttttttttttttggctaagacagaaccaataattttatttcttggtgacaaaaattcaaaggagatgcgtaattgtagtcaagctagactgtacctcagtggactagtcattctcaatacgatggggatttccttccccatgcaatgtttaattatagtattacttaactattttttttttgaaaaaaaaattattacatataaataaattggataatattatataactatcactata

SEQ ID NO: 351546 - DNA, 462 bp, Cannabis indica
tattctattcttatattttttttctacatacaatttaaaataaaattaaatattttttatacatataatttttttcttcctttgaatttataatttgttattttatttattttaatgtggtattggaaacataaaataactataatttgttttattttgttggtagttatgtgaaaaaaaaatatttttaataaaaaaataatcctttctaaaaaacaaataataatataatttattaatcaaataatataataataaagaatatattttttagtctaatttttagtattccgattgaaattggaaaaaaaaattcttttggtattgatttaacactaaatttaacttccccattagagttgcacttacaacccatattttttatcaaatttatttgtatgatgcatagttactctcttttttttaaaaaaaaaataacaaatatttacttatttatttatt

SEQ ID NO: 351547 - DNA, 940 bp, Cannabis indica
aaaaaaagttattttcatttacgaacgcccttctgttgaggtattttttttttatagttttggctttcttaaatcctggttatattagggttggtttctttcatgtttttttagttgttttactattgttaaataggtgaagacatctgataatattgatgaccctaattctaatgatgttgatgatgatgatgagaaaggattactagaatcagagaatattgaaaatgagtctaatggtggtgatgagttgggtgaagatcgtgctgatggtgctgataatgaggatgagtttgatgataaggatgcttctaatgttgttgcaggtagtaaaggcaataagtccaaggatattgataatgtcaagggcaaagaagttgatttaaagggagattaatttttcaagggcttaagcctacttgagattgataaagatcaagttgttttcgttggtttggaggctattgcaaaaatcaaggtatgttgcttttttatattttaaattttttgagattgcgttttagagtagttgatttatagttgcaataaagctttattctagtttttaacatgtgagttgtttacttgttatttttcttttttgcaggttccacattcccttcctgatgaggaagttgaaaaaacaaatgccaatgtttctaaagaagaagaggatgacgctcttccttgtactcctcttgttgacaagagaaagcgtgccttgacattgaaatctctttttgttgattttgggttatctaatttgaagaccactccaatggagtttatgtcttcaggttctcaatctgcaggacatgagcaagatttcaagatcgttactaatgtcaatggcctttatgctcttgatgattctttgtttgttcccgtttctcctgaacttgaggcaaagtttgacaaatagattagcaaaggattgctt

SEQ ID NO: 351548 - DNA, 734 bp, Cannabis indica
agagagagagagtcgtgggtggtgatcaccgaagttcgacgcacagttttggtgatggagtttggtgagaaccaaagaaagggaaagagagagcgagagggaaagagagataaacagaaagagtttggggaaatgattttgaaatgtgggggtaatttggggtttataaaaaagtggacacatattgtcaatttcacccaataccagtttacttaattaattttaccctcacatatgcatggaaaattaaattttgattatctaaccacactatgtttatagtttctaattaatgaatccactgccaaagaaattttttaaaatatttttgtgtgcttttacaatgtaccaaaataaaaaaaaaaatacaccgctgtattttttactgttttgacatttaagaattttttttagtctaattttttcatagtcgtgtacattataattatttaagacattcaaattctgaataatttaaatataaaagtagtattcaaacaatctattttatatgcacatggcgtataaaataaaagagtcataaacaaactgtttaattttttctgaacatgtttaattttcgaatttctgttaattttgtaaaatgtattttattttttaaaacaatgaacattttcattgaaaaaaaaaagttatttgcggcaaaacctcctaaagtaggcaggtttttgtaactgaccccctaatctaaaattttggtggtaaaactacct

SEQ ID NO: 351549 - DNA, 530 bp, Cannabis indica
aaaaaatcattaaattttttctctttgttacactggaatgatctttcctttctttttaaaatagaatagtcattctacctatatggtagaaagagcattttaatactttaaaatgcaaccaaataaaggaatataataaaaattgtttcctttccattccattacctccaaccaaacgcaacctaagtgtcactattaaaaaaattactatttaagatttttactccccgaatcatgatttatgcattattgtgcccttaaacttttcagactgttaaaaatgatctctgaactattcacaatgttataaattggtcattttgtcaagttttgtcacacgtaacaaataaaataatgacatgattgcttagccagttgctatgtcagtattatgttatcgtcacatgtgtaattattattttttttaatttaggtttacgtaggtaattttcttaatcattaattgatttttagtttaataattttttaaaaatacataatttttattttttaaatgttaaattgtatac

SEQ ID NO: 351550 - DNA, 644 bp, Cannabis indica
gacttctctacaagcagttcttcttcggatggaaggaggagaaggatggccaaggagggggagctttcggccgaggtggacaggttgaaggagaaggtcaatgccttggagatagtcggtctcgagatattctttgatttttggaaggctaatccccgggctaactttgactacttgggcgacactaaagacatataccttgagtactgcgtggcccaagtggcttatggtggaaatgaggcggctgcttcaacctctggccaagctgcttcaacctcgagtcaggctgctgatgcttctcctgttcaaacaacagatcctcctgctccagttggcccagaagaactgaaccaagagcctaggactccatctgtttaaacatttctttttatctcttttttttattatatatatatatatcttattcggcctcaacgccttttctaagacatcatgaccggccaagagatctttaaactcggaattatttttttttattttttggacaacaggctgaccgggcagtttttaatccctgtattacgtgcatttgtcatccttaatgaatttcattctttgtttataattgccgtgcaattgtgattgttttatttttaccaaatgctttgtacaggtataggtgc

SEQ ID NO: 351551 - DNA, 517 bp, Cannabis indica
acaagcataaaaaaaaatataaatataaatggtactggcaaacataagataaagtaaataaagctcaattcataaatgcaattcatttccaaaatggaaaactttattataaaattctccaaaattaaaggaattgtcttcaataatatgaaaaatagggaataaaatcccaaactaataatcgaaatccaaatttttttaaactaaaataattaattcaaaaaataaagaagattccgagcttcatcttcatcttggactatttccacccttctgtccaactatccggttcaacttgctaagatagcatccgagttcaagtagttatggctaaaataagaagaaaacaaataaacatggttagtaggtccagaattaataatcgaagaggataataattcactaaaacacattagtttataggaaaagaaatactttttttctttgctagaaatttagggcattggggtttccagtggcccttttcattgcaatagaaacattttccttttggtgt

SEQ ID NO: 351552 - DNA, 539 bp, Cannabis indica
tatatatatattgcatatatgatagaagtaaagaaagaaggcgtggaaaaaaaaagggcagcggctgatctactccaacaacaaaaatgaagaaaaagaaaaagaaaaaaagagagggagagttttaggggatttttatttaggattttagtttagcatttttaatttgagattagcaaaaatcaagaggaagaagaagagaaatttggagaagaagcttagaggttgtttgactttatagtttaaaaactgttttctgttttttaaaactgaaaacagtttttaaaaactattagaagtcgtttagcaaaaaattttaaaatctgttttttaaaagttgagttttaaaaaactagaaaactgaacacatcaaaatgttgttttcaattttcaaaaataatttttttctgtctaacatattacattttatattttgctcacatactcggatcctaaacccgaaaccatacccgaacctagacccagatgggttaatgtcatggtatggtgctaaatattgattttttttcgtaagaaaa

SEQ ID NO: 351553 - DNA, 914 bp, Cannabis indica
tcaacttagcctcacgcttaagttgaatgggttcattctcctgatgagctccctcagcccgaccagcactggatttcctctttttctccttcacatgctaagggatgaaatccttcgggtagagcccgtactccaaaaagttgtcctcggaggtcaacaaagtgatattttgggcagcacccggcagctgagcaagcctttgagctctatccctaagagcgagtgtgaagggtcggtagtgatatacagggatctgctagaactgagtgtaggtggtgcccatgccttccaccatgaaatactcatcaacaaaatgcccaattttgctaacgacattatccccggtccccgttaatcacttatagtctggccgagagaaatagaagtaccttgacctgccttgcttgggggttgatttcaagtcaaaaaaaccagctaacctcatggggagagggcatatcccacttttgggaggtgtatagaatgaacagggcagacagatacttgatgcccttgggagtgaattgggtcggacagaggcggaagaagtctaccaccttcctaaagtatgggtgcaaaggcaacaatgccccttgcttagcatgagcacccgaccaagcacacattcccctttcagggtttgtggctcgattattataggcaggaatgtaacggtctaactcgcccaggtagccgccctaatcaagatcccgtaagcgtgcctcaatgaccttggacggaggactcacccacctggcacccaatgcactctgcctcctctgaggaaccgcaacagtaagttccttagtagcgtaatccatgccctcgaccaggacatcgccgtcagcatcaactagctccccagcctcattatatcccccaaaaatttgggggtgcaacctcctcctcttcct

SEQ ID NO: 351554 - DNA, 600 bp, Cannabis indica
gaaccctttaaacttttaaacctaaccctttttacccttctagttagtacttagtaatatactaaattaaattgtaagttttctatttagatatttttaagtacaactatattactttctagctattctcttattcttctctctttcttcttcttcttttgctttttggcaagtataaatatttatatatatataataataatatttagaaacatgcacgtttttcatataatttcaagctatatatataaactttttacaccacaaatttctaattattttactgtaaggtagaattttttttataaatactgtacataagttttatactgtgtattgtgttaagtttttacaattatttttagttgttccactgttgttttaattgttctattttgttgttttataaaaaaatagtattttgtaaaaaaaaatacagtaaaatagtaaaactcatttattaaattaatatatatatatataaaagaaaaaaaagaaatagagtcgaacctgtgtggctaaatcccacttaattcaggagctcaaaaaatttttctctttttaaaattacatattttttttattaaatttaaaaaaaaa

SEQ ID NO: 351555 - DNA, 866 bp, Cannabis indica
ggctcgtgaatgctatcgttagaacttcaaaatagaagagccaaccatcaattaatggtggtcataacaaaagaaaggcaagaagaaacaagaggatctagaccctagaatccaagacgagaaaaaccagttaaagctaattgaggaactcgaagaagttattttagatctagataattccactagatgtgtgtttattgggaaaaatctagatgaaaaactaaaatagtagttaacaaattttttgaaggcaaacaaggttcaatttgcttggagccattcaaatatgataaggattgaccctaaagtgatttgccatcatttgaatatcgaccataattacccagcaaaaagacaaaaaatatgacccttagattctaagagacaatgggcacttaaggaagaagtagacaagttattaacaactgatttcatatgtgaggccttctacccatcatggatttaaaatcatgctcttgtcccgaagccaaacaacacttggagaacttatattgacttttcagatttaaacaaggcgtgtccgaaagattactttccactaccgaggattgaccagtagctggatgcaactgcggggcacgagctgatgacattcatgtacgcatattctagatataaccagatcgaaatgcatgtccctgatcaatgagttgactaatctattcaatgaatgataactttgactctcgcctaccaggacactgtatcaatttgttggaaaccttggaaattatttaagatatgatagttttgtattttcacatgtatttcttgttgggttttatgccttaaataaaactcatttcaatataatcagatttactcattaatatagatcagaaata

SEQ ID NO: 351556 - DNA, 435 bp, Cannabis indica
tccccgtccacggacttaggagaaaagtcctctggtaaagcccgtacttcacaagattctcatcggaggtcaactggatgatattcctgtcttcctctagcaaccgggcaagtctttgagctctatccctaagagcaagagtgaggggacgacagtaatatgtcaggatatgccgaaaccgagtctgggtgatgctcggatccttcaccatgaagtactcatcaacaaaacgccctattttgctgatggccttgtggttcgtcccgctcaaccacttgaagcctggctgagagaagtaaaaataccctgacctgccttgcttgggagtagacttcaggtcgaagaaccaagtgacctcgtggggagaaggagcatcccatccctgagaggcgtagaggacgaagagagcggacaaatacttaatgcccttgggag

SEQ ID NO: 351557 - DNA, 1290 bp, Cannabis indica
aatatatgaaattaatttaagaaaaacttagtttaatgaaacttttttcaagaaaactatatgtatttttattgtatttaattaaataaagaattataactaattagattcttctagatgcttacttatttaatatttcattaaatattttcttaagttgaaaattagttatttataactaattttggatcaacttgaatttgaattttttaaattcattattaagttgagatattctaggcaattagttattgaattctttaaatattattttaggttgaaaatttgctaattttagatcaacttaaaatggaatatttttcaatttaagtggttatttcaagatatttagtttgttatttaattaaattttttgaaaatactttaagttgaaaattttgttattttagaacaacttaaaatagataattttcaaatatttattttttattatattttaatttattttttcgaattttatatattgatatataattatcgaaacttaaattttttgaaaattaaattaaagttgaacattaattatttaattaattttggaccaactttaaattaagtaattttcattattaaaatataattgatgtaaatgattaaataaaaatacactttttttagtaatgagctttaatcaagagatattcgatctccattgttggtcttacaatagttaaatcattactacaaattaagcttttactgacactatatagtgacacacataaaagtgtgggtcactaaaaaattaaaagtagtttttagtgacacacaacatttgactctaaatgttcggtatttattacgcagaatgtgtgtcactaaaaatatagagtgtcactaactactaaaatccaaaatttaaaattttataaaaataaaaaaaactatggcctatagtcacacgctacgcgtgtgagcaaacatatttacccccacgttatgcgcgtcgctaaagccatgtgaatcacgtggctttagcgacgcgcacaacatgtgggtaaatacgtttgctcacacgcgcggcttgtcactatagacccttttattttaataaaaaaaataaaatatataattataaaattaataaaaataaatattaataaaaactaattatattaaaaaattaattaaaaaaaaggaaattagatgagtataaattcatctctttcttacaaaaccctaaaaattataacctaactctctctccctctctattgcgaacagaaccgcccaagccgccccctctagtcgaaccagaaccccaagccc

SEQ ID NO: 351558 - DNA, 839 bp, Cannabis indica
aatatacaacccaaataaaaaataattactcaaatatcacttacactttcaactaaagatccatgcttcctgggtagctattgcacaaccgcgcagcaacctaacgcaatcgaaacgaaatttcaaccagaaagagaaccaccattaattctggcaacttcacctgagaagatgactagaatcaatcaaaataggggctgtttcgaattcatgaagaaaaaagtgtagaaaaactactacgaaactaaaattcaaccgaaatctagtttaatttgcataaaactaatgttttgacttcaatttttagatccatgaaagacagatctcaaaaagttgaactggagttcccaaaaaatccaactcaagtataataaaaaaaaattacatcaatattagaataaaatatttatcttggtgtattttcgttttttttttcaaatttctaatagtgaatttgttcatattaaatcataaagagacatgtagatagagttacgtacgtggaaacaatgttctaatttttaatgtttcataacagttgcattacagttgcatacacattttgctaacagttatttcgcctgattgaaaaccttcgtctaatgcaaccttcggccaaccatccagtgaccactcagcagccttcatctgattaaaacctttgtctgatgcaatcttcgaccaaccaccctacaattatcgtctgattgaaacattcattttatgcaactactgcgcaaccacgcagcaaaccactctgcaaccatcttctgattgtgtaagtgatagtgtaagaggtattttggtaattaaaatcacataaaaggtataaatgttgt

SEQ ID NO: 351559 - DNA, 1440 bp, Cannabis indica
tttctttttttctttaaaatatgatccaatttattctataagcacattattttacattctacaactacaaccatacaaattaattgttcaaaaactaattgtcttattctttttaactttaatattaataaaataattatatattattatatataatgagttactacataaagtaaaaaaattttaataaattaatatatatgtatgatggtcggtttcggttttttcggtcggtttattacccagaaaaacattgacctctcaatggcgattttaactgttagcgattttttcagtttttggttccgccagtttcgattctaacggtgttcggtaggtcggtttgaacgattttttcagttttctagatttcatgctcagccctattaaccattaatgttaacccgaaaacttttcttggtgacgtggacataaatatttgacatgtggcaagaaaaataacatctcggagttgagtagtctcgagtcatagcagtcggcctgggaggggtctctagccctgcacccaggttgactcctggaactctagaatggaagtttggatttcgacaagttacttctaactcacaatctttaagtattcagtaccatgaagacatagagcagccaaatccaggccccatgagctaaaaatacatgaaccaacacctcaaaagtcaacctgggaacctaaggtttcacccagcgcccaagttgacaacctcaactacggttttagtttccatgaccgtcttagtgaaaataggtctaacttttcattgggacatgaactagacataccacgaacatattttaggcattagaatcagatttggagaacgtttatttttcagcacccaaacacccgatgcccggcaccccagcacctaggttgacaatctgtcaacttgggccacttccaagcattagatcaaaaatctgaatcatgtatcttcttagtcttcataaaaaatggggaaaaaagcactttcggggaagaaacatcacatcctgggtgctagaacacctgacacttggcccagtgcccaggttgacatattatcaacctgggtcatttcaaatcatttttccaacaaagtgtttcgggcctttttttcatcattagaaataacaaagatacaagcaaacttggggagaaaccataatcctaagggaataaaaactgaccccagcgcccaagttgacaatcaacctggtgcactagttttgatcacttaaatattagagtaatttgcggtaaaactccctcaactatcaatttacttgcaaaaaatcatccaacctcatttttggtgggaagaccctccaaagtactgttccttttacatttttcaggtgtcgtctgtccaacctcgttaagtcctaattttgcccacgtggcaatgacaggtcactaaaaaattatcctacgtggccata

SEQ ID NO: 351560 - DNA, 672 bp, Cannabis indica
gaagcattggtcacaaatgaagtaccttcaacatgacaaacaataaaacttggataagagacttgacagtccaaaaatatggtaaagtgatatttggcaatgactaaacttgtccaattgaaagaattagaaatgccatctttagaatgaatgatgggacaatgcaagaaacaacgtgccagaacttgcacgaaaatttgatttgaggtggaaattatgagtcagctcattcccttagccaattttgccacatgttcatgctaccataattgatttcatttttgggcccaattaaagttgtttttcttacatttgacccatttgaaaattggtttcttcacttgaacttttgctatgtcaaaaaaacaaattgccacaaaattttttgggtatctacgttttggtacttgtaatatgtttagaagtatatgtactctattatacaatgataaatcaagggtataaacattatttaaaaagtgcaaaaaaaaattaacattttaattattcaacgtcacgaaagctctattgaatgaggtattctataattcataaataaattgtttgacgatattgcaagagtgtctaaaataatattttcattataaaatctcaaatatataattaatctttaaattaaattgtagctaaatgatattatgaatttatatt

SEQ ID NO: 351561 - DNA, 294 bp, Cannabis indica
tgcttgataaagatcaacaatgtattttgccgtacaatatgtacgtgcccagtgtcctttcattccacatctgaaacataagttttcaaaatttttacgaattttattttgaggacctttttccttgttctcagtagttgtactttttattggagtatacaaatttttattttgataattacaatgccaaacattgtttcgaatgcgactatatatgatcgcaattttaattatggtcacgaacatgtctattattttatttatgattacgaccacgactatgattatgattat

SEQ ID NO: 351562 - DNA, 538 bp, Cannabis indica
ttaataaaatatcagaaattattttatgttgcatggttcacatgatttctttcatgattataagtttaatgtataatttctattaaatccagaacatatagttattcatgattatagtgttgtcaatacagtggaatataatcatgattatatgtttcaaagtttttgtccaataatttttcagtacactggatttacactgacatgataatcaacgataaagattacttacaccttggataagtgttatgttctttccaggacattgataaagtatgctagtatcgaatgtatagagtataattggatcagaccgatattgacattggataagatatcataaactgaccgttttatctatctaagtcaacatttatcttaggtcaatagatcttaatcctgatatgattaggttcgatttcaactgtattatttatgttctttgagttgtttgttaaagttggatcgacccaatgcttatatcttaggaacatgatagtataattgagtgggagcgctaattatagatatggaatct

SEQ ID NO: 351563 - DNA, 801 bp, Cannabis indica
aactaattttttttaaataataaaaatttaatgacttggaccaatcaaggattgccacgtggcaatttatttaaccaagtacttacagaagttctaaaattataacttaagtattattactgtcaaaaattaaacttaagtatttatttgtaaccggaatctaaacttaagtatttatgctgtaaattttttttttttcacaattctctacaaagaaagagttaattatattatattgaatggtatggtatgtaatatgtatattaaattggattacgttggagccttgtcgtttaccgaggaacagaactaccattaggcattagttatatatcaaagtagtctccacaacagcgcgtggaacttactctctcttatggaactcattaataacctcacattgtactctatgaaggaaattttcatttataatatgtaagaaatttaattctgatatatagtaaataattttagtaattttaattttaagatcatacttaaataaataaaaattaaaataaataaatcaagaatcaaatcagtaaacatatattaaatcaaatatattaaatatagataaatttaagatagctttcagatataacacacaaaaattatattgattctgatcttaagttcaatgtgaacctaatcatactctaatttaaaagtactactgctattttttttttatttaatgaggtgaattagagatatcaatctcaagagcagtaagtcttcaatggtgtaattcctcaacacccattaacttatttaactcgagtcaaaatagttgacaat

SEQ ID NO: 351564 - DNA, 705 bp, Cannabis indica
acaatagctcctcaatacaccatcaaaaaataaggttggattgtattagcatgttgtgtacttcaaaactttattcgcaagtgaaattgggatgatgaatttttcgaagaggacatggaaaataaagtaggaaattgtgaaagtttgaacaatattgattttgattcagattcagatgaagaacttggtgacgagccaacagatgatgacaagcaatatatgtttaattttagagatataatagctcaaaatatatggaacgcaagagcaatttgatagtcttaaaaaaattattttaaatatttgctactgaattgttatagttttgactttattttatgaagagattattatttatttatatattattaattgatgaaatttatttttaaatattgtaatattaatttactgtgtaattaatattacaattcatgccaaacatgatattaggaattcacatgtaattaccacttgacatccaaacacaccttgtattttaaaatacaatgtaattactatatagtgtaattactaaggtagtaattacactgcatagtaattacacagttgtttccaaacagaccctaaagtatttaagagaaatatatttatgatgaattgttcattgtaaatatatatatatatataagtgcatgtttggcatcataactaaaaaactgttttttaatttttaaaaactaa

SEQ ID NO: 351565 - DNA, 781 bp, Cannabis indica
gatccaggttcagatctttgattatgctctgctacaaggaaaggaatcgaagggctagagatctgaacggaaggagtcattatatttgttgcaccaatgtaagtttactaactttatatgtgtttatttcatttgttttagaattcatattaggatgttaatgaaacatacttggtagtaattataaatcctggtaaaatatttccaacaactggcaccagagccatggtaatgatttactttcatgaaatatgaattaaaacgatgttttgtgttgatttggatggtttcatgttggtttatgtggttatgggatgaatgtatgtgttgtacgaaatttttccatgaaaaatatttttcctattttttactatatttgatttggattccgtgtgaaaaattaagcaatttttgtttttacggaacttgattccgataaaaattgaaagagttatgatttttggaaaaatcggggttcaatggtgtcgagggtggtcctcatgcgcaccagacccttggacaagccccaatccgttcaccctagagcacgcccgtgcgtctcgcctttggaccctacagcccgcctagttttcttggcagatggggctgcaagccctcccttccacgcgcgtgtgaggctgcgagcagcctctcctaggctgcagttgcagcaccccaaattgcgattttatagggtttttccccaaaaatccaattttttatgggattgtttcccaaaattcgatatttccaattttaaatttttccaatttgaaatatt

SEQ ID NO: 351566 - DNA, 604 bp, Cannabis indica
tgccatatttatctaaactttctcatttttttcccatagttttgtaaatacccctttaataaatggttttttttcagttttaactaaaaaaaataacaatattataaaaatactttcagctgaccaaataaataaatatacaacccaaataaaaaaaaattatacaaatatcacttacacacaccttcatctcaggatccgtgcttcctgcgcaatgatcgcgcagccacgcagtaacccgcgcaagtgaaacgaaaattcaaccagaaagagaaccaccattaatttcggtgacttcacctgagaagacaaccagaatcaatcaaaacaggggctgtttcgaattcatgaaaaaaagtgtagaaaaactactacgaaactaaaattcaactggaaatccagtttaatttgcataaaactaatgtcctgacatcaatactatagtaaaatatttatcctggtgtatttttattgttttctaaatttctaatggtgaatttgttcatattaaatcataaagagacatatagatagagttacgtacgtagaaatactgttctgatttttaatgtttcataatagttgcatttgttggaaattattt

SEQ ID NO: 351567 - DNA, 584 bp, Cannabis indica
aaatatgatatgttcaaccccaatcaacaaaccctattccttgagtttatttttgcaatcttgatctttctctatttcccgtagtcgcaggtgttgcaaagggatgtgggtgaacaggtaagcggtcaggctatacgctgcggtagagcgcggaggggccaacgtgtgatcgaccggcgtgcagaggagccgactacgcttggtcggtgggcgaaaggccggagtctcataatttactcaatatcttgtttggaagcctttgcaccactttgcaaaaattacattacccttgtgatattcatgttgatattattttgtatctaccagaactcttcaataaattctaagacttgtgagatcacaaaatcacatatttacacaaactttcaccaaatcactcacaattaaatgatcaaggcatttgtgctcaaaactggacatatcttaatcaaaataaaactagcacaagtattagtcacaagctcaaacaatattctcattttttaagaagctatgcacattattaatcatgtattagaatgttgaaaatcacaaaaccaaagcacatatgcctcatttttttt

SEQ ID NO: 351568 - DNA, 1040 bp, Cannabis indica
aaataatttccaacaccatcatcattggaagagtcactcactttgtcctgttttaaaaatataatttaaatgagtataaaacaacataaaataaactaaaaaacaaccattgaaaaactaacataccttagcataagaatcggcaaaaatagtagaaaaatgtgtctgcattgaagccatctgagcagcaaaagaaacaaaatgtgcagacacaaactctttcaactcaaccaaatcagaagaaatcttttgttgggaagtatgcagcaaatcaatcttcacctccaaaccatcaaatttctcagaaaaagcatcaagcttgacagaaatgtcactctcaaccgcagaaggctctttcggaataggaatactcttgtaagaattgtagttagtgtcaaacttgaaactgctcaatttgaaagctttgaactcagcagcagtgggtctcatatttgatagttccagctgatcaaaaaacaagaaaatgaaaatttcaataataaagtttattaataataaaaaacaacataaaaacaactacttaaaaaaccaaaaaacaacaaacagatataccttgtctttggaaacatcaaaaatgtagtcttcacaactttgaaagtcggctgactgttacatgtccactgagtaatccttggaatacgagaattttccttttggcaatacttacctttcatgtacttacaacactcataaaaccaaatttgaaaaacatgaggacaaccaatcaaagtgtaaaaaacactcggcctcttccctgaactcattgcctttctaacactttcaacccaactgtcaagcttacccttcaatgacgaaatagtcaattcaaaagaactccatccccaagcaaattcgtcgtacctcccactgtttacaacatctaaaatagacctaggtacatttttaatcttagtaccactaagcaaaaaccattccacaaaatacaaaactgccaacttaacaacatcctcatcaaaatcaccccaccgcttagtggtaaaacattccctaacagattc

SEQ ID NO: 351569 - DNA, 687 bp, Cannabis indica
ttatttagggcacaaaacccaactaatacagcgtaaattgtttgtcacattacttgcttgtattattgtgttaaagttattcaaatgcaagagtggatttgtggttccttcatatgatgagacatgcgggttcttgaatctcgaaggaaaaggggtaattattatatctggatgatacgactcaagcttctcttcagagtcgtaaccagattgtttccctgatcccccacttgatatctcctgattgtcctccagctcgtttatccgcaattggattggatcctcttactttggaccaagttgttggcggagatcaggtttcttccgattcaagtgctctcgcagatctggttgggagtaattgctggcagacctagtcttactcaccgatcatgtcctactcatagactttgtctttgagtggctcgcagatttactggttcccacactttcttgatccttatctcgttgagtagtttttcctctttgagttgatcgactgtgggttcttgatcgcctcgaagtcacacttgcttcttcacgctttattctttcccctcgagagcggtttcttgtatttcccccgtcagggtctatacgagtcctcgctatatgggtttgggaagaatgctagtgatttctagcatgtgacctccgttcttctagttgagtcccaagatcatcctc

SEQ ID NO: 351570 - DNA, 836 bp, Cannabis indica
ttgccctgatatgctaatctgacggctatacaaaatttgcctaacatatatctaatatgttaatctgatggcaactaacatgtacgctaaacatgtataaacatatgcatgacattatactaatcttacctcgattccgaatttaggtgtgctggtcaaccaaagtggaacaatctgctcggcaaattacaagctcctaaatcacattaatcacaacactgataagtgacacgctaaatcacttcccggggacctaaacttgaaactaaaagtttccctatcgataaataacatggcaataccctaaataacacaaaaatgggaaaaactagggttccaaaattttccccaaccggtagaccggttcctcaaccgaaattccggttctaggaaaaattcctggaagccaaccggtagaccggttcctacaggcctccctgaaccagaattccggttcagtgcaggaaaggttcaaaatttcataactcatgcaattcaaccccaattcaaaccaaactctccagacctgctaattagaccccaatgaacatattccaagtgataaaacaaagcttcatacacagaaatgaatttcaccattaaaggttcaagattgagttcaaaaactcaaaacttgactaacccttcacacagcctctgattcacgcattaatccacataaaaactcataactaagcctcagaacacaataacaactaaccacagcaggtacaacaagctaaacaacatatcactcataaaaccaaagttttgagttcaaaactccatacttgattaattccaactaaaatgcatcaaaacctgttctaatccac

SEQ ID NO: 351571 - DNA, 621 bp, Cannabis indica
agtgtcaaaaatgccaaatttttggagacaaaattcacgcgccagccattcctctccaatctgtaaccaccccttggccgtttcacacttgggctatggaccttataggaccaatttcaccaccttctcaaggaagaatttggattttggctgcaacagaatgtttcacaaaatggtcagaagcaattcctttgaaaaaagcctctacagaagctgtggccactttcattctagaacacattatttgtcgttttggtatcccgaaaaggattttgtcagataatggcactccatttactggaaaagcaaccaagaaattgttggaagactatcaaatttttcatgggaagtcaactaggtactacccacaaggaaatggcattgctgaggcgttaaataagttattattgcaggtcttaagtcgcatggtgcacgacagtcctacaatatggcacgaatttatccctttagctccatgggcctatcgcacttcaaaacagggatctacagggttcacaccattttctttggtttttggatcagaagcagtactacctgccgtaatagctgtgtcgtcagctagattagctacggctgcaggaatggatgtacatcaagcac

SEQ ID NO: 351572 - DNA, 512 bp, Cannabis indica
aataccccccaaactcattaaagaggggttgagaattctgagtttcataagaacattctctgtaataaatactatcataaatacacagactcgtggactaaggctcattaatgtctcaaccacgtaaaaatctttctcttaattcctttaagctttcttaattactattattatattggttgccgaaaacatcggtcaacaatggtcaaaagaaaaacaatttgtcaacatttaggcttaaattgggtaaaactaagaaattaataaataaagtaggcttgaaaagttcaatcgatccaaaaaaattgctgatatcatatcttaaaactatgtgtaatttattaattttgcctcaaataattatcaaataagttccagagtagttgagattttaaatcaaaagtcaaacatgtattcatctttccaaacattagcaaatatgctaatttaactgatgtgcactttttttaaaaaaaaaaatcaagcttgagcagtaattaatcataagttaa

SEQ ID NO: 351573 - DNA, 1447 bp, Cannabis indica
tgttaaacaaaacgagcatggaaaaacacccctagggcaatattataattgtacatgcacatatttacgtggtcatcaataagtgggggtcctaagtgcgggccaagctcaattatgcctaggactggccctggttagaatatatgttatatgaaattagtatttatgtcactcaagggttaataatgtggaaaaagattaaggtttctcgttcttatatctataactatcggaggctatcttttatcttttgtcaggcccgccaccttctttgggtttaggtgcaacttggtggggattgtattttgttaatgcaatttgatttttactgctgcaattagtcttgtctcagctgtgacatgattttagtgttttcgtcttgtatatgtgacatagttttgaatgtttttgtcttgttcttcgatggctagccatcaaatcgttattagtggttgcaaagagcaagctctttgtgactgaatgggttgttagtattgtagttacacaccttacacaatagttaagtgctcaagctacgaggttgaatgaacctgctgcaatagtttctactgttatgtcttttgagcagtggatgaaacaaaatgttgtttttaatgttaagtatgatgctgcaatattttttatatgtattttattttaatttgtcaaacgatcttgaattaggcatataattatttgactcatttttctatttcggttgtgtctaccaacataaaaatgaatattgtatactattattttagttgattataattaagggttgagatgcaaaatgaccctaaatttggtaactaagttagtaaatgtccaactttttaaaaaaattaagaaaatggccaaatctaataaattagctaataaaaattataaaaatagatttatcacatatttttttaaaaaaatatatatataataacaaaattaagttacataatttttttagtattgcatattattatattgtaacaaaaataaataaatatattagatcatttaaatatatacagcagtattagatatatcgtagtacagaaaattaatataccgtagtaataaaattatataccacaaagaaattataacaatactaaattaatactcaaaaaatatatatatcatgctaacaaaattatatataccaccattaaaatatgaatacataccaaaaaatttatatataataaaatagaaactaaatatcatattaaataaataatatattatagacaacaaaaatcatataccatacaataaaacgtatatacctacaataaaaaataaaacaaaataatataatattattaaaaaaattatatatatcatattaacaaaattatatatcacctttatgtatactaaaataaaaactaaacatgcattatctaaaataaaatgatatactatacaataaaacttatataccata

SEQ ID NO: 351574 - DNA, 690 bp, Cannabis indica
gaattaaaacgatgtttgtgttgatttggatgatttcatgatggtttatttgcttatttgatgaatgtatgcgatttacgaattttgtccatgaaaataattttatttttgttcttaaactattttagttggattccttgtgaaaaattaagcaattttggtttttagggaactcgatttcaataaaaattgagaaagttatggaagtttgaaaaatcggggttcaatggtgtcgagtgggtgctcgtgtgcaccaagcactcagacaagacgcgcgagtatggggacacggacgcttgtctgaagctgtgtcacgcctgtgtgttcagacacgactgacgctgcatccacccacacaaaccctgcaaatgctgagatttcttggcgcaggaccctgcagtatgctccttccgcgcgcgctcaaggctgcgtgcagcctcctgggcagccaacccgaaaaacccttttgtgggatttttccaaatttccgaattttctcaattttcaaaccctaaaattaaaataaaatattatttttaatatatttaaacttaaatatcaatttcaaattaataatatttattttttaatagattattattaatctttgataaaagaaatagaaaaataaacagaaacagactaaaactcatcttttttacaaaatgaaagaaatagaaaaataaacag

SEQ ID NO: 351575 - DNA, 420 bp, Cannabis indica
atttaatttcttgaaatagaaataaataattaagtatcttgaataaaatcaacttacttattaattctatttatgttcaaaaaaatatattctaatttaagctggtccaaaattacttaaaaaattaactttcaactataattttctacttaattaaatattataaaatataaattagttactagaaatcactatctagaatcttttctttaaactaagtttgtttttctaaattaattttgaaattatccaatgaaaaattaattttatttatttcaaatttaattaggttaaactagtataattagcctaatacaattatttaaatgaagcaaatgggcattcacaattggagttgttcatgtgagggagggcatgtcgtacccaccactattggccccctaactctcatacaaggcc

SEQ ID NO: 351576 - DNA, 665 bp, Cannabis indica
tttattattattttaataggacattcttccccataaaagaagagctcctctagctcattttcacattcagaaaagtacacataaggtcagagtctttgtctctagtttttctctctagaaattacagtttcatcacagttgtcttaaagttgacttcttctttcccttatggccgtcaaagttgaatttttttaagcaaagacaccttcgacctcttcttcactggatgacgaccacctttggctacaggggagcaaaatcggagtcatcatcgtcgatgactgggcatttccctttagccttgttagcaactgatttatgacctatttttgaagtttttttggcaatatagatggagaagtagaggaacgggtaacaaccattatatacacgaaatggaagatataaaaaaaaattgaatgaaaatagtggcagttggagatggatatggctgaatgggctttgatcataggttaatcgtgagggagaatgtgattttttgaatgaaaatattgaaagagaattggaaagagaaaactgaacactaacttagaaacagaaaataaaaataaaaaatgataagaaaagaaaaaaaaaagaaaaaagaatagtagtaagtagagaatgaacgtgcatatagacgtgtgtgagtgatagagtgtgtt

SEQ ID NO: 351577 - DNA, 535 bp, Cannabis indica
caacaatttattaactactagtggttacatcctgactaacgcagaagtagttgccaaaaagtaaagaatccagtatctctagaggagtagacatatagagagaaatttcacaatatcaaggattttgtgattaagaaaatgtaatggtggaggaagtttgtattgtatacaacctgtcagatcctattacggagagaatactacatactacacttgatctggatatcaaagtgttgagattatttaaaatgcacattttgttttattttagtgcaagtgggagtttgttgggttttatgccctaaataaaaatcattccaatataatcagatttactaattaataaacgatcaaaaatcgaattttatgttacatggttcacatgatctatttcatgattatgtttaatgtataaattctattaagttcagaacatttatttattcatgattatagtgtcgttagcacaatagaatataatcatgattatatgtttaaaaatttaattaccatgatttatcagttcactggattt

SEQ ID NO: 351578 - DNA, 680 bp, Cannabis indica
tgtttgcttgagtttggtcttttaaatctacaacaattttttgtatttttttccttttaaatattttgtatgtatattaatatgtgttatgcaagaatatatgtaattattattttatctgattaaatatttggaattcttttataatttaatcactatattattcataataatatgttgcttttttaattgtagacaattaacctaacaaagaagtcaaggctacaacaaaggagaactcaagagatgattattgtgtggattctattattatagttttgttttaaagttttattcaatacaatttttttttttttggaatcggatgactgtatagtaattttaagttaatatttttttgtattaacattttggatactcaactaagatgtagattttttttgcattaaattttgatgtgatgattcttacatatatgaataaataatggtaatataaaaattaaacttaggacagaattttaaaagggttataatgtaacgcccgtattttataataataataaacttgaaaaattaatttttaataatttatatattaataatcacatggatcgggatcccgagtaacaaaatactagttaaaagtattttactaatatgtacatatatttttttttaaactttagcggacaagcatcctcaaaatacagactccaa

SEQ ID NO: 351579 - DNA, 584 bp, Cannabis indica
agatcctggtaaaataattcccaacatttacactgtcatgctgggcttggctcacgggtgctctactgtgtacgaaagggtaaatctatctctgatgtgccatgcttgcgagagcttgacggtgcttgtacatgtttagaccacactacaccaagcgggttggggtctaccaatgatgcactttggtaactctgaatttgctgcttagatcggctaatgaaaagaccttgtaatattttgtaaaatatttttgggatgcggaaagatatcacttttgattgtaaagttccaagttattacaagttttattttaattatattttagataaaagtttaaattttcccgcgcttatctgtctagtaatcccggattaggggattagggtttctttattagttagcatagcgtgcctaattgttagagtgttacacaagttgactagtgtggccaacttccaaaaatatggtttgtaacctcctgctcctggagttgcaggagccacagtctcagaaggagcttatccttgagatggacaagttcttgacttaaactttggcatacctgtaacaccctaacaagcata

SEQ ID NO: 351580 - DNA, 924 bp, Cannabis indica
agattccatatctatgatcagtgctcccactcaattgaactacaattttcccaagatgtaaatatctgccacaaccactagttagcttccacaaacaacttaaagaatatatataataaaattaagttgaacctaactatatcaggattaagatcatagacctaagatcaactattgatattgacttagaaagatataactgtaagtttatgatatcttatctaagatcaatgtccgtccctttcaatgtacactctatacattcgatatgggtaaactatgccaataccttggaaaggacataacacttatctaaggtgtaagtataccttatcaccgattatcatgccactctaaatccaatgaatgacaaatcatgagaatcaaacttttgaacatataattatgattatattctactttccggacgacactattgttaggttatatttagcctatgtttcgggtctgtaaagtaagcattttctcgtctattggtgtcttttggagcggttttacgcttgatttttattgtttcaggttcccggggtgtcaaagttcaaattcagtcaaatggtgaaaagacgggacaaactggcaaaaaattggaaaaatctgctcgagatgcatcagtagtcgcgaccaccaatgagccaggtcgcgacccttttctgtggtcgcgactctggtcgcgacttcgagattttggcagaacccctaattttcgaggttttcctgtagtcgggaccagcttaaaggctagtcgcgactaggtacggacgtcgtggttttgacctaattttgatttttctctcaattggaggcacacctctcatccctatatatggaatacgactcagaaggtcaacctaagcagaaaaagacctaaaaagtggatgaaggtggagaggaagctatcttgaa

SEQ ID NO: 351581 - DNA, 792 bp, Cannabis indica
ataagagaatttcttctcttacaagaagtttccaaacatagaaaatggactgctgagaaatgattctttcctatgatagaaaagaacattaaaagcaaatataaatgtgagaaaatcagtttattaatacagaaatctcaccataaataaaaaaaatattttgacatctaaattgccaaaaaatgactttacaatctctccctttggcactttagataattaaaatattttttaatagaatagtacctgcaaaataaagttagctaccaaacaaaactccccctgagaaacacaacattaaaccgaattataaagctaactttaatccaaagttaaatacaggtaccaatctcaactccccctggaataagggtccagagttgagaaaacaaagcaaataaaaatctattactccccttttttgtttatctaaaagccaaagacaagtaaaaaaataaaatatgttcaacaaaaaatcaaaaataaagaaagacttatgccccctaaagcttgatcagagtggacagttgcttggaaatctcttgctgaacctcctccatggcagctagacgattgttcaccaggataacttcatgcttgacttcctccacatctgcaggagcagaactggaacttacagcagcaacagcagtaggatttgcaccagcagaagctttaggacgcttgggaaaagctccatcaaagtactccgagggttggaaaatggtgctagcaaggggaggctcaagtgtctcatggggaataagccacatccttctaagagaaaaagaa

SEQ ID NO: 351582 - DNA, 701 bp, Cannabis indica
ttgatctgttttatgttctaactgttgttttataaaaaacacagtattttgaaaaaaaaaattgtgttacagtatttttataaaagttaactcaaattccaatatttttgtaagtttctcttttacaaaatagaagttcaattttgttatttaacaaaatatatggtataattagtaacttttacaaaataaattgttcaaaataatatttgccctaaaataaaaggtcataagaaagctattaatttcttgattatgaattcaactaagcttttcaaaaattaccactccgataactacactaaaatttatttactaaaaaactcaaaggctcaaaagagactaataggtaaacggggcggggcgggcgcgggcattgctctcccaccaccatacccacttcttaaattcaccccatacccgtcccaatacccgtttaaattaaagcgggggtggggcggggattacccgacgggagaaggattcccatcgtgtactcattacatatatattttttttaaaaaaaattatgtttcaaagagaattaaaaaaaaataatcataaaaatttagtaaaataataaatttaagttaaatagtgtgtacagttaaaaaaagtataatcaataaaaagcctaaagcatgaagttattttaattgtagtagttatgattttaaacttaaatatatacatatatcata

SEQ ID NO: 351583 - DNA, 728 bp, Cannabis indica
agtgtaactctatttagttataacctcccaattagaatataatttacttagtcccaagtgtattcttggatagaggttctactgtataatatattaggtaaggtaatttcagtttttttttttcttaaaaaatgttaaaagatatcagtagtatttagtatttttatgtatattaaaattgttattgatttaactaaatattgagtcttatatagttcaatataataatttttaaggagtatcgctagtcaatcacaaggcgacatatctagaggtactaaataccacagatgcccaataacaaatcgaataattcctatagctcattaagaaaaataatatatggtttagggtataactaatattgaacaatatactactagtggaaagggtataactaataacaccccaactccctaactatgtaagagagaatgagacaatgtaagaaaaagaggatactaaagaaaaacaagagggaaaccaaactccattggtgggcacaaaaaaggctagagctacatgcagtcatgtggagacacatgatcccacttaatttttactaaattttatttttttataagttgtaaatatttttttactttggttctagtaaaattatttttttattttatttttgtaatcatatttttttattttatttccataaaatttatatttatgttttcatcctgattattctcattaaatttatatattttattttt

SEQ ID NO: 351584 - DNA, 1327 bp, Cannabis indica
ggcccgaggaaacgattgaaccagtccgacagggggtccaagtttagatcccatgggttctggtagttctgatcattaagggtattttacatttcatctcgcaaaaccctcctcaaggcttccacctcagcatacccctgggagtactcgtccatggcatagttgtgcttggctatctggagctcctgccttgcctcatctccgggtaccggagtcagaactatgttgggaggcactataaattcctccgcctcgagagggatcccagaatcatgactcggggccggagtgtccactctccgtggccgtttaggtacctcctcggctaccattttgcctttgcgcttgcggatcagagcaacctcttgctcttcttcaccttcttcaacttcctcaagaagagcccattgctcttcttgaccttctttagcttcctcaggaagcacctcctcctcatccactaagtcaatagtgtctggagggcactggaagaagccttcatgggagtggccatctgggaagaagttggaggaaggggagcatcaggagtgtgagctccggcaagagtggccaaaattgcctccatggaactagctgctgcaacaaaagaaaagagctaagtgttagaatatctgtgaaagcagtaaacacttaaaaaacatcaagctagtcctaccctgactctctaattcggccctagcaaagttctgaatcttaatgctggctgcatcatccccgagatagctgtccgagggccggaaccagctagaagaaagataggccgaagggtccaagggaacgggctccggaggtccagaacccatccgagaccaacctaaataatatcccaaattggagaaataatagtcctttgcatgatccccccaccgggtcgagggcatcctaaacctaaggagacgttcatcaaaccctacaggtgtaatgctagcatattcgttaacgggagggacataatgtattgctaaaggagacttaccggagccggaagtcctcgcgtcaggaacccctgtattcggcacctggacgatgggccttggcctgggagccctcttctcgaccggactcccaatgcgaagatatcgcccgacagccgtttggctcctcctctcgactgggctcccaacgcgaaggggcctcccaaaagctgcctgggccttggtataagccttctccttagccttttggtagagataatcctggtacttcttctctggcggtggcaatgatctcatcccagaaggtcttctccgcggtcgggaccctcacattcgggcagaggaccttagaaaggttggagtcctccacc

SEQ ID NO: 351585 - DNA, 875 bp, Cannabis indica
atccaaaccgagcaataatatttattttgttttctaaattcaatttattatatttaaataattgtgataaatgagataaaatataaaaaattaaatttaaagttcaaatcattcgcaataaaaaaatatagcaggttgaacgttgaactttttttaaatatttataaaaaatgtataaaaatatatataaaaaatataaaacataataataaaaatatatataaaaaatctcggaattgggttggtcgggttagttcagattgattggggtgttgatgatattattttcaacccgcccaatataacgattgggcgagttatattttcgtcgggttttttcgatttatatttttcgacaggttatctcaatttagtttgggcagattgttaagattgagctatttataaaaatttatgtacaagtacagacaatatacacatttttgttgctaagggtgacaattaatacatccttttgcaattttaattaggttaggtgcatttacatatacgtttggtcttataattaaaaaagagtggtgcttttacgattgattaacaatactttttaaaaagtattaagttatatgaaatctaataattagttacaccaataacaatattgtctactaaaaaagtaatattttttagcaattttcattaaaaaaagaatataaagggcactagtggtgcctaacttattggtccaacaaagtattgagtctcatataatttaatataatagcttttagggagtatcgctagccaattgcaacgcgacatgtcgagaaggtgctaggcaccactggtgcctaatagcaatgctcataataataataagagaaatgctaatgggcatcagtggtgcctagcac

SEQ ID NO: 351586 - DNA, 1004 bp, Cannabis indica
agcgcagaactcgagatacatgtctttggcttcacccaagtaatcatagtttgcctgagggttagccttccaaaagtcataaaagagctcgagaccggctgtctataaggcataaactttctctcccagcctcgccacctcagctgtaagctcctcctccttagacttcttctcctcttccagccgacggaggacagcttgaagggatgtcctttcatcttgaaggctattcacttctgcaaataaattctcgatggtctcttcaagtcgatcagaagccttgagatctttagtcaaatcgattattttcttctgagcagtaaaaagcttcttattaacttcacccagctccatccgaacagctccaagttccaccctagcgtcatcagcgtccttcttgaccaagtccacctcctccctcatggtgttggacatagctgcattcttaaaatcagcagacttagctcgggtgtatgtgtaagccaactttagaccagcctgcgtagagaaaaaactttagaatccgagccaaataaagaagattaaaggaaactaacaagaaagacttacccttgtgaattcttaaagactcctcccatcagcagctccaaagaaaagtcgttgttagcaccagctagttgctcactaacctcaggaaccaaccggttcatgtagtgggcgagcatctccttgcctttcttggcctctagaagcactggcaaaggtggagtaggagcctacatctgctcggatccacccttgatcagctcgaatccaccttttggttgctcagggcagtccgaacttcctcctcgagaatccttggacttagcaacttttggagtggaggggtttgcaacagttagctccttggaaaggtcgataacctccccggcatgcgccttttccttggaaggggtcccctcaccgcccttggatttcttggtcgaaggagatgcgcttgagcttcctccaactctcctcttcagagcatcaagcatctt

SEQ ID NO: 351587 - DNA, 681 bp, Cannabis indica
aacaccatggccggccacttgtataagttttttccaattattattttcattattttaatgccaaataatcactaacctaaacctagtggttgcctataaatagaaagtgatggctcacaccaaaaataagaattattcagtaattcaagagattgcctttcagaaaattgagccacccaccttctctctatagccgaccctctctctctctcttttcctcttccaatttcgaaataccctaagtgatagagtagtgcccacacacagcaagtggtacctcaatcataatttggaagatcatgaagaatccaacttgaagagaaggacattgagactcagatttggcgatactctgcaatagaaaggatacaaggcatatttaggatgttaaacaacatacttgtgagtagatctaagatcctggtaaaataaattccaacaactggcctcagagccatggtaattgatttgcttgcaagaaatttggacttaaaacgatttgtatgtgatttggatggtttcatgttgatctatgtgttatatgatgattgattgatgtttgtgaattttcatgaaaaataattgaatttttggttctggaattatttttattcgatagtttggtaaaaaaaaaattaagaatttttttttttatagaactcaatttcaattttatttgaa

SEQ ID NO: 351588 - DNA, 505 bp, Cannabis indica
tcagatttctgagtatttttttagagccacttgcataagagttttttctgtccccccattttgaacttgtttgccactatttataattgcatagtggcagttaattacaaagctgaccaaaatatgtttacaaccattatccctaaatttttgtgggatctgattacaaatcaagccaaataaatgagttttttacaaagctgtgaatatactgcttttattgggactagatgaacgcataattaaagatatacagtaagtcttatctcataggaatgtctcgctgagaatggagccaagatcactttgatatcgagcagttgtttgtcattttaacttatagagactaatattgtcttaactctgatagctatactctcggaggctgagaggatcttccttgcatgtataccaccttctagcgagataaatgcctcgctgtccgttatcttggctcgtcatactatctatacttagtttgtacatcgtacaatatacgctaagt

SEQ ID NO: 351589 - DNA, 512 bp, Cannabis indica
aaattaatcatgtcacccctaacctcagtttcctcatgaaatcgcacaaaatcgcacaaagtcgcataaaatcgcaaaaaaacgtaaaaacccagaaaaacacagactgttcggaacaaactctacctccatttcaaggacacaaaagccacaaattacaactaacaacgttcagatccatacaatacaacaaaaaacaacactatttactaagaaaaatacttacccattgctttgttgagtgtggtggactttgagggtgagaatgttgaaggtggcagtcggccaagacgtggagatggtggaggtggcaggcggcggcagtcggcggcagcggcggtgatagagagagcaaatgagaaagagagacaaagtgaaagagagagagtgcgagaagagagagagagatcaaacgagagggaaagagagagaaaggagaggctgaattttttcggtttgaggagagggctattttggggttaccattgtaagattagcatagttacaaaatt

SEQ ID NO: 351590 - DNA, 864 bp, Cannabis indica
ctaaactgagacactttctttgggttagggactttaggaatgagtgtcacattagtagtgttgaagcccctatgcaaatttccagtgaggaagaagtctgtcacagcatcacagaaatccttccctaccgagttccaataatgtttgaagaagagaacagacattccatccggccccgaagccttcaaactacccatcgagaacagtgtttgtcttatttcttcatgacaagggataacctccagccctgcttgttccgagggggagaggtggtccgaaatcaggtggtctaagctttccaaaggcccctggggcgggtttttaaaaatattccccaaaaaatcagtgaattcttttccaattgcatctcgatcagttaaccaaaccccatccgtactcaggatgctctccactgagttccttctattccgaattgtagccgagaggaaaaagaacttggaacatttatcaccatccttgatccacgaaacacgggatctttgctgccagtaaattgacttccgtcttagggcctcattaagattattccttatctccacctcctgagcccaagatctagaacccgcagacatacattggataacttgtaactgttcttgtagcttggaaatgcacgtatccaacttgccgtattgctcccggttccaattgagcagagcaaggcgcgatgcacccattctcttataaactctggccggggcccaatcatgcgaaacagatccccacgcatgttccacaattaaggagctagggggtccctggtccaccaggcctcgaaacgaaaaggacgtctgctcctggattcctggaaagcagacttaataaagagaggcctatgatcag

SEQ ID NO: 351591 - DNA, 1149 bp, Cannabis indica
attaaaattgaattagcaacataattaattttgaaataaatggaattaattttttcattggattattttaaaattaatttagaaaaatacacttagtttaaagaaaatactctagattgtgatttttagtaacaaatttatattttctaatatttaagtaaaaaatttatttaagttgaaaattatttgttaagaccaacttaaattaggatattttcttagaactcaaattagaattaataattaagttgattttattcagcataattaattatttatttccatttcaagaaatttaattaattaaaaatatatattaagttgaaaattaatttactaatcaattttagaccaacttaaattagaatattttcttagacattaaattaaaatttataattaagttggttttattctagatacttaattatttataatttaatgaatttaactaaataaaaaaattatatttaagtcagaattttttcaatttcagaacaacttaaattaaaataatttcagaatatattttatttattaaataatcattttccactaaattttgaaatgcatttcttttaaatgtagatatttagaaaattagattaaagttgaaaattaatttattaattaattttagatcaacttaaatcaagtaatttttcattaatgatttattaaaataaatagactaaaatatattatattttaattagaaaataagtaattatttgatgaattatctagatagatattttctaggtaaacttaaggtatttttctagatatatttaattaaataaaaaaaattaatatttaagttgattttattcaagacacttaaatatttgatattgttcttaagagatttaattaaatagaaaaattatatttatgttgaaaattgatttattaatttttgaccaacataaattagaataatttttttctgttttattttattttattttaaagtaaatttcgaaatgtattgcttctaaatacattagatttcgaattaaattatatatacttgtagaaaactaaattttagttgaaaattaattatttaattaattttagaccaacttaaattaagtaattttcataatatttattggaaagctaatactaaggatagaaaatatt

SEQ ID NO: 351592 - DNA, 524 bp, Cannabis indica
tctctctctctctattcggccctctttgagcagcaagaggctgaccatttctcttggtgtttcaagctttttcaatcaatctaggtgtagttcaagttgttggtaagtccttaaacttgttcttgtttcttttattggaattttgatgaaatgatgatgttttgcatgcttatcttgaggtgttgttgctgctgtgtttgtgagataatttcagaggtttaatcttgtttatttgagtagaataaagctccttatgatgcatgatacttaggttgattaaagttgtggaatttttagctcaaaattatagttttctaagagaaattgtgaaattggttgatgtgtttgttgcatgagtttaagaatggagaaaggtgtgaaatctataccgaccataaaagtctcaagtatttctttactcagaaagatttgaatatgagacagaggcgttggttggaattagtgaaagattatgactgtgagattctctatcaccctgggaaggccaatgtagtggccgatgc

SEQ ID NO: 351593 - DNA, 496 bp, Cannabis indica
attaaataaattaagttttgggataacaaagaaggttataaataaaaagtaataaattaaattaaatatataattaataaatgattattccaataaacttatgaaatatgtaactcacacgtatactataacaaaacagagtcaacactcagctcatacatggtcattccaaaaattttctcaacattaaaattaaaatttcctaaattttattgtcttaattatagtaagacaatgtatattacctaattgttggaaatttataggtgcttcaatagaaagaccaaagtcaaaatacaattcaaaatgaaaagtacaagaacaataatattgataaaataatgttacaactctagacaaaatatacacataagtatagaaaataagatgaagtagaagattataaaattacaatataaatagtagtatatatatagatgtgagaacaatctcaacaacactaacaccaagtgtcaagtaggggaatcacaaaact

SEQ ID NO: 351594 - DNA, 639 bp, Cannabis indica
aatttaaatcctaacaaaaatttacataacaacttacatagaaacgactggaataaccattggagcaaccaaaccgtaaattttttttaaaaaatgacaaataggataattctcataattttaaggagttttttcatttttatacttctaaaatagttttttttatatatttttacgaaattctaaataaaaatcactattgcaactagcggaacaacttaaatcacaaccaaaaaatcgtatagcaacccacatagaaaccaccagaaaaactattttagaaactcaaaccgtaaatctaaaaaaatagtatatcgaattatttcttatttttaattaatatatatagaaaaatttagagttacattatttttgctctaacattgggacatatagagacattgatctcctattttcggtacttggaagttggaattatatattgttaattttataatagtattttggatcatatagtttataaaagttattgattagattttttattttgttaaattgcagtttagattttaatatttttttcaaaatggtctaaaataaactatagacttaatttttatcaaattaaaacttaataataatctaacatatgacaaaattagttatatttttttttat

SEQ ID NO: 351595 - DNA, 436 bp, Cannabis indica
cagaaatgacatgtaggaatgaaatcgtcattctgtaggaggttgccagcatcagtcctccttccttcaaacttgagtttgatgggtccagttggaacatgtctcctctcagatgagtcagattcgttaatggtgattgaggtgtcaggagaccaatcttccttctttgatgaattgacattggagggtaaggaatactcaacagacaggtcattcccttgcttatatagcatcttatatcctaatgaagttcgatcaccatagggcttctgaagctgtagggtttgattgatagcagcagtgcctgagggaatgaactgtaaagcttgcttggttcagattagatcagctgtgagtttgtagatctcattctccttttcatcaacaagtcggctgagatttttcacagagtcttctaactttcctttttcagtct

SEQ ID NO: 351596 - DNA, 1493 bp, Cannabis indica
ttagtcttactcgagggcgagtaaggatttagtttgggagaatttgttaggctatttttagcctaagtttcgggtcatattttatagtttttttttcttttttattatttttggaatagaattatgcttgttttctttgatttcaggtttctacgcttggaatttataaattggacaaatttcggaaaatagtgatctataaagtagagaaaattttgaaagagaaaaaagctgaaacttcaagcctgaattcgaatatgttctgatcagattttggaccaagtaaaaacataaaagttttagatctcttttttatctttccatcgcatcttgaatcagctcgtttggagtttgtatgagaaagttatgcctattttactgaaagaggtcgaagcagaaaaagatgtccagtggccgcggcggggcttttggccgccgcggcgggagactacagaaagccctttttttcacttttctacagccatcgcggcgaggatattggccgctcggcgccgacttcgttcagaaggataacttcgtcttttctcgtttttggaaaaaactatatttaatgaaagaaggtcgcgaattatagaggggagaccatatggaaccctaaaaacacaagaagaaggctcttggagcgagcatgggcgatctgcaacaatccttcatctagtttctttctcttctcttgattttttatgtttttatttgtgtttatggatttgattatgagctaaactctctatttagggatttgatggatattgactgagattattctatggattaatattattggtttgttctttcttcctctattattgtaatttattcatatttgttcttataacatgtgtttgattggccaccttatgcatgatctatgatctcaatacaaaatctaataaatgagtattgagaatgctctaaatgaatatacctaggttttgatgtgaaacgagagtattcacatagcttatgtgacttttagattattgcttaatgtgaatggtatgttgttctatctcagagatgcagtagttggcatgcaatttaggaccattatgatctgaaaagagtttaggttaatttataatcggtcatcacataggaggaagaagaatggttaattagtgttaataatttagtaatcaaagcaattgaaatcatatccctaatttcacatccattgttaaaccttttatttgtttgttatatttaattttgctaagtttatttagtttcaaaatttatttattctattgccaaatagaaacaagaatttaattgattgatacttaactgcagtcgtcgtgggaacgatctcacttacctgagtattacttgttatatatcatttatttataagatgatatttaatttctattttattatacataaatttgttggtatgtattcatattttaatagtaatatatataattttgttagcatgacatatatttttttagtattaatttagtatt

SEQ ID NO: 351597 - DNA, 597 bp, Cannabis indica
atgattgaaaaactaaagcatcactacttaaccatttttgaattgttcttattgctggttcaatctgttgtgaaggataatttgaggaagtggaatcactttctctattcttctcaactgagcttgaagtagtaggattgtcggagcaatgaactctctgctcttcagataaaacaattcccagcttagctgctttctggaatttcatgttcatcatgagcaagtatgaagtgatactctgaccaggagtcatcttcacactttgaagttcattccaaaaggcatattctagatgaggattagggtgtgggttgtacattttgacactacaaatatcaatagacagaagcaaatcatttggttcaataaattcatacacaaattcagaaaataacaagtaagcagatatgtttgcaaaaataccaaaaactaaacatatttattatttttcaaggtttccaacataatgaaatacagtgtctcagtaggcgagagtaaaagataacattagttgaatagagtagtcagctcatctaaaatggacaccattttagcagcctttattcgattaaaatgagaatccaacgttgtcccggt

SEQ ID NO: 351598 - DNA, 584 bp, Cannabis indica
tttttttttttaattttgttttaacagttaaaagaattagttagtttattaatgctgttactctcacttgtactcgctatcagggtcattctaagcgattttggtgtcttaggtgaaaaattaaactttagtattttattaaaaaaaaaactaatcaatacttttaaattttttttttgtttaaaaaaatacttcacaaattctaaaataggcaaaaaaaaaaaaatcatgtatattgggatcacataattttcttttgaagtattaagtgcatatttgctcttatgaacatttattatgtatactatacattatactaaaaatatttattatattatatatataaagaaatgataaaaaaagagattatttcacaaatacacaaaacaacaaaaaattacaaaaatacggttcacagaatttaaacatttttacgatttttttaattttatttactagaaaatacggtctttttatgttatactcttgttaatttgttgtttgattttttgttattctgtattcttattttttgtttgttgtttttgtatgttatttagtatgttatttttcattgttacttt

SEQ ID NO: 351599 - DNA, 608 bp, Cannabis indica
attgatacctttaatttttatctcatcttttaaaatctattacgtttacctctttttttaatttttctactaattttcccctaacattttacgatagtctcaatttttctctaaccaaaattttgccctctaactttcccataaatctacacattcatctctaaccaaaatcgatctattatgtttgaaactgtgacttggttatgtgagagtgtgagtgtaatttaggtataatactcataaaaagagatatatttgaattaaattttatttagaagtaaatttgattaatgcattaaaaaaaagatattcctcaacttctcccaaaattgtattcccactcatgaattctggtgggctttctgtaatatttttatagtgcataatttcacgtattgagaacattgtttagtgtactatagtatattaaattgatgcttttgtcttttaatcaaaacaactttttctaaaagttgagttggagcagcttcagtttttagctgtagcttctctaaaaattcttcaaaaagctattttttaactgtttactaaacacatttttatcacaactttttcacaatgcaacttttagctttttcaaaagttgt

SEQ ID NO: 351600 - DNA, 536 bp, Cannabis indica
gtgcagcctcctcttcttcctccacctcgaaaggactaccagcacagacatcgctctgtttctctatctcctggacctcagtgtccccttcatgatccccctcctcctacacgagtggatcctgttcggcgctgggcgaggtggtgtgctgggccacatgagggtcagacgcgttaactttacgcattgtctgtttagtacgagccatcatcctgtggctagacagggagattgaattaaaatgaccgtcgcttgaagagggcagactagaacaaagacgagggtgatcctcgtaaaagagttgaagcagttcctgatcgatttggtgttcacttcccccaaaactcacctgggttcatcaacaaaagacaacatgcaagatgagtgtttggtggggatatcgaacattaaacaggcaaatatgccgaccaggagtactcaacagattaaataatgaaaatactcgacgaaaagtcaaaacttcaaagtttgaaatttttcgtgagttagggcaaaaatttcatgaagctttgaat

SEQ ID NO: 351601 - DNA, 568 bp, Cannabis indica
taagctctaggtaatttcttgtacctttctctttagtttcttgaatttaaagatatagatttttgcatgaaggggtgttttagctactgctgttgttgcagttgtcagatgttgtattctgaggtttaattatgttagattgtgttaaattaagcatgtttttatggtttttagttagtttaaccaagtgttgagttttagaactcaaacttggagctttaatggtgattttggattctgagcttggtagttgatttattgcttggaaatagtttattggagtataatatgtaggtctggaaagtttggttaagtttggaatcgttttggtgaagctttgaaattttttgggttttttttgtagaaaaccgggtaactgttttctacagcagggctcccaaaaatttcagctttgcgatttgcaatagttttaggtttttggttggttaattccctgctagtttatggtattgccatattaagttgcagtagataaggttttgggttaaaacctaagttccgggtgtgatttagcgggttacttatctatgttgttatcgatgtgatt

SEQ ID NO: 351602 - DNA, 513 bp, Cannabis indica
tgttaatgaaacatacttggtagtaaatctagatcctggtaaattatttccaacaacttgcaccagagccatggtaatgatttactttcatgtaatatgaattaaaacgatgttttatatattttgtgttgatttggatggtttaatgttggtttatgtgcttatgtgatgaatgtatatgttgtacgaattttttccatgaaaaatattttttctatttttaaaaatattttatttggattccttgtgaaaaattaagcaattttcattgttacggaacttaattctgatgaaaaacggagaagatatgaattttgggaagattggaaatcatgggtgctgcatgcagcctatcttggcagccccctccaaattgcgatttttgtaggtttttctccaaaaatccaatttttcatgggattttttcccgaaattcaatttttcccattttagatctttccaatttgaaatattttctttttttaaatatttctattttggaatatttccaat

SEQ ID NO: 351603 - DNA, 665 bp, Cannabis indica
acatcagaagttccttcaaactgagtttgaaggatctggcaagcttccttagcagattcacatgatgatataagtttaatataacctttgcctacaccattaaatatagcatgcaatgctttgctattataggcagaaagtttatcatcttcaatagaccattccagttcaaattttattttagaattacctgtagaatctgtctcaactgaagaagaccaacctgatagaaccatcctccgagctttctcatcttgagatttgatgaaggccctcattctaactttccaataaggagaatttgaatcattaagcaaaggtggtctagaaatcgaacttccttctacaaaaaatgacattttacacaaaaacgttaaaaggaccacactaagagtttagtgtcccactctgataccaattgaaaaattgagtttttgcaaatgtcaataatatatatgaaaatataaaattgtatacgtctgcagaagcagaatgtaattttgttatctcaaagaccagtgttgcagcgacaaaacagaacagaaagaatataaaaataattgcagaaaattaaatcacttaacacaagagatttgtacatggtatcagtgttctttcgaacactcctagtccacgaggccacgcccagagaatgaaatcaatta

SEQ ID NO: 351604 - DNA, 524 bp, Cannabis indica
gagaacaaaataagagtatgtactatagaattataaaattattctatatatatatattatatgtaatagaactatagaagtaagactattcaatccaatctaataaagttttttttttaatgcttttacacttattccattcatcaaattttgaaaatcctcatccagtaggtcattctaatttctcatttaacctccaattcaatttaatttttaaggtagcctttggttggagaaaatgaaatggaatagaatagaaagaaaaaatcttttattctattattttgtttaattttattttaaagggttagaatgtcatttttattttttatatttttaattcttctaactaaatgccacggatttgttatgtgagttttaatacagtaagagagagtagatttaaaagattataaaactcaaaataaaagggaaacttacaaaaatactggaatttgggttaacttttacaaaaatactgtcacacggaaatcttttcaaaaatactgtgttttaataaaaca

SEQ ID NO: 351605 - DNA, 574 bp, Cannabis indica
aaggttggattggatcggatgcctacccatacttaaatgtacccgtttgccgagatttttgaaaaaacaattatttaatataagagctaaagaaaatacaatcaaaagatcgataaatgaagaaaatactcaaagtttttacgtggttggagcgttaataagccttagtccacgagtcagtattattattagataggcttaaaaagcttaagggattacaatgagtatgaacactctattctcttcttgtgcaagtaaattaaaaatctccaatcctttgtatgaaggattcaatatgtatttatagagtaatagagatcatacttagttaccatttcccgttaatggggaatttgtaattaatacatagatttggggcttatctaatgaagctcagcccatgaggcaatgcatgtatgatgatgtggagacttgatcacggtgatagttgttcatgtaaggaccgtcgacaccatctatttctctattggtatgatattgtccgctttgagcctaagccctcaatgatttatctttggacaccttcccaaaaggcctcattccaatggagata

SEQ ID NO: 351606 - DNA, 822 bp, Cannabis indica
atatccatatattctccacccctatcaattcacaagatcattaaagttttacctaattggttttgagccaatgctagaaattctcgatacttctcaaacgttttagatttcttatgcataagataaatatgaccatatctagagtaatcatcgatgaaagtgatgaagtactcataaccacctttagctttaacattcagtggtccacaaagatcttaatgcactatgcctagtggttccttggcacgctctccctttgcagagaaagaacgttttttcattttgccttcaaggcaagattcacaaactggcaattcacctaagatgaaatttttcaatggaccacctttggttaacctgtgaagtctgtcatagcctatatgacgaagacgtaagtgccataaatatgtttcatcttcagtattgatcttttgctttttgtggtttctaggtttagctaccttaaacatttcaatattaaacagaaatagttcatttggtcttagaacataaagctctgtcccatagatgcaacacaaatttgaatgtcatttcgagaaatcatagaaccaaaacttgaaaaaattagtttgtattgttgcaactgtaaacatgaaacagaaatcaagtttctactaaaatttagaataaataagacattgtgtaaatccaaaattcggttctgaaacttgagtttcgcttttcttctagctctatccgataccattttgccattaccaattttaagtttgaactctctggattttacataattccagtttttaagcaattacaatgaacaacaaacatggttagtagatc

SEQ ID NO: 351607 - DNA, 678 bp, Cannabis indica
gcatgatttaccaaatttctcatatgttaaagtacgttttcgaaagttaaatttgcacaaatagcttagggtttaattagctgaaacacaaaagttggtattgaaagtgacaaaccccttttctctaatatattgtactttatttctgtttgtcttgattaatatcatgtgaccaatagaattaagttaagtaatatactcataattagattcgtacaagaatatacaacatacaaaataatatatacaattaaaatagataaacattaatttctaacaaaaaaaaaaaaactaaattatgttttgaacttttgttaaaagaattaatgtttaaatatctttatatacaaaatgtgtatatttaataatttttattagtttaatataatattttaaagatataaaaatattttgtaaattgattgatttaatatataaatattaatactatttattttaaattaattaattttaaattaatttaaatatataattattaatatattatttataagattcgaaagtatgctgaattttaatatttttaaatggataaattacggcataaatacttaatgttttagattttatatacttaaatacctaatgtttatttttagaggtaaaaatacctaatgttacaattctcttacaccgttactaccactttcgttaact

SEQ ID NO: 351608 - DNA, 1192 bp, Cannabis indica
taatgcaaggcacgctacggtgctttttcaattacagtgctatccttgctaatcaaagatttttctcgaaaaacgtgtcaaattaaaacttttataataaatattaaactttataatttacaaaactatttacaagtactgggatcccatttttaaacttttatacaaaatataccaaaatacataaccggtcacacagcgactacaaattaatactctcagatgtcccgagaccgaacactctaggtcatgctgccacgacatgtacaatcccatcctagtaggctcactcatgttcagctttcgcctttcctttacctacacatggaagcagaactgtaagtcaatagactcagtaagaaaagtatataacatatcatataacaccaacttgtatctaggcgcccatacacctatttacaaggcttaacagatgagtaagaacgttccatactagggtacatccattataccacatacactacgtaccttgctgtatgagtgttggtagggtttgtttcgtaccctgagtaccactgagtgatataccacaaataccctatattttcccgtattggtgctggtatcactataatgtactcttaaacaaaattcactataccaatgcactctgtaccataactgtacaagtgttgatagtgcaactaacatttaagcatgcatatacacataacatatacatacactcagatattgatatcacacattatatacagttcttaacttctttcccgattcaagtgtgctagccgacttgaacgaaaagtcacgtgctggatggatgccctaatcacatattaaaactgggtaaatcacatgctcgaaaaccctaatctgggaaacccaaactacaactctaggttctgttatactctctatgaatcacactaactcaggaaacagggaaacacccaactacagcactgaaatgcacgagaattgaaaaaaatggaacattcagggaatcctgcaaaaactgcctaaccggttttactggtactggtaaaaccggttacccggtttgcaccagttcaccaaaaaaaatccatttcttgctcaaaaccccaccaaatgcaaccaaaccttctagagtacctaattagggtataaacaacatatttcaaccagtaaatcaaagaaaaacccactgaatcaaaacatgccattagag

SEQ ID NO: 351609 - DNA, 434 bp, Cannabis indica
tgtcagttcttagtaccttaattttgttctcagtctggttttctagtagcctcttccatgtgtcaaaggttcctagagcctcatctttgattttcaataaataaacccagactttcctgctgtaatcatcaataatactcataaagtagtgtgcccacctttggttagaatcctagatggcccccaaaggtcagaatggagataagctaacctttctgtggtggtgtgttctgccttgttgaacttcaatctacaagccttccccaaaaacattcatcacagaattcaagtcgttttgttagcttctccttgaaaaatccttgcctgttcatttcctcaagtcctctctgacttaaatgccccaatctgaggtgacatagccttgcttgactgtgtttggttgagtccaaaacaggtgctgcacaacctgaatt

SEQ ID NO: 351610 - DNA, 556 bp, Cannabis indica
tttaattaagtgatattaaatataatatatgtatttaattttttctaattaggtaatatatatatttttttaatttttttgaaatgagatttgagattttaatctttgaagattttttttgctattgcggttatattttgtgccttctggataaaatctaagtgagatatcgtggtgaattattgtgtatccgcgattaagcagaattgtttcttattttaattcaaagttaaaccaataaagttaaaaatgtggttgaaaatatctataatattttaagtattctaaatttaattaaattaattttttttaatataaaatatctatatataatttttatttttaaatatatataataatattttaaaattaataaagaatattctcttaagtaatagtatattctatactattgagaaaactaaaaaatactattaaactaaaaaatttaattatataccacatattatataaaatatatatatactatttcaataaaaattaattaataatgttcatatatttttttttcaaaaaaaaaaaaagatagaagaaa

SEQ ID NO: 351611 - DNA, 644 bp, Cannabis indica
aaattgtgccacgtgtacactgtgtacacgtggatattccaacctggcagttaacagccaaaaatagatggaaagggctaagtgctaacagaacttaggtttaggaggttttactactaaaattttaaaattagaggttagttgcaagaacctggccacttaagaagattatgccgcaaattaccttaaaaataaaaggaaaaagaaaaaaggtacgaagaagaaaaagactgaagagatagaatgtgaaataaaaaaaaaatacaatgaagagagtgtgtgaatgtttctcaatttttaatcattaattttaattaaaaaaaaaagttgtcacaaaagtgatatgacccttgtcacatgaaaactttaacttttacaaaatttaaaaaataatataatatattttagctgattgtaatacccagtttaaaatagtatttaatttttttgtttggatattgattgtgtgaggataattatcttttatttgtgttgttagtgagttgatattattgcttagagtagttgtaccaattttctaaagaaagttaaagttgtattaactacgaaagtaaaatattatggtattttcataagtacgtaatcgtttaattaaagtctgatatgaaagtccattaggtttt

SEQ ID NO: 351612 - DNA, 794 bp, Cannabis indica
ctccctccgaggacctcctctcggatcatcacctccgcctgggcttcccttttcttggcctcttcctcgaactttgccttagcaagagcctccttccgctcagcctcctcttggaacgcccgcctctcagaagacatgtcctacaggatcttcacgacttcgtctatgcccccaaattcggacaagatgaagccatgattaactatggttttggaaaggcggccggccactgcagcaatctggaaaaggaagcaagagtgagtgaaggccttaagtaaaaataatgagagaagatgtaaatcacaaagtgcttaccgcggccaaggcgtggctaaggtcttgagcctggtagacggagttcaaggatgcacaagcagcgtaccgtttaggcgcgcaccgagtcagttgggcgacgtactcaccggtcatcttggcagcgaaaggggccagggtgggcccgaggaaacagttgaaccagtccgtcaaggggtccaggttcagatcccacggatttcagaagttctcctcgttaagagaattttgcacttccactcacaaaatcctcctcaaggcctctgcctcagtgtgcccctgggtgtactcgtcaagggcataattatacttggcaatccgaagctcttgccttgcctcatctccggggaccggagtcagcacaatgccgtgaggcactgtaaactcctccgcctcgggagggatcccgaagtcatgacttggggccggagtgtccaccctccgtgaccgtttagaagactcctctgctaccatcttgcctt

SEQ ID NO: 351613 - DNA, 532 bp, Cannabis indica
tttatccgaacctttgggcgtgatccacccagaatgccattcacttaagagtaaatgttattttgttttgtacttaacatgttcatccaaccaggtacttttactgatagtatcttcttaagtgttcccagttccaataccttggtactagaatgagttgcattttttcgtcatacttacccagtttgtatgctcctgattctaggacttcgaccacctgatacgacccttcccagtttggtctgagcacacctatcgtactgtctttggtgttcaaaaatactcttcttaggaccatgtctcccacaaagaattttcgtgctctcacttgtttgttaaaataccgagctactttttgttgatgggctatcaatttcaagtttgatgcggttcgtttttcttcaacttcatcaagtgactttgcaaggagtgcatgattaacttcttggtgatatgtcagtcttctgtgggacggcggttcgagttctacgggcagcatggcttcatagccatatgccatggcaaatggagt

SEQ ID NO: 351614 - DNA, 810 bp, Cannabis indica
tatattgatttcacagacctcaacaaggcgtgccctaaagactgttttccacttccaagaatcgatcagcttgtagatgcaacagcagggcacgaaatattaagcttcatggacgcttactcaggctacaataaaattaaaatgcatccaccaaaccaagaacatacaagtttccgaaaagatatgggtctatattgctacaaagtaatgtcgtttggtctaaaaaatgctggagctacgtaccaaagattggtaaacaaaatgtttaaagactagatcgagcgaaatatggaagtgtacgtggatgatatgctcgtcaaatccagaaaggttggggggtaaataggtgacctggacgaatgcttcaaagtcctcagaaaatacaatatgaaactaaatcccttaaagtgttcctttggagtcagcttgggaatgttactaggcttcatcgtcaatgcctgaggaattgaagctaatccagagaagattcaatccctcttggatatgaactcgccaacaaaaaccaaagaagtgcaaagcttaactggtcggatcgccacgctcagcagattcctttcaaaataaacagacaagtgggaaaaagctttccaagagctaaaagcacaacttgcaaaacctcccgtactctcaaaacctccagacggtgaggtactgggaatatacttagctatcacggaacaagctgtgagtgtcgtactaatcagagaagagaacaacgtataacacccagtctattacatcagtaaaagactcattgaggctgagagtcgatatcgattgatagaaaaa

SEQ ID NO: 351615 - DNA, 410 bp, Cannabis indica
cttgtgcgtgcaaaatcgttggactaataccccttatgtctgccatagtccacccgattgcttttttttatactttttttaacacctctagcaaggaaccttcatcttcaactcccaagtttgctgctataataactggcagcgtgtcattctcccccaaataggcatacttcagatggcttggcaagggtttcaactccaacttcggtggttcttagatggagggttttggaggcttgaaattactttccttcagctccaaagattcaaagggcttcttgaatttagggataggttgcaatggccccacccaagcaacttggttgtcttcatcttcactcaagtcttcaagcttatcaaaagaacttataaacttctcatccttccaagcttccctgtgaaatctttca

SEQ ID NO: 351616 - DNA, 1062 bp, Cannabis indica
tttctgaccaatttctgaattttcccttttattggaaccacctgaagaaagatagaattcccgacttgaaatttaatatttctacacttaagatcagcatagctctttcatccattatataagcaatatacaaacttgaatctttaaactgcatcagtatcactttaacagtgctctaataactgttgttacatgaaaactcatttagaaccttccactcagtattcttatcggactgatacaacaatctggtttatatcgtaaaatttccttcaagcaaaatcaaagttctttgccaatctagttccaaacctttcctcgtacttctaaagttcatagtgactctactgggccattttatttctttccaacagattaaactaccacataatattaacaagttctccaatcatgaactcaatccctattctggttacattcccaacaaccgatagtaagatcttttcgctttacaaacttgtcctaaacctcctcggtttaaggacaaattttcttccccaagtggtaataaatcacacagttcaaaattttcaatcaactttaaccgtcaccactgcctcccatctaaattctttcaaaagaaagaaaagtatttgatacttttgtgatccgtatagacttcacattttcaccatatagaaaatccacatagaaaaacggtgccaaactttcaatgtaaaacgattactgccaatccaatatcatgacttaaataccacttctcatattccttcagtagcctcgatagttacgcaataactctcctaaactgtgtcaccatacaatctattccttgtttagaagtatcaccttgaatcacattttctcctcactggctaacaatgttatcattggtacaatagttaacctttattttcaattctttcgatctaatcactaaggttgttaacaacccccaaccaacctgttaattacagaaaacttactaacctttacttgtaaatttaggtatcagcgaaatttgcatttctcatatttagcgtaaaacttaatgcttctagagacgttacaacatcatcc

SEQ ID NO: 351617 - DNA, 823 bp, Cannabis indica
cacgcgaagggctcattcagctgggtatcgtcaaccgaatctgtcccactcccttccgcctcctcttcgtcctcacctgactcgcgaattggggtcatccattcatcatccatctcctccacctcgacggcaggagcatgcctcgagtgtataaggtagtcgcgggccgacaccgtggactcgctgtctcgaatgtcgatggtcccaggttcggcgagttcctgcaccatcctttcgatgtctgcagaagacatcgggcctagctctattggagcggcctcctcttcagaaagcgaggttgggagaaagctgtcctcctcctggtcaacttcaccgtcgaatgcacggcctccagagccgagttgttggctatccgacaaatcgctcatctgaaagatagaagatcttttcagcgtgatggatgtgtgaaaagcaaaataagtgatctcacccgcattaaactataaagtcgcactcgatagaataatcagcatccttgcgaatactgaccgccccatcaatatgcgagcagagataacactaaaaacgcgagtaattcacgcatcctgggccaagcgatatacctccagaaacggctgggagaatcccagtgactcaaggggcatgcgttttcaagcatgaccctgaagttactgggatactcccaccgttccgagactacctatcagccaaggagtacgatcatttgagtatcatcgcatattgcaaatggctgggtgtatctcagtatctcaaggggcatataatcgcatatatgaccattagaatactgagacacacccaccatttggaacagcgattg

SEQ ID NO: 351618 - DNA, 572 bp, Cannabis indica
gtataaactcaagtaagcttcttctcaatgattacacaatttttattaagtattctcatttggtttttgagataacagcttttgataattgtgtatatatcacatgttcagtgggagtaagaatatgatcctggtattatatattggtgaaaaattgcttgccactaatgatatacctattttgtattagagatatgttgagattgttcttgggatattcttgaattttcccaaaagagatatatcaataaagtattaaaaaaattagcttgaaagatactataccagttcgaaataggcatgcgaagatcacatttgcgtgtaatttccatgctatacacccgtgattgatctatgtcatttaattatattgatatacatgactattgatgggtttagctacgttaaatgttacgaaagccgctttgatcctatgttagtataatcaatggacaagattattttgatatacctattgttaacgcagattttcgttaactaaatttgaacctcacagtaataatttcacacagaaaaagaaaagctgtaaaaaataaaagcatgaacacagg

SEQ ID NO: 351619 - DNA, 1152 bp, Cannabis indica
tagtgatggcctcaaagaaaagatgatgaaaactctttccttcattaaaattttgagccaccttcactctccctatttgaaaccttctctctctttctctcttcaaaagcgacaccctaaagtgaaaagagtgagtgctcacacacatcaagtggtactcaatcatagtgtgtaaggctgtgaagaatccaatttcaagagaaggagattcagactcagatcttagagatactatgctatagaaaggatacaagggttagagatctgtgttaaggagacattaaattccgcagcaaccactgtaaggttcctgaaactttatatgtgtttatttcatatcattttagaagttcatgtttaggatgttaaaaacatacttgttagtaaatctagatcctagtaaaataattccaatagtcagatcacgaacaagaataacttactaattaccgcttatttggaaatttaaaacatgctcttattcagctatcaggctactaacatgcttcctatcaggctttccttaaatcatactatttagataaactactaaagtattaaaatcttgctgaactatgagatgagctgatcactgatgacgattgtacatgttgtgacgatcttcggaagacaacccgacggatcttataccaaattgtaataccctactagtttaggtatgttaacataatttttaactagctgtgcagctcgttgctaatcaacgagtttattgaaaatcgtgattaattataattttgcttaattaattgtaaatattaaaatataatatttataataaatcgggatgccgttttacaaaatatttacaaaagtttcactatgcatatacaaaagtttgtcgcctagcgactatagaaaataagccctgatgtcctaaagatcgtacgctcgaagcctaaccgcctcaacatgtacaatctccatctgctcgcactcacggctgttaaccctaactgtgagtcaacaaattcagtaagaaaaggataaataatatcataaaaataacccagattataatctggtgcccatacaccaaaccataaccctaactgagtgaggaacgttctcgacaaagtatgactaactgcgaatcaagcctatactcagtactctagtcggactgatgtg

SEQ ID NO: 351620 - DNA, 750 bp, Cannabis indica
ggaaccccatgattcttaacacatattatatatgattacattaattctttctagcatttttttggtttggtaggtatatattatttttagtcacaaaaaaatttaatgattaaaattgaaaaagttgtaatcaattataaattattatttttatattgtgattaaaagtctctgactaataaagggattagttataaaaattaataaatttttgatgactaaatgtgttcttaattggtgataacttatatataaataatatattttagtgataagtaactttttgtagtgataaaaagtcacatttaattacaaaaaaaaattatgttgtgattaaaatatattgtcactaaagctaactttttgtagtgataataatattgaataattaataaaaaaaaaaatgacttaatcgaccatttaagaaaaatgatatggtagttaatcctcccaagatactaacttaactatattatgttaattagttcccttgttttaaagaatgtagaaatgtcgtagacaacgtacaatagtggaagtgtataataagatttataagattttatctcaaaattaattgacaattaaagaaataattcatatattttatatataatattatttttttcatatattaaacaatgtaggagtctttaacatatctactaagtcactacatataatgtaatatggtttcattttttttttttttggacaaagtaattaaaatcactcatcaatttacgacgc

SEQ ID NO: 351621 - DNA, 538 bp, Cannabis indica
tttttttatttttttttctatatgttctcatttcttaattgatagaaaaaaatttaataacaaacaatttctagttaatttttaaagttttttttttttttagaattgctaaaaggtactatcgctacttaatattttctcagtgtcttaatcgtaaagtaccaccaattaaagatgttggtgttggacaccccagtagtgttcaatagcaatatatatatatactagatgagagttacgtggcgagccacgtaaatattagttttatataagttctagtggtttttgtttaagaattcagtaactaagcaacgacaacaacaatggtagatagatctatttaagtttttcatatttgtaaagattataaatctaaacttttaattttcttgatttgagattttgaattgttctgatttatttgtttatgaatttattgaaatacttgaatatttatttgttctgatttattcatacttgaatatttatattgatgattgttaatgaaattagtttgtagctttatgtttctagaaaa

SEQ ID NO: 351622 - DNA, 1595 bp, Cannabis indica
aagctaactattgataattacataaatattatgtcagtttttctgacgtattataaaaacaaataattttttaatcttgtcatttacttcatattaattttgttttataattactaagccgcgtttcgcgcggtgtttccaaatttttgtaaattatacatatatatatattatatttattgagtgatataatctaaaatattacattttgatgtgtgtattataaacaaagtaataatattaaaactaaaaacataattttaaaatacatagaaagataacaattttgtgacaaatattaaatggtagaattaacaaagaaattgcatgtgtttttataataaaataaagaaaaaagataacagcttttgaatttaataaactgagcttgtgactgatgatgttgttgtttttaaaatattgtttagaccttttttttttaatagaaagaaacaatgtaacatacaatttatgaaagtttttacattttattttgtggtataggtggaacgttttctccacaaaagtaaatgtaggatgtcaactgtaaagtaattcttcataacattacttggttttaagaactgaaaaaatgaggatttcataaaaatattagtgatagaaatttttatctatgaaatgtataataagaagattaattttaataaattatgtgaaatatgactaattatttctataatgaaatgtgtatttgtcttaatattttgtggtaattaaaatgataagtactgtataaatttggttgagcgctcgcacgctcattataatcattgaaaaataaaatttaatttatgattatttgattatttcagaaattcatatattaagtagttgttaattgttaatatatttactaaataagcaaaatattataaatcatgtgtttgttattttctttttatttctaaataaaaattgaaataattttttattattttatatgtataataataataataataataataataataataataataatatacattcaactaaaattaatattttaaaataaaaaaaaaatctatttttttcatttgttaaagaacttaaaggattttttttaatttttaatatttgacaaattttgaaaaatgtaaaagtgtatgtttctttcattttaaaaaaattataagggtgactaagaaattatttttaattactttaaataattttaaatatattttaaaaaattacgataaaaaactcttaagaaaaaactttttatatgaaatacttgacaaagattaaaaaatattaagtatgtgttacgcatttatttataaaaattacaactaattgtgcatgattaagttcttcaatcacctatataaaaataaataaataaataaatgatactaactttgagataaattaaagtgaaaaaatagtgacctatacataacctagatctatatcaccacaatgatttctaaaccatgttggactttttaaaaataactctcatattctaaagatataaagaaaatgtataaaaaaaaaatgtgaaaaaaaaaagagaaaaaaatacaaaaatacaaaaaaaaaaaaacaaaaaaaaaaaaaacgaa

SEQ ID NO: 351623 - DNA, 859 bp, Cannabis indica
tggatgaagctaaagccattggaaattattctcaaaacaacaactttgggttcaaccaaggaggcaaccgaagaaatagtgggttctatcaacagagaaatcagaaccaacaatataatcaacaacaaagctctagtggaaattctggtttgcagacagacttattgttacaattcatgacagaaactagatcttccattaaagatttgcagactcaaataaggcaactagcaactcaggcagcaacccgtctttagggaaatttgcctagtacaactgaagctaatcctaaagaaaactgcaaggcaattactctgaggagcggtaagaaatatgatgggtccgagatgatacaaccagtggatgaagagattaaagatcaatcagcaccaactccaacatcaacagaaaagaaggctactgatagtcttgcaccagaacaacagtctccaccagtcagcatagatcatcatgtgaagataccttatcctcagagactctgaaagaccaatctagacaagcagttctcaaaatttctagaggtctttaaaagactacacatcaacattccttttgctgaagctttagaacagatgcccaattatgtgaagttcatgaaggagattttgtccaaaaagagaaaaatggaggactatgagacagtggcattaactgaggagtgtagcgccattctgcaaaagaaactccctcccaaactcagagatccagcgagtttcactattccttgtaccattgggagaattgaaggaataaatgcactatgtgacttgggagccagcattaatctaatgcctttgtctgtcttcaaaaggctaggattgggaaaagcaaagcccac

SEQ ID NO: 351624 - DNA, 775 bp, Cannabis indica
gacaaaggtgtaataccttgttcaagccatggtgatccccactaatctacactcaaggttgtgagtgagtgatcttctttttcttcttcatattatatatatgtatgtgttatataatattgtgtaatctatcttctcttctacctttcatatatatatatatataatatctatatattgtatattatgtattgtaacatttatttaatctctttgttgatccttgtattatattgcaatagtgttgtaatgtcttgattttcttccattgttataaaatctctaacaatcaaaaattctctatatattatagatgcgcggtcaaagttttccttcttacttttttaagttttcacatgacaatgtctctctccagtatattcactttctatattatatcacatatgcacatgtaatatgttactgtttttgtagatatttctatcaatcaaatattatttatgatattaatggttatataatcttatgatatctttatattttattttattttaaaatttaaatttaatatttttgtttagttgtgactagctaaataacaatatatagtatgccatagattgatagtttttttttttttaaaaaagataactatgttattataaattaatgagggtaatcatttacaataacaaaatatatcgaaagaagaaaattctccaaccaagagatagtctcgtccactcctagagcatattttgctaaacaatcagcaactgcattcgcagtatgcttaacatgagtaacaactatg

SEQ ID NO: 351625 - DNA, 707 bp, Cannabis indica
ctttattgttataaagtcgtgcctttttgtttaaaaatgttggggcaacgtatcaacgactagtgaatgggatgttcaaaaaacaaattgggcaaaatacggaagtctatgtcgatgatatgctggtaaatttgataaaaaatgaagaccacatgagagacctcgaagaatgccttgggatacctagaaaatacaatatgaagcttaatctgaagaaatgctctttcgaggtctcctcaggaaaatttcttggtttcatagtaaatgcgagaggaattgcagccaactcagaaaaaaaatcaaggccctaatcgagatgccttcaccaacgaagtcgaaggaggtttaggccttaacaggaagaatggcagcattaaacagattcatttcaaagtcaacagatataaatgtctaccattctttaatgttttacgaggcaataagatgtttgaatagacagaagaatgcgaggaagcttttaagggtataaactaagaaacatttatcgacacctctaattttggctaataattggtgaaactttatacttttatttagttgtctcagagaatgcaatcagtgcaaccttggtgtgagaagagggaaggcaccaacaacttgtttactattatagtaaaaagttactaggggcagactcaagatatcccctcctaaaaaaacttgccttatgcctgattcatgcatct

SEQ ID NO: 351626 - DNA, 903 bp, Cannabis indica
attaaagctcgaatgctagcttctcaaagtaggcagaaaatttacgcggaccctaaacgacgagatgttacattccaacctggagaccatgtctttctacgagtgtccccaatgaaaggaatcaagcactttggaaagaaaggaaagttaagtcctggatttattggaccttttgaaatactagaaaaggttgggcaagttgcctatcagttggccttacctccatcgttgtcattgcataatgtatttcatattttcatgttgaggaagtatgtgtctgatccaatgcatatcctaagctttgaagaactggagttacaaccggacgtatcttatgaagagcaaccagtgcaaattctagataggaaagaaaaggcccttcgaagtaaaaccatagctttggttaaggtgctctggaggaataacaaagtggaggaagccacttgggaattagagtctgatatgaggactcaacatccagagttgttcaggttagatttcggggacgaaatcctattaacgaggggataattgtaaagaccgcctaagattaatattttgggttattaaataattagggtttatgcatgagatttaattaatatttataaatgcatattgtggaaatatatttaagttcatatatatatctattatgctattttatgtaaattactcaatttctgtgtttgtgttcggaagctgtgggaagcgacattgggcctttagagagtcatattttatatgttttcttttagaatattattatcgaggtatcattgttgagtattggtggtgttggaatttttggggtttgttaatgactaggttacccttgagaatttataatttttatgtttgtgaggaaggacaaaagagtctttgggcaagactttatttgtc

SEQ ID NO: 351627 - DNA, 485 bp, Cannabis indica
ataaataaaaaatttggacatccacataattattgatatttataacaatatttttgaaaccacaaaaagatatatttgaaatcttcctaaacagattattcatctatatatatattatatatttattttgggatatatattaatctcttgtatattcagcaatgttttatgaaaaaaagaagatttaggcctaattttttttttatatatatattttttaaaaaaattataataagatgtaaaataatggtgtgcatgtatggacattgaccgatttatgttatagttagagggagccatgaccccaaaaaaattaacaaatatatatttatagacgtatgaaattaagagtaattcattttcaaaaaaagaaaagaaacaagaaactaacgtttggttggaggtaatgaaatggaattgaatggaaaggaaataattttcatttcattcatttgtttggttgcattttaaagtattggaatggc

SEQ ID NO: 351628 - DNA, 1120 bp, Cannabis indica
ctagttgggcctgtacggctgggatgacctgctcggcattctggtcaatttgaattacgtctgcgtctttctgagcggggatttgagtagtggctccgggctgcacgattgtcgtaacattctgatcgtctgctcccctccttctatttagatcattccttaggtcacgggttgtccctaacctttcgaacacagaagcgcctggctgccttagcggttgattcgcttagttgatgggtggaatggcaccattcatctggttggaaccatcaggtatgactcctcctgatgaattaccagacaaggtctgctcgcctaccgctgggcccatgagtggaactcgtgaccagggattgggcggctgaccatttgtagtctgggaagtattcattgttggatcctcgtccgtctctcctaggggaatgacattcggcgattgccgacctatagtttggtaggctcttcttatcagcacggtagcttgccgactacgatcttcgatctctgcatggtgagcccttaatgcctccatctctctagctctccattcagggaacatgtgcctttgttcgtcgaatgcgagatttactgcagcacgtagttcgccttgatcatgatgtagggtattattatgaccctgcatgagtccaagcgcatcacggagattttgtaattcagtggcatctccaatatcgtctaggcgttggttccagacggaacagttgtgttatgaatgccctggttgggtgcggaactgttattccaagtctcttgcacaccaggtgcaatttcacctataggaacggtttcaccattccccacgttcgccggctgtccaggattaacagcaggctgaaccctcgtgtttcctgggttctgcgatgcaggatccagcgtctgtgaatttgctggatcagtctggcctctacgagtttgcaccattgtattggcaattggatgttgaataaagagcgattcgtgatccttctctcaatgaaagcaccaaaatgttgacatcgcttttagccaacgacaacgagtctatttgataagcgataaatgatttataataacaaatatatgataaagcaataaagagacacatgaattttacagaggt

SEQ ID NO: 351629 - DNA, 726 bp, Cannabis indica
taatttagtagtaattagtccaattccctgtggttcgacctcacctgtgtgagtgtactacttgattgcgtatacttgcgtagtaattaataattttagcaacaatactctttcaaaaactcacttatggcacgtttactatacagtaatcagaatcggaataaattaatggagaaatgtaacggaataaatgaaaataatcggaatcaatatttgtaatatgttgtttactaaacttttttagaaatggaatagttgtgatttatcttgtttactttattaggaaacgtaatcgtaatgcttaaattgactaaattgcccttttgagttaaactatattatatggtagttattttgcaagacatattttaaaggacaaaattgtcattatatatttaatattaaaaataaaataaaaataataaaaatccattacccttaatggcattccttataaaattagtgggggaagttctccatttcttttctcccttatttaatcaacttctccttttcctaattttaataatgcaagtaaacaaatgtaagggaatgattaccttactattgattcccattacttattagtaaacatgtcattatttcttttctacttataagtgaatttttagggtttttcattgtgttaatgaaggaaatgggcctctaattagtttaaagggttctttgtattattaacttaaaaacttttaaagagcaagaatg

SEQ ID NO: 351630 - DNA, 597 bp, Cannabis indica
attagttttggcatttaaatggttagaattggaaaattggcatttttaggaaaatagaaataaaattgtggaaagtgcaaaatccaagtgaggcccaattacaccatggccggccacttgtatgtacattttccaattattattttcaattttttaatgccaaataattactaacctaaacctagcagctatttataaatggaaagtgatggctcacaccaaataaggcatttaagtaattgttcagtaattcagggaactgcctcattcagaaagttgagctcttcccttttctctctatatatagccgcccatctcttcttcttaaaacaacaacacacaagagagatacaatttcgaaatcttagtgagagagtagtgcccacacacaacaaacagtacctcaatcatagattggaagactgtgaaggatcatatccaagagaaggacattcggactcagatcttgattatactctgcaacagaaaagaatcaagagttagagatctgagtggaatgagacatattattccgctgcacccaatgtaaggtttctcatactttttatgtgtttacttattatcattttagaagtt

SEQ ID NO: 351631 - DNA, 641 bp, Cannabis indica
atactttgacaacattcaaaccacgatgttacaaaatggcgtaacaaggcaagaaattaagccctactttccaaatagaattttttactttgggcggcgctggaattaaccacatgaacttccactaacgagattgacctgaggaagtcgacacttgaccccaccctagggatgtaaatggggcggggcgggtgcggggattactcccccacccccatagccactttttaaattcaccccataccccttccaatacccgtttaaattaaagcgggggcgggcggggattacccgacgggagaaggattcccatcgggtacccattacatatatatttttgaaaaagaaaataatgtttcaaagagaattaaaaaaaataatcataaaaacttagtaaaacaataaacttaagtggaatagtagtgtacagtaaaaaaaaaaagaagagtataatcaataaaaaatctaaaagcatgaagttattttaattgtagtagttatgtaattttaaaacttaaatatatacatatatcatatcggggcgggtatctattccccccgcccccgccccgtttccgactcgggtatgaatcttaaaccactaccgcccccgcccctcgaaagtcaaccccgtaccacga

SEQ ID NO: 351632 - DNA, 493 bp, Cannabis indica
gttactttcaaaagcaaaataaaagcttaaaattaaactatcaggtgactttttcaaaatataaggggtttttatttaaaaaatacaatcataactcaacatactcatgtgaaggtaccagattactttaaaaagcaaaataaaagcttaaaattaaaataccttgtcattttttccaaataacatgttaattaagtcaaggatataatcaaaatatatgtatgagtgtcaatagtggaaataacaatagaatttaaaattacaattggttgaaaaaatcaatcaataaattacctttctctatttttcaatcaaatcaaataaatatttattaatttgcttagaacatgaagatgaggaagaagaatgtacaacaacaccaaagaaaattagaggagaatgataatcgtaccaaagaaatttgacgagaatgccaatcgcaccaaaagaaattagaggagaagtgagaaaacaagaagaagagagaaaattg

SEQ ID NO: 351633 - DNA, 1410 bp, Cannabis indica
gtctcgatagtctcctcaaaatggtcagctacctcgagatccttagtcagctcagttatcttcttctgggcgagaaacagcttcttgttggcttcacccaattccaaccgaacagctccgagttccgccctggcatcttcagcatccttcctggccaagtccgcctctgccctcatggtgtcggacaaagccgtgttcctagaagcggcagactcagcccgggagtgagtgtaggccaacttcagaccggcctgcagaaaggaaaatttttagcatttgagctaagtacggaagattaacgggaagtatcaagaaagacttacactggtgaaccccttcaaaactccgcccaccaccaattccaaagaagagttagtgtcagcaccagccagttgctcactgacctcaggaaccagtcggtccatgtaatgggccagcatctccttgcctttattggcctctggaagcaccatcaaaggtggagtaggtgcctgcacccgttcaggttcactcctgaccagctcagacccaacctttggtggtccagacctgtccaagcttcctccccgagactccttggacttagcatcttttggggtagaggggtttgcagcagttagctcctcaaaaagatcaatgacctcctcttttccttagaagaggacccctgaccgcctttagacttcttggctggaggagaggcgatagagcttttccccattctcttctttagagcctcaaacatctgccgagacatgtctgtacagaacgaaaaacacaacatggttataaaaaaatagacatctgaaacataaggcataaaagtcaagaagctcaaaaacaagacaaagtagtatgcaaggtgagtgcccaaacaaggttcgaaagttcatcatcacctgacatcgatcttatttcagacataacagctttccctttaccgaacatgggaggggacggtcgagcaggtgaaattggctcccttatacgaatggcatggtcaataggcctgggcggggccgaaagtttcttcttcctcttcagtgacgtcacctgctcttcctcagtctcatcttcaggattcaagggctcctgagcatactacttggcccttgcacctcccttcaacttagcctcgtgcttcagttgaataaactcattctctgaatgagctcgttcgggccatccagcaccagacatcctctgcttcctcgtcacggacttaggaataaagtccttgggatagagcccgtacttcaaaaagttatcgttggaggtcaactggataatattccggtcttccaccaatagtcgtgcaagtttttgagctctatccctaagaggaagagtgaggggaggacggtgatatgtcagaatctgctagaatcgagtgtgagtgatgcccgtgcc

SEQ ID NO: 351634 - DNA, 645 bp, Cannabis indica
ataatttgatattgtaaagtgtaatttttataattattttgaacttaggtgccgtttggtaactttttgttttctaattttttaatcacaaaatgaaagtaaaatttttgtttttgaaaaataaaaatgtgttctataaccacttttatttttcaattttaaaaacagaaaacaaaagtgtattctgtaaaggtcattttattttcatttttttattttatttaagtcgggtctaggcctagggtcagattcgggttcgggtcagaggtcgggttcagcgccagggccgtggggggatttaagtctgagtctggtcgaagtctaaaatattgattaagaaaaaaaaaactgtttaataaaatattgaaagtgactattttttgtttttaaaattttaattcctaattaaaaaactgaaaagtaaaaataaatttataaaacatgtttttgaaaaatattttcacttttctaattttaaaaacaaaaaattaattaaaaaagtgttaccaaacgccaccttaataaatatgaggcggtgacatgacactctaaaatttttctaattagccttatttattccctccttaattctctcatatttttagtttttagtagcttcttaaataataattaatataaaatata

SEQ ID NO: 351635 - DNA, 576 bp, Cannabis indica
aaacattaacatcttactttttgggttattaaatatctagttgaaaccttcaattgcccaagtcccttcatacagtacaaccacaaacaaagttgaatctgcaaaaaaaaatgacaaaaaagttaattcagataaataatgtgtcgcaaaatatcgcaaaaacattgcaaattatcgtggatattatcgacaactatatcgcgacacatctcttcttgtcgataaatgtcatttgggactggtccaaacactatgtctaaatatatcgacaaatatcgaaaacaatatcgacaaaattgaaaaaattgttaacatgccacaaaactgtagtatgtcgcaacatacatcgcgacacatcgctacaaatcacaaaacttcatccctaacctcacacccactcttttatcgctaaatgtcgccaataatatcgtaaaatatcgctaaaatcacaaaaaaaaccaggaaaacgcaaaatcgttgcatttcgtgtttccttgacaaaaatagtacataaaaacaaagatatgtgtggatatattcaaatcaatataagtacaactaaatcaaacaataatt

SEQ ID NO: 351636 - DNA, 658 bp, Cannabis indica
tttagatggggtttgatacctcctggaggtgctttgctatagctttgccctctgggagtgcgtgggcccctcacgttttctccgggaggtatgtttcttactgatcttcttgacttaagaagacttagtcaaattatcttaaaaccatatccctcaaatccacgtgtcatagttgcattggtccacgtactttggacaaaattaagggcaacatttaccccccaagccttgtttggcgggaagtaaacgaggcttgtttaggtgcctccgcttgtcttattaactacttggcacgtgctttgggcgcgtggggtgcatttatgaccatcatcattgcaatttttactttttgcaggcaacagttcgtttcctatccattaatgatctggcgcatttaatggttgtcagtcgagtactcaagcatttccaaccgccttgatgaacgcttgtcctagccattagatctggagaatgcgaatcgattgctattctcaccgtacgatgatgcctgatcacagctgcttcacacctgttctagcctataaaagccagccttctcatttcatttggttactttcactaatttgccaaattttctcagatctttcacagagagaaaaaattctagacaccatagatcatttgatactcttccttc

SEQ ID NO: 351637 - DNA, 681 bp, Cannabis indica
cccctgctatagcctgatgcaggaggggtaggagccccgccaaccactggagtcctagcagactcagtcatacacccaactgcgccctcagctcgcagtgccttttccaccatttcagcataggtggttttgtcgtctgtagtaatcatcaggtcatgtcgaatcttcgcactcagcccatccaagtatttttcctttttactgaaatcagttggcacaattcccgaggccaacctcgccaaccggtcaaactgcgtagtgtactcagtaacgctcatattttctttctgggtcaggtgggtgaacgcttttctcttggcacttctgacggcctcattgtagtacttggcattgaaaagttcttggaacctttcccaggtcatcgttgtgacatcgtgtatcatggacaccatgtcccaccagaccaatgcatcttcttgaaactgaaaagtggcacagaccactctatcattcccggtgacgcccatgaaattcaatatcttggtgcctgcttgcgaaacctttcatacagaggttccatccgattcatcgctatcactggttcggtgtagacaacaggggcaagtgccactgtaatttctggtacgggcactgcaggagcaccctgctgtcttaatcgatggatttcattatctttttcctcaattctggctcgcattt

SEQ ID NO: 351638 - DNA, 508 bp, Cannabis indica
  modified_base (77)..(77): a, c, t, g, unknown or other
gttataatcataagtatattaaaattatgttgtactaaaattttttgttttatgttattattttttttttaaaaaanataaatttatatgcatttgataattttatttttttcctaaaaaaacgctttattttgtgacgtgtagaaaaacataataaacactattcatgagatttgttaacataaaattatgaaactaaaaaatatttaataaatataaagtattttttaaagattagtgttaattacaacctcctagttaatttttgtgcctgaagtcatttaatagaatattgttttttttttagttttttcatagaagtatttattatagttaaaatatcatacctatgaatttttaaaaaattcagaatagcttacagcactgaaaacagagttcgtaatgttccatattatcatgcgtgttcaaaaaacatcaaacctatttttgacactataaattattcgaattttttttttaaaaatatttataggaatgatgttgtaac

SEQ ID NO: 351639 - DNA, 615 bp, Cannabis indica
tagtttcttcatcaagaaagaaaccagtttcttggtgactttttcggtgatttttccggcgataatgccaatttcgatgactttttcagtgccggcagtaactccgacaatttttccagcgccaaaagaaaactctggtgcctttttcagcaccggtgacaacttcggcaatcactgtaaaaaaatatgaagggaattttaatatctttaatggtaattcaatcgaaagtttttatttttaacaccatatttttttcctattaagttttcttaccatatttatctaaactagctttatttttggaaaacttacaaaaatactaacttttggctcaatctttacaaaaatactgccacacggcagaaataacttttatactgtcttggcttatttgttttttctcttatactgtaaacaccaaaaaaaaaatgaggcctctattttccacacccacggacagaaccaccacaataacactaaaataatcagaaaacaactattaattttggtgagattgagaaaaaactgtgaaatcgacgttaaataaataatcatagcaaaacaactataaaacaacactaaaacaaatcaaacaaaaagaaaggaaaaaatga

SEQ ID NO: 351640 - DNA, 579 bp, Cannabis indica
aataaagaagaaaaataactataaaatgtgacccaaaacttaggctaaaaatagcctaacagtagacccaggtaaaagttgttgtcagaagcttcatccataccaagaagtgagcatatctggtgtcgaacaacatgttggacatttgggctgaagaaaatggaagactttgtgagattaacctgttgaccggaagcagtttcaaatcgacgaagaagagtcgtgacactgtgtgctgcacctgaattatcttggcaaaagaggtagctgtcatcagcaaacagcatatgagagatggtgggagcaccgttagcaacacggcagccttgtaacaatctgtcactttcgaacttgggaatgagagccgagaaaccttcaacacaaatgatgaacaagtaagtggataggggatcgccttgtcgaataccacgagtgggaaggatgggtcccatgacatggccaccatgaataatagaatagcgagcactagtcacacaagacattatcagattaacccatcgaaggctgaatcccatttgaagcataaccgcccgtaaataaccccattctactcgatca

SEQ ID NO: 351641 - DNA, 684 bp, Cannabis indica
ctaaaatataatataaatccattttttctaaggaaaatctcaaggagcgcgcgcatatatgtatgttcaagggggaaaaaaactaacaataaaacaaaagtgtgtacatacaaaacccaaaataaaaaattaatttggtaattatttgagatataatgtgaggttttagttatattaattattgtgaaactttgttgctctctcaagtacagtgtagattgtggagatagtgctatttggaatagggatctttcttctgttgttagtggtgaccttattatagacttgttaattctattgtaagtttccttattttgttgaaagcatgtaattcataataatataggattatttaatcaagtttccattcgtaatttcatcaaatatatttaggggttttttagttttaactaaaaaagattacaatattgtaaaatacttctaggccaccaaataaataaatatacagtctaaataaaaaaattacacaaatactacttacacacaccttcaactcacgattcatgcttttcgggattgaaaccttcgggtaaccacccagcaacccaacgcaactgaaacgaaattcaaccagaaagaaaaccaccattaattccgttaacttcacctgataagacgatcggaatcaatcaaaatagggattgttttgaattcatgaaaaaa

SEQ ID NO: 351642 - DNA, 664 bp, Cannabis indica
ttcatagagttgacataaaatattattttaatttgattggactgcttgtgattgacaatacttgttgtatataagtatagtgaacaaaagactttgaaggaaaatatttaaaggcagcacgaaatatgctccccaattttaataactttctaacgttttcaaaaaattcggtttcccccctaaattcattttcagaagcctatatttatacagaaaactgacttcccttcttccaaaaatactactacacactatttccaccattaggacgagggaaacactccttttgaagcctcactaaaaccataatttggtttgttaaaaaaaaaacacatggtagctggttctggagaggactcctacgggttcgagagggatttcccgtcatggaaaaattcgtttgagggacacccccattgctattgtggtgatctagcttatgtttggacttctagtagtggagcaaatcctggtcgtcgcttctttggatgtccgcactatgtaagactttgaaccgcttaataatattttaaactaggctttgtaaatatgctaatgtacttatttcaacttcaggagaacaacgaaagtcgaggatgtgattacttttgttggatcgatcaatctcatcctaaaaaacctacagacactactcccggattgc

SEQ ID NO: 351643 - DNA, 603 bp, Cannabis indica
tactcaatttattgctatctaaccagatgtgtttttctgatcttgtgtgagctaaacttttcttttctatattagggaagttgtacttactgcttacgattatgtaggtacagaaattgaaattcctgggctgattgaagtttcattttagggaattttctagtggactgtggtcttgtttagaccgtatgtaagctgccaataaggtgcatattgattataaatacaccttatagcagctaagactagtatctcttttgtatctttgtatttcactcacatctttagaaaagagagtctttgttttgtagagaagagcttgtttgactctaactctttttatttatattttgtattgtcttgagtctgtattcaagtctacaaaaaagaagaacaacagtgctaccttcgggagaaggttttacaaagctttcgggagattgattttcaagtcttgcatcaggaggaagcaagcactcttcaaggaaatcgaagggagttcgagcacttgaagtttcaacaaggttcggttagaaggtggaatacatcaagcttgcggtatataataagagggagtccatttatgcataagtcaattacttt

SEQ ID NO: 351644 - DNA, 874 bp, Cannabis indica
aataaaaacagtaaaggaaaaagtgtgaacacaaaagagtttttacgtagttttgtagttaaaattctgcatagtccacgagtcaatctcattagatttctaatggtattttcaagacatttttttcttatcaattttttgtccccctttagtatgacatgcctctatttatcattacatagtcaggcagttaattacaaagttaactgtgatctttacaacgttttcccctaaaatcgtggggtttgattacatatcacgtattataaatgcggttattatttgaataaaacacagttgtgattaatccacttttactgggtcaaaatgatcgtgtattaaacacgttttaagtcataacactctgggatgtctcaacaggaactcagtaccaatgaccttgatacgagctagagctttttcgatatctttctgaggttgatgatgtatgcctcgttgcctcttcgcttgaaggcataatgcttcattttgacaatcgtagttcttaataacaaagagtactttagcagttatcattcgaatgtcagcttctgctcgagtgaactgatttgccaagactaataacctcactaaaagatatctgaagctgattgacgaaagtatcaggagtatgccttcctatagcgagataagtgcctcactattagttgtttgggttctcccgactgttatacttagtttctatattatatgctaagtgttttcacagtcattatgcatcgcttacatcttcccaggcgcaatgaagtttatgtctcgccttgtgcattcaatgtcgtatggtttctcattaatacgtgaggcaacaatttgtatatctttatctcgcataggaccttatagtcaacaagtt

SEQ ID NO: 351645 - DNA, 881 bp, Cannabis indica
aggtggaacatttgaagaccaaactttagtccaaaaccgcttgctattatgaaaagaggaacccgaagcaatactatgattggtcaaggcaaggtgataagcactcttaacactcaaaattcctgaagattcctgaccccagatgagattgttagatccacttgcaccagagattggaacattaaggatattggttaccgtggaggagtcaaaatgttgattaagtctatctaaatcccagccacccgaaggagaaagaaaataaaaaagagttgagtcaggaggaggaggggaggcataaaacttataacgaagcccaggaatccaatgatcctgaatcgtatgaatatttgagccatcaccaactttccaaattaaccctctcttcattagatcacacccccaaaggagactacgccaggaataagaaggattaaagccaggacctgcctcaaggactgaagaattaggaaaatacctagcttttagagtttgactaagcaaagagtgaggacacgtaaggaccctccatgcatgcttggcttgattaaaatgaattaaagatcgaaaacccaaccccccaacaaactttgattgacaaatagttccccaatttttccaatgaagtttcaaattatcccccgacgaaccccaccagaattttgcaatgagggactcaatttccttacaaagtttagtcggcaatctaaaacaggacctagcataagtaggaatggcttggagaacagctttaataagtgtttcctttcctgcccttgaaaaccatttgtgatgccaggaatgaataatgttggaaactcgatctttaaggaaaacaaaagcaggatacttagacctagacaaacactgaggcaaaccta

SEQ ID NO: 351646 - DNA, 591 bp, Cannabis indica
gagccatattttccttgaatcgtttgtttctttgggaggatcgtcagtcaagtgatcatctttgtcaatactcctcaaatacagtcgaatcgtcttactccattccaaataattcgaaccaatcaacttatggtccgtgattttagacatcacgggaaccacatcagaaacaacgactgattttgaatctaattttatctctgacataatctcaaaagaaaaaacaattgacagagaaaatgaacaaaaagaacaccaaagatgaacacccaaacacgaagaaggcaaaaacaaataccaaattacacccttaaacagatgcgagtgggcttagaagaacagattaaagaaccggcaaaagaacaccgtcgaagatgccgtcacacccgcctccacgcgtcggcgcatgggaaaacgcgcaaaaccttcaggcggcacgtgagccccacgcgcgaggaatccagcgaccgaacttcggggttttgtagatcggtggctgggcaacactcctgaatggccggtgagaataaattcgcactccaaataaaattttcaaaaaaaaaaaagaaccctaaactcaaaccctaatct

SEQ ID NO: 351647 - DNA, 685 bp, Cannabis indica
tttgtcatggtttcatgcgatttcaccttccataatgtttgctttctgaactgcataatgcatgtctttcatcttgcttattctaagcttcatgaaattttttgccctaactcgagaaaatttcaaacttcctcagttttgacttttcgttgaacattcttattctttaatctgttgagtactcctggtcggcatatttgcttattttaacgttcgatattccgaccaaatacttatcttgtgtgttgtcttttgtagatgaactcaggtgagttttgggagagcgaacatcgaatcgacaaggacttgcttcaactcttgcacgaggaccatcctcgtctctgttctagcgcaccttcttccggtgaaagacattctcccttaaatctttcatccagccatagaatgacggctcgtaccaaaaagacaatgcgtatggctgacgcatctgaccctcaagtggcgcagcacgccactttgccaagagctgaacaagatccagccatccagaaggaggaggatcacgaaggggacgctgaggtctaggagattgaagagcaggacgatgtccgtcctagcagtccctccgaggcggaggaagaggaagaggttgcacccccaaactatgggggatataatgaggctggggagccagtcgatgttgatggagacgtcctggttgagg

SEQ ID NO: 351648 - DNA, 781 bp, Cannabis indica
gaaaataagaaaaaaaaatgaactaaaaaattctttaaaatgtcaaaataagtagatggtgcatgagtgcattgtaaaagcacccaaaattatatgcagtctaaatttcaaacaaatatactcctttttatatatataaaaaaagtaaaaactaatatacatacaaaagaaaaattagatgacttaattactttatttttcttttcaaaacaattaaaaataaatattagtgtgacatgttgttgggaatattttactaggatctaaatttactaacaagcatgtttcattaacttcctaaatatgaatatttctaatgtgatgaattaaacacataagagtttagaaaaccttacattggttgcagcggaataatataacttcctctgcttagacctctaacccttgttcctttctgtcgcagagtattatcaagatctgagcctagatatatttctctctttcgggttggttacgaccgttttccgtactatgattgagtgcttgacttgctatgtgtgggcatgacactctatcactatggacgaatttgatgaagaacaatgaaggaggttttaaaatactatagaaggtgtctctcatctactagttgtcagataatgaaaactaggtttgatttggttgaagtgaatagttggatgagatgagagcatcatgttccttatatagtgtttcaactagggcttaggtttgaattatatggattaaaaaacgaataaaatattgggcaaaattagacactaaggccgaccacttagtg

SEQ ID NO: 351649 - DNA, 968 bp, Cannabis indica
gggtatacggtgaaattttcacttttatgcctctgttatactttttaggtttgggctaagggattcaaatgaaaattacgaaaatatggtcatttaaacaatttttataagagttccaactattttaaaacttatgttttagtcaattaatagtttggattgtacactttttttaaaaaaaaaaatatcaattttacaaattgtttttttaagagatttataatgatgaccatattaagttaaaatgttcaatatatgaccaaatagctttagttctaaaagattttagactatgcattttatcataacgaccctattgaaacaaaacatattataaaaatacaagagaatcaaagcctcaacttcgcccggtactttttacaatatttacaatatttttagtttcctaagtattttatactaatctattaaattcaacttttttatactcaaatccaagataaatagtaattagatttaaagaaaaaataatcttctaatctaatccatttaagtgacaaaattaaatccaatttgtaatttaatttaattttttttttaatttggacttttagtttagaatgtaagttttactattaacttaaacaaatacgaaaaatcacataaaaattaaacatattaattatttaagtttaatagtactacataaaaccatcagctttacaattatagtatacaacagaattattaaatattacagtagctaataaaataaaggaaaacttataaaaatactagaatttagattaattttttataaaaatactgttacacgatttccttttcaaaaatactgtgcctttataaaataattatggaacacgaaacagaacaactaaaaacaacagtgaaacaactaaaaaataaccgtagaacaacaataaaaaattaacaaagtacacagtatttttttaaaaaaattccaccccatagtaaaaaaaggtaaa

SEQ ID NO: 351650 - DNA, 759 bp, Cannabis indica
catagaaaacaacagttattaaaaaacctgtttcttgatcatgatcaaaaaccagtttctaacacatatcttatatttcaaaaaaaaaaaacaggtcatcgcaatcacaacaatccaataccaagtaaaggtgcaagaaaaaggtgatttcacaatcaacatactggaaagaacatgcagctgcagaaggttccaactagatgagataccatgctcacatgcaatagctgtatttgcaaaaagaggattaagagcttatgactatgatgtcgagtattacaaaacagcaacaatgatgaatgagaatagactatacctgagagcatggaaagaatagtgtggccaccaaaatcaagaaaaccagctgggaggcctagaaagaaaagaagaagatcaaaaggagaaccaaaagttgtcttgaaatgcacaaggtgcgaaaaagttggccacaaccgaagaacgtgcaataattcacagttttacaaacctccaaaacagaataacaaaagcaacgagtcaaagaagaatgattgatcagctacaagataaatagatattgattgacagttttataaaaactggtttctcagcattgaataaagttggacaaaatacaattttttcaataagatacatacaacaaatatttttgggcttttgaatttttatctatttaaataatcattgttttaaagattttctcttaatatcatagatcatttcaaaaaggtacatgaaaaagaataaattttataacat

SEQ ID NO: 351651 - DNA, 525 bp, Cannabis indica
aaaagtagtatttgtgaaaaatagataaaatagttgagaaaaatggcaagaaccaaatttgtttgaggcccatatcatggtcggccacttgagggttttatgctccactttttatcaatattttattctaaatgaatcaaccctaaccctatggaaattagtataaaaggatagctaaggtctcatcattcaactaatacctccaaagctaaaaagctagctttttgatgaaacctattccgtcttcttcttcctcatgaattttcgaaataccaaagcctatcttcacaaaataaattctgccattagtgattgagtgcatgcccacacataacaagttggtcctcaatcatcatatgtaagactctgaagaattcaatcaacaagaaggagaattaggctcaaatcttggtgataccctgctacagaaaggatacaaggattagaaatttgagtggtaggagttatttaattccgctgcaaccactgtaaggtttctcataccttttgtaacgtccccgcttc

SEQ ID NO: 351652 - DNA, 543 bp, Cannabis indica
atattgattaagaaaaaaaaaactgtttaaaaatattttaaaagtatttctttttttaaattctttaaaattttaattctcaattaaaaagtgaaaataattttatagaacatgtttttagaaaatattttcacttttctaattaaaaaatagaaaattgattaaaaaaaatgttaccaaacgtaccctaaataaataatatacatatctatatatataaataaagcagagaaatatcactctaaaatcactccaaataattttataattttatatgctctttcctttgttctctcatttattattttttaattttcattttatactactttctaaaaaaattaaaatgtattctaaacctaaaatagtacaacgacatatttttgcttatataatgtaaagattaaatctgtgtaacaaattaatatataacatatgagattattttcaatgaaatatgtaaaagttgtgctatatttagtacaaaaaatagttttgtggtaaatttataccaaattttagctttgtgctccaatacacaat

SEQ ID NO: 351653 - DNA, 426 bp, Cannabis indica
agatcctggtaaaataaattccaacagctttgtctactatagaagctgaatacatagttgtaactgaagcttgtaaagaatctttatggatgaaaaagtttcttcaagagttgtgcttgcaacaagaaagatacattgtcaactgtgacggtcagagtgccattcacctctccaaaaattcaactttccattcaagatccaagcatatgtatgttagatatcattggattcgtgatgtgcttgagatgaaagaattgcatttagaaaaggtgcataccaatgagaatggttccaatatgttgacaaaggctttgcttaaagagaagctcaaagtttgtaggcgaagagcgggcttagtagagcccaccaactgaggcagagggggagatttgttgggtccgcccctttattggtgggcttggacca

SEQ ID NO: 351654 - DNA, 517 bp, Cannabis indica
ttaattgagatcaatcctttattctttctacccttatacttaaacctcaatagaaagaatacattcagagtactcaaaacttaaatccatactttatctgcagaatcaaaccataaatatgtgtcagcttgatagaacattctaaatacaaactctcactaaactagcacaatcttaaataataccacatccatatatgagtaacaagctcctgcaaagccttaagtgatatatccttaatgatcccgatcacacaaaatatagagtttgtccttattatgttctatagacaccttattactctaaacttcattttaataacaattagctcaaagtcaatgtgccttttgaccttatagagttaatattgttactaaaatgaaacctgattgatttattgtcacaacatatatctttaataactttcaataccattcttaattttgcaaccatatgtgacaaaaaaatctcacaactaaaaacttaataagatcagaatcagaaatcttaatgatct

SEQ ID NO: 351655 - DNA, 722 bp, Cannabis indica
ttgtgtctaaatgagctacacgtgcgaagcacgtgagactccactagtatatataaaaataaaatcctctatatcgtccctctcccctcactcacactctctctttctctctacttcaaaaccacaaaaggaaacatacaaaaccccatcaccagtgtgaactctggcgacccatctctggccactgtctagccccacgcgccggaccattcgaatcctcaggtaccgacaacctcaacccccaagcggtgccgccagggccgtcttaaacattttagaggtcctgttccaatcttaaaaatttggcccttaataaaaataatagtataattaaattctaagttcaatttttttatttatttttttaggtagatcaagtttaaaaatttacttctagaagttttagttaaaaaaaatatttcattcatatttgataattttttttaaaagaaataaagtcttgccattaactcatatatataatcgtgtgtatatttttttttctcttttgatatatttttttttaaatgaaaacttaaaattgaatagaaatatttaaatatatatgatgaaaaaaattatttattaatcaatttttgaaacaactaaaagatattatatatatattccactatcaaacatatattgaatggaatataaaagattgaaaaaaaataaatagtaaactaccataaattggaagagattctaggtataaagag

SEQ ID NO: 351656 - DNA, 569 bp, Cannabis indica
agtgatcagcaattaaaagtaattaagcacaaataaaatagaatacatagaaattagggggaaaataaatcatattaaaaccataaaacaatgttaaacaatctccatctaaccctaattaaatgtttagctactcatgtttatgagagcacaatcacacatattaactttaagaaaagagatgaaaatagagaagagaagaatgctgaaaaccctctgaagaatgcctccaatattgcagttgatctctccactttgcatctgtattctctctgtttttctctctaaaattgcttgatgaaatcaactcccttcttccctttatataggcattgaaggcctaaaaatatggaaaaaacgcacatgtttaaattcccagatttaaatttttgggaaacctcaaacgagatatttttctgctgcgtcgactgatagtattttgaccataactctctcaatattgctcggaattgaacgattcaagatgttccggaaagataaaagagagatctagaactttcatgttttgactttttccaaaatctaatcagaacatcgtcgaattcagg

SEQ ID NO: 351657 - DNA, 1020 bp, Cannabis indica
agatgctggagcagttttctaatgggtatctaaaggaagtcttttggttcatatatatagattttatttatccaaggaacaatttcaactattccagaaaagataaaagtcatgaaaggaattccttaagaattaacagtgagaggtctcatgtatgttttataatgcatgagaccagacacctgatgttgagtgagagttttgagtaggtattagtttaatctaagaaaagaacattggaagacaatcaagtaaatcttaagatcaaggagaggaactatatgttagtcgataagggtgatattttaatactcttagactacaccaaataaggtttctagacttgcgttaatgctagaaagtctactgatgagatggtgattactctgggatagaacaatgattttttggagaagtgtaaaaactaatccggagtctctaaactctactagtgagactgaatgttaaagcaaccaagaagactactagataattatttagccaatggaaagttctaaacaatttttggtattattctagtaatggattaattacaagtgttagtttctgaccaacacagatatagttgccaattagtaaagaattcagtatcataagaggagtaaacatatagaaagaaatttcacaataccaaggattttgtgactaaagagatgtaatggtggagaaggttcgtactaaatacaacctgtcagatcctattatgaagacaatactacatacaacacttaattttgatatcaaggtgttgagattaattgaaatgcacttttagttttatattagtgcaaacgagagtttgttgtgttttctgccctaaataaaacctatttcaacataattagatttactaattaataaaatatcagaaatcattttatgttgcatggtcaaaatgatttatttcatgattatatgtttaatgtataaattctattaaatccaaaacatatagttattcatgattataatgttgtcaacacagtggaatataatcat

SEQ ID NO: 351658 - DNA, 710 bp, Cannabis indica
ttaaatgagctatattttagtttttcatgacttatttatactttcattggagatgctctgaaagtgaatgacaaattataaaaattaacctaactattttcaaatcttttaggtcttaaatcacatgttatctaatcatctttgagatggacgaacttataatccgcattaaataataatctaaatgtcacaaaggttatgcaaatactttcgtttcacatcaaaacctagtttatccaattttagcattcccaaaactcacttttcagattttgaattgggatcattaagcatgcctaaggtgatcaatctcaaacatggaattaagcacaaatatggataaattcacaatcaaaaaagaaagaaagatagtaattatcattaactctagaaataatgtcaataaacattcatcatcttcccaaataggagtttagttcataatctccatagtcaaatgcataatcaaatttccaacaaaaaataacatagaaaattaagagataaggaagaactagttggtgatcttactctgggtcaccacaagtgcttcttttgcctccttcttcagttttagggtacgatttctaagtatattgcttctaaaatacaagacccttatatagaaattaggactggtatctctgaatggcaaaattccaaaactgcctaaaattcccgtgtttatcccatagtcgcgactacataaa

SEQ ID NO: 351659 - DNA, 826 bp, Cannabis indica
tctaaagcagctccacatcaatataccattagtggaagctttggagcaaatgccaacctatgtgaagtttttgaaggataaggcttggggagtttgaaactgtcgctttgacagagggctgtagtgctatgttgaaaagtaaaatcccacccaaattgaaagatccgggtagctttagaattgcaatttccattgggggtcgagaggttggaagagctttttatgacttgggagctagcattaatctcatgcctatatcaatttttaggaagttgggaattggagaagcaaggccaaccaccgtcactttgcaattagcggatcgttccatggcgcatccggaagggaagattgaagatgtgttggtgcaagtggataagtttatttttccggcagatttcattatccttgactatgaggccgatagagaagaccctattatttagggaaggccattcctcacaaccggaagaacattgattgatgtacaaaatggggaactcactatgagggtaaatgatcaaaaagtcactttcaatgtgttcaatgctatgagattcccggataaaattgaagaatgttcacgtgtgagtgtaattgattctattgtggctgaaagttttcacaaggaagtgtggaaggatgaaagggtgataagttctcttgaagatcttgaagccttgagtgaagatgaagaaacccaagttgcttgggttgaaccaatgcaacctttccctaaattcaagagagcctttgagtctttagagctgaaggaaagcaatttcaagcctccaaaaccttctatccaagaaccacctaaactaga

SEQ ID NO: 351660 - DNA, 835 bp, Cannabis indica
gccatggtaattgatttactttcaagaaatttggacttaaaacgatttgtgtgtgatgtggatggtttcatgttgatctatgtgttatatgatgattgattgatgcttatgaaattttatgaaaaataattgaatttgcatttctggaattattttttttggatagtttggaaaaaattatgcaatttacttttttacaaaacttaatttcgattttatttgaattagttatgattttttgaagtttgaaaaaaaactgaatttctctctgttaggagcgtgttcggacaagcatctgtcgaaacgacacgccaagggatgtttgaaatccccctctacgtgtgcggaaatcatgccagcagcccctggcgccaagttttctcggctgttcattctatgggcgctcgtggatgagtatgcaacgcataccatccgcacaactcacaattttttctattttcttcgatatttcatgctatttcatgtaattaacttccgattttttgtgtagttttgtatttttatttttacctttatatttcaaatctaattatcagaattaaattaattggattttttaaaattaatttaagatattagtgttaatttgaatttaaaatgggtaaaaatctatcttttttgcttagttaattatcttatttttaaatttgattattttatcttatttttaaatttaaggtcagatattaatatattttttaaattattctatttttaaataaattgactttatttaaatttaaaataagaatattataatcatgatattttgaatagatataggatattatgctaacttttaaattttgttatt

SEQ ID NO: 351661 - DNA, 537 bp, Cannabis indica
tgtttggccttttcttctctctcttttttttttaattttgattgagatttttttttgactcttgtaagtttgaaaggtagctaagctaagtattgttaacctttcttggcaatagtaacacaaactaacatatcacgtggagaaataatccaaatcctttttgagatctctgaatcaccacaatttgagtatataaaatggtcccccatatatttggcatctcatttttttatgggtccaataaattcaacttcatccaatttgtgtacaactttctacttactacttattattcaagtgtgagatgaagaaaaattcatccaaaaaaaatccaggagagatttgttgatgcaattaggggaaacttttaattttatttgcttatattataaggttaataatatttggattttatgttttgtaaaagttgttaattagattttttgttttgttaaatgacaaaatgaaccttgtgtttttcaaaataatttaaataggactcttaacttaatttttgacaatttttttattcatata

SEQ ID NO: 351662 - DNA, 810 bp, Cannabis indica
atcatgattatattccactgtgctgacgacactatactcatgaacaaatatatacatatttatatatgttctggacttaatagaatttatacattaaacataatcattaaataaatcatgtgaaccataaaagcgatttctgatctttattaattagtaaatctgattacattgaaatgagttttatttagggcacaaaacccaacacagctcgcatagctcttgatcattggcgtaaagctcaagataacacttctctatcttacatctactcttgtagttgtgatgatggagctgagctttagactaaaccgaaaaacaaatacaatcaagattaatgttgatgctacgatttttactagtgacaaccaatatggctatggtatggttgcaagaaataactcaggatctctcgtcgaagctaaagctcattgtctcaacagtgtcttcgcccttgaggttgtagagattatgggcatcaaaaagctctaagttggatcaaacgtcaaggctggcaacatgttgaactggaatcagacaacttagtctccatccaagccatccgcagccattcgcctctttgctccattttcgggaatttggttcaagactgtcattctcttatgctttctttgcctttaattaaaatctgttttgttaaacgatcagcaaaccgtctagcacatgttgttgttaggatgtcacgatccttctcttcatagtatttttgtgtctaatgctccagttggtatgctaaatattttgtactcaatatgttaatttaatgaagttgatatttcataaaaaaaa

SEQ ID NO: 351663 - DNA, 511 bp, Cannabis indica
ctgcagagaaactttttatgatcacatggttcacacagtaatccgtgaaggactgactgtcaaagtgtttgccattgttcgagactatcttatatggtattccaaacagacaaattatgttctttacaatgaagtcttggacttttttggatgtaatggtggccagtggctctgcctcctcccatttggtaaaaaagttaattgtaaccactgcgtactgtaccccaccttgcccttgagtaactgtccgatcaggtcaattccccaaatggcaaaaggccaaggactttgcatccgagttagtttgttgggcggtgcacgaggtatcgttgaaaatctttcacacttatcacatttcttaacgtaggccttggagtcttcaatcatggtcggccaaaaatacccttgccttagaattttcttggataaattctgcccagctgcgtggttgatgtagaatccatcatggactttcaacaaaagtcgttcagcttcttcttgtgtaacacac

SEQ ID NO: 351664 - DNA, 615 bp, Cannabis indica
cctactttttggtcagggttatacgttcattttggaaacacgatagtacaattgaaagggagcactaaacacagatatggaatctatagcttctacaggtatttagaagtgaaacgatgatttcctttgagcttgctaaagagagataaatgattgagatctcattttagtgattatattaattcactaaaatatcatttataggtggtcaagtgttttaaggataaaatacattgaaagggtgtaacggtaagtttatccctatgcaatgtagatcctctatataggagcattgattattgggattttaacaatggataattaatagcgtatatgtatcgtgaaacatatagagcgttctatgtaactgagagttctatgagtggatgcaatgaggaattaataagttagtgaatttactttgtaaattctaggtctacttattggaaggtcggttatataggcccatggtccccatattagttgagaccatactgcttgtaagactcaattaattgattttagttaatcaattataattctaaaattagactatgtctagtttatgattttcagtaagtaagggcttaagagagattataggttttatttgtt

SEQ ID NO: 351665 - DNA, 524 bp, Cannabis indica
ggtaataaataaaagatttggacatccacataattattaatatttataacataaacatattttttcaaaaaagagagggagagagagagagagtgagagagaggaaacgaaatgtgagaaactaaactcttgaaagcttatggtgttcacacgtgtacagtgtagatcccatttgtgcttattccttcattattataatcacgtctaacttaaattttatatataattattttgggatcgagattgcttttgttccatactaaacgggttttatttattgtatatcttatgctatataaatggataatgcaatatatcggaaaatgattgaaacacactcaaaatatacataattgatgtgtaattaatcttaatcttacaattaaaaaatgatatggtgtcaatgactaatattaactatacatattgtgagttataagtgtatataatttgagtgtacatccaaaaccggccttaggcatgcctaaaaataaaaagataattttaaaaaaatacaaaaacaa

SEQ ID NO: 351666 - DNA, 631 bp, Cannabis indica
accggaattccggtttgtgctgggaacccgaaaaatgcccccaagacctcaaaatcaagccaaactctaccaaattttccaatatacctgtactatgcatatacaacataatccaaccagaaattcacagaaaaattcaatgaatctcaacttgccattaaagacctaaacttgagtttcaaaactcaagcttgctcaaattcatcatcaaagctcaaaactaacatccagaactcaaaatcaactcaaaataaacttagaattcgaaccctaagcatacctaaacctaacagccactatttctcaaaatcacaagttcaaactaagtaaaaagcttaaaaacacacaatcaagagttctagggtttacctccacttcaagagcacttaatccttagcttaattccagaaaattgaggaggaaaagttggctttttctcttgttttgtctcagctgaaagagagagagagggagctccaagggtaatgtctctttttttctatttttcttgattttcttcaaatgggaaaatgattacttattaatccttgctgcccttaggaattgctaggtgtcactaacataaccagccacctaaccctcaaataaaccaaaagactaaattgccctt

SEQ ID NO: 351667 - DNA, 800 bp, Cannabis indica
aaaatgtttattttggtatttttagaaacatgtttaccttattgttattttttgaacttgtgtatgaatttgaatgaaccaaatgatttatttctgtttattgatatttgtagtgtccaaaatggataacccacaccttgaacctctccttgaacatgcctttgctaatgaactctatattgttaaaatgcacgcttcctggtaagagcattaattcacacctaatagtcttcctcctgagtataatgcatttgttgtatcatgtatgatcaacaattttaactcatccaacataggtaaactgaatgcaaaattgcatgtttacgagcggacttttcttgcaaggaagcctccctccatatttgtagacatggaaggaagatagtaattgagtatgatgcttctgacattgttgcaaataatattggaacaatggatagtcgtactcttcaatgttcatattgtgataagaagggacatcaggaagaaagatgtcccagacttctagactatttgaacgaaggtaacgcttttgtttttgaatcatgtgttttagagaatgccaaatccttttggattgttgattcttgatcgactaaccatgtttgttcttcattgcagctgcttgaatcttgggattatttaaatccagggaagttaaagctcaaagttgggaatggcgaattggtgttggtccaagctaagggaaaagctcgcctcaagtttcaaaagaaatttttagttttagacaatgtttgtttattccgaattttagtagaaacttgattagtgtttcatgt

SEQ ID NO: 351668 - DNA, 476 bp, Cannabis indica
tgggcaggaatgtagcagtccagttcgcccaagtatccaccctggtcaagaattcgaaggagcgcctccataatcttggacagagcacttacccacctagcacccaaggcacgctggccttttatgaggaaccaccgcggcaaactcttcactgacgtagtccacgccctcaaccaggacgtctctgtcaacatcgactggctccccagcctcgttgtactccccgtaatttgggggtttaacctcttcctcttcctccgcctcggggggactgccaggacgtacattgtctagctcctcgatctcttggacctcattgtccccttcacgatcctcctccatctggacggccgaatcctgttcggcgctgggcaaagtggcgagccgagccacttaaggatcagttgcgtcagccatatgtgttgttttctttatacgagccatcattctatggctgggtacagggctagaagaat

SEQ ID NO: 351669 - DNA, 1365 bp, Cannabis indica
ttgtttattgaaataccgagctactttttgttgatgggctatcaactttaagtttgttgtggttcacttctcttcgatttcatcaagtgattcggcaagtagtacgtgattggtatctttgttatacgtcaatctccagtgagatggtggctcgagttctacgggcagcatagcttcatatccatatgccatggcaaatggagtctgtccggttgccgttttctcagttgttcgatatgaccatagaacttcaggaagttcttccagccaatttcctttggcatctttgagtcttttcttcagtgtatccttcaaggtcttgttcactgcttcaacttgaccattcgcttgaggatgtgccattgcggagaaacttttgatgtgccatggttcgcacagaaatcagtgaaagattggttgtcaaactctttgccattattcgaaactattttgtacggcaatctgaaccggtagattatgttcttcacaataaagtcttgaactttctttgatgtaatagttgcgagtggttcggcatctatccacttagtgaagtaatcaaccgctaccactgcatactgcacttctcctttgcctttgggtaactgtctgatcaggtcaattccccaaatggcaaagggccatgaactttgcatctgagttaactcgttgggcggagctcgaggtatcttcgaaaatctttagcatttgtcacatttcttaacataggcctttgaatcttcaatcatcgttggccagaaataatcttgccttagaattttctttgataaactctgcctggcggcctgatttccacaaaatccatcgtgcacctcagataggagtcgtgcagcttcttcttgagtaacacatctgagcaacgacatagagaatcctcttctgtacataattccctctactatgatatactgtgtagccttccttctcatctttcgagcttcattttgattatctgggagttccccagtgttgaggtagcggctatcggtgtcatctagttcggggaagtatcaatcatttcaatcttttccatgccataatgctaggctctttgaggaactagataggaaccaagttcgccttatcacttacattacttgttcttcttttcctgtgcattctaccacaaagtttgctaaggcatggcctttgtttactgtttgggttggaaagaaatttcgtatcgacccaactccactgcccacttgagtagccgtccagaggcgtatggctttcgtaatatttggcgtaatggttcgttagtgtacacccgaacaggatgagcttgaaaatagggccttaactttctataaatcgataccggccttcggcctcaatgagtct

SEQ ID NO: 351670 - DNA, 613 bp, Cannabis indica
aaagtaatcaagattatgtgattaaatgtattcttatgatttatcagtacatagggttcaactgatagaataatctacaatgtagtttacttgtaccttggataggtgttatgtcctttttagggcatgggttaaagtacggaagcttgagttggatgtatggagtatacatcggaagggaccgatattgaacttggataagatataataaacttaacgtaatatctatctaattcaatatcacctagttgaccttagatgaaatgatctcaatcctcagatagctaggttctagttcagttgtattatatatgttcttcaatttgttcgttaaagtcgatccatggatcttctcgtaacatatagattaaagacgtgatagttcaattcagtggaagcgctaaccataaatacgaaatctatagctactatctagacataaaagtgaaatgatgatttccttcgatcttggcttaatagagataaatagttgagtactcatttcagtaattatattagtttactaaaatatcatttataaatagctaagtacttttgttggaaatattttaccaggatctagatttactaccaagtatgtttcattaacatc

SEQ ID NO: 351671 - DNA, 829 bp, Cannabis indica
ttgttatgatttgatgctatacatggatattgcatagtgattatttaatattcaatattaaattacaataataactatatatcatattaagtggtattaagtactctttgtaactatatatcatcctatggcagaattgtgaagcaatttttcttggcaagtttgtcaagtctcttaaccaaacatttattgttctcattcctaaaaaggattctattatgttatttttaatctaaatttcaggtcacagtttatagttattttttttctttattattatatacagaatagaattacgcttgtttttttttttggtttcaggtttcgacacttaaaatgcataaattggacaaatttcgaaaaacggtgatccataaaatagagaaaattttgaaagagaataaagctaaaacttcaaacctaaattcaactattttttgatcatattttggaaaaagtcgaaacataaaagttttagatctcttttttatttttccaacgcattttgaatcagctcatttagagtttgtatgagaaaattatgcctattttactgagagagctcaaagtgaaaaaaaaaatagatccagtggccacggcgaggcttttggccgccacagcgagggactacagaaagccttttttttttacttttctacagccgccgcggcaaggcattggccgtcgtggcgccgagttcgtacaagtcaaggataacttcgtcttttatcgtttttgggctgaaaaactctatttaatgaaagggggtcgcaaatgatagaggggagaccagtatggaaccctgaaaagacaagaagaaggctcttgg

SEQ ID NO: 351672 - DNA, 762 bp, Cannabis indica
ttttttccctaaacctataatacattatattggtaagataggacaacatttactatatttccacattaccctccttatttaaatctgacctctctctttcctctctctttctctctctgtctcgcatctcttcgctgcacgcagaccgcccacacccgtccacgcagaccgtccacacccgaccgcccccaccgtccacgtagccgagtgccccacgtcacccacagccgaccgccccccaccgtcccctctctttctctctcttctctctctgtcttgcatctcttcttcttttttttcattcaatttttggtgcttaaattgatgaaataaattaatactttgcaattttctgtgaaatatgttagttaaggttagatttaagatgagatctgttagttaataggattgaaattggtatgaactttctgtcgaaatggattttttaggtcgggtccgatggggcccgatgctcgttcgatgtgtgtccgatggtacacaaaattacttcatttttgggttttttagaagtcggttcgatgggggctgatgcccgtccgatgtgtgtccaatggtacacacatttagttcaatttttgggcttttgaaggtcgagcctgatggggcccgatgccagtccgatatgtgcccgatggtacacgattttagctcatttctaggctcttgaaggttaggccgatgtaattggggggtaaaattgggttttactaaaaattatcccattttacaaatttcttaaag

SEQ ID NO: 351673 - DNA, 666 bp, Cannabis indica
ctattgtaccacatttcataagggctctttaagcctataacacaatttgggcttctatttataagatagattgcagtagctagagcttccctccaaaatagtttctctaatttggaactgaacaatagatatctaactttgttcaacagggttcggtttattctttcagcaacactattttgctctaaggtcttcactacggttctatgcctagtgatcccatactcttgacacaacatgtcaaattcagagttaataaactctaacccatcatccatcctaaggttcttaacttttagatcggtttggttttccacctaaattttccaaattctaaattgttcctggcactcattcttagttgctagcagataggtccaaacacacctactataatcatcaactatagaaagaaaatattgcttaccagagtgagtcgacactttgtatggcccccaaagattagcatgcacatattcaagtatcttcttagttatatgccttgctggagtgaatttcaacttatgttatttccctaaaacacaagcttcacaaaaatggtaaggcataagaatttaaatttttaattataccttatttgtgcatttctttaaggtcatgttaactgatatgcccaagtctatgatgcgacaactacatattcga

SEQ ID NO: 351674 - DNA, 1436 bp, Cannabis indica
aattcttattaacatggagaataagagagcagtaatacaagcaccaattcaagagcaacacagctctgcaacacttgagaaaaacaccagagaaacagtcttagtttctcaactcctacccgagtacatctgttcttgaccccttcaagaacatggtttcacagcttaaaaaactaagcactcactctctaaactctctcttttttgaaaggaaaatcaaactttattaaccttcaaattctgtcaccaacataggcaacaactctgttgggatatttcccatactgaaaatacaatcaggataaaatgaagatgcccttgcaaactcatgagcgactctattagctgaccgcttaataaaacaaaaatggacattgcttaaattagccaacatggctttgcattcctgaatcacacaaccaaagtaagaagacagactagtcaaactccttaaagcttggatgaccagaagacaatcggtctccacccatacagaactaggcggatgatttttaatccaacttagagcttctcgaaagctcaaagcttcagcaacagccggagcaatatttcccatgtgcaacttagtatggcctttaatgagtaaaccgttatggtctctaacgacaaaagcacccccaaaccgattatcttcttacaaaagtggaaagagtagcctatttataggtacaactcacagctagaaaataggtgcaaaatcggcaccaactaactaactaacataacagaaagttagttaagtgtaggtgtgttagttttaggttagtttagaggatcaacttccacaaatttccaccttgattctttaaagcaattttctagctatcttttcatagaagccttgatgatgttgatatcttaatatgttcagcaagtaccaatgttcagcaaagtgagacaatgcatcaatttgctgaaagtgagaaccttagttcccatgtctgcatggttgtcacttgtgtgcaccttctccaattctcctcaatcttctctcgaatgaagtatcgtctaatgtcaatgtgcttgctcttctcatggtatacaggattcttacataggtgaattgatgacagactatcagaatagactgtccctttgtctttgagtagatgcagctcttgtagtatcccctgtaaccaaatagcttccttaaaagcttcagtggtggccatgaatttagattttgtagttgacagtgccaccactggtttgttgtgatttccaacatatccaacttttgttgaccatgaacacataagcagtagtagaccttctgttatccatatttgatgcataatcagcatcaacatagccttctaatcgcacatttgatgtgtctctttgataaatcagaccatacttaattgtaccttttagtatttaatcagccacttcactgcattccagtgttctaa

SEQ ID NO: 351675 - DNA, 606 bp, Cannabis indica
ttacaagcttcatctgcacttagaacacatctcagccgactagtgcttgggttccccgaaccagggtgatctcatcaactaattctcaagtgtttcgtattacaatttccagttctctctaaagaaatttaatacaaactttacagcaattagcaatgaattaccaacaacaattaagaatcttgattgcaagtgcacaatcccttgtgcagcaactgagtttgacttcgacacttcttcaacttgaaatcccttcagatttgatgacgaagttgacactgaactcccttcagtttgaactcagtaacttcaggctctgatctttctgccatagatgaccatcttcaagctatacaatcagacctgtagaaacaacaagatacgactctaactcccacgataaaaactaaattaaccgactatttcgatttttctggataacctgtttacagaataaactcgactatttataccgaacaaaatagtccacctggcactaactaacacctaacgataacagacttaacagtacgcaagtgcagatataacagactgaaactgcagacatgactagacattgtactaaaataatctgtcacaaaataa

SEQ ID NO: 351676 - DNA, 633 bp, Cannabis indica
tcttttattatctcataaagtgtgagatgttcaccaccaaatcaaaaaagaattcaaaaatattctttattcacaaaatagatgataatgattttcacatcaatagtaataaataataatattactatattactatccgtattattatcatactatataactcatatattaatataatatgcatgttaataatcaacatctcatatgtaaccatacacatagtattaacattaaattcatatgttacatcatgtaacgtatatacatatatatcatatatcatatatcatatacacataatatatatattaattacacaattatatatgttacatacttcacacatatatataacatttatttacacttaatatacatgtatgatatataatatatactatatatgcatgtctctagaaaataattatttctacacatttaatctcacaatatatatgtatattatattatatctcatcatatatacaatacttactcatatttcatattatatattatatatctcatatttattatattccatacgggtgactattcaatggttacatttttatgtaaccatatggttacatttttctttaacctgtaatagcaggttactaataggtagac

SEQ ID NO: 351677 - DNA, 527 bp, Cannabis indica
aatcccaagtatatcttaaacatttggaatgaagacattgcctatgcactattaagtgcttttcaaggacagaagaacaaaccagaaagttgtggagaagctatgaagtgcaagaatgctaagaagtggaactgtgctatggataaagagacagactctttgagaaaagagaagacttgggtttgtgttccaaaacccaagggaaagagtgttgtcaaacatatgtggccctttagacagaaagaaagatgccctaagacaaataaagagttagaggatatcagtcagatcctcaactctaatgagattggttcaaagatgtatttcatgttaagtaccataccagatacaacatatactatagttgttgttagcaagtatatggtattgactgggaagatacattggttgattataaaatggattttaaaatacttaaagaagacaacatgtgttaaacttgcgtttagaaaatcacaaaaccaaatggaagggttttgtgactcgatctatgcaagggagaaaaa

SEQ ID NO: 351678 - DNA, 1004 bp, Cannabis indica
tttattatatataaattttttggtatgtatgcatattttaatagtggtatatataatttctctagcatgatatatatattttttgagcattaatttagtaatgttataatttatttatggtatataattttattattacggtatattagtttttagtaatatgatatatcaaatactgctgtatatatttaataatctaatatatttatttatttttgttacaatataataatatgcaatattaaaaaaattatataacttaattttattattatatatttttctaaaaaaatatgtgatgaatgtatttttataatttttattagctaatttattatatttggccatttactaacttagttttcaaatttaggaccattttacatctcaacccttttaaataatatcaaaaactgttctaccattttttttttcttctttttgataattttatttcttactgttaataaagtaacaataaaaaaaaattaatagtcccaattttcttaactatctaaacataatagttttatttttcaattttttaagaaggtctagttatataagcttaagtgaaaattagataaaatatgagatttgattataaagttataaaaatatagcatttataagtttgccactctcctatagtatttttttacatttataattttttatgatatttgatgtgccatatttttgtaaatctaatatctaaactcatatttcatgtttttgtttctagcccaattagttttatctttttatttggtttattttgcatttgtattttaagattttttatttctctatcttttctttctactctaatggtatgtttacttaaaggaaatgtgaattaattatatggtattagattttcatataattgtttactaaattttagaaattggaagaaagtagtggggctcacacaaattagagaaaaaacaaaaggaaaggttctccccctatttttatagggaatacttttccctttccta

SEQ ID NO: 351679 - DNA, 585 bp, Cannabis indica
tccgtcttcaccacaaacttcgaccctaacaagtaatgcctccacgtttgtaaacaatgaataacttgcaggagctctttctcttgcgcagtataccgcctttctgctttggaaagcataatctgacgcatctgtctgtacttcagagggtttgcatacaactgacatggctaacacaggatcttcgatcatggctccttttagacttcgaaagcttctttgcacttctcagaccacgtccatataacacccttcttcaacaactctgtcaagggtgccactcttctcgaatagtcctccataaatcttctatagtaattggctaaactgagaaacgagcgtagttgtttcacattggctgcggtcgtccactcttggattgctcgcaccttttctaaatccatacggatcttcccgtgttccacgacatgacccaagaacttgatactttcttgagcaaacgagcacttctctcgtttcgcatatagctactctttcctcaacttctgaaacaccgtagcaaagtgttcccgatgctcttctaaagtggcgctgtagaccacgatatcatctaggtacaccacc

SEQ ID NO: 351680 - DNA, 999 bp, Cannabis indica
aaatattaataggatttgttttattattattttattatatataaataatattttattattttatcaaataaaaataaaaagttacccataaatttctcataaaccaagaatttcagttatataggcacactttatatagaatagatatatttatataaactaggatcccatgtttaaacttttacaatctatatcaaaatatttttacaaacatgacgcacagcgactacaaaatatagcccaagtcgttccgagaccgaacactttagatcgcgccgtcttgacatgtacaacgatcccccaatctcgaatctcactcatgttcagcattcaccttttctttaattacacacagaaataatatctgtgagtcgacagactcactaagaaaaacacataacatacaatataatactgacttatatctaggcgcccatacacctatccacgagctaggcttattaaataaataagaacgttttttactaaggtacgaccattgtactacatccactacgtactgctactgtacgagtgttgataaggtttgcctcgtacctcgagtaaccctaagtgttaaccacgtacacacactccgtacctatccgtactagtattggtaatgtcgtactgtactttttaagcatcatacactataccaatacactcagtactgctaccgtactagtattggtagtgtacaaatcacaaagagcatacatattggttacctttgatttacaccacttgattttaacacttcctccaaatcacaccaaaaaccccaggttcttgctaggctagaagggaagagagagagagcaagaaatttgagttttctttcctttttttttttaattaactaattctcttacggttacatgccccaggtaattactatttactcgttaataattagtgtcttgcatgtaactttttcaaagttgttctttattttttaaatttttttttattatttgttagagtctagtttttgac

SEQ ID NO: 351681 - DNA, 610 bp, Cannabis indica
aaaaaaagaaaaaccctatttaaaaagctttcttccaagacaagaaaaaaccaaaattttcaaaccttaagcttctcttttcttctccttctgccgaaacctagaagcagctgggaaccaagtggatttcattttatttcaaccattcttgagctaatcttagcactagaagctagctaagtgaaggtatgatctttctacactattcttgatttgttttcttgagtttagtttaggttttggtggaagtttcaatgaattctgagctggggtataaactgagggtaaggtaggttcttagggttgaattggaacttgtttgaatgaaaattgagtgaggttaagggctgtttaattgaattggtgttgaaagtgatgtttggtgcaaattttcaaatgagatggtgattttgagttaaatggtgaattgtgattaaatgatgtgttgaatatgttgtatttggtatattgaactgttctggaaatgcaatttaggtctgtaatggttttggttcgagctggggaagaaaacccagaatttttctggtctgacagcaaccggtcgaccggttggttctggtgtaccagaaccggtcgaccggttacagca

SEQ ID NO: 351682 - DNA, 708 bp, Cannabis indica
cagtgatatgatctggttcatccctgcatcaacctatgagatttattaaaatattccgtttgtttattctctttatcactaatgcctactgggttttactttgggattgcttttactaatattcagtttactttcttgcattctgatattttttgaaacttatgactcggatagattcgttatttctttttgtttttcaaatcttttgattcattagttgatggattttgcccaagggaaagttgtgttggctttagaaggtggttacaatctggagtctatagcaaattcaacgcttgcttgtgttgaaactctgctagaagataaacctgtcgttggatctgcagaagtgcacccatttgagtctacttggcgtgtaatagaagcggtaacataatgttccaaagtattgttgttttctttgaatttataattttagggaactgagggctgggcatgaggaggttgccattggggacgactggaaatatgctgtgtttacttgtccttgtttctaactagttacatcatatgtcatctactttggaggtttcgccataatttaagtccattctggcctacacttgcaaaggaactaccaaagaaattaactgatcaaaaagcacatctgattccggtagcttctcttctcctttttctccttttccagacagatatatacatgcttgtctgagttctgagaaggtt

SEQ ID NO: 351683 - DNA, 1366 bp, Cannabis indica
tagaccttgccttttcggttttatcctttttcccctttctctgttcctcttttttctccttttgtttgcaatgtcactacctttgggattcttgccaaggaaaacctcttggggctttcttatttggcaagtgtctggagggggcctctttccagcggtgaggggacccccattcccttttttgaacattagggtttggtatggggcctaactgctcgatttttttgattttcagaacaaaaatgtctgcttccgcatccggttccaaatcttccaagaaagaagaagctcgtttcgccaccctggaggaggtcatgcagggctctggggcccaagaaaattacaagtccctcgccaacggatgggaggcggctgagctccactccacactgacctgcgctcaccagctggagaagatcgtggtggtggcaggcatcaagccttcagtctctgggacctaccaccggctgcctcgggatgaggagactcccaaccacaattacgggggcttcagagcttggagccagacccacttgatgtctggggctatgcttcccctccaggattattttataaactttcttgttgtcgttggccttgcgccttaccaactcatccctcaagcctaccgcctactttcaggcttattcattttttacgctgcccggagctagggctcacccagtccggctgagatattgtatttttatgaacttatttccatccgcaagaagggggataagtttaaagacggtttttatggccttcggacccatcctttgaatgagggttcagtccctttcaaccatcagaagcatgtgaaggaataccgtcactgcttcttcttttcctccggcgtccaagccatggaccgcccggagcttctcacagagtgggttaggatccctccttacctgcggactgcgcctacccaagtatttctttaacgggccaagaccttctccacgtatgataagaaggccctcgattgtgtcgagttggtcacgatagagaactgtcagaaggccaagctgatctctgggaaccagtcggtggatgacttcaatctttccaaagtcatctgcccaaacgtgagggctccggtcgcacaaagggcgttccgggaagacatcatcgccacggcggaggaccggtaccaaaagtacctctttaagagggaacaagagctggcctacatcaaggcccaggcgactgccgggaggactctttgtctggaagctccgccggagcggaggacccttaggcccaagcctggggtcccggtccccaatactggtgctcccgacgccagcacttcgggttcaggtaagtcccctttaataatacattatgttcctcccgtctg

SEQ ID NO: 351684 - DNA, 855 bp, Cannabis indica
gagtatcaatggcagaacagagagatttagatgatgagaagaaagaaaattcttaagcttctgataccatattagtgaaagtaatgtcaaaagtgtttcattaattaataattcaggtatttatacaagaatacaggacattagacacaataactaacataacggaaaaactgttattaactaactcagtaacagactaactaaacaatagcctataacagattctagcttaagatacccaaaatataagtattttattatccaaattataagtacttcgttacctgaaatatgagtataactcaaaatataagtaattggttatccaaaatagtatatagttatctaaaatataagtacatacatcacccaaaaataactttttttttttttttgctgaaaccctaagtataagtacttggttactcaaaatataattatctagttacctaaaatataagtaccaagttgcccaaaatacatgtaattggttagccaatatagtacctacttgattacccaaaatataaaaacttggatacttaaaatataagtaaatggttacctaaaatataagtaattggtcacataaaatgatggtaactagttactcaagatagtaatttgttagcaaaaatataaaacacaattcataatcgtaattggttaccgatggtaatatattattttgtgtttacacaaaaaaaatatttactttattttaaaaatctcacaaaaaatcgatgtaatgtaatttgtgacctaactaaatacctttattaagaaaaatcataaaaaggattgggagtattttaaaaatacacaaaacaacaaaaaaattacaaaaatatacgg

SEQ ID NO: 351685 - DNA, 1112 bp, Cannabis indica
aaggccgcgcactgcgttgcgagaaagtcttgtttcttgtcaggttgtatctttagtgagcttaatgctccttcagatttactatctattgtaatggatgaacgttctggttaaataaaatcttattccattacaaaaaaaaaaaaaaaaagtctaaaggtaatggttaattatattaaatttaaaacttaactaccaagcaatatatataacaaataaaagaaaataataagcataattctgaaggaaaaaaatgacaaaattcttttagttattattatttttttttttttgaaatcgtgacaaaattcttttacgatataaataactatttttttttctttaaagtggagaatattttttggttttgaaccgaaatttattaaacaatatatatttcttgtctattttggaaaatcaacaaaagtataatgcaatctttgaagaatttaaaatatattcaagtacaattataattatgtttttttttcacaaaaacaaaattgtgtagttgatgttaatattatatttgtattgttataagttatcaatcagcagatcgattttgagttaatttgggtctaaaaaataattttttcagtctctttacaacaataaataatatttttaaattattaaaaaatatacatatttattaaaagtttttttttttttcatttaaactcttaataagaatgggttcaaagtacaggtttaacctactttagtctaagaccgactctaattatgattgtgatattttataaaaattattatattaaattatataatattatatatgtttttgtttttatctgattatataaaagaaaagtacgaggcggtgacatgtcattttaaattcattccaaaactatttttttcttctctttaattctctcaattttaagattttattaaaggataaatctacaaattgatattttactattattttagtaatttttctataaaaaaaatataaatctacaaattgatattttactattgttttaattttctataagaatataaaatattttgaacaaaatttagaaaataaaaataaattccaaaaaaaatatcaaaccttaaatcaaatataattaatc

SEQ ID NO: 351686 - DNA, 788 bp, Cannabis indica
ttatctagaaaaggagtctaatgtaggttatgaaaataagagttatctctttctttatatagaatttcatctagggttaggatttaaattatatagattaaaaaaagataaaataatgtcataaattaatcttaagtggccgaccctatatgtgggtcctaagagtttcaattttttttatttatttaaataccatatcttttctttcacaaatgccatattttaattctaatcctataaacgtcaaatctacctatttaataattataattaattatcaaataaaatttccatttaacttatttgttaattagaattagaccttacaaagtctctaattaacaaataaatcttaaatcctctttttttctcaaataatccattgcttagtgaaaatttcacaaacaagacatagtcttatttagaattctaattaaaaccaagtaattgagactataaaacaatattatcccagttagtgtgtagaccatagccttatataattaagctctcaataaatagatctgaaatttaccaagtaaatttcctaacttattaattcctcctgaatccactatagatttgaaattgcactcctgattacatagaatgctctatataccaaaaaatagatgcaatttgaattacctattatttcaatccaaataattaaagatcctctataaatgatctacatcgagtatggataaatttaccgtcctaccctttaatgtattttatccttaaaatactttagctacctgtaaatgatatttcaataaactaat

SEQ ID NO: 351687 - DNA, 673 bp, Cannabis indica
gaaattaaatgattgtccaataaacttgagcatattgagaagaattcaacaatgctaaatccaggttcttcaatttttgaagaggttcaggagataggtcaaatcaatcatgttgggttgggatgtgtttaatatcaatctaaattgaacactaaatttgttaaatctataaataccttctggtttttctgatttaacactgcaaaaatctatttctacagctgaaccttatgttcctaaagaaagggagcagtcaggtaagaatgaaaattttcataaaaaatgaaaaaatttattccaacatgtcacttttgtggtgttaagggccatattcgacctaagtgttttaccatgataaatatgactcaatatttttacatttaatccatgtggaaaaatgttgtttaatatctcctcaagatggtggctattttttttgctcaccaatcttgaatcaccttatcacatcacaagttgtgctattgtaataccctagaattaggaaatggattagcaaaaccctaattagtaattatgaataaatgatgaattatattattatatagttcaatttatgtgaattaatatgatttataacatggtaagaccccgttggtgagccaggggcattttggtaattatgacccgagagggtaaaatgatgaaattaatt

SEQ ID NO: 351688 - DNA, 706 bp, Cannabis indica
tttttttacaataatttagtcgttaagtttctttaatgttcttgatgtttcatttgtgactctaacaaaggtaatatattaaaatttatatttcaagcaagagctttaagctttgtaagaaaatgtgaaaacgaatgagtaaagttttcagttgaatagcatagtaaatatatataataataataataaaattaaaaataatattcagctttaattaactaaaaaagttgaaaataaaatttactaacacttataacttcggttattaagtaaaaagtgatctaatactcaatctgagaaacggtcacattggcagttcaaacttactacagtgcgataaggaaagaaattctaccgaagctaaaagttcgacgcccaactgtacgtattctttattttaaatttcaattatattttattaagatctttattcatttaaagaaaaatctttactgtccacatcaattggaagacaccgaatgtggatattatgtaatgaagatgatgaaagatttaattcaagcttcgaatcggaaacactttttggccgaggtacatgacatacaaactatataaacatgtcatacattattaatattattattattaagaatgcatatgatgataactttaattaatatattatttatctttaaattttgtagttaagtgatgcaaagtacacagaagaagaaattgatgaagt

SEQ ID NO: 351689 - DNA, 460 bp, Cannabis indica
tatacctccatgtttcgtcccatctacttttgaaacataccatttacgagacgttggtatgttgctctaacattttccaatccaaatggcatgactttgtaacagtagagcaccatattcgtcttgaaacacgtatgttcctggtctggatgtacattttaatttggttatatcaataataagcattcataaaagtcatcaattcatgccctactgttgcatctaccaattggtcaatccttggtagtggaaagtaatccttaggacatgccttattaaaatctgagacatttatacaagttctccatgtgccatttggttttggtacgagtactcgattggagacctttgagggatagaaggcttctcgaatgaagttattgattaataatttgtcaatgtcaagaccacttagtttaatttggaaattagcagttaatcacgtttaattatgaaatta

SEQ ID NO: 351690 - DNA, 853 bp, Cannabis indica
aacaccttgtaaaacaacttgtaatttctctcatctagcatcaataaagataaaggcctttggggctgttctggccgaggagtaggcaagtgattaacaatcacttgttcgaacctcgtaaatctattgtgtttgatctcttttctctacttcttttactgttaaattgattgcctattactgtcaaactctagttctcattactggttttctgctactggttttattggttttagttcacagttgtgttgtttaattttcagttgtttagttctgttcttgatcaagttctttgtattgtgttgtttgcgaggtgattgatcatgcattgatcacatcaaatggtatcagagctcagtcgaagggcatcatcaaagaactgaaacaaggacatcaagaacttcaagaaaagaaccaagaactgatctgctatggcttctactcggtttgaagttgacaagttcaatgggacaaacgactttggtctatggagaattaaaatgaaggcatttctggtacatcaaggaatctcagaggcaattgatagagatgagcttgctgctctaggagatgacaagaagaaactcaaggaaattcagaacaaggcacacagtgccattctgttgagtctgggagatgaagttctcagagaagtgtcaaatgaggacactgcagtggggttatgggaaaggttggcatcgatttatttgaagaaatcactggccaacaagctctacctgaagagaaactgtacacgatgagaatggatgaatcaaaggatttaaggaagcatctgatgagtcaatcgaataatctggacctagaacattggtgtcaagatagaagacgagat

SEQ ID NO: 351691 - DNA, 834 bp, Cannabis indica
aactatactacttgtgttgaaaacttaaaattataggtcaaaatgtggatttttggtgaactttggacttgtttttaaacaagtgaacatgtgaatttttgcatatttgattttcttatgtgtctatatgcttgaatatgtgaaatagagtgtatttagtatgcctataggtttgccttgattgaaatttgcatgaaacaaatttttggtacctcacttgttgaatttttagatttttaggcctaaaagagtgtttttcgccaaactctctcatttttcaacatttttcgattccgtaagtttgtacacctcacattttattttataaaactgctggaaaaagaatttttcaatttcgttgcataaaactcatttttggtacggttctagttttcttggcaattttcgaaaaacttaccgtaaatcgtcatttttcattatttttcagtttttcttgtttgagcaattttgttttatcatattaaaggtattagaattggtttggggtcatttgggtcaaaattggattttttaggacgtttttagggggattttttctggtctgctgcaccaaccggaattccggttgtaccatccggaattccggatggcgcaggaccagaaaataagggcattttcgtctttttaatgcgatttttccccttttaaaaccctaccaccgaaattttcattccccattcagattttctaacctaatacagcagccactcctcccttttctctcaaattctctctttcaaaacctcactttcatcttccaataattaaaaaaaaaaaggtgtgttcttcaatggcttcctcatctaatccctc

SEQ ID NO: 351692 - DNA, 773 bp, Cannabis indica
aaattggacaacaccgcgcgaagcgtggcttagttccctagttagcaataaatttgtgttaataacgcaaaaataacactagaacaactctgattatttgaatgaacattttcagtcgtttctcagggataatctatatgtaattattttttataaaatcccatgttaaattaaacaacctcagtttatctgttttgcattttttttttaattttagatctaaatctaggtgtgtgtgttgtttttttttttttcttagtttttttaaaaattaaaatactatgagtttagttgtgtttacctctgttcttgggaaagaaactctgtaaatgttgttgtttgttcttgaatttgtcttttgatttagtaatgtttcctcttcgccggatttaatgtattttttcttaattttccgcgattccggtctgtccccaactaggaagggaggcgccgtttttgtattttcttactgttcaccgtataaaagtaaaattattgggcttgggcagtacgaaagaaaacaaaaagggcttggacagtaaaaaagtaaagttttaccatattccagtatttttcaaaaattttggtaaaaaagccagcaaaacttggcaaataaatttgtaacaagtgttgcacatatatgcatatattctaaagctccattatttaccttacataatatcatcatttgaaaatctcattatcttaggtgtcgtttggtaacactttttgaatcaattttctgtttttaaaattgaaaaagtgaaaatatt

SEQ ID NO: 351693 - DNA, 574 bp, Cannabis indica
agttgagacaatactacttgtaagacttagttaattgattttgattaatcagttataattctaaaattagattaagtctagtttatgaattttcactaagcaaagggcagaattgtgaagaaagagtttctagggttcatttgttaattaagaaactttgattagtctaattaataaatatattaaattacaatattatttaataattaatttttaattattaaataattagaattgacatttaagtggtaaaaattggaaaattgccgttttcgagaaaatgaaatgtaaaaaatgataaaatggaaaaatcgcaaagtggggcccattatcctatacatggccggccacttatgtagcctatttatcatttattttttttcattattttaatgtcaaataaatctaacctaaccctagttggtttactataaataggtagtgatggcttcaggaaaaagatgatgcatctcattacttcagagaaaactcaaagccttcttcctatacctatctgccaccttctctcttcctctttctgaaaactgaaacctatagtgaatgagtgagtgcc

SEQ ID NO: 351694 - DNA, 621 bp, Cannabis indica
tagcagaattactttctgctgctgcaaacgtttacagtttttatatttttctatatacaactgacatttgcaaaaacacggtttttcagattggatgggtccaaatccattggatgtgatccaatgaacacccctacccgctaatacctcctctcgaatcttgactagcttagagtcttccaattgcactattctgattctttctaacaagtctgattgaagtgttaggttatgtagtttcctaatcacaaacttaatatcagctttaaccatattcgaagccaactgaggtgagatcattatggtacttaaaacctacccgggatctcttctgctcaaagcatccgccaccacattagcttttccaaaatgataaaaaatctcatagtcataatcttgactttcttctaactaccgtctctgtctcatatttaaatctttttgagtaaagaagtacttgagactcttgtggtctatataaaatttcacacttttccccgtacaagtaatgtcgccatatttttaaacacagcaacaacaagttctaaaaatcatgtgtaaacgctgctcatattccttcaactaatggaaaacgtaggctatgacctgtcagcttgcagc

SEQ ID NO: 351695 - DNA, 962 bp, Cannabis indica
atgtataccatacatcggatactggtaaactctgccaatgccctagaaaagacataacacttatccaaggcgtaagtatacctatcgctgattatcatgccagtctaaatccagtgaactaacaaatcagggaattaaactttcgaacatataaacatgattatatttcactgtgttgacaacactataatcatgaacaaatacatatcttctagacttaatagaatttatacattccaggttatctacggaagatcgtcaagacatgtactatcatcgttagagaaaagcttgactaacggttcagtaagtttttacttgtttattatttatgtgattagaaaaggattttaggaagcataatagtttatgattatgcattgtcttaaaatcaataagtatgatatataaagcatatgagatcgctatttgacctacctgacttatgggttcgcaggctaagtcatattatatggagacccaacaaaatataaggagacaggttaatgtggttgagactagaggtggtcgaggtcaaaatcccctgaatccctgtggacgtggcagagccatggaaggttccaaaggggtggtcatgaaagtcaaccaccagctccactgaactgggagcaaaggtttgcagaaatacaagcccggattaatcaacaagaagaagaaattcagaggctgaaacagcaggtggagcagggtctattgggctttatgtcctaaataaaattctatttcaatgtaatcttttaaatcatttatcaataaagaaatagatttatttttattacttttttaatgtgttatttagttaatgtgattatttatttatttatttaatttatgaattcatcaatatccttatcacattgatatttttgtttattgtgttgtcaacacagtggaaggtaatcaagattgtggaattaaatgtattcctatgatttatagta

SEQ ID NO: 351696 - DNA, 718 bp, Cannabis indica
atccaacacccgaaggagaattgagcttagatcttgataatactctacgacagaaaggatacaaggttagagatctgagtggaaggaatcgtttaattcagatgcaaccaatgtacaatttcttgaactttatatgtgttaaaatttcattattttagaaattcatatttaggatgttaaacaatatacatggtagtaaatctagatcctagtaaaataatccccaacaactggcctcagagccatagtaatgatttattttcatgaaatatggatttaaaataatgattgtgataatttggatgtgttcatgttggtttatgtgcatatttgatgattgtatggaaatcgtaattttacgataataaatattttttgtttcgttctgaaagtatttttttttggaaagtagatgaaaattaataaatttaagcttttatagatctccatttgaattttttatgaattagttatgattttttaaatttgaataaaaatatttaaagctgtgcaacacccatgcgcacgcgaacaagggcatgcacaccatttcagacacggcttgaccaagatttctcagacacaagctgtttgaatgagaagctaaccgagcgagcccagccaggaaggctgtcggcagccacttttcacgcccaagtccccctcttacgcgcacggggagtatggattgcatactcccctcgaccaaacttgtttt

SEQ ID NO: 351697 - DNA, 428 bp, Cannabis indica
tttaaaattaatattacgtgggctactaaaaatgtgccacgtgtacatgtgtgtacacgtgggcaatccattgtggcacttaactgtgatttttagacgaaagggtacaaagcaaaacagaatgaaagttgaggtagttttgctctcaaaaaattaatttttgtggttaagtgttaaaaaatttaaagtataggtagtttagccgccgatatccctaatagtgccttagtggcttgtggaggagttttatttacatcttaaaaatttaagcaccttattttaataactagtaaacaactcgcacttcgcgtgcggttatattttgtttagtgataattaaatcataaaagtatattaaatttcaaaatttaatacttctatatatatatttgttggaatttattttaacaggatcttagatctactca

SEQ ID NO: 351698 - DNA, 974 bp, Cannabis indica
ggaagtattcatcgctggatttttgtccgtttcacctaggggaatgacattcgaaggtttctgatctacagtttggtaggcttttcatatcagcacggtggcttgccgactacgattttcaatctctgcatgatgagcccttaatgcttccatctctttgtctctacacttggcaaacataagcctttgttcctcgaacgcgaggtttaccacagcgcggagttcttcttgatcatgatgttgggtattgttgtgaccctgcatgagtccaagagcgtcactgagattttgtaactcagtagcatctccaatggtcgtctgggcgttggttccaggcggaacggctgtgttatgaatgccctggttgggtggagaactgttatttccagtctcatgcacaccacgcgcgatttcatctataggagtcattacaccgtgacccacattagctggctattcaagattactagcgggcagaaccctggtgtttcctaggttttacagtgtaggatccaccgtctgtggatttgttggatcaaccaagcccctacaagtctgcaccaccatcgttctcgtggttagattttgaataaagagcgattcttgattctgctctcaatgaaagcaatgttgacctcgcttttagccaacgacaatgagtcttatttagtaagcgataagtgatttattgtaatcgatatatagtaaagcagaataaagaaacaagaattttatagaggttatcccctgatctgtacggtaatagcctaatcctcgttatttgtattgacttaagaacaaggagaaaggttccttttcttatagctcttacaacagtatctctgaatacgaattcttagataactctagggtaaagtctcgactaaactgtctgcgaccaaacttttctcgatctcttgcccagtgaacatgcatcactatttatagggttgtaaacgtgtagagaaagtgtt

SEQ ID NO: 351699 - DNA, 1024 bp, Cannabis indica
tcacgatcaggaggaattacgtgccgcagcaaacctcgcgattgacaaacagaggcgtatgttcgacaagtggagggacaaagagatggaggcattaagggctcaccatgcagaaattgaagatcgtagtcggcaagccactgtgctgatacgaagagcctatcagactataggccagcaaacgccgagcgtcattccctaggagaaaccgaggatgacccaacgatgaatgcttcccagacaaccaacggtcagccgtccaatccccggtcacgagttccactcgtgggccaagaggtaggcggacagaccttgtccgggaattcatcaggaggggtcatgctcgacggatccacgcaaaataatggagccattccacctgccaaccaagcgaaccaatcgctaaggcagccaggttcttctgtgttcgataggttgggaacaacccatgacctaagggacgatctaaacagaagaaggggaacagacgagcagaatactacaacgaacgtgcagtccggagcccatactcaaatccccgctcagaaagacgctgacgtagtccaacccgaccagaatgccaatcaagtcagcccagccgtacaggcccagctcgacgaactgaagaatatgtttcatggcatggccgggcagcgtaacaatgatcttgagttagaccgtgcacgcggaactcccttctcaccagagatcaatctcctgccactacctcacaagttcaagatgccaacgtggaagatgtacactgggagagaagatcctctctcccatctcaagtattttgagatgcaaatggatttacaaggggtacgaggagacgtatgttgcagaatcttacccgccactccatcagaagccgcacatcaatggtatttcaagttggctcctggaaagtttagttcatggaaaaccttctcttcggaattccatgcacaattctcttcctcacgccaaatcccattgcatttgggagatttggtcgaagtaaaacagcgaccaggcgagc

SEQ ID NO: 351700 - DNA, 607 bp, Cannabis indica
gatttaatttaatagtgttatcacaaatttaataaagataggtaataaaccttcatttttctaaactaattgtttaattaaatctatcataaagttcatgtaattttattaaatttcaaatttagcccataggtaattttagatttagtatagttttaatcttagtttatactttggtgtctagtgaaccacataattttaaataataagggagtagccacaaaatccttaattatataaaattatatatattaagtgaatcaagatcacataatggaaatgaattataattaattatgtggacataataatcttaccctacaagaattttattatatttacataattaatatgttaaattaaattctcttaatttatcccacaaaaaattatgtagatttaatttaatagttttatcataaagtataaaaatttgaaacatttataaaataattaagtataaatgatattttagtgaattaatataatcactaaaatgagatctcgatcatttatctctatttagcaagctcgaaggaaatcatcggttcacttctatagaagctatagattccatatctatgtttagtgctcccactcaattgta

SEQ ID NO: 351701 - DNA, 726 bp, Cannabis indica
aaaattataaaaatattgacagtaaggatgagaagctcaacaagtcttctaagggtgctaaagacaagaagtagggtcttctgttgggaaataattttatgaagtagtttgatttttaaatgttaaatgataaatctttttttatggatgcttttgtttttatttcttcttttatattatagtttaatttctgtatgactgatcataatcttttttttagacaatagttgttctttttattttattttttttgtaattagagtctaaatgcttttgttgttagtgtaagttttttaatgacaatgtatttttttcatagctcacaattgtgtagcaactgttatgctatgttaaaaaaactattccagtataggaattctttttaatcttaacaccaaaagtgttttgaacttattatgatcgttctaaatttattgtatttgccatacaacttaaaaaactattatgcaactttaaaaaaccaatatggttggaatcttaataacaatatatttttaacacgccacacatctatctagcaactactatgcaatgttaaaaaaattatttcaatatggaaaagcttcttaatcttaacaccaaaagtgttttgaacttactatgaacgttttaaatatattgtatttgaatacagcttaaaaaattattatgcaactttttaaaaactaatatggttggaattttaatagcaatatatttttaaca

SEQ ID NO: 351702 - DNA, 1034 bp, Cannabis indica
aatgttatagggacaaaatggctgtttaaaaacaagtctgatgaatttgggacagtgactcgaaataaagcacgacttgtggctcaaggatatagtcaggtcgaaggcatcgactttgatgaaacatttgcacccgtggctcgattagaatccattcggctacttcttatcattgcatgctttttgaagatcaaactctttcaaatggacgtcaagagtgcgtttctcaatggggtaattcaagaggaagtctatgtcaaacaaccacaggggtttgaagatccacatcatccacaccatgtgtacaagctcaataaagccttatatggactgaaacaggccccacgtgcgtggtatgatagactcacctcatttctcatctctcatggcttcactcgaggtactgcagatagcactctattcattaaacatattgacaaaggaatttttgttgcccaaatatatgttgatgatatcatttttggctcaacttgtgatagtgaagtccaaacatttgtcactttaatgactaatgagtttgaaatgagtttaataggtgaccttactttctttctaggactccaaataaaacaactagatcatggcacattcatttcacagtctaaatatgtcaagtctatgttagataagtttggattctctcaggtcaagcatgcacacacaccaataggcaccacgtccaaattgtcacgagatgagtctggtgaccctgtagaccccactctatacagaagtatgataggtggcttactgtatctcacagcaagtcgtcctgatatatcctttagtgtaggtttatgtgccaggtatcaagctaatcctaaacagtctcatctctctgcagtcaaaagaattttcaaatatctagctgggacagttaactatggtctttggtatagttgtgacacgaatacctctttggtaggatatagtgactctgattgggcagggtgtatagatgataggaaaagcacttcagggggttgcttttacattgggaataacctagtctc

SEQ ID NO: 351703 - DNA, 461 bp, Cannabis indica
ggccttgttgttgcgcatcagccaggttgtccataaggatgaggctcttttagtctgttgaccatagtgatgtccatttttcttagcggtaccacagtattgtcatattctagttgtggcacatcatacgtcccgcaaagctcaataattacacccgccaaacgaaggccaccacccgtggctccttgaacaatttgcttgatgctccctttgatgacttgtccaatattaatattgtacctcttcatgatggcgtacacatattttagtctatccatttggacatcggagaaatgtttactcgacaccaaccgagcactcacaaagtatagctaagttttcgccaccgggttgatttcacatcggtgtagaatattgggcgacccgtcttgcccatcattgtaaatcccgcttagttaatttggaaattatcagttaattgtgattaattatgaaattat

SEQ ID NO: 351704 - DNA, 548 bp, Cannabis indica
ttttgtacttagacaaatttccttttattttggaaaaatttatatcctcgcggggataattatcctttaacattttcgcagtacaagggactcgcgttttctatatatatatatttgcgactttaattacagcttggtgtaataagtagaaatatttacaaggctgataaaattttgaaaatttaacaattaatttcattcatataatcaatagtacattcgggcatatatacccccctatacttaggattttttcctttgcatgaaaaatatctaagtataagtacaagagtgaacatagtcgaataatgcgagtactattgataataaaatttcaaactctcgccattccatgctcgtggaatcgcagttccatcgagtgttgcgagtcgatacgtggcatcaccaattttttctgcgatgaggtatggtccttcccaattatccccaaagaccccatgcgacgggtttttggtatttggcattactcttctaaggaccaagtctcctgctcgcagggcttttactttcactttggagttaaagta

SEQ ID NO: 351705 - DNA, 539 bp, Cannabis indica
attggagttttatttagggcataaaacccaacaatttcaagggcgaccttttgtatgttgcatctatatgagctataagtacgtgcatgccgtgttggcctgacctgtatttttgtgtgcttttcaaaatagggtcgtgttgtcagaccatgaaaaaatatagattgtgtcgtgccgggacataaaagaaacatgggtagtgtcgtgtcgtaccaactattttatataggataagcctaacacaagccgtaggtctgatatttttgtgtcatgttttatttgggtcgactcgtctttttttttttatatataaaccagtccattttcttatacgagcttgaatttgtgctctttgatttcatatttttattataattaatgagataattactaaaatatacatatgaataattcaattattttttcataatttttttaacaataactacacacaattatataaaaataagagcattgctattaggcaccagtggtgcctagcaccttctcaaaatgtcgcgttgcgattggctagcgat

SEQ ID NO: 351706 - DNA, 638 bp, Cannabis indica
tgtcaatggtgtcgggttcaaggccatgccttaaatcagtgtcctatgtttaaggctcaattttctgcgattcaaatcccgacacccacacaagcacgagcacctcaagctggtcgtgtttcctattaaactcctcaagaaaacatggcaacggctgctgcttcctcttcgggtggttgtgtaaagaccgcttagtttaaatttggaaattagcagataattagggtttaattatgaaaattatttattgatatttaaataattatttatgttaatttatttgaatttagaatgcattttatatgtcatatatagaaatttcatacattgcattttcggtgcccggcaacaatggaacgcgatgtatggctaagtagaatcacatttttgtattttgatatagcggggcagtttggttagacgttgggaatgtcgggattaatcggtaatttagaattgcccaaaataccctcagtaccctttttatgtcaacttagtgtgagagggcgaaaaggtcgttttgcctatttgtaatttgtcttttatggatttttaattatgctagtaatctgattttttctaacttggtttggctgaaacaaaataagggaaatcatttttatttcattttattcaaa

SEQ ID NO: 351707 - DNA, 1229 bp, Cannabis indica
aaactctagagtgtatttggccacagacattttcccctgagtcagttttacaaagtcctccatatgtgaggttctcacaacgatgtcataaaattgttcctcaaacagactcttgaactcttcccaagtcatcacactgacatcacgagtctaccccactatatcccaccagacgcgggcatgatcttgtgacatgaaagcaacatagtttactctctctattcccatcaccgctatattatcaaggatacgggtgattgtactcatcccctaattaactttaattatatcaatacctcccaaaaaagttggaggttacagcttcacaaaccgttcaaacacagaatctctatgtggcaacatgaacccctagttacccaccactggcacaggtactggtggtaacgcttgctcaataggggcagtcggtgccggttccctcaactgacgcaactgttcctcttgacgaagtatggtacctcgcatttcttggaacatctgctgacagtcagtaggtagattagcattgccaacccctgcattatcccccagattctggagaggcgcaggcagtgccagtggatcgatttggtccgcactaggctctacttgctcgccctgtggtctagatgattacggaggatccattttttacaagtacccttgtaatcaacaaccctagcgagttaagccccaataccacacttatgcacttattgcattaaaccctaactcaactattcattccaattaaataaacatttatcatataacattctaagcatggcatcatatatcacataaatactttagatgctcaaataatgcctaaaatggaaagtggtaaatgaatgatcacataagcagtaaagcatttactctcaacacttactggaccacgagttcagattgtcgctgacgatgattgtacatgttaagtcgatctacaggaactttaaataccttggcgctctgataccaaactgtaactctctaacaattaggcacgtcacgacaactagttatgaaaaccctaatcctctaatgcgggataactaagaagaaaagcgcaagaaatttaaactttaaactaaaacagaataaaaatataacttgtaatagcattaaaccttacaatcaaaagtgacaagttttgggatcccaaaaaccatttacaaaatgttacaagtcctttcactagccgacctaagcggcaaaatagagttaca

SEQ ID NO: 351708 - DNA, 827 bp, Cannabis indica
tatttattaattagaaaatattaaattttattgtatttttttattaattaaaatgaatatttctatatatatcactatgttatttatttttattcgcatttatgtacacccttttcataaaatttatgtataatgcatatatatgttattgctaataacataaaaataactcagttataaaacaaaataatatgattcttgttttctttccggacagtctagtaaacatcataataaaatatagtttccgattattttccattttaaaccgatacatttctcccattgattattctgatttcaattacagtttagtaaatgtgccattatagtaattgtgctacaatcaaagtaaaaaatacctaacatagtatttagtatacgtgcctcgcacgtagctttttcctagtatatatatatttattggataaatctattgtggggctcttattttttccgcatgctatggggaaagaaattgagccaataagaagttaaagaaatgtaagtgtaaataatttttgttatttgacagatttttcatatttgtagctagtgggtacggtgctgctggcagaggggctgaggactcgccacgtgtcgattgaaaaatttttgagttaatttttttgcctttgtttaaattgcatatacaaagggaaacttacaaaaatactgtaatttgggttaacttttacaaaaatactgtcacacggaaatcttttcaaaaatactatatttttataaaacaccagtaaaacacaaagcagaataactcaaaacaacagtagaacaactaaaaaacaaccagtagaacaccagtaaaa

SEQ ID NO: 351709 - DNA, 756 bp, Cannabis indica
caaatgggacagtttttttattgttggagacacgatacagaattgaaattaaaagaacgagttaaataatcatctgccaaattcttaaatcatttggccaataattagaaaataaactaaatttttgcagcctctaaaattagtgtatctttgcattgattccaaaatcactcctattattttgatgtaattcaactaaagattttagtaaattttcaatcaacttcattattataatatatataggtttttttatttaattatcaatgccagtttagatttgaacctcataaataagaagttttttaagagaaaaaaaattggaaaatgtttcttaatatccttacccaacttcataactcaggagcattaatttcaaagataaatgctacttaaccttttttaaaaagtcaaattttagacattatataaccactggaaacactcccaataattaatgtaaaataactatttaggtaaaaatttaggtgaagtttgttaatatttttggttttaaaatttttaatcacaaaaataaaagtaattttttttttgttttttaaattttatttttgaaaaataaaaatgtattttataacaactacttctgttttttaagtttaaaaacaaaaaattaaataaaagtgtgttctgtaaattttatttttattttaatttgttaattttatttaagtcgggtccggatgtgggtctgggtcggggagttcgggttccaaggtctaggttggggtggga

SEQ ID NO: 351710 - DNA, 749 bp, Cannabis indica
cctgatcatactgcttcttcccattctctttctcagcctccaaatcgcgggccatctccacgatcgtcgcctgcgacttcttgacttcaagctccgcctgttccttcgccttgctgagttcttcgagctccttctccttggccttgctgagttcctcgagctctttctccatcctcgccacttcttgcttcagcttttttatattctcctgaaaatgagcgttctgcctcttcagcgagtcggcttccttcgaaggagtagccgcagcttttatgaacaaagccatcgactgcgcggccagttcagcagatcgcgtaacaagatcctcataaggaatctcagccaggaacttctcttgcatggccaggaagtcgcgagctcgaacaggtggatcaattacgactttcttccccttgtcttgtgtggtcttggccagcttcttggaagagtctgcgacaagtgtagccatcgcatcgctcttcctcttctgggcgacaaccggcgaagtcgtcgctgttccaccctttggtttgatcttcaggacaggggcagacttcagaaaagtcatatctgcgaacataaatgaaagataagtataagtcaaaatcctacctgttagtttataacaagagacgaattacctgaaatttgtcgaggagtttgcttagaaagacgcttgtctattcgctcttgctgcttctcggatggttctttgtatactggctccctttgaagacttgcgttctcag

SEQ ID NO: 351711 - DNA, 548 bp, Cannabis indica
tgatgatcaagttgtgttggctggcttagaggcttttcgtaaaatcaatgtaagtgtatcttaatttatttgcaagaaaattatgttttattttggttgcttgacagtttaatgtttgttttgcaactgtttattttctgactttgttttttttaggtcctagaacccaatccaaatgttgttggtgaaaagacaactaccattcatactgatgaagaagctgaggacattgtttctgatactcctcttttggataatagaaagtgtgcaccggcattggaatctccttttgttgatttcgggtcagctgatgtgaggagcactccaatggaggtaatgtcctcaggttctcaatcaggaggggatgagagggattttaagatggttacttatgtgaagggcctttatgctcttaacgattcatttgctgatcccgtctctcctgaaattgaggcaaagtttgacgcttggattggtgaaggcttgctaaaacatcctaggtgactatttttattatttctgtatttgtattctattttattttattt

SEQ ID NO: 351712 - DNA, 1000 bp, Cannabis indica
attgagagcctcgtaaaaacagaaaaagccttcccttctttttaaagaaaacccttctcctttatggctgaaaatccagagaatattaacaccccacatgaagaaactaaccgccgttctgggaaagaacccatgggctctagaagatctaccaatccgcagtccaaaaggaccacccgttccaggagagctcaacctgaggatggccccagtgctcggatcacacgtccccggagaactaaacccgacgttggtcttagtacgaggacaacgcgctcgaggacaagtcagtgtgggaatggtcagaatcccgagacaagggatgaagagttcaaccatggaggtgcccaatctgtaagagagggaacttatgaaacagaaagtgatcgcctgagacgccaactggaagaggagcaacgtctaaacgctgagtcagggcggcgcaagggacgaatgctcaaaatcaacctaaacctagagtgagaagaccacgaggcagacctcgtagctcacgaaccaggagacaggaaaaggcccgagaagaacaacccggggaaaatgagacacgccctgagaatcaggatgaacaggcagaaaggagacagccagaaactaatgaacgagaaatccctcatgaaaatgaggaggatcttggaactcagccgggagaatagagatcacaagctaggaatcaccagcattcttctcaaacccatagagcgaggacttgtacgtaccctgatgggggaaatacgaaaaaccactctcgggaggaaagaatagagcatgaagaggaaagtgtgacttcgagccaattcagaactcatacccgatcaactcaaagaggagaaagtactcagcgagctaatgatcgggagagtatgggaacgagtagatccgggagccacttaaaaacaaggtctataagtaggacgcggtcaatgagtaagacgaaatctgccagcaattactcccaaccggatctacgagagcacttgaa

SEQ ID NO: 351713 - DNA, 516 bp, Cannabis indica
cgccgcaaattgctcaataatttaatataataatttttaagaagtatcgctaactaatcacatgatgacatgtctagagttgttaggcaccactagtacccaataacaatactcttttttaagactactttagatttttgcctctgaactttttaaaaatttctctaaaattattgagattgttggacttaaaaacttttatctaattttactaaagaaagtctgacgtggatgaaaatttaggaggcacaattcggtatattaaagttcacgcacatgattttataaatattaaagttcgagggatacgatttagtatatggacaattttcatattagcaaaattgaatgaaattagacaaaaatctttaaatcaaatctatcaatctcaatagttgtgaggaaatttttaaccacctaaaaattcaaggacattatttagtacaatatttttaaaaaaatctaattagcttttttttattacattaaattatatatcaaaaataatatatatat

SEQ ID NO: 351714 - DNA, 616 bp, Cannabis indica
caggagaaacctgacacctcgcggagatgccttagcgttactcgagcttccgggagcatatggagttccatatgccttctccgggagctacgtcctggacgctaccttatggcataaagacttagcaaatattgtaaattgcttgatccacgtgtccttatctggttggtccacgtatattgagcaaaatcaggggcaacaaatacattagtgattttgatttaataaatttgcatgacgcttgaagaattttgataatctaacagatgtattaaaaataattactcaaaagtaatcatttttaattaaacaaaaaactcattacacaattgaaacccaaaaaataaattaaaattaaaatttaatcacaaacgaccgagtaaatcctcaatctgtagaaaacaatcagtagatatatatccaatcacaaagtgccaccatattttgaacccccaatatacaacatttattcacatcaaaaatatatttttttggtagaacaacaaaacacaaatttgtttattacacataagaaataatagaattacaatttaataccaaaagtattaaaagtacatataaatagcaaaaaacattaatttttaatatatatata

SEQ ID NO: 351715 - DNA, 1330 bp, Cannabis indica
atcatggcggaaacaaacaaatggaggtgctaacaacaaattcatcaacatcggaatgatgaacgtgccattaactggatctaggacgccacctgtggatgttgttaatggcggagtagggcgaggtaatattatacctctcaatctattccctgaaacaactggcccccaagttggagaaacatccacgccaccagcaacaatgcactttccgcctatcactccggcggtagtatccgagggaatcgtccaactcaccaccgaccaatacacctgaggtggatggacagaacagggcccgacgcccccctcgagccccaactactcacacagataaccctcaggtaactaactctaggcgtcgtaataatcgtgttcccagggaacgaacaaccaaccctgacggtctggatctaaatcatccaacctcgagagaccagtctgcgaggcatcccaatcaagaagcacgggttgacgaagaccccgagcgacgcaatccccgcagccggccttcaagagaacgacgcagagtctgccacctcgtccttgcatgctcgcacacctagcagctacacgaggtccagttctatggagactcaacagggaggacgataccaagtccataggggcgatctgcgtgatcacctcaacgtggttttcagagcacgctcccgcgcccctcgcgacgaggaaacaccccgtgatccccccgtgggtgatcaaggtgtaaacactcgcactaacccgcctaacgcaccggcagcgactactggagttaatgtcccagcgaacctcgccgcagtaatcacagctcctgcagtcgcagcagtcccgacccctatagccgggggaattgatcaaagcatgcttttgcaagctttgaaaatgctcgagcagcagagaaagcccatatacaagctgcacgggacttctccttttactgcggaagtgcgacaggctcagcttcccaagggattttgactgtccgaatccctaaaatataaaggtacctctaatcccatagattatttagaaaagtttaacactataatggaagtggatcaggtacctcagctcgcgaaatgtcgcattcttgcggcaacgctggaggaaaacgcccacgattggttcacccaattgcctgaggcctcaatatcgacatgggaaacctttgtcgacttattcctcacgcattttcaggccacgatgacttataggcctccctatactactctggccaacatcaaacaagaacccgatgagtctttacaagactattttaaacgatttaatgcagagtaacaaaagtcgagaaggctctcgagtcttc

SEQ ID NO: 351716 - DNA, 681 bp, Cannabis indica
atgaagaattttcggtagcccataaagtaagaactcaacgtacaagcatgcttgaactgggtaattttatgatgggtgacctcctgggaagttttcctaagaagtgtgcgagtaaggacaaagcacgttgaaaataatcgtgttggtttatagggtcagacgtcattccatgaagctaccaaagttatgtactcgtgtataagagccatcattccgtcggtgtaagggcctaattgaggctagacgcaaaataccgagtaagctgtgaaatcccacactgcatggggaaggtcaagtgggatgcttctaagactgtgtaggtatgggactacatagttgaatagggcttaaatggattgattggtactaccgatatcaacaaggtgcatcttatttttcggtagtccatcacgaaagaattccacagttaagtgtgcttgacctggcttaatttccagatgggtgacctcttaagaagttttctcaagaagtgtgcgagtgaggacaaagcatgctggaacaactcttgttagtttgtagggttagttaccattccatgaagcaaccagagtgacatactcgtgtataagagccattattccgtgagtgtaagggcccaatggaggcttgaagcggggacgttacaaatggtattagggccttaacccagccaaaagtgtg

SEQ ID NO: 351717 - DNA, 1458 bp, Cannabis indica
ggtatagggaatgttatttgagagtacattacagtgatatcagcacaagtgcgggaaagtacgaagtgtgtgtggtatatcactcagtggtactcagggtatgaaacaaaccctaccaacactcgtacagtgaggtacgtagtgtatgtggtatagtggctataccctaatcacattatgaaatcgggtaagttacatgatcaaaaccctaatcccgggaaaccagaacccacaaccttaggttctgctatactcactagagattactcaatctctggaaatatagaaacacccaaccacgacactgaaatggatgaaaattgagaaaatgaagtgtttggggaccctgccaaaaccggctaaccgattttagaggtctggtaaaaccggctagccggtttgcaccagttcaccccaaacctttcacctcttgctcaattttccaccaaatgccaccaaaccttccagagtacctaaacaatgcatggacaatattttccaaccagtatttcacagaaaaactcaatgaatcaaattatgtcattagatatcaaagctttgaactcaaagtttaaacttgcacaaaacctaatccaaacaccaaaaccaactgctaggaactaatttcaactcaattgaacctaaaaaatcaaaccctaaacaaacctaaccctaacagcccccatttcacaaaatcacataatcaaaccaactaaaaatttgagaaaaacataactagagagcaactagggtttaccttgattgattcctcctccaaccctggctaaaaacacaaaatccagcaatgaatccccttatccttgggtagtcattacaattattcccccgttaaaattaaaagtgcatttcaaataatctcaacaccttgatatccagatcaagtgtaatatgtagtattctctctgtaacaggatctgacaaggtgtattcaatacaaactttctctactattacatatccttagtcacaaaatccttgatattgttaaattcctctctatatgtctactcctctagggataatagattgtttactttttggcaactacatttgtgttagtcaggaagtaacaccagttgtgaataaattattggtacagtgccaaaaactatatagaactttccataggctgaataagtatctttcctgcaactttaacatatagtctcactggtagagttggagatttcagatcattttttacatttctccaaaatcactgctccacccccagagtaatcaccatctcattggtagactttctagcactaacgcaagtctataaacttaatttggtgtaatctaagagtattaaataccacccttatcgactaacacatagctcctcttcttgatcttgagatttacttgattatcttctaatgtattttcctagattatttgatacctactcattactctcactcaacagcaggt

SEQ ID NO: 351718 - DNA, 783 bp, Cannabis indica
atacagcgcattaatggtagtacaaacggatactcaaacgtttccaccgccttaattgcaattatcttgttcgttgattttctgagaattcgaatcgtacgcttcccccaccgcttgattggtaggtgatgacgcctgttcctcatgtagctttgcctataaaagccaccatccttccctcaattccggtacttcccatttcttgccaactttgctcaaatttcccagagagaaaaattctcagacccagaagaacacctttaagcaccttgcagttttctccatttcttcttcgtttgtcactgttagtccttcttgtcttcattcgattcatagcaggacccccagttccaatacttcattgtaagttctttgcaccctttgcttcattattaatatgcatggcatgctgttacttatctgtttgttctgggtttgcattcgaagtttctggaaatgcaagtgtttaaatccttcatataatcggtttgagtttactgctctagtgataggattacggttgtcacgcatttgttgtgattttttgcagaagaccatacgttcttcgtataatggtcgcttagggcataggatagactgttttctttctattttctgccttttctttttctttagtgcgcaatggcgtcttctgtgaatttattgcacccgactcttgtctagggaatcctcctagggtttcctgtatgacaggtgtccggagggggcctctttccagcggttaggggacccccattccctttttcttggtttagggtttgg

SEQ ID NO: 351719 - DNA, 644 bp, Cannabis indica
ttgttacatgtcacatattcaagaaaaagaagattcgagtttagtatttaatgatactctactacaaaaaggattcgagggttagaatactaaacgaaaagagccagctaccatcattgtaaggttttttaatctcctatgagttaattgaccgttttatgtttttcatattttaggatgatagattatttatttgataactaaacatacatgtcagtaaattaagatcttggtaaaacaagctccaacaactaattctcgggaggaactgccctttggccaagctttattcaatcttcaaaatggagaacaactaagaagaatacaagagttgagctcattaacaatggtgtcttgcaccttacaaatcaactcacttgagaaagaagcgatcaaacacacacatcctctttaacaaccctcctaattcattacaaacataattatcatctaaattcctctctagatcgtcacctaaagaagtaatacacaaagccttatataggcaactcaaaggggtacccgagttagttaaatgaaatttaactaccttgggagctggctggacaaacctgctccatctaacaggtcactagatgagactagcacagtagtacaccaagttactaaaatctcccacaaat

SEQ ID NO: 351720 - DNA, 731 bp, Cannabis indica
gttaattagttattctaactgatttggaatcagttattttttctgttaattatcttgccaagttgttcatttgtagcacatgtctaattgtacctttgcctatataaaggcttgtaattcagctcaaccataatacaaccgattattttttccatctttactctgttttctctgttacaaagcttaaagcttctcatacctttaacccgttttccaataatcatagttttcatggtatattttaattagatgtattaacttattaaaaaaaaaactaattaaaaagtttaaacaaaatacgaaagtaatttactaaaaaacaatgaaaaaaagatactaatgtctttttatttttcttgttataatggaaaagttcaacatgatagataaaaataagacttgtttgggaaaaaaaataaaaatttaacataaatatagaattaaatttaatgtcattaaatatatcatttcttaaccaaacaaactatatatatgagtatataaataaaaaaaataaccataaaattcaatcaaaaaaaaaaagacagaataattttcaaacaactttctttctcatgcgataatttgcttctctgtcctgcgatctctgtctctatctctctccatctccctttctaatctacacttggtaataatatttaatttaattctaatttcttaatctatatcaattgatctttactgttacttgtctaattttgatatgctct

SEQ ID NO: 351721 - DNA, 569 bp, Cannabis indica
atgttatactacacattattgtttgtgattattcttttagggataagtacaaatagaaataagagcattttatgttatacagtttagtacttagtagtttagagttgggtgtcccatgccacctttaacccgttttccaataatcatagttttcaatatggtatattttaattagatgtattaacttataaaaaaaaaaactaattaaaaagtttaaacaaaatacgaaagtaatttactaaaaaacaattgaaaaaaagatactaatgtctttttatttttcttgttataatggaaaagtttaacatgatagataaaaataagacttgtttgggaaaaaaaataaaaaatttaacataaatatagaattaaatttaatgtcattaaatatatcatttcttaaccaaacaaactatattattatatatatatgagtatataaataaaaataaccataaaattcaacaaaaaaaaaaaaagaacaagaattaattttacaaacaactttacttctctcatgcgtataatttgtcttctctctcctgcgatctctgtctctttctctctcc

SEQ ID NO: 351722 - DNA, 514 bp, Cannabis indica
cagaaaccattctcaaactcatgcaataaagacaacaaccaatttcgaaatttctctttgaaaactataattttgagccaaaacttccaagcttgaatcaaagcaactaacatgcatcataaccaggtctaatctactcaatcaatcaagaataaacttctgtaaacaacatcaaaaacacagcagcaactatgaatcaaaactaagcatgcaaaccactttcttttcataattttcaacaaattcaagagagaaagattaggagctaaagtagcttgattagaacaccaaaaagagtttgaattcacaagaaaattccaaagatccttgctgctcaaggaggccgaacaagagagaaagagagagctttgatagaaaattggtttttctgttaacttttctaattttctaattttgaaatcaaaggataaatgtaatataccaactctatattcagccaataaaacaataataactcaaatattttcacaacactaagtccactaaaggaaaa

SEQ ID NO: 351723 - DNA, 454 bp, Cannabis indica
tttataaaaatacttttaacaaaattatttgtacaaatatcgatgtgccatgtcagctcaaataccaaaatttaaaatattttccgaaaatagaaaaaacttgaaaattttcgcttccataaatttcattttataagtttttttttttaaagcaactttttaattgcttttgatgaaaataatatatcaattagttaatttttattaaaaaaaattatttcaagataatttttttctcatacacatttgattgatcattttaaatttttaaccagtttactttaaaattaatatatatatatatatatattataattttataatataactaattttattatatttaagatactatttgataactttataaattttttatacgaacgtatcaaatttttgttgttaaataaatttgttattagtatattatatcgtaacttttaaatacaacata

SEQ ID NO: 351724 - DNA, 559 bp, Cannabis indica
tataataaaaactgttcggagtaatggtaaaaggtttaatttcaatttaagaggtcatgagatcaattcccaacttcaacattttaattttttaaaaaaatatttaatgtgtggttatgagtgattgaaccttggagctcttaagagtttttaaaagctttacaattaaactaagcactagaattatgattttaataatagttaaactatatgtatataggggccccaaaatttgatttcgccttaggccccatataccttaggaccaaccctgtaaacttgtaatcctttctaattggaataaaattaacagaattagtcaaagatcaacaatcacccaaacaacatcatgcttcaatgtgtcaatggcgatccaataacaaattccattgtaatcttgtcccatttccattctggtaggcaaaggttgaagtaaacctgaaggtctctaatgctcagccttaacttgctgacaaaatatactgtaacgtaggggtgagcaacggtcggtttgatcggttttttacacaaaaaaaatccaaaattcggttttcggttt

SEQ ID NO: 351725 - DNA, 945 bp, Cannabis indica
ggataattaaataaataaattccctaaaaatagtaataataacacacatgaataaaaatgatacgttaattaaatactaaacattcatttgtacatttttgtagtatagtagtattattttgctaaatatttatagatagatatatatatgcatgaaagctagctagcactcataaaagaatctttatcttttcacaataaaaggctttaatttattaaaattaattattatttattttattttattttatttttggtgaaagaaattaatgattatatttatatttgaaggtatggtaagagagaagagtgaaaaggagaggcgcaaagcattcgcatcaagaaatttctttatattaattgagacaacaatgtccaaaatgaaaagtactttttgttaggcatgtggggttcacttcaactcttttgttgtttttagaaaacaacctcaatttatagagagaaaattattagtaaacaaaaaaacacaatgagagggattaaaaattaatataatgacttaaaagtcaattcctctttttttttttttagaataaaaacgtttaaaataaataaaataagagttagactttccggttattacataagatgttttctagtatagaagaaaactcaatcgtaccagttgcttttttaatgaaagcctacctcgctaaattacgagctgcaaaattataaagtttggaaataaatgaaaaattacaactaaacaaaagattagaaagatgtttacattgatgaatataattatcaataccccaatcgaaacagtttcctttcagagccttgataatcgtctcagaatcactttcactcaatcatgacaaaacagtgtttcatgatcaaaacaaccgtctccaaagctaaccgatatgccgcttctccagtaagcgggccagacaacgcaacgcacaaaacagccca

SEQ ID NO: 351726 - DNA, 664 bp, Cannabis indica
tatttatcaactagtaaaaatttaagacaaaaaactagtttcgtaaaataactaagataaaaactcacacacaaaaacttaaataaaacagctcaaacaaaaatatccattcaacatgctccaacccaccaaataattacacccataccatatctacctcaaaaatactcattcattatggtatataaccggttctattttaattataaccgatttaagttatttcgtgttgtttgtttttattcattataacattattatagaaccgattctaatttaattataattagtttaagttagtttgttttatttatttttattcattaagttacaaaaccggttatatttcaattataatcggtttgagttattttgtgttatttattttcattcattatattataaaacctgttctatttttgtttatatttgagacatctacttcttgtgattttttcagtgacttttttcggcgacagtgactttttcggccacggtcacttttctggtaacttttccagtgacactaacttttctggtaacggtgacttttccggtaaaacttattattgtttacaaatatgagatttctatctttttttacaaaaatatggcataaaaacagcccatataaatgtaaaaaaaaaggctaattaataatttt

SEQ ID NO: 351727 - DNA, 1106 bp, Cannabis indica
tcgaggaaggcctagctaggaaatcaacctaccgaccagtggaaataccaccagaaatactagaaaaggccacatgagccttgatttcttctttaacaagcctctataaatatctcaaattgaatcctaccaacttggactcatctaatctatccgagaataaaggagcttaaacagatcgtaactgcaccctagaaaatagggatatttaccctttagtcacaccttttacagagccaattgtatcaatcttccccgtataaatagtgaatgaattcacaaggggaaaggacctagaactgaaatctcatactcacgcatctaagaccacttttctgggagaaattctatttaaacactttgagagtcatagctaaagtttgatttttcttccttagtgatctatacggtattatctcactagaaataaaacaaaagaggggagtatgtcattacccacatacaagggcgcctaacctctataaattatgtgtgttctttttatttacttactattcttaactccttattcgtgattaatcaggatctatttgactctgagttagttggcgatttttctagtcaacacacataaaaggaaccaaacaatcaatctgttaggaaagttaggatttcataattgtagatcatgttcccaggcatccatattatttgattccaaaaatagaagttgtaagaatcatcttctttgagaaactttaatgagtgaatcaaagaacctaataacatgaacaagagttcatgattactcaatgttaagaccgatctactattgatcatctttatattatgaattaggtctttatagtaaatgacatgtttgataaagatatcttaattacatagtggtccttgtcatatataatctctattatatatgttgaccgaggtttttggcaaccaatataataataatatttaggaaagctgtaagaagttaatgcaagagatttttacgtggtttgggcattaatgagccttagtccacgagtctgtgtatttatgagagtatttattacagagaatgttcttggtgattttcctctctagttcttctgaaacccagaattctcgacccatgcctt

SEQ ID NO: 351728 - DNA, 474 bp, Cannabis indica
atagttcttttaaccccttggcgaagaagatccatagaactccagatgcttcgccaaacaaaactaggattacgccccaaccccgcagagaggtagtcatcatgaggaaaataacgagctttatagagcctggagacaagggaatccgagtagcacaacaacctccaaccctgtttagctaacatagccaagttaaaatcatggagaagacgaaagcctaaaccaccttcatcttttggacgagaaagacggtcccaattcatccaaataattccattgccctgactactagttgttttccaccagaaacgagccattaacttctcaatttcgtcgcaagtaccaagtgggatgagaaagacactcatagcataagtagggagagcttgaaccacagtcttgaagagaatttccttgcccgcacttgacaacaacttcccagaccagctattgattctgttcaaaaccttgttc

SEQ ID NO: 351729 - DNA, 604 bp, Cannabis indica
gataactaatcagattgtaaagagttttatttagggtataaaacccaacataaactcttaaaaaagcaatcaagctagtcgtaccctgactcccaaattcggccctagcaaagttctgaatcttaatgcaggctgcatcgtgcccgagatagctgtccaagggccgaaactagctggaagaaagataggccgaggggtccaagggaacgggctccagaggtccagaacccctccgggaccgacctaaataatctcctaagttggagaaataatactcctttgcatgatccccccaccgggtcgagggcatcctaaacctaaggagacgttcatcgaaccctacaggcctaaggctagcatattcgctaacaggagggacataatgtattgccaaaggagacttaccggagccggaagtgctggcgtcaggagcccctgtattcggcacctggacggtaggccttggcctaggagccctcttctcaaccgggctcccaatgtgaagggatctcccgacagccgtttggcttctcctctcgaccgggctcccaacgcgaaggagcctgccggaagccgcctgggccttagtgtaagccttctcctg

SEQ ID NO: 351730 - DNA, 661 bp, Cannabis indica
tctaaaacctaaaataatgaaaagaataaacacaaaacccacaaaagttatataagaaaaaattaaaaaatgggggaaaccaaaaagaaaccgaaaaaaacctataatcgaagagcatcatcatcctaatcatttttttgagcagaagcatgtaaaatttttggaggggcagcaacctttgctttcttcttaggaggagcacgatcacgtttcgataactgaggaacaaaatccgagtcatcatcttcaccaacaggacgtttccccttagatctattagctacagattttacacttattttcgattttttttttggcaatggagaaggggtggatgaagaacgcgtaatagccatatttatatatagattaacagtaataaaaagagaggaaaaacggatatggaaatcggttaatgtgagttaaaaaaaaaggaagaaaagaaagaagaggaaaaatgggttgggatcgtggagggacacaaattcagctatggaggttttcgttttcaaaaataaaaattgaaaagaaattgaagataataagaaaaagaagagaaaaagagaggaaaatgatgtatggattgatagagtgtgtaagtggtaaaattgtaataaaataaaattgaagagtaaaaatgtaagcttaaccatgtggtgat

SEQ ID NO: 351731 - DNA, 567 bp, Cannabis indica
ctttggctggtgctttgggaaaggctaaacacaaaagagagactaagtaaattcatgactaacatggatgcaaaatgctgattctgcagcaaggaagaggaaaccattacacacttattttttgagtgtgaatacagccggagctgtctgcaagagacgaaaaagttcctgcaatggaacacaccagcaactactatcaagcagctgcttcaagcttgccacaacacaaagagattctcagcagctaggaagagtatggtgaagactgtacttgcaagtttggtgtattatgtttggaaagcaatgaatgaggtgttatggaatcaacaacaatggcttatcaacaccacggtcaagaaaactcaacaaatgagtaagatcagaatcaaggggctgcttcctaagaaagctaaggatgaagataaagcatggatattaatgacttgacttgtatagaatcaaaatgtaaatgtatttgatagcaaaatgtaaagattagtgatgtaaaagtttggttggagcaataaaattcttattcataaaaaaaagctatagatttcgtattta

SEQ ID NO: 351732 - DNA, 535 bp, Cannabis indica
tcaattcttgagtaaagtgtatcaacctgccttatgtgccaatttttaattcaataacttcataattaagctatgactatgacacacttagatccgtcttgaaaatatctttctaatgcaaattgaaccatgtcattaagataaaaattaagagagttattcccgttttactgaagagaagattgtgctgttttgttccagttgtaagcactgacacagccaaatggcagctctcggtcgtgcatgttctcagacccctcagggtgtgttttgaattttttatatggtgagccttatttcggggggtctcgggaccccaaaacttcattttgacatccaaaaccctaataggagaccactgccaccagtcggggcctaaaagtggcagtggtcgaccatggctgtaacgccctgtctaatagggacgccacgtgtgtgcttttataaaatttacatttactaataagtataattatatcaaaagtgaggttaattaaaaattttcaatttaaataaacacataattttcattaaa

SEQ ID NO: 351733 - DNA, 815 bp, Cannabis indica
ggtagtggcagcggaagcggcagcggtggcggtagcggcaacggcagtggcagcggcaacggcagtggcaatggcagtggtagtggtgggggtaacaatggaggtgatgctaatgtagataaaaatactaatccagagagttgtaaatgtacttgcaatgataaattgagtggcaatgtcaacagtgatagtggtggtggtagtggaagtggaaatggtaaaggtggtggcaatggtagcggaagtggtactggcagtggcaatggtagcggaactggcagcggtagtggtaaaggtggaggcaatagtagtggtaaaggtggtggtgatggtaatggaagtggaaatggtaaaggtggtggcaatagtagcggaagtggtactggcagtggcaatggtagtggaactgccggtaaaggtggtggtgatggtagtggaactggtggcggtagtggcagtggtgatggtagtggtaccggaagtggtgtcggtagtagcaatagtaccggtaatagtaaaggcaatggtgatggtagcggaaatggtagcggtactggcaatggtaaagataccggaactggaactggtaaagttaatggtaatggaagtggtagtggcagtggtaatggtaacggcaatgaaagtggtaaaggtaatggcagtggaagtggtagtggcagtggtaatggtagtggaagtggaagtggcagtggtaatggtagtggaagtggaagtggtagtggcagtggtaatggtaacggcaatggaagtggtaaaggtaatggcagtggtagtggtagtggcagtggtagtgg

SEQ ID NO: 351734 - DNA, 304 bp, Cannabis indica
ttatcccattttttgcactgtgacatggcggcacctgctggtgacacgtggacctgattcgccgtatttgctcgagatagatgcttcgagcagggcgcagcatacacctgcacggacgatgtcttcctagccgagcagtggataatccgagtagcgcatcaacacttaggaattcaagaatttgcatcgtgaagcacaagagcaatccctataaacctggaatcttatcacagagatatggcaagctgtccaaatcccacaatctgtatattctaaatatgtaatatattgttggaaattattt

SEQ ID NO: 351735 - DNA, 466 bp, Cannabis indica
aaatcagggaattaaacttttaaacatataatcatgattatatttcaatgtgttgacaacactataatcatgaacaaatacatatgttcagaacttaatagaatttatacattaaatacaataacgaaataaatcatgtgaaccatgcaacatagaatgcgatttcttatctttattaattagtaaacctgattatattgaaatgggttttatttagggcacaaaacctaacagtcgatacacagggtcgggttcagtagagacaccgcgaggaggaagataccaagtgcataggggtgatctttgtgatcactttaacgcagtttttagggcgtgttcccagacaccccagaatgatgaagagcctcgtgatccctagtttggcgatcagggcataaacaatcttatcaacccgcctaccgcactagctgcgactactaaagtagttatcccagcaaatatagct

SEQ ID NO: 351736 - DNA, 643 bp, Cannabis indica
atatgaaaaatgcagttagtattttttttttagcaaatgaagtcactacatttccaagttgttttatgttacaaattcttaagtatgtaaactataaaaagtgatttaaaaataatggtgtgataatttagacatgaaattgcagggtttcaagaatgtaaataacatgggaggaggttatcttgcttgggtgaagcatggttttcttactcaaaaaccaaaagaagagctttaaggcgtgtgtatttttttcattttatttttcttttgagaaaaaaataaaaagaaaaataatgtattatctgatttaaactttaaacatgtcatatgttgggacacatttattacacctaaacataggtaggtactcctttaaatgtggattactatttggcacttaaagttcttaacatgatattggtgttgtgttaggatctacctaaaagtcactaacttgcatcattaaggtataatattattattgatattatttaggctaattagtaatttttcacatgtactaaatcgtgtccctaaacttttttggccgttagaaattctccccgaaatattgagattgttaaatttaaggactttgtctaatttcattcaattttactgattctatgtactaagccatgct

SEQ ID NO: 351737 - DNA, 505 bp, Cannabis indica
ccatttttgctgcttctcttctctataaatttctctctctatctctctgtcaccttatctccattttttttttgttcccctatatcttagggttttgcgattggaatcactaactttcctcctttattcagccaagaacaccaaagaatcaagggatttgtctttaagatttgctcaccattttccaagattcaaggtaaattttgctacctctccatttcaaaattcccctcatttcttagacagaatatttttcattgttctcttgattctcgatcatttttgaacttgatgtcggaattattgaaacttgatttggaattttgaccttgaatggtttgttgttgctgaatgggtatgttgaatggagttggaaattttttactatttttgttgtgggattcggatcattttggagtttgaattgttgtaggtgaaatatttggctctttattgtttttttttttatcatggtcgtggcccatgagatagattttagaatatg

SEQ ID NO: 351738 - DNA, 554 bp, Cannabis indica
atgtcatgattattgttttaatcttgtttagatggccaccaaattaggttttactttaatctaccgtcatcttaggattactattcacctaatagtctatgattctaagtgtttgagacaaattgtaatttttatttgtgatgaagaatagaacctaggttaaatgaattatatgcttcattgatttgttgcgtagattagtctatctccatatatctcaaggctttatctaagttaaataaattgcatgcttcatggatttaccgctttaggtaaaagatttaattattgagcgcttcgccttgattacatacaataggaagattgggataattgactgcttcagctttatctgggagattaatagtttgattggaaactgaaaattatattctttaatagaaattaggaatgattgttgagggtggagaataacctttaactagtctcttataccgtagtctcaattttaatttatttgttttctttttatttttgctatttttattctaatcatcaaaaccccctttttctaattcttgttactaatttgt

SEQ ID NO: 351739 - DNA, 420 bp, Cannabis indica
gggcataaaacccaacacaatatgcatgaatgaagaaatgaatatcctaaagaacaattaaatctatttttagtaaagttgcctaatggggtggagaacattaatttagcataaatctttcaccagtaaatgctcattaggcaacatagagaaatataaagatataaaacaagattcattgctaagaagtttattttgaactacgaatcaataacaagggagatttacattctcacttgtctttatataagattctattatagtaacattggcatttattgctcgtttcaattcattaatcaattcaaaacaatgaactagaggagaaggtatacagattactataatgattttccactaatagttgtgaactacatatgcaagcttaagaagtctacctatagattaaaacaaacatct

SEQ ID NO: 351740 - DNA, 1178 bp, Cannabis indica
ctaaacattgtcaaaagtgatagttggaattgagtttaacgtcaattccttctcaagaacaatatctataataatcttatttctctcccaaactcaacatcctcaaaattattaaagtttctcgtctcaaaattgaaccataatgtgggatcacaaaaattgtagcttttttaattactagagtatacagtaaagtatagttccttactattttggagtccgtattccttttatgaggcttataagacctcatcttaattgaacatccacaaatagaatatatctatatgttagactatgagtctaaccacaaccttagtttataaagagttttaacttatactttacttgatacacagttcagaatttatgttgcattcttaagtgtttctccccaaaaacgagtttcatgacgaagaatgaattatcacacttctagtcatgtccttagataaatgttaattacatctctcaaatacccttcatgttaggtttgcctaacattttgtattggaagatgaaattacatttctttagtatttgtgcaaaataatcttagacgttattcacttgattcgtcatacctcccatggtagtgttaaccatcatagttagtttcaacgattttaattttcttacctagttgatttgtcaactatggtttaaaaaatttaaaagaaacgtctaaagattaatgccttatgaacaaaacaagtttcattagtctgaagacaagatactattattgatcattccatgaaaccatgaggaaagatctaccaaaatatagcataaattcttagataatgaaacttttattttgtcgcttgatttctttatgtttgtttgttacccctttataaaatctaaaatttattaaatcaagggatcaagaattctattaaaaataagtccttctattctccttttgggagatataatcttaatacttataccaaagtataatagaattctcatgattcaatttatattttgtaccataagagaaattataaggtttctttatatgaggcaaatttcaataaattcataaattaaagagctagtagaaccaatattggaaaagacttttaaattctaaatgaacaagaatgtcctaacttattcaaaatagaattcaaaaccaaaactcatctaggtgatgatactgtataagt

SEQ ID NO: 351741 - DNA, 748 bp, Cannabis indica
gtttcatgtcctgcacttcatctttgtcatcagatctggaattcaaagatgttctttccattgcactacataaaggtaaacaccaatgtacttttcttatttcttcttttatttcttataatcatcttcttgctcttttattgcttcacttgattctatcactattcctaaaactgttcatgaagcaatgtctcatcttgggtggcttgctgcaatgatagaagagatgaatgcttttgttgcaaataatacttgggacttggctaatttacctttaggaaaatgggccatagggtgcaaatgggtgtttacagttaaattcaatcaagatggaacaatttctcacataaaggtatgtcttattgccaagggttatgctcaaacctatggaatgaactatcgtgatacttttttcctattactaaactcacatctgctcaattgttcatttccatggcagctactcatcattggcctttgcatcaacttgacaataaaaatgctctttttcatggagatcttgagaagaagtgtatatggagcaacctcctgggtttattgctcaaggggagttagggcgagtttatcgtcttcgcaaatctttatatggattgagacaaagttctcgttattggtttggtaaatttagtcagcctgttgagaaatttggtttgttaaaaagtaagttagaacattctgtgttctataaaagatcaactactggtatcattttattagtggtgtatgt

SEQ ID NO: 351742 - DNA, 573 bp, Cannabis indica
tgtaataatcacaatataatgtgattggaagtaacatacatgtaatattcatataagttgtaacataaaaggtggagttactcatattttgtaacttccacatgatcatcaattaagtgtgtaaggagtggttacacaacttaattttttgaagttcaaagctataatgcaaatatagctgttaggaatttaattttatcatttataatatttataagtgatatgaaataaaatggaatagtttgaaatggtttgaaaagttatttacaaaagctgaaaaattttgtaactagtaactagttacttttttttcaactttaatattagaacgttttttactatggggatgccttttaacaacttccataacatccaaatcacccatttaatttcatttacacccaactaagagattataacagccatgggtgtagaatgtttgaattttaaagtgtgtgatcctaaacagtataaatagagatattggttcatcctttgagacacactcttctattctatctttcaaacacaaagttagagagttttaagacttgataattcccataagtattt

SEQ ID NO: 351743 - DNA, 613 bp, Cannabis indica
cagaattcatctggaaatacaagatatcatgatatattgcaaattcactactttaaaattttaataatttttaaagtttttgattaaagaacctatcccacaagaagggaaggtcaaaagtagcagttgcaaataagatataactcataaaaacaacattaagctacatgcgaaggtgaatactaacggctcgcattttgtaggaaagtattaaacgagacaccaagatgccttgaaaaaaatacttaaacctaatatatgaatagaaggcctaactattcatataagcaatcaaaaatatacgaaatgatgaatcattaaaagtatatttaagtttgcttaaaacagattataactgtttatgtgaaagtagaattgataactactcgtaaatcaaaagcatagcagataataattgctcgtacacatagtagattactaactacttaaataatatcaaaggaaaatacgagcattggaaaggcttaaagtattttaaatttgatcaaaatataattgtttcaaactatttttatatttatatacatgtataaaaaaaaattaatgtagcacaagtgggagaatgttagacttttctttttggcttacatat

SEQ ID NO: 351744 - DNA, 544 bp, Cannabis indica
aattcttcctccacgatgccacgcaatatttgttgaaaaacaccatccatcaaacacattaagatacaaggtccccaatttgtgaaccttgatccttgtctcaaggagccccacaaaaccaacaccctgattttgaatgaattgcttgatagttctttgcttttgagtgttgttggcccctcggacattccagcaaagaaacttatccatttccaagagagggatctcccccctctcttgtattattctgttttgccccaatctccacttcttgcaaatcctgcttctcaccacctgctgctattagtacactaaaagtgttctgcaattcggtttctgcaggtgcttcttgtgacctgcttctcttccccctgtaaccggttgaaagccctcctcatcaagtgtattttttttgttgtctcccctgttatcattcttcactatccattctttcttaggctgaattatcttcttacattcgcctgtcacatgtcccattccatggcaatgttgacataaacttggcttccattcatactgtaca

SEQ ID NO: 351745 - DNA, 521 bp, Cannabis indica
atatataattttaattaattagagagtaaccacatcatctgattaaataaaattatgtattattcatctcatgttacttttatctttaagtgtggtaaattcaacttaaaccaacatttataaaatgatctggaataagaatattttaagaacattaatttgcttctattcttagaagcctgaagtatgtctcggagtccgaataagactttgcattgtatttgtttcaggatcattaagtagtatcagaataactaaagttaagactacttcatttttcatacaaagtaatgaggtgtctttgagataaattaaatagggaaatttcactatttgcccttaataatataccccatatcaaaatttataccctaaactaatttgtacaaattaatgcctataattttaaaagatacccaaattaccctttaattaaaatttccctctaacagtttccctttcctctctctcttcccacttcgtcttccccaacccccacctacctccgagaaacccaacca

SEQ ID NO: 351746 - DNA, 468 bp, Cannabis indica
gagatgccttagcgttacttgggcttctgggagcatatggggttccatatgtctactccgggaggcatgtcccggatgctgccttattacataaagacttagcaaatagtttgaatgataaattgtttgatccacatgtccttgtctagttggttcacgtatattgggcaaaatcaggggcaacacttataattatacaaataataaatcagacaactaataaaatttttatatataaaaaatacttaccatttttgttggtttaacgaaatattctttaaaactaaaagaatgttatgttaaatttaatattaaaaggggttttttctataataaactaataaaggcagtattttacatttacaccctataaagaaaaaataaacataaataggaaataaaaatttgtatttacaaaaatactagcctaacaaaaaaaaaggaggaaactcctccttcttcgtgagc

SEQ ID NO: 351747 - DNA, 653 bp, Cannabis indica
cctacttagaaatgtttttttcccttgtccgagctttggctagaggatacttccttcttagccttagccactgtaaaattataacattcccgagcaatctactggtttcctctcagacaccctaccccattctttgttggaaacttcaggcatgaatggaatatcgacgtaacaacctttaagtcatacaaggctggtcgtcctagcatgacgttaaagcctgatggaacgtccaataccagaaattatgccattatagttatgctcatcggagcttgtccaacagtgaggggtaggcgaatttgccctagaggtgtgactccttggccggagaaaccatatacaagcatgaggcagggggttaaatctttgagctggatccccatcttttcataggcggtctgaaataagatgttggaagaggctccattatctatcatggttctggccacaatcttgttggctatttggacctctacgaccaaccggtcgttgtgcggaaacctaattttgacagcatcttcgttgttgaatgttatggtgggctctcctgcccgtgggattttaggcttcctttcttctatggccaggatcacttcttcttgctcgtactgtgttgttcgggcataactctcccgagctttgcccgaatc

SEQ ID NO: 351748 - DNA, 1080 bp, Cannabis indica
ggttttattaaaacttgagttgattggatagttttttgctgtattagtccatattgttggtgatcaatagttaatgggcttagcatatgtgtgtgtaaagtataggtgaagcaaaagtgtgagtttttttagttaactaaagcctttgatgagcagacctagttcaaatagggttatgtagctaagtccatttcctaactctataaatacatattgtcttattacaattgtatacttttgataatgagataaataaaactgcttctgatttagagaccggtaggaagacttagttgatagtattgcactatcaaattgcggtaattactatggatcaatcaggtatacgcatacataattattatatattattatagtgttctttattgtatacaaattttgtgtcctcactaaaagtaagagtatcactaacatttaagtattctcagtgataaaaatatagttttttttttttgtcaaaataaagaatcaatggcgacatacaatatcaatggacagcaaagtcgtcattaatatatattaatgacgaaaaagtcgtcaacgattttttttaatgaaaaatagttgtttgaataagcaggaaaattccctctaaaacaatcactgacgaccataagcttggccgcaacgactgagcttaataactcaatttttttacaaaatgttaggttatttttagtattaaatttaggttaattttattatatttttttatttagtttaaatcatgtttggagtattttcacgctttttatcttttaatttacagatttaaaatagatgaaaagttggaaaatatcaatataaaaagatagaatatcgcataaaagatatcccggtggaaaaatatcaaattcaaacccagaaaaagataaaatcacgtggaatatggatgcagaggaaacacgggccgcggcatggctttagcatgccacgacccgcctacgtgaaaaatcaaaaggaagtatcccagaaggccacacgggccgcggcatggctttagcatgccgcgacccgcctctatttctacagcaaaaatatctcgttctggaggtttcc

SEQ ID NO: 351749 - DNA, 1020 bp, Cannabis indica
tctactttgggaggtcaaattgaccaagccaagtccgccatgattctggcgccactatgaagaactcggtcaacgtctagctgagggacgataaagacagcgctaattgggaggcaacccaaattttcttgatattttagttgaaatttcgtttgtttgagttgttatttttatttctctttttagtttatgcttactaaactggtaaactaaattttggtttactttaaatttttgtactgtatatgaaaaaaaaaaagagagagaaagaaaaaaaattcgggttcggcccagtggccgcggcgagatacatgtggtcgcggccatatgtcaactacagagagcaaggtttttttgatggtatctggccgcggccaaatcttctaggcagagaggctatttttcgagcctatctcgccgcggcgagatgtgctgacgggtttaaaagaagccacaattcacacaatttcaaaaactcctctttgctcaaccctaacccaccaccaccgaaaactactccccataaccacctctcttcatctaatctcatcctaaactctttttcttcaaatctaaccacaatctttcatcccaaatacttctaaatcattattcctctcataaaacactcttttcctttcaaaatcaaccccaaatccctaaaacctcacccaaatttcaaaaaccactattcatcttcttcttcctcaaaacttcaaggtttccttcaatggaggttgaataaaggtggattctcattgaggtaacaattcttagactctctatacaatttttggatcataattttgaattattggagaattttgggattttagtgtgaatttgtgggatttttgctcaatacattgttcaatagagttgtttgtgattaggaattggtttatttgtgattgggttgtcacccgggaaagtgaatttttaatggaaagtgctgccaaaatttttataaattttgagtgttagaatatttggtgagatgggtcctaaaagagctagagt

SEQ ID NO: 351750 - DNA, 513 bp, Cannabis indica
tattaattatattaatttgatatttttagatttattattttaagatatatatgttaaattaaaaatacaatgtttgttaaataaaatataaagttaaatggttagagagacaataatatattttgattattaatttattattatttttattggacagagaaaatagtattaattagttagggagagaattgagtaattggaaattgatgttaacgtacaaaaaaaaaaaaatactgttaactattttaataaaatagcttgaaattattggtggcacagatggaaatagagaattgaggacattagattttttttcccttgagaccgcctcatgacacctctcattgacaccgtaggtgcccatatctttatatattaaaagtgtctatctaacggcaattcttggtttaacgattcttggtttaacgattcctttttttatttagccttacacgattaacttaacagactgttaacgttacacgttaacaaataaataaacccaataattaa

SEQ ID NO: 351751 - DNA, 575 bp, Cannabis indica
ctaaaataaaaatcttaactctccaaaaccccacccacgcatccacaccatcgccctcctctctcgccgtcttccttcctctctcgatctctcattcttctcgtctatcgatctccacccacccctcctctcgtcagtctccctctcctctccgtcgcatacgtcggaccaccaccacctcctgtcggtgtccctctcacctccgtctcatacgtcagaccaccaccacctcccgtccgtctccctctctctctttctctccgagctcgatataattatatttatttatttatattcttttttatttattatatatatttattttgttattgtataaatttaatatgttttaaagttagttgttattgtaataaaatgaattacttgttttatttttttctcttttttttttatatattcccgatggattaaaaccgtcgcctataccctgatgtaggcaatggttttaagtggggaagtccacattagcaacagtttttaactgtcgcctattttgcccattttacgacggtcgtataggcgacggttatagaaaccgacgggaatactttaaa

SEQ ID NO: 351752 - DNA, 852 bp, Cannabis indica
aagtaatcagggctttcacatagaaactgttattgtcacaggtttgccactataatttcatacactcttgaccttagttaggcttgcaatttgattcaataacaatcatacaagttgcgtcgttatatgaaaaataacttgcaattttttcttgatgaataaaatgggcaaacatgccttattacatcaaaagtaggcaattcgtgcctttacattatcaaactttgctggtaggtatgacgaccagctatgaaaatacactttgcgggtacaccaactaacctaagtcattgctgaaaagaaacttatattggtagtacttttgtaggtgctctccgttttaatggcaagacactagtactagctttgcgttggcaccgtaacatgctaacttgtatattctaggtgggatgacctccactactccgtacttggtggtaagtcatcctttggtggaatgatgggttatcatacccataggcaaggacaaatggaatgtcgcacgtggctgaagactgtatcaattagaaggacatagtcattcatgaggatgctttctttggctttttgttgttaataaagtagtttccatcattatcgttgttggtcctctttcaattgttaaagccatttttgttattactcccctgggagccttggccactattgcttgctccgttcttgtttcccttagcttgattgaggcctttggcattccgctcggcttcttccaatttaataaactcatcagctctgtgaagaaagcctctcatagtatgggttggtttccgccttgtatccttccacaaccgacttcccacaaggatgccccccatgatggcagcccgcttg

SEQ ID NO: 351753 - DNA, 779 bp, Cannabis indica
gctggaattggttaaagattacgattgcaagattctgtatcatctcaagaaagacaatgatgtggtagatgcactgagtagaagaggtcccgggcaggttttcaccaattcaatatagctcctcaactggcctcagagatggttaatgcaaggatcgagtttgtagttggaatgttgcataacttgacactccaatctaatttgcttgatagaatcagaaaggcgtagttggaagatcctgagctaattaagattcaggatgagatgatggctggtccacctaaggacttttcaatctcgaataacgaaatgttactgtataaagcttaggtttgtgttcctaatattgatgagctcaagaaagaaatcctcaatgaagcccacaccaaaccttattcactgcattcgggaaccaccaaaatgtaccagggtctaaaatcctacttttggtggtatgggatgaaaaaagatgtggtagagtacatgtccaagtgtttaacctgccaccagaacacccttttatagggatgtactacagaagatttcagtagaatttatcataaaaaattaatgtagaaaaagaaaaatatttttgaaataattgtacccccttacaaggttatttcgatagacacccttctctgttttggcatctatgagagtttttaaattattatttttcttcatcatgtacattgtagttacttagaatcacctgtaaattcttatcaaattctgaatagtttactgtgctgcaaataaaattcaaacagttgatt

SEQ ID NO: 351754 - DNA, 746 bp, Cannabis indica
ttcctttttggcaaggactccttctttggaggagacttagccaacttcgggcttcgttgtctccatgggctgcgtcttctcagacttcgacctttggaatttttccctcagggactgtgagatcgcgattgcggcactggtgacttacgcttgtccttgcctttttccaattctgctagagaattctcaattctcttatgagcttcagccatagcgaagaactcgactagtgattcttgtctttgggcttgtaactccttccaaaaatcggttcttggcaggacacctgttattaacatacaaacaagtgaagactcgggaggcttcttgacttttgttacttcagcattaaaacgtttaaaatagtcttgtaaggactcactgggttcttgtttgatattagccagggtagtatagggcggcctattagtcatcgtggcttgaaaatgcgtgaggattaagtcgacgaaggtttcccatgtcgagattgaggcctcaagcaattgggtaaactaatcgtgggcattttcctccagtgttgccgcaagaatgcgacatttcgcgagctgaggtacctgatccacttccattatagtattgaacttttctacgtaatctatgggattagaggtacctttatattttagggattcagatagtcgaaatcccttgggatgctgagcctgtcgcacttccgcagtaaaaaggagaagtccagtgcagcttgtgtatgggctttctctgct

SEQ ID NO: 351755 - DNA, 889 bp, Cannabis indica
aagtttcaactattccagaaaagataaaagtcatgaaaagaattcataaggatcaacagtgagatgtctcatgtatgctttcgtatgcattagaccagacacctactgttgagtgggagttatgagtaggtattagtttaatcaaagaaaggaacattggaagataaacaaatgagtcttaagatcaaaagaggaactatatgttagtcgataagggtggtattttaatactcatagactacaccaaatcaactttctagacttacatcattgctagaaagtctacttatgcgatggtgattactctggggtggagcagtgatttttggagaagtgtaaaagccaatctagtctctaactgtaccagggagattgaatgttaaggttgtaggaaggatacttatttagcctatggaaagttctatacaatttttattattgtaccaataatgaattatctactagtgttacttcctgaataacacagatgtagttgccaaatagtaaagaatccagtatcccaggaggagtagacaaatagagagaaatttcacaatatctaggattttatgactaaggatatgtaatagtggaggaaaggttgtattgaatgtaatctgtcagatcatattgcaaagataatactacatactacatttgatatggatatcaaggtgttgaaattatttaaaatgcactttagttttatgttagtgcaagtgggagtttgtttggttttgtgccctaaataaaacctatttcattataatcagattaataattaataaaagatcaaaaattattttatgttgcatggttcacatgatttatttaatgattatatgtttaatgtataaattctatgaaatccagaacatatatttattca

SEQ ID NO: 351756 - DNA, 619 bp, Cannabis indica
gcataaataacttaacgtctatgtcacacttattacataatcaagaatatgtatagctactcaattatcaacaatctctgtgtttcatacagcaccctaaacatacatcattataaatactcaccttcagtgcttcataaagcactctaattcacacattaccataaccacataatctcagtacttcataaagcactataatcttacatctctataaacacgcattcgtacattccatgagtgactgagactctacaagaaaagtgactaacttcataagtagtataaggattgtctagtcacactgtaacaaaacgtatttgattacaatctatcatataataatatgcttaatcaattttacaacattgtaatcacacaatcccgatacttcataaagtacccttaccactcgttaactacaagctaagtatgtcactatcgttgcccgatacagcgaacgataagtaagaaacctatccacagtttcaggagtaattactcataacggtaatgactgtttttcaatcctcaccactcattatccacgagctgcgtatgtcactatcgttgcccaatacagcgaacgctatgtaagaaacctaaccgcggtttcaag

SEQ ID NO: 351757 - DNA, 1120 bp, Cannabis indica
aatattaccctacaatctactcttttggagcaaatcaaaaaagcactattacaagatccagagtaagtaaaatctcgagatagggtttcgactcgaaagactactgactttacagtggatgacacgggaatgctacgatttatgaattgtgtttgtgtgcctatgaatgatgacattaaaagagatatcgatgagtctcatacgactccttactcaattcatcaaggatcaacgaagatgtatcaagatcttaagtccatgttctggtggccaggtataaaaaatgatattgttgaatatgttgcaaggtgtctaacttgtcatcaagagaaagttgaacactagagacctgcagggttgatgcaaccactgaatcttctgaagtggaagtgggaagatattgccatggacttcttggtttgattgcctaggaccacgggaatgtacgactctttgtaggtcatagttgatagatttacaaagtcaacgcactttttacatgttcggacgaacttctccattaatcaatatgctgagttatatgttagagaaattattcgtctccatggtgtcccaaagtccattgatctgatagggatctgaagttcacatcaagattctgggagaatctacatagagccatgggtactccgttgaagttcagcacaacttttcattctcagacaaatgaacagtctaaaaggaccctttagattttagaggacatgttatgggcatgtgtgtttgattttcaagaatcatgggtaaagtaccttccccttattgagttctcgtaaaacaatagctatcaagcaatgatcgggatggctccttatgatcttttatatggaagaaaatgcagatcacctattcactgggatgaagtgggtgaaagatagttcctaggtcccgaagttgttcaaagaacaagtgaggcagttgataaaatcaaaatgcgtatgctcgcagctcagagtagacagaagagttatgctgatccaaatcgtcgagatattaattttcagatcggggatatggtatttctccaagtatcacctatgaaaggcatcaagcactttggtaagaaaggaaatcttagcccgaggttcatcggaccttt

SEQ ID NO: 351758 - DNA, 820 bp, Cannabis indica
agttccaacacgtttcctcccatgcggcattaaatgcgagatgactgctcaggggaagcctgacacttcgcggagatgctttgatgccacttaggcctccgggagcataggggacttcgtatgccttctccgggaggcaggtcccggatgctgcctttctttataaagacttagcaattaattcaaatgttaagatcttttggtccacgtgtccctgtctggttggtccacgtatattgggcaaaattaggggcaacatttacctccaagccttgtttatttaacaaatgaacaaggcctgttcagatgcctctgattggctcctcggtttcctggcacgtgcttcgggcgcatgaaggcgtatttaatgatcatcattactgcagcgattcactttttgcaggcgttgattcgtttcatgcccattaattgatacggcgcattaatgggtgtcagacggatactcaaacgtttccaccgccttaattacaaatcaatctacccgttggatcttgggaattcgaatcgtgcgcctccccagccgttcgattggtaggtgattgcgcctgttccacatgcagcttggcctataaaagccaccatctttccttcatttggttactttcatcctttcaccaaatttcttcgagttttccagagagaaagaaaaccctcaaactagaaaaccttcaaacactataggtttcttattaaccctcattcgttactgtcagtcaacatttcttcgtcgatcaacaacaactcccagttctaacactttatgtaattttttcgcatccctcactttactgtttgtgtt

SEQ ID NO: 351759 - DNA, 655 bp, Cannabis indica
gttgataaatataactgatttctcagtctcagattccaacgtccaactcagacgacaactcaaaaatccaacggtgacaactccgatgtttagctctggagacttttcggtagcaacaacaattctaacgcgtcttaggggatagtgattgttttggtagtgggatgatcaagtttttgagtttatgagaagtgtgtaaaacttatatatgagttttgatattcgtaattggtttttttattaaaaaatcagtttttattatacgtaattaatgaatttattagcttattgcattaacaaaattacttttagtattactaaaaaaagaactcttcacaacacactatttatgacattttcattttaatgttataaaaagtcaggttacatgacatgtttttttaaaaaaacatcattaacaaatgtcattaaaaattatcaataatatttgacaaaataatgccatataaactagtattaataacctaattaaaatgttgttaaggttatattaattatgacattataaaattgttattgatattattattaattcatattattaaattgaaattttataatctagaatctctttttactgtatatataattttttcattcccatttaaaaaaaaaaaaaagaaagaacaccact

SEQ ID NO: 351760 - DNA, 962 bp, Cannabis indica
taaaataaattccaacagtatatcttttgatactacttgtgattggtgtaaggagaaagatgaggatatatgtcatgctttgtggttttgttctaaagttcaaaagatttggaagcttgctggttttgatactcagatttttatgagaatgccgaaagcccctgattttttgttttacttatggggcaatctcacaaagggagaaatgatacacttcataggtatgtcttggctcatatggcagcgtaggaacaaactcatttttcagcataaagctcaagagattcatatttgggtgaggtgggctcatgagcaattggacgagttttttggggaggttcagagttctcggcaagacatgacaacgaaagtcaaacagaaatggcatcctcctccttcagattatgtgaccattaacacaaatgcatctataattcaagataaaatgggctctggtttaagtgctgtaattagaggacacgaaagagacttgattgttgctgaaactttatttcttccaggtattctttttgtcaatttggcggaggctgctgccattcgtttgggagttcttttagcccacagattgtctgttccgaaggctattgtttcaacagattgtttgggagttgttaatggtctgaaatcagtctctcctcctttctcggattggggcatgttgggtagagagattctatcacttcagcaacattttctttctttaaagtttacttatgtccctagagattgtaatgctgtagcaaatactttagcaatttggagtcgtatgactcattcttcttgtatgtggattgattctttgcccccttgtgctgctgctacattattggcagataagccttgtgtggttgtttaataaagttgttcattttcaaaaaaaaaaaagtcacccataaatttttcataaacaaaaaattctgatatataggcacactttatat

SEQ ID NO: 351761 - DNA, 672 bp, Cannabis indica
ctacccaatgtattcacaacataaaccaaccagtatttcacagaaaaacacaccaaatcaatttatgccattaaagctcaaagctttgaactcaaagcttaaaattgcataaaacttacaatcaatctctaaaccagctgcaatgaactaaaattaagccaaacaaaccctagaattcgaactaagcaaacatcaaaccctaacagcccctataacccaaaatcacttcttaaaaccaaaatacaacttcataaacttaaaaggaaaggagctagggttaccttagttatttttccttgaatccttggttgaaaacacagaaaattatgaagaaatggctgggttttccttctggtttgtgagggccgaacaccaagagagagaaaggagaaatgatatttctctaatttaaatttctttttctttaattttctttctttcaaagtaaaacccctctttcattcaattatgctgaaatagaataggtgtcatcacccaaggctgccacctaacccttatttaccattttactaattgactaaaatgcccttaaggttataacttaggtatttttaaagctaggggtaaaatggtcaaaatccataaccccgctcaatcccgataattcattttctctaaaatatttccccttatgaaataaggttctaaact

SEQ ID NO: 351762 - DNA, 975 bp, Cannabis indica
acctcgaattgccgaaagaagttgtggtcgccataggagaaagttactgtcatcaagcttgacagaaactttgtgagagaaaacaactggtgtaaaggttgaagaggccatgaaaggagaaaaagaaaatagatgtagaagaaaaacagagtctgtgaacgaaaaagacagagttgagaaacaaaaactataatggcggaagcgaaaattttagctctgataccatgttgaatgtgtaaaagtgaaagaaagatttcattgatttggaattaagaatacagccctttatatacagtacaacaagaagagttagttagggaagctacctaactgttataactgataagtaactaactaactaacatttaacaaagtacatgtactgtttacattattttatggtaaaatgtggtcagctttatatgtagatattattaacacattgtaaagttcacatacaaattaatttgtaatcattaaaaacaaaaaaaaaaaaaaactaatatttatgattatgcttctctatgttttgtaattcttattcaaagtccatattttcagtaatgttttctataatcttaaaatccttctcaataaaataatttacaaaacagcaatttaaaagttattgcctttttattatttaaggttgtaacttgttcattttacatagtgaaaagctggaattgatgaagctgaattggaagtgtaggagataattcaatcgaaaactaaagaaaaattacatttagtaacacttttttttaacttaaagaaaattagaaggcaacacttataaacgtgttgtctcctagagtgttactaaaaatgtaggtataaggcaacaattataaaagtgttaccatatgttgtaacttaataaaaatatataacaacactaattataaaagtgttgccatatatctatttatttttaaaattataattttatttcaaaatattataattattttt

SEQ ID NO: 351763 - DNA, 797 bp, Cannabis indica
tattaaaaaacttataaaaaaataatattaaaaaataaaataaaaataaataaaatccattacccttaatggcattcttagaaaattggtggaggaagttctcccctctttttctcccttatttaattaagttctctctttcctaaatttaataaattaaataaacaaatgtaaggaaatgattccatttccattaattcccattacttatcagtaaacatgccatagttatttttaaatagagtattctttgataaaaattttactgtaataatatataatagtaccacagtatatacgctacttcaaattgaaaaggatgttggtataaaataacaatgataaaacattaaaatatatatatatattgtatgttcttgtgtcgtagatttcccttaaaataacattcaaactctataaaaataataatttgctcatattgaacaagaatatataatgatacatgaaggaccagctcgtccagccacctttctccaaccacgaacgacccaacgaagggaaaatctgagcctcataccctccaaaacattcaggtaatattttatcttgttcttattattattattattattttccaaaactctgattctcggtatcattctagatctctctccttctttcttttcttaggttaacacagctgatctgtggccattcgccggtcacagtgcttcgaggttcatggcgtttcgtggtgcaggatgttaggttttgtaccctaaataaaactcatttcaatataatcagattaactcattaataaagatcataaataa

SEQ ID NO: 351764 - DNA, 1084 bp, Cannabis indica
cggatcatgctgtttgttaaaagcttatccacctctttctctaaggcctcggccttcattgaatcgaggggtcgtcgcttttgttggaccgacggcatgtccgggttgacgttgaggacgtgggtgatgacgtggggacttatgacagtcatcctcttggcaccatgcaaaaatgtcaatggcgcccttcagtgtctttattattttttctttttccttcgagtctaggctttttcctaggcggagtaccttggtggagtcgaggtcacacactgatacctcctcgacgtcctccatcggttctacaattttctcggaccccacgcggggatccaactcgtcttcttcagccatttctggctcaatggtttcccggaccatcagtacgggcaggtgggtcgcaacgttgtagcattgcctcgcctccccctgatttcctctcaccgtccctatcccagcttcctgggttgggaactttaagcacaagtgccgtatggatgtgactgcaccgaaatctaccaaggccggtcggccgaggattgcgttgtatgcggtcgggcagtctaccaccacgaaagtgcagtacttgaacgtgctttggggggtgtccgggcacaaggtgactggaagtctcactttccccattgggataagtgtcgttccgttaaaccccgtgagttgggaaccacttggtgagaggtctcggtccgtcaggcctattgcggtaaaggcctctttgaaaagtaaattcacggaacttccgttgtcgatcaggactctggccaccactttattggcgatgggggtctctatgaccaacgggtcatggtggggaaaacgcaccgtcttagcgtctttttctgtgaatgtgatgggttgatccatcagccggggcctttgagctgggagttgagtaacttcccaaacctcattgtgtttcacggcccctgcataccgcttcagttctttgcgggtagttcctccgatatggggtcctcctgagatcatggccactctcccattaggtctgggtggcaaaccggggatatgctgggcatctccggtgggagcaactggagccaat

SEQ ID NO: 351765 - DNA, 789 bp, Cannabis indica
aaattcctcaaattcaataagtaaacatcgaaactaatctcatagctacccaaaagcagtttcatgaaattaaaatctttacaactactctaaatcacacattcaacatatagaaccaatcattttcaacttaaaacaataccaatcattatcttaagctctccctcttcaattatttactatcatgctactaccagagcttgaatcactaatttctggttgaaaattgaagaaagttgaatagtaaaggtgagagttttgtcgcactgaaggagaagaatttcgtttgtactgttttttaagttttaagttaaaacatacatatataatatatatatattaaactgataagaataacgtttattaataataataataaaaaaaattattattaataattattttactattttttaaccactaagaaatctttagcctagggtatttggtcaactttaagtaccccaaaataccctgataattctataattaatttgtctcaatgatcccatcaaaattactaactaaaattgttgtgacattttcggcctccgatcaagtctccaggatcgccaaatttgaaaatatttttatttcacaaataacttacattatatccacatatttcaaataaatcttcgtaattaataaattatgcttatttatccacttatgacaaaatttataatttatactaaattaggttagcgggatcataatcctactcattactacctaattaacccataatgaataataaacttaattattcataattaggtttttggg

SEQ ID NO: 351766 - DNA, 1264 bp, Cannabis indica
tttataacgccacattacaacaaagaaattggtcttagatcactcatgctttcgggtttagactttttcggaataagcacaatattcgtttcttttaaatgatcaggaaattcaccaaaagtaaagaagtgttgaactaatcgaatgatatccttactaacgatatcccagaacttctgataaaacccaggattaaagccatcaggactaggagatttatcaggatgcatttgaaagagtgctttccgaacctcctcaatgtcaaccggaatagtaagagactgattcatagaagtcgatacccaattatgcacacaagccgtaaccctaccccaatcaatctgaagctgtgagcaactctctaaaaataatcttcaacgacacccggtaagccattttcccaatccacccaaatcccacttctatttttaagagacaaaatctgattatttttcctcctagtactcgcacaagcatgaaagtacttagtgttttcgtcaccagattgcaaccacaattgtttggatctctgtttccagaagacctccttctgggcgaggactttgaataaacgattttgagcctccttgtacctgttaaccgaatcaacatcccttctatttttcaaaagcttcagaattttatgacaactatttattcgctgcttgaaattactagtgatatccttcccccattcggctaaagcagtactacaacatttgatttttgagctcaaagaattcgactcatgaacatcccaattatcatgcacaatttggcgacacataggctcacgcacccaagcattttcaaaccaaaatttctttaaactaaccactttctaaataaattaagattcaacaaaataggacaatgatcagaagcaaaaatttctaaattttctaaccttgcatccggaaaaagatcattccaaccatgcgtgacgagagctctatccaaacggacttcaatccatgcctccgtacccctccctttctcccaagtgaaaggatagcccaccaactccatatcaataagactgcaatttgaaaccacatcttgaaatccctgaattaacgagcttggataaggtcgaccgcctctcttgtcactatgatgaaggacattattcaaatctcccattaaacaccaaggaagaatcgattccccatcaagctgccgaataagtctccaagaattcccacgcaaactcctctgaggttcaccatagaagccagtcgcacgaaacaaagggtatccgtca

SEQ ID NO: 351767 - DNA, 530 bp, Cannabis indica
ttgtcttgaagaatttaaaaatttgaaaactcttgtaataaaccaaaccaattctaaaatcaaagtattaagaactgacaatggcttagaatttgttagtgatgagttcactgaattgtgtttaaaatttggaatccaaagacataaaaactgtaataaaaacaccacaacaaaatggtatagatgaacgaatgaatagaacattgcttaataaagttagatgtttattattagaatcaggattaaagaaacatttttggggagaagcattgtatactgcctgttatctaattaacagaagtccaaacaaaaaattgagttgaaaactcctgaagaactgtggtctggtaagccaccatttccgtcacagttgaagatatttggttgtacaacttatgcacacaatgtacaagacaaacttgagaaaagatcaattaaatgtatatttctaggctatcctaatggagtaaaaggctatagactccattctcttgaaaccaataaaattgtaactagtagagatgtgattt

SEQ ID NO: 351768 - DNA, 1235 bp, Cannabis indica
ggggttttgggttcgaccaaaccatttgtacgcattgtatggtaaattaataacatgcttatgaactcgactcaatttgaatttcaataaacatctttattcatttattggtcagaaatgtgtctgttactatagtaacttacatcaaagcaattatgcttatcagatctgatctttagcttaacatgaacaaaacaaattatagaaaataaaaatcgtactttcaatggtggtcatccgacctgagtacttgaaatttttttttaaacctttgggagtggtccacccagaaggccattcacttaagagcaaatcttcttttatttcatacttgatatggtcatccgaccaagtacttctattggtagtattttcttaaatgttccctgttccaataccttggtacaagaacgagttgcatttttttcatcatacttgcccaactagtatgcccctgattctagaacttcgaccacttgatatggtccttcccagtttggtccgaccacacctatcgtactgtatttggtgttcaaaaatactcttcttacgaccaagctactttccgtgctttcacttgtttgttaaaatatcgagctactttttgctgatgggctattagttttaagtttgctgcgggtcgcttttcttcaatttcatcaagtaattctgcaaggagtacatgattggcctcttggctatatgttaatcttctgtgggatggtggtttgagttctaccggcagcatagattcaaatccatatgcaatgccaatggagtctctctgcttgttgttttctcagttgtgcggtacgaccatagaacttcaggaagttcctccggccaatttcctttagcgtcctcaagtctcttctctagtgtgtccttcaatgtcttgttgacagcttcaacttggccattttcttggggatgcgccactgcggagaaacttttgatgatcccatggttcgcacagaaatcagtgaaggattgactgttaaattgtttgccattatctgagactatcttttacggtaatcttaaccgacaaattatgttcttcacaatgatgtcttgcacttttttggaaatgatggttgccaatggctcatcctccgtccacttggtaaaataatcaattgcaaccactgcgtattacactccgcctttgcctttggcgaactgtcaaatcaggtagattcgccaaatggggaaaggccaaggactttgcatct

SEQ ID NO: 351769 - DNA, 1628 bp, Cannabis indica
ggtggagatcacttacctaatacctaaaaaattaaaaaaaaaaataagataatagtaactgagatcgatgtcaacctatcaatcgtcttcttggatcacatgggaatcatccatgagcaattctatcattggtcatcatactctgcattattagttattttcctgctgccaacatcttcatgacatagttttttcattcgtcacgtattttattgatttttttgttagtgtaagaggatgatatgttccttttaaactgcaataaatgagacaaatcattaatttaataggtcataataaaagtatttaaaaactttagtatttgtgaaaataattagtgtctttacctctgattcaaaatttcgtgtaggattatttttagtcatgaaagatttaacaaatctcatactataaaacccacactggatgccatctggttgctccggacatgtgtactcagtgaagcttactgctactgaccgtcagtttctttaataaaagtagaacctctcaagagcactacacaaaaataatataaagttaatacatacattaatgacaattagagaaatatactgagagctttaaactactagaacatacatttgaacacttcttttaatatcttgatgaaaaattttgtttttagaatctagaaatactacactctgcgaccccgtttggattgggattctacaatttcatcagtacagactctgttattgtcttaaacaagacacctataagacccaaattttagattatttggtctggacgaaaaatatgtagtatcagctactttcaaatctttttttaataaatttaaaacggagcctaaactgacgaaaatagagaaaaatcacagttttacaaacattgggtacttatgccactaaaaaaaatcattgggtttataccgcttacaaactcaaaattttgggtacttatgccgctatttacccttaagttaattatcaactatcatacctgcaccatacagacattggaaaagatctgatccagttgagataacaaacgtcaagtatgtattttttttttaaaagtatattttgttttctacctattgtggtatttttaacacgcaagtatacgtatcgttaataagtaatagactcacaaagtgtgaggtcgatcccacaaggattgtagttaagtactttaaaattaaacctttggttatgttaaaattaagagaaaattaaatttataaaaacaataaagaaacaatgaaaataaggagcaaataaatcaataaggaaattaatgatgattaaaagttagtgctttcgatttcaattgcaactattaattatcactacaaaaaatcttaattttagtcacaacaaaatttgtgactaaaagtaaaaaagttgtgactaattattaattacaatttgttgtgactaaatgtggttttagtcacaatacttgttgtgactaaaagtaaattagtgacaatttgtctctaaatactatgttttagtcataagtagttttttgttgtgaccaaaagtcacatttagtcacaaaagatttatgttgtgactaaaaagttgtcactaaaagtagttgttttttgtagtgtatggtttaacatgattctattc

SEQ ID NO: 351770 - DNA, 582 bp, Cannabis indica
taatgaaaggatgaaaggggatccatactcgacatcgaagaatgggtattgagactaccacatcctctgtaggtatgatcacagggttggtaaaagagaggtgcgctctctgggtaggccaaggacgtaaagaggcaagccacagtaggtttaacctcgtgaaggtggtaagatctgatttggtaactcgcgagaccaagttcttgcacaaaaagggttcatccaattgagtattgtccactgaatcagtcccacttccctctgcgtcttcttcctcgtctgattcccgaactggggccgtcaagtcattatccatctcctcgaccttgacgtcaggagcgtgcctagaatgaacgagatgatcacgcgctgacaccgtagactcgctatcttgaatctcgatggttcctggttcggtgagctcctgcaccatcctttcgatgtctgcagaggacagcggacccgattctgtatcaccggtagttacgacctcttcttctaagaacgaggtcgggatgaagctgtcttcctggtctccatcaaatgcgttgcctcctgagtcgagcatttggctatccgaca

SEQ ID NO: 351771 - DNA, 577 bp, Cannabis indica
ttttcttgtcttgtaatctatcctttttcaattttgaaaatcttatgatctattattatttctctttcttcttcctcccttttccttttgttttcttgtgttttctcaatcatacaatcagcaacattatcagctacttgaaatatgtttggtaatgctagtacctcgcttatttatgaagtttcatcattgtattgcctacagtcgtatgctggctggttggttatttataaaaccagtttctgaacatatgtgctttgtgttacaacttcattttcagatgtttattgagcaatgatttggaatcttgtctcatctttagttgtgatgcaaagtagagattcaataattgcattctgtttctttctgagttccaagtagaacaacagtgacttgccacttattattttcattggtgatgaccttgggcataactggtaatgcatttctattggagtgttgcatatgattgttgggctttatgccctaaataaaactctatttcaatgtaatctctatcatttgaatataaataaagagaagtatttccatcactatttaatgtgtcatttggttc

SEQ ID NO: 351772 - DNA, 960 bp, Cannabis indica
attgataatgctctgctacagaaatgaatcaagggctagatatctgaacggaaagaggtaaaataatttccaacatgactgtcacacattgagcgtgggttcaatgcaatgacaactttccaacaagtacttgataaatgcttggtcgaggatttgggttatgaaggcaagcgattcacttggatgaataagaggaatgggggtgcacatgtacaagagcgactagatcgctttgtttgtaactaacaatggtgtgatttatttcccatagtaaaaatgcttaatgatgattgtaattactcggaccacagacctatagttactactgttcttgaaaatgtggtgctgagcaaccatcaatctcaaaagccttttcgattcgagccccattagctgaaagatgatgagtgtcatcaaattgtactcaattcttgggttctgcttattgctgtgtgttgtgaaaattgcgtacgctacgcagtcaaacaagtaataaagtgataagtaagatcgtctccatagggattgcaaacaaaatttgatgtaaaactaactaattacaactgaaagtaagaggaaataacatgaaaatggttgagcaatgattcaaaattaaaaatgacagtaattaaacttgctaaaattaatactattgttgctaaaaaaattgcttgtaagaaaaaaatgtaatatggtaaaaatggcttgaatagctaattctttctagttaggttttctcctaggtgttacagcatcggttcagcattacttcagcattttgcgcagagataacataaattcctctaggcttgtgagaattttccaacactcacaaatttaagtctaccacttagatcaatatattcctatatcaaaccagcaagcagaacactatttaaacatcaattttttaagttatgcaaggtaaatgaaatatttctattccacttacaaagaaaa

SEQ ID NO: 351773 - DNA, 670 bp, Cannabis indica
agttcctggtaaaataacttccaacaagtacaacatgaagcttaaccccttaaatgttctttcggagtaggctctagaaaattccttagcttcatagtcaatactaagggaataaaagcaatctcgaacaagatccaaggcttttcagacttgaagttgcccacaataatcaaagaagtacaaagcttgatgggacgtattactgcactaagcatatttgtgtccaaatctacgaacaaatgcgtacctttcttcaacattctcaaaggaaataaaaaatttgagtggacaggggagtgtaagaaaccattccaagagctgaaaaagcaactatctcaacctcctgtcctatcaaaacctctgaacaatgaaaagctaggggtgtatctggctaccacagaacatgttgtgagtgcagttttaataagggaagaagatggtatacaacatctagtatactacgtcagcaagagactgtttgacacaaaagttgatacccactcatggagaaactaacatacaacttactcgtagaatcaaaaaagttaaggtcgtacttccaagctcacccaataagggtgtacaccgaccaaccattactacaagttttgtaaaaaccttaaacatttgaccgactacttaagtgggccattgaacttggccaatttga

SEQ ID NO: 351774 - DNA, 948 bp, Cannabis indica
acggtaagtttatgatatcgtatttaacatcaatattggtcccttccaatgtatatactccatacatccaatacttgtaatgtaatatcccgaaaaataaaatgatatttaaatagacatattttattagataagtaattattttggtaatgaagtaaaattacgatattacttagggtaattagggaagatttattaaatgattatataaagcgtaattgattaattacggaggttatattgggatatgtgggtatcaaggacaccatttttgaaataaaaatatttttttcgggcccaatgactgtggaatttaatgatgtggtcagaaaaatcacgacattaatgggagaattattttgacgatattccagactagtttagaatttttagaatgtcagtttaatggattagtaaaattaccaaaatgcccctaggttattttcaaagttattggaggtgtagattagtcttttattaattttggatttttgcccttttgacttttagggctgtctattataaataaaaagaaagaaaaaaaataaactaagatatatataaactcataactatgaaataagtaaccaaaacactccattcttgtcctctccttcgtgcaagccaaccagccagcaagagaggccctcctcaccattttcttttgcctttggagcatattattcaacctaagatcaacctagagtgattgaggtaagtttacaccttataggttgtgaattttatgaatttttgttggttttgtggtagggttttgcctttctgtggctgtagggattagactaagattagggtgtgtttagggtaggtttttgagtatgttagaaatggttttaagtggtttctatggctgcttgattgagtttggtttgttgaagccaaagttgagttttcttctttttaatgtgtgaatttgattcaatgatt

SEQ ID NO: 351775 - DNA, 497 bp, Cannabis indica
tcctaacgaactcaccgaatccagtttgacctacggttgtgcggagtgacactcaaccattcgtactactcacaatgtcacttgcggtgtttacgggcccggtgacacacagtatgtagtcaagttagttgtggggtaccggagtcactactctcctaacaaactcaccgaatcaagttcgacctacggttgtacggagtgacactcaacaattcgtagtactcacactgtgacctgcggtgtttaaaggcccggtgacacacagtatgtagtcaagttagctgtggggtaccagagtcaccactctcgcaacgaactcaccgaatccagttcgacctacggttgtacagagtgacactcaaccattcgtagtactcacactgtgacctacggtgtttatgggcccggtgacacacagtatgtagtcaagttagctttggggtatcggactcactactctcccaacgaactcacctgtaatgccctaatgctaaggc

SEQ ID NO: 351776 - DNA, 470 bp, Cannabis indica
ttttaaaaagtattttgtaaacgggatcccgaaattgtatatatgtaatactttaagtttctaattaaataagcaaattttaattattcacgattaaatctaaagttacaaatcattcaagattaaatattatagtcatctaaagttctaaaaactattaagattgtccataacaaacataaagaaaatcaaaatcagttttgatatcggcctcagtcaacaatctcaacgtcaattgtctttgcttttggtgatgattcattaaccttatttttttgttctgcaattataaaaatatagttaccagttagtcaacttattataaataaataaataaataaaaacataataaaaatagaaacatatttaatattcatgaagaaaattatatttacctagaagagaatcataagctccctcataaaaaaaacagattataataataataactaccaaaaattttgtttatt

SEQ ID NO: 351777 - DNA, 649 bp, Cannabis indica
ttttaataataaaaattacttaatttaagctgatccaaaataaattaaaaaattaattttcaactttaatttaatttttaaacaataatttcgacaattcatttataattaaatataaaatttcaaaatattataaaatataacaaaataaatttctgaaaaatatctaatttaagttggtctaaaataataaaattttcaacttaaataattttcaaaaatttattaaatatcaaattaagtaccttgaactagtaaccttaatttgaaaaatattcctatgtaagttgatccaaaattaaccaattttcaacttaaaaaatattttaaagaatatctaaatatctaattttctagaagattctacttaattattaatttcaaaatattctaaattaagttgatccaaaattagtttgaaaatatttaaaaaactaattttcaacttaaatatattttctatgaaaattcaaataattaagtatccagaagaatctaactagttataacttcctttatttaattaaatatagaaaaatgcatcaactttatcttgaaaattttcattaaactaagtgtgtttttctgaaattaatttcaaaataatctgatgaaaaattaatttcttatatttcgaaattaattatgt

SEQ ID NO: 351778 - DNA, 857 bp, Cannabis indica
cgggcggtcaccttgcattttactttttcttgttcttgagcttcttcattttcatgccttctgttttctgattgctgttttataaccatactatttttgttctgtgtagacatgtctcggcagatgctcgatgctctgaggaagagaatgggtggaagctctagcgcctctcctccggccaagaagttcaagggcggtgaggggtcctcttttacggaaagaagaccttctggagaggtcattgatctttccgaggagctgactgttgcaaacccctctacccccaagtctgccaagtccaaggagtctagactaccaacggctgggtctgaactggtcaggagtaatcctgagcgggtgcaggtaccaactccacctttgaccgtgtttccagaggcaaaaaagggcaaggagatgctggcccactatatgaaccggctggttccccaggtcagtgagcaactggctggtgctgataatgactcatctctggatgtgttggtgggcagagtcctgaaggaatttaccagggtaagtcttttttgatacttccctttaaatttccacatttagctccatatgctaaagtttttcctttgtacaggccggtctgaagttggcctacacttactcccgagctaagtcttttgcttccaagagcgcagctctgtccgacaccttgaaggcaaaggtagacttggccaagaaggaagctgaggaagccagggcggaagccggagctagtcggttggagttgggcgaggccaacaagaagctgttcgctgctgagaagaagatcttcgtgctgacaaaggatctcgaggctgctgatcgttttgaggagaccatcgagatct

SEQ ID NO: 351779 - DNA, 700 bp, Cannabis indica
atgacaggtgacaaggactttttgactaatattcggcctatgtagtgtggggaagtcacttttggaaatggcttagctggaaaagtcattggtatgggaactctcaattttgaagggttacccagattgaaaaatgtgatgttagttgaagggctaagggataatttacttagtattagtcaaatttgtgaccaagggtattctgtctcatttggcagtgatcattgttatgtacttaatgatgataatcaatgtattttgcaatgatttcgatccagtgataattgttatactctaactcctgtgtttacttgtcattcaaccatcaacaacactacggatttgtggcatgccaaacttggacatattaatcataaaaatttgaaaaaattgacaaatgcaggtattgttcgaggtctacccaagcttggtaaagaaagtgttggtaagtgtgaaccatgtcaactttgtaagcaattaaaaatcactcacaaacgtgtgtgacatcaatacctcaaaagtattggaattgcttcacatggatcttatgggttcaattcaagttgaaagtctaaatggtaagcgatatattactaatgtagattttttaagagaaagtctgacacttttgatgcttttaaaactctttgtttgagattaagagttgaaaaaggttgtaatattgggaaaattgttcgaa

SEQ ID NO: 351780 - DNA, 1869 bp, Cannabis indica
atacagttctagggctttttcttatgaatttttcgtccccttttccatctaacatgcctctatttataattacatagtcagacagttaattacagagttgactgatatctctacaatgattatcccctgaaatcgtggggtttgattacatatcacgtaaaataaatgcagttaatatttgaatatcacacaactgtgattagtccgcttttactgggtcaaagtaaacgtgtattaaacacattataaatcataatattctaggatgtctcgataggaactcagtaccaataaccttgatagcgagctggagcttttcctatttctttctgatgttgataatgtaaatgtcgtcgcttctgctcttaagacataacattctatctgacaatcgcagtttttggtgacgaggtaattttcaactgtctatatcatttgaatgtcaacttctatctgagagaactggctcgacggagctgtgaatctcattcaaagatgtcaagagttgattagtgggggtaccgcgagcatgccttcctatagcgagatgaatacctcactattagttgtatgtgcttatacgactatcttaccgtgtattatacgttaagtgtctcattagtcattatattttgtccacgtaacgaggttagtgtcgcgtcttgtacacctaaagttacatggtttctcgttgatgcgcaaggcaacaatttgtatatctttatcttgcataagactattcagtcaaccgagttgtgaatatactctgtcaattttacttttaacaagtcattccacctcaaatgtaattataattacgtgtcttggttcatatttttcccagcttgacacgtgtcctcctctgacgtgttagcaaaatttcaagtttaacattaagtgtggaatcattccaattcttgacaatcacatctctacactcatcatccttaagccaaaattgttcgaattgaaactggattttgtgtttcactgctatccgaatatgatctggtaccaaaataaaatattgtattgctctatgatctaaactgaagaaatccaagtgtgtaaggtgggaatcaacaaagaaatcactccaattcccattagtaaatcctctatccaatcgttccttgatgagtctgccattgaagtttttattactccaagtatattttgttggaatatattttaccaggatctagatttactaacaagtatgtttttaacatcctcatatgaatttctaaagcgatgaaaataaacacataaaaggtatgagaaaccttacagtggttgcagcggaattaaatgactcctcccactcagatctctcacccttgtatcctttctgtagtagagtatcaccaagatctaagcccgattctccttcttgttgattggattcttcacaatcttacatactatgattgatgactcacttgatatgtgtgggcatgcactcaatcactaatggctgtatttggtttgtgaagaatggctttgctatttcgaaaattcaagaggaagaagaagaaggaataggtctcatcaaatctagagtgaaagctaggtttttagctttggaggcattagttggatgatgagaccttaggtatccttttatactaatttccatagggttagggttgatttatttagaattaaaattgataaaaaatggagcataaaacccttaagtggccggccatgatatgggccccacacaagtttggtttttgccatttttctcaactattttatctatttttcacaaatgccactttttgcaacttcaaccctacaaatgccaaaactatttacttaataattaaaataattatcaaataaaattgtcatttataatat

SEQ ID NO: 351781 - DNA, 663 bp, Cannabis indica
agatagatatttttatagaaaacttatcaaaataataataaaatattaatttggacagattttagactgtcacgtcagcatctcatacttctcctttatatatatatagattatttaaaatatcttataaaattttcagacatttaaagtagtttataatatagaaagcaatatttaaatagtatatttcatacacgtgtaaaataaaataatcatgagtgcgacacaatatttgaactctgtttttgacgtgttaacttttttcaaattttttaaaattttgcaggtacgggttcgggttcgggttcaggtgggggtctcgggtctcggtccatgtccaagtctgggtcctagatccagattcgggtcttgggtccgggtttgggtttgagtcccgattctaggcccgagtccaggtccgggtccaggtcggggtcggagtcaagttcctgtgtccgggatctgcggtgcaggtcccatcataccggcagaactattaggggcgaactaaatccgtcggtaatagtatgatttttttaaaaacaaaagtaataatattaaaggaattgttttgtgcgagaatttttccggtattaaattttaaatttattagcagcggactattactggcggaagtccgccgctaataacattaaataatat

SEQ ID NO: 351782 - DNA, 1086 bp, Cannabis indica
gtcctgtaaatctagggcataacttgcctcttttcccaaaacgcttgatccccttcattggagatactcgtaaaaacacgtgatcccctacttggaactcaacatttctgcgtttcagatctgcataactcttttgcctactctgagaggcaagcattctaactttaatcttctcaattgcctcattggtccgttgtactgattctggacctaggtatttcttctcccctgtttcatcctaatggatgggagatctacactttcttccatataatagttcatagggagccatccttattgtactctgataactgttattgtacgagaattctatcagcagtaggtacttactccaggaaccctcgaaatccgtaacacaaggttgtaataaatcttctagtatctgaattttcctttcggactgtccatcagtctcaggatggaaagccgtactgaatttcagtttagtacccatagcccgttgcaaactttgccagaatttagaggtgaactttggatccctatctgaaactatggactttggcacaccatgcagtcttactatttctttgacgtacaaatctgcatattgatccactgaatatgttgttttaactggttgaaaatgtgcagacttcgtgaatcgatctaccacaacccaaatggaatcaaacaaacccatggttctaggtaatccaactacaaaatccatcgtgatatcctcccatttccactcaggtagggtaaaaggctgtaacaaccctgccggtctctgatgttcagccttgatttgctgacaggttaggtatctcgatacaaattctaccatattcttcctcattctgctccacgagaattaaggtttaagatcttgatacatcttggtggtgccgggatgcagagagtatggagtggtatgagcctcttcgagaatttcattcctgagttccacactattaggaacacaaaccctggttttgaacaatagcatcccactgtctgacactgtaaagtctctggcttgacagctgaaacctcttctctgatctgtactaactctagatcagtcatctgagcgactttatc

SEQ ID NO: 351783 - DNA, 733 bp, Cannabis indica
atcttattaattataataatactgatcatcaattaatatctaagatcaataattcaattttaaatcattaataataacaatgactaaatatctagaaaaatatatagagaatatataaagaatcacgtaaagaaacatcaattaaaatataatgaaagggaagtgagaagtagatctggcttaattttattgggctagaagggaactaattaaggctaaagtttcacattaataaaagaaacagaaattatagagatacataaaaaaaattgattaacaattaattaattataaaacaaaatatgtagtgaatcaatacgtacgtatatcctctcacttaatttggttgatgaagaaattgctaggttgatgaaaaaagaaaagagtgatatgagagagagatagataccatagcaatgtatggatatcctagtgatattattgaatgtatcgtagcaataaaaaatattatatgatatatgatatataatatatggttattttttgttgtatcatcactaatttattagttatctcaagaatagaaagtacgcaatccagagacctcggattgcattagcatgagaatgagtaattataactgcatcaatggttcttagcctagcaaaaaccaattaaaaatataatttcataaatatatttttttaatttcaaataattagcatcaaatatcagtttaaatattaatgggatttttttatttttattttat

SEQ ID NO: 351784 - DNA, 743 bp, Cannabis indica
aatttaaaaaaaaaaattaaatggtttgcattataccatgtattttgatgaatttcggttaatcatacataaatgccccttaagtcatttttaaagaataaaactaatttgtaattacttaatataaatgattctctttattcattactgatgtttacattttacatcagtaatgcgagttacatcatttatttattggtagtagggtcgaaaatattctatgttccagtagttctttattagagagccgttgagtcgagccaatttataaactccaacgccaactgctattttgatgacatattgaccctcccaatttgggttgaacactcctacagatgcatctctcgtatttgcaaatacttgtcttagcaccaagtctcaaatattgaatagtcttttcttgaattttttgttgaagtatcttggaactcggtgttggtatgctgcgttagtgatttgcgactcagttcgtttttcctcaagtagatccaaggataatttcaaaagttcctggttttcttcttgattataaaactctcttctttgagtcaatatgttcactttgacaggcagcattgcttccgagccaaatgctagcgagaaaggagtgtgtcccgttgctttcttctaggtagttctgtgggcccagagtacctgaggtagctcgtcaaccgatctattcttagtttcattggcggcatgcgaggtatatgtgaaaacctctgacatttatcacattt

SEQ ID NO: 351785 - DNA, 1359 bp, Cannabis indica
atggttttactttgtgacaacaccggtgttatagccaacagtatagagcctcaaagccacaagagaagcaaacacatagagaggaaataccacatcatcagggaatatgttgcaagaggggacgtactggcggagaaagcggatactgaagaaaaattagttgatccattcaccaaaattttgactatagttgcatttgaaaagcactgactgaatttatgattaattgaaatttactgattgttttatgttagtgcaagtgtttattttcattacttatttaatgtgttatttggtcgaagagcggactggcctggacagtcgaagagtagatctgagttggccaagagcagatctgagcagacgcgggctcctaccccacccttgccattgcatccagaagccaagagacgcaaggagatgcttactcactacatgaaccggttggttcctgaggtaagtgagcagctggatggtgcaaacaatgaaccttccctggagttgctgatgggaggagtcctgagggaatttacaaaggtgagtcattcttgacagtttcctttaatccttctttacttggctcagactctaatgttttttctctgtgtaggctggtgtgaagatggcttacacctattaccaagctaagtctgccgcctccaagaacgctaccatgtccaacaccatgagggcggaagtggacttggccaggaaggatgctgatgaagccagggtggaactcgtagatgtctgaatggagctgggtgaagtcaataagaagctttttactgctaagaggaaaataaccgagttaactaaggaccttaaggcttccgaccaacttgaagataccattgccaccttgtcgggataagtgaatattcttcaagaggaaaggggagttcttcagactgtcttccgtcggctggaagcagagaagaagtctaaggaggaggatcttaaagttgaggtcaagaaatacaaatcagaggctgatcagcagtgagcggaggtgacgaggctggaagagaaagtacatgccttagagatagctggtctcgagattttttatgacttttggaaggctaaccctcaggcaaattttgattacctgggcgaggctaaagacatgtatctcgagtactgtgcttcccaagtggcttatggtgaacccgaggcgaccacttctacatctggccagaatgttgacgatccccccgctcagacaacagatcctccagctcctaccaacccagaaaggcccgaaagaggagcctgggactccagctgtctaaatacttctctttttatcttcttttttttatatatatatatatatatatatctatccggccataa

SEQ ID NO: 351786 - DNA, 676 bp, Cannabis indica
gtgtccctttttgacatttttttacttttttgtcaatactcggttatttaaacatttataaaagttttatttttcaattttacattttcaaaagtttcataattacaaatatacatctccatgcttatgtcatggttttctctcttcttacacgccaccactgccataacttctcctttcttatttttttttaattttttttttattttctattactctttccttggttttttgttgccacaacccacgatcacccagtttgaagccctaacccatgatttttgaacttcccatctatgtcattatctccattatcttccatattctataaatggccaccactaggtcgggttcgaattcaccttccccagctaaaaaaagttctaaaaatactaagaaacctcctactaaattctattcttaaagtttgtattcttaaaaaggggttgaaagcacattgtgaagtaaaggaatgggtgatgttgctagagcctatctggttcctaaaagaagtacctattccaaatagattaagtctcgtaagggaagtagagcaaaatcttcaaaatttgccaatgatgtaagtgggttatgtgtttttcatttttttttagttttttcttgttgttgtatttttcgtatgtatgttttgtgtttttaaattttttccccttcg

SEQ ID NO: 351787 - DNA, 706 bp, Cannabis indica
gctgcatctatatgctgcatataaaggttagagaaagaagttagacaacaaaatatattaattgtagattagttgacttataaagtatagtaaaattataacttagtttacttacgtcatctgtaagccattcctgtagtgccaacaacttccaaaagaacgatggaccgtaatcaccacttttcaaatcccgaagccggtggttgagaatgagtccagaacaccactatcaaaaagtatccaacaatcgctcatccagtggcaccaggggatcaaatgtcaaagaaggcctctgtttcttcttcatctccgtgtagtcatgaaaccatacagggggatttctcttcctcttcccacacttaacccctgcaggttgtgcctctatcgccaaaatttcaccctgggactcgctgtcatctatacaaataacacctgcaccgataggagtagctggagttccctcataaggatcataccctttaggaaagacctcctcatcttgtagtgggggtgatgcaggtggtagtggggtagatgcatctgttggggccttcggtgctgaagctgtcgttgccgtacgatgtaacattctcaatatatttctgagctgctccgtaattaggttctgaccaaccttcagctctacatggctaatctcatacgacatcttcaactcggcatgacaagcgtgttgggttttatgccc

SEQ ID NO: 351788 - DNA, 1056 bp, Cannabis indica
gaatgttgggtcctgcaggataaaatcgaggagctaagttcgaagaggaagttcgacaaatacaaaagaacgaggaaggtcatccctgagtggatgacaaagaagaaaatcagaacgcgagtggttcgacaacacctcgcaatatattaacgatcattggaggacccatatcgcaggagactcccgcaaatctcaagagcgatatgccaaagaagctaaagagaagccgctcaccaatgtaaacaatctcagtgaacggccagaaaaattgtttaaaagagaatgcgacgacatcacctttatggagagtgatgcgagatgggtccatcacccgcattctgacgcactagtcattgtcgccaatattggcagagataatgtccaccgtatactcgtggacaacggaagttcagtgaatctcttgaatttccaagcttttaaacaaatggggttgcatgagaaggacctgcgacctgtgacgtcgagtatatacggttttaccggcgacgtcatcgcactgaaagggatgattaaactcccgattaccttgggaaccgccccagtaacagccaagtcaatggctgactttgcagtaattgaccagtattcggcatacaatgccgtgattggtcgaccaatattgaaggagatgaagatcgtaacctcgatctatcatctcaatgaagttccctactcccgctggagtaggctctgtgcgaggagtccagtcagactcgcgagaatgctacaatgcagcagtcaagctcgcggagaaaaagtcaataaatgttatctatttattggaggcaccacctcctcgccaggaggtcctcaggatcgaagaggtgtcgcacacggatgaaccagatctggatccaaggatcctcgatcatgccatagcggcccaagccgcggaagacactatcgaggtacctatagaccccatagataatagcaaagttttgaaaattggttctaaattgacttttcagcagcaagaacaactaacgacttttcttaaacaaaatcttgatgtttttgcttggaaacattcag

SEQ ID NO: 351789 - DNA, 588 bp, Cannabis indica
acagaactaccgagaagacggcaacgggacacactcccttctcgctagcatttggctcgaaagcaatgctgcctgttgaagtgaacatatcgactcacaggagagagttttataatcaagaagaaaaccaagaacttttaaagttatccttggatctacttgatgaaaaacgaacttagtcgcaagtcactaatgcagcgtatcaacaccgagttacaagatatttcaacaagaaagtcaagaaaagactattcaatgttggagacttggtgctaaggcgggtatttgcaaacacgagggatgcatccgcaggagtgttcaacccaaactgggagggtccatatgtaatcgaagcagtagttggaattggagtttacaaggtggctcgacccaatggctcgcttataaaaaactactggaacgtggaacatttgcgaccatactaccaataaataaatgatgtaactcacattactaatgtaatattttaatttcagttatgaataaagaaaatcatttctattatttaagtaattacaaagttttaatctttaaaattacttaaggggcatttgtgtatgattaatc

SEQ ID NO: 351790 - DNA, 676 bp, Cannabis indica
aaagatttgctcgccctaccagaattgtcgtccgcaaagaaaatatgggagaggaccggacctcccctactaagagtaattccctggatgaccccccgattaagggcatcatgaagtaatctagaaagcacttctgctgcccaaataaagaggtagggggagagtgggtcgccttgccgaagcccacaagaaggattaattctcccaacttgcccccattgagacagatgtttagcgtggtagtggagatacactgtgagatccaaaggtgaaatttctgggggattccgtagcaatccaaaacgtggtcaataaatctccagctcaacttatcataagctttgaccaagtcaatttttattgcgaaaaaaccctccttgcctctttttctgttgaaggaatggatgatttcttggacaatgacattattatcatggatattccttccagggacaaaggcagcttgagttggacaaatgagagaagggagtaaaggttttatcctgttcgcaataattttggagattactttgtacaccacattacacagagagatgggtctaaagcggttggttcgagtcggatttttcaccttagggataagaacaacattcgtggcatttagccctctatgcatatttcccgaaataaaaaaatcagagaccgcatcacagaa

SEQ ID NO: 351791 - DNA, 673 bp, Cannabis indica
cttgaatgaacaaaggcataaatgctaaaatatgcttaaaaagttaatcatacccaacataggagttcatagccactcaagcatttagaaaactaactcatgtttaacacaaaaattacaatccaaatttgaaattgttcatccatggctgctgccctttttacaacttatcaagtttttgatatttaaagataagaaagacaagaacaaaatataaaaggaaagggaagagaaatacaaacaaaataaggcttgtgtccttctcttcttttgcacttgggtcccccttctcctttcttctctttgtactttctgcaattaaagctcttcttcaaaaatggtagctgcccgttatggtgaagatgatgatggtgtatttgcttttctcctctttttgttgttgggtttttagggtacaaaattcacaccctaaaatagaagcccaatctttttccactttggcccactaggtttagtctcctttcttccaaagcagtcaggtggtgcattttaagtgacttggacaaattcgctgatgtggataagtgaaagtcattttttagactttttccacgtcattacccaaactgcccagaatgctatagcattgcttcaacatttctgcccagttttcaacttttgctcaaacttctcctttgcatcacttcctttt

SEQ ID NO: 351792 - DNA, 582 bp, Cannabis indica
tccttcccagaagagcttgttacataaaaattcaacgcaactctcgcatgcacatttatgccagaaagatcactaggtttacgatacgtctttaaccctccttcacgaatcggaaggactacttgaagtctatcctacccctcgtgatacttttccctttgaccttttacttttcctttcgaccttttcaagcgaagtctaaacttgaatttttatacaacttcagcattccttccgaaagtcgaagcttgttacataaaaatccaatcggaatctcagatgcacgtttgtgtaggatagatcactgggggtacgatacatctttaaccctccttcctagattggaaggactacttgaagtctatcctacccctcatgatgcttttccttttgaccttttcaagcaaagtctaagcttgaatttttatacaacttcagccttccttcccagaagtctgagctgttgggttttgtgccctaaataaaatccataatcagatttactaataaagatcagaaataacattttatattgcatggttcacatgattcatttcatgattatacatatatataatgtat

SEQ ID NO: 351793 - DNA, 633 bp, Cannabis indica
gcctgttcttgacttttgcaattaagattaataaaactcaagggagtagactattactgacatccggggccgaacctctttaaaatctggtgtcttttatttacatttattgtgaatttcggtgttattaactgcatttattattgtgattttggtttaaatctcatttattacaattccgcgtcggttggctaaaaatccagtcaacacactcttttagaaaacacaatttttaaatcacaaaccaatcaaaccctaatgtttcttagtttttttcacataactaacaacaaaataaaaataaattcttgttattttatatcaccaacaacaaattaaaataaataaaacaaaaaataacaaacacaagggaaaaaattatgtgtataaagaaatatttagttttattttacggtgtgtacttgcatagcaaataaattaccactgtgtgtacttacatagtaaataaattttacaataataaactattatatttggatgctattaattcttaccacacgttttataattatccaaagttgtcatagactatcaaatttagatgagatcgacggtaattgagatcattgagatattttttagtgcaaaacttttcatctatttattatgtat

SEQ ID NO: 351794 - DNA, 577 bp, Cannabis indica
ttaaaagtacaacacataaacatgtgtccccacatgaataaacacacacacaaccggtttagtttggtgtaatggaattgaatgaactttattatattttatgttatgttcaaatacacatgtgggcacaaattaataaacacactatacaatagtttttctctattcattgagtttgtaatttgtatgtttatttcttttaatcatatgccaacaggtatgttaactataataattctttaggattacagtaacgaaattaaaacaacttttttgatatgctacaaatgtagattacgggagtcactattctcgtaaagaactcactgaaccccttcgagctagggttgtacagagtgacactcaaccattcgtagtactcacactatcactggcggtgtttatgggtcccgtgacacatagtatgtaatcaagttagctgtggtgtaccggagtcactattctcgtaaagaactcactgaaccccttcgagctagggttgtacagagtgacactcaaccattcgtagtactcacactatcactggcggtgtttatgggtcccgtgacacatagta

SEQ ID NO: 351795 - DNA, 518 bp, Cannabis indica
gtttcatgttggtttatgtgctacttgatgaatgtatgtgatttacagaatttttccatagaaataatttgattttgtttctgaaaatattttatttggattccttgtgaaaaattaagcaattttcttttttacggaactcgatttcgataaaaattgagaaagttattaattttggaagattggatgccatggctgtcgaagctaggtgcatgcgtgcaccaggtgcttcggacaagcaggagacgcgcgcagatgctcagacatcttccttgtctgaagcccacgatgaccctgcacccacctgccttgcaccctgcagatgccgagaaatcccggctgggtacctactgtccgcgcgcgcccagggcagcgtgcagccttcctgggctgcacttgcagccctcctggcatccacctcccaattgtgatttttgtgggactttttcccctatttcgattttttccaatttttcaaaccccaaaattaaaataaaatattatttttaaatatattt

SEQ ID NO: 351796 - DNA, 754 bp, Cannabis indica
aaaataaaaaatactctaaaaattattctgatttaagttgaactgaaattgaaaaattttgcacataaatataatcttatatttaattgacttcatttaaatagaaatcactaagtatctagaataaaataaacttaactattaattctaatttaatctctaagaaaatattctaattcaagttggtctaaaattaattaacaaattaattttcaataaaatatattttgcttatttaattgaatttcatgaaataaaaataaataattaagtatcttgaataaaatcaacttaattattaattctatgaaagttctaagaaaaaatatcctcatttaagttggctaaaattaagtaaaaaattaactttcaacttaaatatattttctacttaattaaatattagaaaatataaattggttattagaaatcattatctagaattttttttttctttaaactaagtgtatttttctaaataattttagaataatccaatgaaaaattaattccatttatttccaacttaattatgttgctaattagtttttaactatgttagactaatataattagcctaatgcaattatttaaataaggcaaatggaccttcacaattggggttgttcatgtgagggagggctgggttcaatatgttgtacccactactaatggcttcctaactctcacacaaggcccaaaggagaggaatttaacctttcattaaattattgttattcattgaataagccca

SEQ ID NO: 351797 - DNA, 688 bp, Cannabis indica
tggattaaaatcttaaccgtgtgcttgagtcataactctttgaattaaattggatgtgtattagaaggttgttcatctagatgtaaaacatttatttttgacgcatatcacttgtgttctatttggattgtagaatgttgacttgacatggaatagaatttgtttgattgatttttgttttgaaaaggatttaggcaaattttcttttgatcgattgagcctttcgaacctacctgaaaagttttatccttagttacccaaagttgagccttaacttgttttaaaattcgccccacttaactaagcttaatttgttatctttaactattttcattctcaacatacattattatgccataagcttttaatcaagtttggggggaatgaattgtgtaagtggggaacaattttgaaagtaagcaattgaaaaataaaatacttgttatgtgatgtgcctctattgtaaaaagaaagaagaagaagaaaaaaacaaaaagaaaaaaaataaaatagtgataatttcttcttgagacacaaatgtgaacaatgaagtaggcacataggaaaaaaaaagaaaaaagtgtaatctcttactagatctttgggatgaaagaatggataagtgtgggtgcttgtttggtataattgtgcttatggtataatgtagcctaaatgacttctcatctac

SEQ ID NO: 351798 - DNA, 568 bp, Cannabis indica
tcctcctcttggagcttttaaaataatatctctgaatatggattcttagataagtttttcgaccctttgcccagtgagaatggatcactatttatagggctataaactgtggggaagaagtttcccttctgattacaacatatataattgccaagattacaaattaaatacagaatacattgatcaagggatttggacagcttgccatatctctgtgatatgatcccaaaattatagggatttctcttgtgactcacgatgcaagtgctgaaactgctaagtgttggcgtgctattcggattgctcactccccagttaagaaggttttgtccatgcaaatatatgtggtgctttgttcagcatatcttttgcaagtaggtatgtaaagttgattttacgtgtcatcatcgtgtgatgccacgtgagagtgcaaaaattaggataacacaatgatttgacagttcactagatttagactggcatgataatcaatgataaggtatacttacaccttggataagtgttatgtcctttcctaagggaagtggtaaagtatactagtatcgga

SEQ ID NO: 351799 - DNA, 1042 bp, Cannabis indica
agtgggataaatattggaaataagtagaatactgagtttgaacgaggtaattgttttgaccattttacccctaggcttatgttggctttagtttaagcaccaagggcattttggtcatttttctaagcgattaggtggtctcatctggagtttgacagctggtttttagacacttattcagtaagtgatttattcatttagaagaaaataagaaattgaaaagaaaaaaaaattaagagaaaagtcatttctctttctctctctttgctcgaccaccaccaaaactagaaggaaattagcaatcctcatccctttttctggaattcttcaaggaatcaagaggggaatcaggtagcgataagccctagcacttcaattctttagttattcaagcattaacctagtttttgtatgccattttgtgttctagtggatattagggttaagttatcttgtgattcgatttctaagtttaaattaagttaaaaatgggttcttgcagctggtttaggagtttggtgtggtggatgcacaagtttgagtttgaaaaatcaagcttggttcatccatggtatattttgattttgtatgtttttttggattctgttggttagattatattgtttgaggtcaatataggtgttctggaagttttggtgaggtttggacaagatttggacaagttttggattgcttgaggaaacctggtgcaaatcagttaaccggtttaccaggtcctgtaaaacctgttaaccaattctggaacaggtttcccgaacaatccatttcgtcgattcgtgttagtttcaaagccttggttgggtgattccttgttacttaggttattgtagtttcagttttctatagcagaacctttagttggaggtttggatttcccgaattagggttttggtgcgtcatttacccatttatgttatgtgattagggcatccatccagcatgaggttttccgttcaggtcggccaactcacttgaattcggaaacgaggtaagaatagcgtagaacatatgagatatatat

SEQ ID NO: 351800 - DNA, 525 bp, Cannabis indica
agtgaaaatcaaagatacaaaaggggtacttgacctagctgctataaggggtatttataatcaatatacaccttattgacagctcatacacggtttgaacaagaccacaacccactagaaaattccctataatagatattcaatcagcccaggaatgtccatttctgtacctatagaattgtgagcagtaactctaacattccttttatagaaaaggaaaattaagctccggttttctcctcaaaaatctgatctaacaaaatagaaaactcacacaagatcagaatatcacagcttgttagatagaaaagaattgagtaaccaaacttactatttttacattattttccataaattggaaaacaagacaactttcctttcaaagatagattccttaatataaaggtcacatacaaaatatggaaaccaatatttacagcacaaccgaaattaaacaataaataataaaatatttttatcacattaaagatgctaaaaataaaattaacaatctccccctttggc

SEQ ID NO: 351801 - DNA, 732 bp, Cannabis indica
agtgtggcaagaacatcttccaaatcaatcacatctctgccatacttcatggctgccttgacttcttgatatgcgataagaagtgatctcaacagaatgatggtctgagtttcttcatcaacctcatgatttatgttagtcaaacctaaaataatctcattaaatttatcaatattatcatctaaagaaaggaaagaaactattctgaaatcgtataacctttatagaaaattgatcttgctagctattgatggttttaagtataattcttccaatttgttccaaactcctttcactgtcttttttgcgatgagtttccttcgaacattatttgacagacacacgaggatcgtgtagtacgccatctcctccatttaaactttttcctctagtttcttttctgtcaataacttatcatctctaagaaccttagagactttctagtgcattaggatttccttttagactttctcttcatagtgcaaagtccccagtttcatcgaatctcgccattgatgacatttaaagtttcttcaagaattacaccagaaagaatcttgtatctgtgttcttaattgattatcaagctctgatttgtgaaaaaattacgactaacagtgcagaattaaatcaatgaaactttaacattcaaacaattagcgaaaaaaaattaagaacaataatcgaataaaaaataggagcaaacagagtattgaaaaataaaataaaaaa

SEQ ID NO: 351802 - DNA, 526 bp, Cannabis indica
acgaaaccctcgttctcccccttcgacaaaaccttcccttcttatattcattttcttcgattttcaatccaaaacttagcgatctaagctccggtagtagcaggatagcaaatccttgaaaagggaaagcttaaggtatggtttaatttcgttttaagtttaaaaacgattggttttatataggggctttatgatttaaaaaggttatggagattctgacttcgtagaactgttctttggtaactatgggactagtttatgtgtttacttgttgaatttgaagtgattttgagttagaaatcgagtttggaactttttaaagcttagtccgaacgttaatggcgtttttcatttaaggggtcgatttttatttctgttacgtaaggatggtagtatttatggtatatatgcgccctgtgaagtttggagtgatttggataagttttgatagtgtttcggtgagtgcgaaaattgtgattttcgagttttatagtttttagaaattcctaagagatcagaaatcgta

SEQ ID NO: 351803 - DNA, 672 bp, Cannabis indica
tcttctgactgtattgctttatccatgcagaattgtctcagaagatgattcaagctttgaagaagagaataagggatagctcgggcctatctcctctggccaaaaagtttaaaggtggtgagattctgtccaagttgaagatgctagttgaggtggccattgatatctctgaggagcgacctgttgtggacccttcaacccagaaggtctcgaagtccaaaaattccttgggagggagttcgactaaatttgagcaagtcaggggtggatccgaacaggttagggcacctgccccaatcctggcgctgtgcgtggaggccaatagaggcaaagaggtgcttcaccactacgtggctcggtcgcttcttgaagtgagtgaacacctgtccgggcggatagtgaattggcattggagttggtcttaggagaagtcctgaaggagatttcttgagtaagttccctctatcatttttctttaattcttctttgaatggttcggaattgaacacattttccgtataggctggtgtgaagatggccaatgtaacaccataactagcataggcgtattacgagatttttaaacatgatgtgcagctcgttgctaatcaacaaggtttatggaaaacgtggttaattaaaatttttgctttttacttaaacttgtaaaat

SEQ ID NO: 351804 - DNA, 557 bp, Cannabis indica
tatatatatatgagttaatggcaagactttatttttttcaaaaaaattatcaaatatgaatgaaacatttttctttttttaactaaaacttccaaagtaaatttttaaacttgatgtacctaaaaaaataaataaaaaaattaaaacttagaatttaattatacttattatttttattaagggctaaatttttaagattagaacagggcctctaaaatgtttaagacggccctgactcttagaaattcatcaaccatccattttagcgagttagggataaagtcatgatctctggtgtgaataattcatcttcttgatcagcaccgccttttcgagaaggcatgggacttttccccttcgacacatcacgtcttgatggtggtagagcgagctagtagaccctatacaaaataccatataatatatcaaatttgatcctaattttaccgaatttttgatagcataacaactgtaattaaatgtcctcaaaaatgcaatcgtttgggcatgcataaattttttcatacttctatcctatggaatttaaagtctttttc

SEQ ID NO: 351805 - DNA, 1656 bp, Cannabis indica
acgaccacacacccacaaacaatcctgaatcggagacacaacatgctccactattccttgttgttaaagtccacactgtcaagtctttcaaccgaaagaatttcatagaaaaaatgacaaagaattggaatcatatctctaggaatcccgttgtcatcaccgagcgccctcatggccttttccttgttgagtttggttgcgatggagataggcgtcgggttttgttgcaacaaccttggacttatctcaaccaagccattcttatggatattccaaattccctcgatgtcctcaatggagacagcttgctcaaaattcccctctggtttcaagtgtttaacactccttttcttaaacgctctgaagagttggcggcccttgtctcttcctctctcggccacatgttggagctctacaagccatctcttcgtgagacatggggaccctattttaggcttagggtcatgtttgatgtggcacatcccctcccccgtggaataccggtccatttctcgggcatcaataaggttgtttggcttgaactgaaatacgagaacctcccagatatttgtttcttctgtggccgaatggggcatagttacaataaaggttgcatggattacgtgaaagcttgcgatgaagctcctttcaccctggagctcaggtatgacatcaaaaccatttccggtaaagttaaggtttccactaatgctttgctatgccctgaacagattaactttgccaacccactggtcgcttctttcatgactactaacccggctagtgcggtttgtgttgcacccccggagaacatgccacctttccccacctatggcacccaagaaatttgccctccgcaaggccaaacacaacaagtggggcttttcaagtccggcccatcaactctcccacaaaactaccctcaatggaaccaacccgaccccacaaccaacacttctactcccaacccacgccataacatcccacccgagactattacaccaacatataccgccctccttaattccacaatgagcaatactagtgtccaaaaagcctcccctacttccatgccgaaccaagccatcacctcccaacactcaagcggctccaactccactagttcaaaatattgccatgttcctttgcccgagaacatcccacttctcgacactagcaagagacttgaagccatgaacctcacctaccaatcgggaactgccaccccttcgggttcaaaggcctcaaggaaaagaaacaagcccgactctaaggacaagttcaaaaggcaaactgaaatggtcaatggagagcttcgtcatcaaatcaagcgttcccgctccgacaacccacaggccactgaaatttcttccggaagcgcaggccttgccactgagcaggcctgccagcagccatgaagcttgtcagctggaatgcacgtggacttgggagtgatcgtgcattccgtaatctctaccgtttagtttctttttgtaatcctactattttatttattatggaatctaggcttgctaaaaatgtcgttgacaatcttaagcgcaagctccattttgactcgggtttggaaattcctaggataggtagaagcgggggcttgcttttattttggacgaatgatgtaactatcactttact

SEQ ID NO: 351806 - DNA, 651 bp, Cannabis indica
aaatattaaattaaaatttatatttagagttatctaaattagtaatttcaattaagtaaatatatgttaaaataaatggattaaaataagtatcaaatgaaaatacactcttaagaataatgagctttagttataagaacattcaatctccattattgtttctacacagttcttattttagtgagtaatcatcactaatggatgaacattcattggcaatttaatatcgtagaatctcgaaagataagtattattgtaaatgtttatattcttagtaatgtccaccctaaagtggctgctaagagtaggacttacaaggtatgaaataatggtggaagctcataagatagaatggccttgactctcgcctaaacggaacaacgccagattctagtcttgatcgaataaaaagttactagaatggtatccattttagatgagttgaatactcgattcaatgaatgatatctttgactcccgcctaaatgggacactgtaacagtttgttggaaactttggaaattatttaagatgtacttgttttgtatttttacatgtctaacttacttgctacatgtatgataatttttgaatgtatatgaatttatattgaaccatgttgttttcagttattaattgtagtataatttt

SEQ ID NO: 351807 - DNA, 1288 bp, Cannabis indica
aaggccaactacgagaagaagctgagttcggatgttcagcatgagtgcaaatacacagcttatgactttgcacctgcagtataatattgggtgtatgaggccattttagaggttgggaagaggtatgacacgaatcatgggattcggtttcccaagatgcttagctggacgagcaagggtgatttagggaagaaagaactcagtgcattattttctagacgggtatgagtttcacttatgtttagagtaattatttaacataaatgcttgtaataaatgctaaattattttactctgatattttttgaaccttaaatagaatctttaagtggtgaaggggctacttccacggatagaagaggaggcatatgtgaggaccatctcctacgatagtgtggaaaacctggttgatgatggtgtggatgacaaagaggctgaggcaaagactcaggtaccagagactcaggtacaaacattcaggtaccaatttttggaactttttttatgattgtataacttgtttgtttttttttctttttgttctgtgatatttgttacattttggtatatatttttttaggccacttgtttagaccctcagcccaatgcaccatcttcatcaggccttcgtggtgccgagtacaatgaattagtggggaggttggataggatcgaggctgaccaaaagggtatgtacgcttgtcatgccgagctaaagatggcatatgaaggctggtcagaatctaattatggagcagctcaaaaatatattgaccatgttgcatcgtccgccaacgacaactttagcacccaactttagcaccggaggccccagcaaatccatctaccctactaccagctgcatccacccccactaccaactgcatcagcccaactacaagatgaggaggtctttcatgatgggtatgatccttatgagggagctccagctactcctatcagtgcaggtgttatctgtatagatgacagcaagtcccagggtaaaattttggcgatagaggcacgacctgcaggggttaagagtgggaagaagaaaaatccccatgtatggtttcgtgactacacagagatgaagaagaaacagaggccttcttcgacgtttgatcccctggtgccaccggatgagcgattgttggatactttccaaaagtggtgttctggactcattcccaaccactgacttcgagatttgaaaagtggtgattacggtccatcgttcttgtagaagatgttgacactacaggaatggcttacagatgacgtaagt

SEQ ID NO: 351808 - DNA, 835 bp, Cannabis indica
tttgcctgaggccttgagactgacgagaagctcttgataattttatttctttcgcagaactcagtggataactcaccatcaaattgagttctattatcagatactatcttgatgggtattccaaatctacaaattatgttcttgacaacaaagttgagaactttcttgtaagttatagaaaccagaggttcagcgtctgtccactttgtgaagaaattgacagccacaactgcgtactttgctcctcctcgccctgtggggaatgccccaatcaaatcgattccccatattgcaatgggtatggcgaggtcatcattcttagttccgttggtggtacacgaggtatatgtgaaaacctttgacacttatcgcattttttgacaaattcgtatgtgtctttatttatagttggccaatagtatccttgtcgaattattttctttgacaagctttgccaacctgcatggtctcaaaagccttcatggatttctttaatgatttcgcttgcttctgcggggagcacacaccgttggagaggcattgaatagcccattcgacacaatttgccttctattatcgtgtagtgaggcactaattacaagagtttttgtgcctcgtttttgtcagttggaagttgcccgtggagaagatagttgactatgggtgtcatccaggtatgcgagttttctatcatctcaacttcttccttttcacatatacttggctcgtccaacacttccaccagtaccaagttcaattcatcaagttcgttttgcgaggccagttttgccagggcatcggcattagagtttttttctcttggaatttgcttgat

SEQ ID NO: 351809 - DNA, 531 bp, Cannabis indica
gctacttcattcggattaacaaattgaaacaattgttggcgattatgttgtacgagccattgatatagtatcctaatagaaaatttagacaaagctaccttagataaatttttgaatagataacaagaataaagttaaaaataataaatttattatatatatcaagtaatatacctcatgtagcacgtgatgataccttgcccaatctttttgttgaaaataaagtccaagatgtcttccttcgatatatacaagcctgacatatctagatcaaatatgtgtctttcaatggatactttcacattcgcattgttaggccacgtcgatataattttataaacctcattcaagtaatgacctcttattacaggttgttgcacttcttgtgacagaggttcacgaatacgacgtgtaggctcttgttgttgttgggttaagggtgctgctgagtgtcttgatttggtaattaaagcatcctgcatattgatttatgaattaattaaaattaaaaaaaaaaagtagcttctctaa

SEQ ID NO: 351810 - DNA, 677 bp, Cannabis indica
aaaatataaacagaacagtacttcggagggttttcctatcaaaatatgaggttggatggttttttgtaagtaaattgatagttgaggggttttgccgcaaattactcaaatattttacatagggagtttaatattacaaactaaactacttattcgcagggcaagcaaaatggacaataagagaagcttctagacttctcaaacgtaaaatgtctttgtcgactatttcccacttcttcactgaaagttgaaagaaagtggtactcttatttagaatgaatacaacatggaaacataactctaatttacctctaattttatatttatttgaaacatacctctttttatatgtattgtacccaaaataccttgacataagatagtcacatgaaaagtatcttgaagtgacatgagcaaaattaatacaatgtttaaaaaaaagaggtaaaatgatagactttgaaaaagaggtaaaaataaaagagaacaatataaaaaggatatagagtgtaatcccctataaaaaaagtaagtgaaagccccccaaaaagaaaaaaaaaaaacgaaaaagaaaaaacaagggaaacttacaaaatactggatttgactcaattcttacaaaatactgccacacggtaaaaataactttatactgttttggaacttttttttctttt

SEQ ID NO: 351811 - DNA, 678 bp, Cannabis indica
agaatgagcttctctcaatcaggcagcgcgacatgacgatcaaccaatacttcaccaaggtaaaatctctttgtcgcgaaatctctgcattagactctggtgctggcatgtcagatgctagaattagaagaattattattcatggattaaggccagaatatagaacttttattgctgcaatacaaggttggccaagccaaccttctcttgttgagttagaaaacttgctagctgaccaagaagcgttagctaagcaaacgtctggagtctcattaaagagtgatgaagaagcactctttagtagagataagaaaggacgaccccgaccaaatactagtagaaatactagaaaacatgatgacaaggatagtcatcatgggagctcccaaacagggggagctcagaataaagacaaacggggtggtcaatcaaagaataacaataaatttgatggaaaatgctacaactgtggcaagtatggccacatggctaaaagttgttggttcaagaagaaaactgcagaaggcaatgcagccacatcaaatgcagaaaggacaagcgatgaagaatgggacgcagaagcatcattcgcagtggaggaagaagaattagctttgacagcttctgttccaggaaagatcgactacaataatgattggatagtcgactctggctgct

SEQ ID NO: 351812 - DNA, 634 bp, Cannabis indica
taaaataaatttccaacagtgacatgtgccattctattatggcagaggtcacctaaggtgagttataagccagaaatgacttttctcagttgtcccttacaccttgatgtcaagggaacccattcgaacaaattttcttccatagtttacgaggagtgacatgtgccattctcttgtggcaaaggtcacctaaggcgatttctaggtagaaaatgatttttctcacttgtcctttgctctttgatgtcgagggaacccgtttgaaaaaatttccttccatggtttgtgaggagtggcctgtgccattctactatggcaatggtctccaaaactggagagcacgaccattttcttgtggtagtggtcacttattccttttgtcttgtagttttagtgctattttaactttataaataaacccaagtcattctcatgcccaaacaagtcaattccttattgttttccttggtgaattgaggtctctatggtgaaaactctcgcgcgagcccatgaaccctagtttgggcatacttgggtgtgtgagtcccggcgccaaatggttggttggtgtttttgagccctctagaaatgccatagggccctcaagaaggatgtcttgccttatttgacattt

SEQ ID NO: 351813 - DNA, 891 bp, Cannabis indica
atggttcctttgacatcactctatttaggtctccttcacaactaaaagagaccatatatgaaccaactcataagtagaaatggcaaatcttcctttccagttagtcatgataaaattgttgaactgttttaggttgtaacctttgcgggagaaaattttacagatcagtcgatgagaagtagggcgtggtggtggaatagcaatattggacaaattgattacttctctctctctctctttaacaaataatgcattggaaaggttaggatgaaaggaatttcatcgtgaagaagatgaaaaccataatagaatcagcagatcaaaacaaaaaaaaaaggccaaaaagagaggaagcatggaagttaattaagaaggagaaaactaggaaagttatgagcggagaaggatggaagcaggttaattattgatgaaagtaatgggcgaaaactaaaataaaaacattaaaaaagaaaaaaaaaaaaaggaaaaaaaaaaggaaaaaccaaactaccaacataacagcaaagagggcagacaatgctcattgtgaaaataagattaaagttttgataaattatattattaatattataatttaagtgcatatattcattcgatcattttatcacattaacaataatatatattaatatatactatcaaataatataattatagtatcttttaaattaagaaaaaaatttaaacaaactaacaattaaatagttaatttattaaaaagtgaaaataataaattgttataaaaaaaatttgaatttatatgtgtgtgcattgtgtattgtgcatgtatctttatatattaaaagtgtctatctaacggcatttcttggtttaacagaatatacttaaaaataaaagaatattctgtta

SEQ ID NO: 351814 - DNA, 529 bp, Cannabis indica
agagcttaattgagaaaaaaagaaggttttagagtttatttgtttattaggaaaccttgtaaggtttaattaataaaaaagttaaatgacaattttgtttgataattaattataattattaaataaatagatttgacatttataggattaaaattaaaatatggcatttgtgaaagaaaagataagttcttaaataaatgacaaaattgaaacctgtaggccccacttatatggccgaccccttaaatggattattaagtcattttttattatttttttaattccatataatttaaatactaatcctagaaggaatcctataaatagataagataggctcttaattttgtaacctgacaacataaccttcatcagactactttgtcagacaactgagaaaaataaagagcctctcttggattttgaattcctctctctttcttcttcaaaatttttgaaccctaaagtgaagagtactttcccacataattcaagtcaatactcaatcatagtgtggaagattgtgaag

SEQ ID NO: 351815 - DNA, 581 bp, Cannabis indica
tttactcacctaacccagaaagagaacatgagcgttactgagtacacaacacagtttgatcggttgacgaggttcctcgggaattgtgccacccgattttagtaaaaaggaaaagtatctggatggactgaatgtgaagatcaagcatgacctgatgatcactacagacgacaagaccaccatgctgagatggtggaaaaagcactgcgagctgagggcgcagttggatgtatgacggagtcagttaggactttagtgagtggcggggctccaacccctcctgcatcaggcttcagcaggggaggtagtggtttggccatggaccagaaaaggaaaacatccactgcaatcggtggctcggggcagaaaaagaggttcagggggaacctgagctgaggcagtcgtcagggtggttcagagacccgtttttcgtacctagagtgccccagttgtaaaaggcaccatctgggtgagtgtagagggcaggggtgcttccagtgcggcatgcccggacactacaagaggaattgccctcaactaagaatagaagcacaaagggctccggcgagacccactccagc

SEQ ID NO: 351816 - DNA, 651 bp, Cannabis indica
tgttacatactgtttgatttgctttaatattcttggtgaatgagtcaatttttttcctgcgtaaccgatatgacctcattctactacttcattagcttgataaaataatttctgactattcttatgagtttgattttttcatcagggacaaagacaagcggacattctgtactttttgttggcaaaaatatcaaggttattttattttttgttgtttaaaaaaaatataataaatatgtgtggtcgacattgtcaattgagctttcttaaaaattcttgttatttttcttgttatgtttcactattttcttacgtactatttttgctcttaagtgttgattggtgctttatgtgttattatggcgttgttcattttttttgttatctttggctccttgatagacaaaaaggggaagtagtattgatttttggattatgtgttcaactctagacccttatttttagggtgagttgtcttgttttcggtttgtaagctttttcatccaaaaaaaaattctatgttttatgtgttagagtgctttcatgcatgggaagtattttctatactcttttatctttaaaaagctttttgctttggtttctcacacttgatgcaggttttctcatataaaatgttttgtcaatcaaagt

SEQ ID NO: 351817 - DNA, 1228 bp, Cannabis indica
gccatgcatagtggatttgggccattcttttctccacgcatctgatattctcccgacacttggtttactacgagttgcgaatcgctgtagacttccagttcttttcggcccccacgagttttgctaatctcagtcctgctatcagggcttcgtattcagcctcatttttagaagctgtgaattcaaaccgtagggcttcttggagtcggagtccgttgggggatatcattacaacccctgctccggatccattctcgttggaggcaccatccacaaatactttccacgccgggacttgcgttataggcatgctcgcgttagcttctgccttgtgacgctcagtattgaagtctactaacgattgtccttttatggaggtgcgaggaatgtagtgtagatcaaattagcttaactccatagcccatttgaggagtctcccgcatgcctctggtttttgcaggacttgtcggagcgggtggttggttaacactttgatcgggtgagcttggatgtaaggtctgagctttctcgacgccattaggaggcaaaaaactagtttctcgatcaccgggtatcgtgtctctacccctatcatgcgcttgctgacatagtacacgggatgctgagttttttcctcttcccgtactaaggctgcgctaaccgcattctcagagacaaccaagtataggaacaagtcttctctgagaacaggttttgataggattgggggtttagcaatgtgctcctttagttttttgaatgcctcctcgcactcgtcggaccattcaaattttttacatttcttcaggatgttgaaaaagggaatgcacttgtccgtggatcgggagataaaacggctcagggcagcaacctttccggttaagctttgtacatctttatgtttgttgggggaaggcatgcttgggagagcttggattttctctgggtttgcctctatcccacgctggctaacaatgaagccagaaactttctcgatttgaccccaaaagtgcacttctttgggttaagtgatctccatggcttgcgtatgccttcgatttgaccaacatgtcgtccacgtatacttcatgttacgcccaagaaggcctttaaacattcagtttacaattcgttgataagttgcccaagtattctttatcccgaaaggcatgaccaggtaacagtatacccccttatcggtcctcaagctagtgcattcttgatctgt

SEQ ID NO: 351818 - DNA, 736 bp, Cannabis indica
gaaaagataacaaaattggagaagcaattttgaatcttaatcaaagtggtgaacaaaatagttgaagaattttgctaacttttgtgtaatatttgggctaatttcattgaggatataactttaaatcatgggtaaaataatcacataattttgtgagtggtgatgtgagtttgatattttagttttgttgagaaaactaaaaatatcaaatggtattttcaaagtgactttaaaaagtcatttcaagagaaatacacacaaaagtgatattatatgcacttatgctagaaatgtgggggtgactcacaaatttaatcaaaatgtattgagacatggttgattaatttatttaattttgaattcaaattataaatcaagtttggctatgtgcatatgtgaaattttgaaatatttggtgtcaaattttggtgaaaataatttcaaggaaatcaaatttaagagaaattatagagacaaagtggtcctctatattttaaaatcaagatattgtcttgatagtgaaatgtgaaagtgtgagggtgatactctaatgtgaaaagtttaagacatctttggtgtcttaaaataaagtgcaatttaaacatgtttagtgtctcaattggtgtttaattttgatatgcttggtatcaaaattattgagaatttgagttgtgtgaaaattaatcttttgtgattgaattttcaaagcttaggtacttaaggagataagtggtca

SEQ ID NO: 351819 - DNA, 877 bp, Cannabis indica
agttttgctaaatagagataaatgattgaggtctcatttcagtaattatattagtttattgaagtatcatttataggtagctaagtgttttaaggataaaatatattgaagggtagaatagtaaatttgtccctattcagtgtagatcatctatagaggatccttgactattagagttgtaacaattgataatcataacgtatctatatcattgtacatatagagcgttctatataactgagagtgctattcaattccaaatatatagtggcgcagggaggaattaataagttagagaatttacttggtgaattctagatctacttattgaaagctgggttatatagggccatggtcccctcactagtacaatttcattaagaatattataaacataacaatggttattatcaaagctaacaatataacccttatcacaaacttgactaatgctaagaaaattagcttttagtccttccactaacatgacattcttcagtctaggaaaaccttcaaaattaagagttcacattcctataacttttcccactagactgttgccgaaagtaactttccacaatgcattggtctaatgtcgtcaagataatctttttcacatgtcacgtgtctagaacaaccactgtcaaaataccacaggtgagaggcaatagttttaaaacatggagatcctaccaatcatttatttttgatagcccatttttatttttgacaaacatatttattttcaaaataattagatttaaaaatatttttcatagtaacacatttaggttgaatgtgaccttttatcccacaaaaatgacaaataggaatgaatcgtcttctttccctttgaaattgtcaaacttaccgtgct

SEQ ID NO: 351820 - DNA, 801 bp, Cannabis indica
tgccgtgtggcagtaaaattgaaaagtattaccccaaatccagtatttttgtaaaatgccctaaaaagaattggcaccaacggttttaatataacttacttgggcccaacaacacaataggccttagagtcaatctcagacctcaaagccctaactaccaaattactcattccttaaggtactcatctacttccaataattattgtcatacaaccactattaaaattttaaatatatatatttagtcgattatcacattctaccctccttaaaagaaatttcgacatcgaaatttaattttccaaacactttgagtactgtctcttcatgtccttttgtctctctatttattttattggtccaacatacatgtatctaatgcttgtcttaccggtaaaatcataacacatttaatatatactacttaatttaaaaattattatgctactatactttacttaataacaaaacatacttcataataataacttacacatacactttaaatatacaagttttgtaattgcatgctcatgatattaaaagttttcattctcttatgaacatccttacatgccattaagagtaaaatcctttattctcttatgaacatccttacatgccattaagagtaaaaatttattctcttgtgaacatccttacatgtcattaagagtaaagatatatatatatatgtatgtatattatagacatccttacatgccacatcaaaaacattatatactacataaaatagcatccaataaagggcatgcaaaagatcttatgttagcttctctt

SEQ ID NO: 351821 - DNA, 599 bp, Cannabis indica
aaaactaaaatattaaataaaactaacactacgtggcttgtcacgtaacaatcacctagtatataataaaatgtttaaggagctgagataatatttatgaaaataaataatatatgatgaattttttatttatttttttcaaaaataaaaataaaaaagagtttaactaaaatttaataattaaatgaatatatcacacaatatattattaatattacacatgaatagctagtctctcttagctagagatgtcttttataaggtcctagggagctcgattgcatttgaattataagttagattaatttttgccgctactacaaaaatagttttttccaacatttttaaacaatcgtttaaagtattctcgctaatttctataactgtcgcctatacgaccgtcgcaaaacaggtaaaataggcgacggttaaaaaccgtcgctaatgtggacttcctgaaggttttaaccatcgcctataacagggtataagagacagttttaaaaccgtcaagaatgtaaaaaaaaaaaaagagagaaaaaatgaatctgtactttctcccatttttttcctgcattagttttataattttacttaaa

SEQ ID NO: 351822 - DNA, 619 bp, Cannabis indica
atatacatatttatatatgttttagacttaatagattttatacattaactataatcatgaaataaatcatatgaaccatgcaacacaaaatgtgatttctgatctttattaattagtaaatttgattatattaaagtgggttttatttagggcacaaaactcaacatgggagcagaacaaccttcagtaaaacagccataactcactcaatattgattcaattgacgctttttaacttgcatttcaaagataattccatggtctatcaagtaatgtctctcactccaattgtaattctgaagttatcaacttcaaattttgtccttaagagtgttatgaatttaagccaaaacttacccgaagtgggtcccacagaaagtttcagaaattaacgaccaatctctagagtcaatttcactattagatcattatcaatagtcaaaaataacttaaatgtattttttcatattttttagaatattttatcactattttaacaggacatccttccctaaacaagagctcccctaactcaatttttaagttcaaaaaagtacctataaagttaaagcatctctcttgaatttatttttctagaaattagagcatccagacttag

SEQ ID NO: 351823 - DNA, 1126 bp, Cannabis indica
agcatgccgccagcgttcatcctgagccaggatcgaactctccatgagattcatagttgcattacgtatagcttccttgttcgtagacaaagcggattcggaattgtctttcattccaaggcataacttgtatccatgcgcttcatattcgcctggagttcgctcccagaaatatagccatccctaccccctcacgtcaatcccacgagcctcttatccattctcattcgatcacggcgggggagcaagtaaaaatagaaaaactcacattgggtttagggataatcaggctcgaactgatgacttccaccacgtcaaggtgacactctaccgctgagttatatcccttcccttgtcccccatcgagaaatagaactgactaatcctaaggcaaagggtcgagaaactcaacgccactattcttgaacaacttggagtcgggccttcttttcgcactattacggatacgaaaatcatatatatatagtattgtaaagcaatatataaacttaggtagggtgtgcataaattgatccaatgtaattataactgaccactctaattataattgaccgtcaaatattagatatctaattgtgatcaaatcgaattagatgttatttttgaatacataattggatcagatcggatgttggatggggtatccaaaatttagtttgaatgagtaattaaattttatattgttacacgtaaatatatatgtataaataaaaattaacacttaaaattttacttttttttcttggattggatgaatccattccaatccaatccatactggacctaaaatattagatggatcgaatctgatccaaaaaatagtaggtctaataaatccaaattaaactaataaatatacaaaatacatctagtggatagaaccgatccaatccaatatccaatagatgttggattgattggatgactgaaaataattggattagatcgggtagtaaaatctaacatccaagatataattggatcggatttggatagacctaaaaatattagacgtggtccaatgaacaagcctaagtaaaagaatgggatgagtcaattgtttctcattaattggtaatagagtacaaagatgtttatatacaat

SEQ ID NO: 351824 - DNA, 713 bp, Cannabis indica
ccttaactttatgtgtgtttattatcgtttagaagttcatatttaggatgttaaacaacatactgtgagtagttctaacatcctggtaaaataaattccaacatttctctcccaagatcaataacctggcgttgccccacaagtttaaactgccaacctgcaaaatgtacaatggaagagaagatcctctttcccacctcaagtatttcgagatgcaaatggatttgcaaggaatacgcggagatgtgtgttgcagaatttttcctgctaccctctcggaagccgctcagcaatggtatttcaagctagcccctggaaaattcaactcatggaaagccttctcttcagaattccatgcacaattctcctcctcttgccaacttccgttgcatctaggagacctagtcgaagtcaagcagagaccaggcgagcctctccgagcatacataaacagattcatgacggaagcgaccaaggtctctcgggtaactgaagatggaaaattgtctgcgatactatggggcattgaggtcctcggtgaactttggaaggacataaggaagaacggcccagtagactcaatgagtgattttctcgatcgtgctgaaggcttcattaagattgaagaagctattcagcgagcagaaggcgagcaaaagcctgacaagtcaaaagctcgttccactggaacgtccgcccaactctccccttac

SEQ ID NO: 351825 - DNA, 1239 bp, Cannabis indica
tcaaaccgccagctccaatagtcagatattgcagtagaactcaattgtatagaaaaaatcagctcttgatctctatcatcaaaaagatccttaattacctcttcatcccactctcgagaattcattttgaaaatgctgcttacagtctgattaacaagtgcaggatgtaaagaaataacatagccattcgtgttgtgtagaagccaagggtcacgtaaaattgaagtatgttcacccgggcctatcgtacgtattaccccagcctgtaccagtcattttgcttcaaaaatactcctccatacgaagctcggatggtcccccaattcagctgaaagaagaattccgttagcatagtatttagctttcaaaactttactcaccaaggacgtagcattaaccaacaacctccagcactgtttccccaacagggccatattaaagtcccgcagactttgaaaattcaaacctccaacatgtttgtgacgactcaatcgatcccaactcatccaactaacacccgttctacgaacagagtctgtttaccaccagaacttagccatgagacactccaactccttgcaagtatccaaaagtaacagaaaaatactcattgcatggctagaaattgattgcgcaacagattttagcaacacgtccctccccacacgagacaatatccttcctttccatccttgtaattttctttttattttgtctttaagaaagccaaggatagcatttttattctgtcccaccgaatatggaagtcccaaatacgacctattctcatcagcctcataaatatctaacaggtcacagacgttatccctttgagagatactatagtattgtaactatagaacattgatgactttgaaaaatttgtcttttgacctgaagcaatctcatacagtagtcatctatagtttagtgttattaaacttataatttgtaattatttccaaggtgcatgcgctttgacttttgactatttgtgatgaaatatattccaaaaggaaacaattttgagtcaatacttgtcttgagtttgactcagtacacgtttttagaattttcattgttttcccacaaatattgaatataaagtagaatttttatttaacaataacctattagaataatttttaatttattataaaaaaaataattctcaatttaaactaattatataaataaaataaatctttaaaatataaatttttttagaggaaatacatt

SEQ ID NO: 351826 - DNA, 581 bp, Cannabis indica
ctctctctctctctcggctgtatggtattctagggatggggtttccttgattttcaagctgtttttctttcaatctaagtgttcttcaagagcttggtaagacctttgtatcttactctttaagtttctttaaattttgatgaaaaagatgaggttgcatgcatagcttaagttgttgttgctgctctgattgtattgttgtttgcagagaattatgcatgtttaattgaagttatttgagctgctagtaatgcattatagttgaggtcgatttcttgtgttttcagaggctattatatgcatgattaagtaggtttgaacggatttggatgcatgttggttagatttaaccaagtttgagttttgaactcaaagcttggagctttaatggcatttttggtatatgtgtgttctggactgtgtagttgctttagaaatgttctatgggatgtttagaacaggtctggaaggttttgtgtggtttggatttgttttgaaagagttatgaatttctgagttctgcctgcgaggaaccggaattccgattgtgcatccggaattccggatgggttttgaaaatt

SEQ ID NO: 351827 - DNA, 507 bp, Cannabis indica
attggtaatcctcattaggggttagggtttcataagcatttaggttagcgtgcctatttgtttagggcattacagtggcaaacttcttccgtctctgtccgaccaagtttactcataagggcatcaagtatctgtctgccctgttcatcctctacgccacccagaagtagggcatgccctctccgcatgcgatttgctggttttttaacttgaagtctactcccaagcaaggcaggttgggatacttctatttttctcagccagacttcaagtggttgacgggcaccgcagacaaagccgtgagcgaaattgggaattttgttgacgggtattacatggtggaaggcatgggcaccacctatcctcggttccagtagatccctataaattacatccacctttcatgctaactcttagggatagagctcaaaggatcactcagctgccggacgatgcccggaatatcactttgctgacctcagaggccaactttgtggagtacgggct

SEQ ID NO: 351828 - DNA, 1124 bp, Cannabis indica
caaaaatacgaccaggaaataatttttcgacacttcaagtaaagcttctctaaaatttgacatttgagatctttaacactttctacacgactatcccaacgagtggatgacaatgattttagagtcaatcctttcacattatcttttaaaatttgccatctcttagtagaattggcaaaaattgtataaatgcgttgaataactccaaaaaaatctctagttttactacacgattcaaccatgtcatacaaaatcaaattaaggctatgacaaccacaaggagtataaaaggctcttagatttatgtctaaaaatttcttttatacaccttgatgttttcctttcatatttgacccattatcataaccttgccctcgcacatcaaatatgtcaagatcaagttttttcagctcattttgtagcacatcaaaaagtccttgaccagttgtatcattcacatttaaaaatcctaaaaaagattcttcaatgctaacagaatgtggagaaacatccacatatctcaatatcaaggacatttgctcttgatggctaacatcaggagtacaatcaagtatcacagaaaaatattttgcttgtttaacttttttaatgatttcagttttaattgcagaagcaagcaaaagtattaactcgttttggatgttatgtccaagataatgaatgtgaatatcatcatttgtaatgcgtttaacatgttcttggataacaggatcaaactctgccaacatttcaattaagccaagaaaattgccattactattttgatataatttctcattagatccacgaaaggccaaattatgtttagcaagaaatttaactattaaaataattctttgtaaaacttttttccagtgatctttttctttttcaattagtctttgagtcgatttatcaatggtttgattcttttggagtcttagacgcaattcgtaccaagtggtcatatttttaacatgttccatgcttatctcatgctctctaagtctttcaccaatatgcacccaatcactaaagccttcatttattaattgtcctctaacaattcctgttttaaaaactttgcaacaaaaacaaaatactctatctaactcttttgaata

SEQ ID NO: 351829 - DNA, 938 bp, Cannabis indica
ataactcctataacattaagaatttgaaagtaagatgtataacaccttttcacactcttaatattggtgataatggtggaggttagtcatagtaacaagtaacttctccaaatattacaaaatgatgacaactaatacatattatcatatattacatattagtttgttacacatatttaatatttacattatattattgataaataatataataacaatgacataaaaataactgaattattcttttgtagacattatatagttttttttttttttattttcaacaaaaataatatcaattgaggaacagataattatagattctttaatattcagcttcattggggattggcttttggtttttttcttattgttttactgtcgattctgttttcaaagtgtcggtatcaaccaaaataacatcttttgaaattgatcccctccttggagcaaataaaagttatctagttattgttgttgtgttgttgtcaggttgctgaacagttgagtgttatgagtgatgttcacttccaatcactgtcatattgttgcacaccaatgcttgggtagctaccagaaaggattattattctgttgtttctgtgtagttgaatgtgttcacacacaatggatatcatgcaaaatcaattttctttgttaataactgtatgtaaaatagcaaagttttgtcatccttgatttagagtggctagcaaccttctttcagttgtatttgagttgttttgagactctagtctagttcctgcaacattatctgcactaattcagcataagtgcaatctcttgatattaattctccacttgattcgtaatcaatatagtgcttgttgtcattccaatgaccattgctatgtacaatacttgcagaggttccatctatatcctgaaatttttatatttgttatgagtatcagtat

SEQ ID NO: 351830 - DNA, 711 bp, Cannabis indica
taataataataatgatgatattgattttgatttttttaagacgatgaaatgaattttgacttaaaaataggagaagatctatctatcttttttccctttgttcggaggaattatttaaaaagtcaactaatgatcatcatcatcaagtcaacggtcatattccaataatgccccagcagaataatcagaaagaaacagtaagagtgtcttatactaataattaattctataattaaattgtttgatatgattaatataatttgttactattatataattatttgatctctcttcaaaaccttaatttgtttttagtttcaaaacaatgttaacaacttaggagccattactactacaacccatcattcaggtatgtactttgtttaatttcctctcaacattattattattattgttattattaataaggtaattgacaaaactattttatgttttaatttaatatgcttaattgacaaaatttttttaacaattaaatctcactaattaaattgttattatgtacccttattgtatacataacatatttttattagttttgaagttttattgtcacgtgacataacaataatattagacaataaaatttaactgacatcttaaatttataaaaaacaaaaataaagctaaggaatattgttaaaaaaaaataaaaatttaagtgtacaaaattaaaatatataaaaattt

SEQ ID NO: 351831 - DNA, 423 bp, Cannabis indica
acaaaaaattaacaacaaattaacaagagtacaacataaaaagtttctgtaaataaaattataaaaatatttaacttccgtacaactgtttttttttaatctttttttattattttaatgtatttttgaaataatcttaactttaagacctttcttttgtaaatctaataccaaaataataattataattattaaaaaatttaacaccaattgaatttgtaaataaaataccaaaataataatataatagattaatgatactatatttatacttggcatagagttaaagactaagagcatctccaatagagatacaaataagtgatgcaaatacaaaatatagctcactttgtcaaaaatctactataatagtgtgtcaaattgtgatgcaaatgtctcacataacaaaaagtgatctaaatt

SEQ ID NO: 351832 - DNA, 936 bp, Cannabis indica
accctaaactgattttttgtcaaaataaaatttaataataatctgatttaaatgtgttatgacaaaactgtttatattttctatatctgttcgtgttagaaattgtcttcaagttggttatattaaaaaaaaagttgttaaaaagtaagcccaaggtcctatttttcctattttgaaaaatacagggtccactttgtcatttaacaaaacaaaaggtccaatatgtaactttcgaaaaacacaggatccaaaataatatttaccctttaaaatttaaggaattaaaagcaaatttctaataaaaagctacaaatgagctggaagatacaaaaatagttgatagcaaattgagtttagtaataatacaaaaataaaatttgacaccaacaactaatataaaacaaggggtttttttttcagttttaaaaaaaataacaatattataaaaatactttcagctggccaaataaacaaatatatagttcaaataaaaaaattacacaaataccatttacacacaccttcaacccaggatctatgcttccaggaaaaccatcgcgcaaccacgcagcaacccaacgtaactgaaacgaaaattcaaccagaaagagaaccaccattaattacggcgacttcacctgagaagacggccaaaatcaatcaaaacatgggctatttcgaattcatgaagaaaaaaaatgtaaaaaaactactacgaaactaaaattcaaccagaattccagtttaatttgcataaaactaatgtcctgacttcaattttcagatccatgagatgcaaatctcaaaaagttgtattggagttcccaaacaatccaattcaagtataataaaaaaaaaattacatcaatactatagtaaaatatttatcctggtatatttttcattcttttccaaatttctaatggttaatttgtt

SEQ ID NO: 351833 - DNA, 605 bp, Cannabis indica
gaaggaccttatcctttttatccagaatctgtactggttgctcttcataagataaatctggctggagttctaggttttcatatcttagcacatgagtgggatctaaaacgtatttctgtaacatagaaatattaaatacgttatgaactgctgaaagtgtttgaggcaaggctagataataagctaccaatcaaatcttttcatggatctcaaaaggccttgtgaacttagggcataacttgccctttttcctgaaatttttatccccttcatcagagacactcataggaatacatgatctcctacttggaattctacatttttatattttggatatgcataactcttttgcctactctgtgaggtaagcattctggccttgatcttttctatcgcttcactggtctgctgtactgattccagacctaaatattttctttctctagtttcatcccaatgaatttgagatctacacttcctaccatacaatatctcataaggagccatccctatagtattctgatagctattgttgtatgaaaactctattagtggtaagtacttactctaggagccttcaaaatccatcacacaggctcgcaaca

SEQ ID NO: 351834 - DNA, 679 bp, Cannabis indica
gtgctggccgacctgaacggaaagtctcgcgctagatggatgccctaatcacataatgaaactgggtaaatcacatgatcaaaaccctaattcgggaaacccgaacccacaatcctaggttctgttatattctctatggtttattttaactcaggaagtaggaaatcacccaactatggcacggaaatgacgagaattgaggaaatgagaaactcagggaaccctgccaaaaccggttacccggtttgcaccagttcacccaagaaatctcatttcttgctcaaaactctaccaaatgtaaccaaaccttccagagtacctaattagggtatacacaacatagtctagccaataaaccccagaaaaacccactgaatcaaaacatgccattaaatatcaaagtttagattttcaaacccaaacttgcataaatccaattccatacatcaaaaccagctgcaagaagcttaaactaactcaaatgaaccataaaattaactccctaaacacttctaaacctaacagccaacacttcataatatcactactcaaaccaagtaaaaacttaaagaattccatgacaaaagtttctagggttaccttagcttcaagaatgatcaattccttagcttcaacccagaaaacaccaagctttgagggtgaatccctctggtttttg

SEQ ID NO: 351835 - DNA, 565 bp, Cannabis indica
cacgattaggcacgaaaaaatacagacttgggcacgacacgacacgatgctacaaattgacacgacacgacacgataaatatgtccttaagcacgacacgacacgaaaagcacaaaagacatgacacgtaaacacgaatagactaacccaaaaagtacgacatacgaaaagcccgaaaagcacagtataatatatttaaaaaccctataatttattaataataataataaaatataaatttatcaattataaataagttaaaataataaaagttaaatataataatgaatattataattctataattaaaactattaaaatattaaaaactatgattatattttaatttaattatagtgtgagataaaaatttgagtatttaataaaataattaaattctaatgatgttaataattttttttatatgattatttgtaaaatattattcaaaattatataaatataactaaacctttgaaatatacatatactttaaaaagttttttacggctaaattctctcaactatcactccaattgcacttaactttctaaactcaaatttt

SEQ ID NO: 351836 - DNA, 536 bp, Cannabis indica
tctgaccggttgtgtttttttccattgcaagtttctctttagtgtatccttcaaggttttgttgacatcttcaacttgaccatttgcttgaggatgtgccactgcggagaaacttttgatgataccatggttcgcacagaaatcagtgaaggattggctgtcgaactgtttgccattgtctgacactattttgtacggtagtccgaaccgacatatgatgttcttcactataaagtcttgaactttctttgatgtaatggttgctagtggttcggcttcagtccacttagtaaagtagtggactgctactactgcatactgcactccgcctttaccttaaggtaattggccgatcacgtcaattcccctaatggcaaagggccacagactttgtatttgtgtcagctcattgggcaaagctcttggtatctttgaaaatctctggtatttgttgcacttcttaacataggctctcgaatcgtcagtcatcgttggccataagtaaccttgccttagaattttcttggataagctct

SEQ ID NO: 351837 - DNA, 512 bp, Cannabis indica
agagagaaacctgagaggcgtggttgttgaagagcggagaaagggagaagtgagaagacgaagctgcgatcgccgaggtcgcgaggacctccattggaagagctcagctatcaattttatttattttttatttaaaatatttatattttgattatcgttttttttaaaaggacggtacagaatccacgcgccttatttcttatctctttgctgggaatattcaattaaatttattaatttatctgatttaaattatttattattattttttctacaaattatttcaaaaaaattataaaaatatggttttataaaattttgatttttaagattttatttataaaattcaatcttttaatgtatttttgttcttttgctattttttttttttttgagaaatttcactgttattaaaactgcatatcgtttacaacaacagagaaaataggatttgggatttgacccatccaacagacatcttcatccaactcaagagcatacttagctaaacc

SEQ ID NO: 351838 - DNA, 585 bp, Cannabis indica
tgcttttggggggaaccgatgcgtcttaggcattttaaatgatttccttttttcactcttctgcctataaatagggttaagcatcctccacaaattcacttttaccaatttctccattaagcaaacttagagcaaagaaggttttcacttcaagtctgtcgtgagatttctaccaaaagcatccgagcagctttgtttggactgaactcagatgtcgaacagtgagttagttttcaatctcttcctcttttactttgcatgtttaatttctggttttcatacatgcgttcttgacgttgctgtagaacataggtagaaaatctaggtttgaaactttgtgattttctttgtcatagtctgtaatacttcacagttcatgacgttggcctttgatctcacattgtctttctttcaccctgcttattcaaagcttcgtgaaatttagccctaaacccaaaaatttgaaacttctaggttttgacttattattgaatattttcattccttcaatctattgagtacgccaggtcggaatattttcctgtttattattcgatatcccgaccaaacactcatctcgcgtgt

SEQ ID NO: 351839 - DNA, 510 bp, Cannabis indica
ttcatgcttctcaaatgcttaaacatttctaatgagcaggcaattcatgcaatcaacaattaatctattaatcaactaacaattaacaattactaagccaagagtcgaacgagtcttcgcagccaatgtacatatcaagccagtcttcaggatctttaaagcttggtcgctttgataccatgttgtaacgccctaactctcaggaatgccacgtgtgtgcctttacaatcttattattattaatctattagtttcggaaaaagtgtggcttaattcttttcaaaccaattacaaaactgttattataaaagtaggttacattttcaaatatagagaaaagaagtcgatcctgcttcccagaagccaagacaccacggtgtatatgtacattgctgggaaacctccaactcatggccaaacacagtgttaggctatttttagcctaagtttcaggtcacattttatagttgtttttcttctttattattatttttggaatagaattacgct

SEQ ID NO: 351840 - DNA, 619 bp, Cannabis indica
gacgacactataatcatgaacaaataaatacatatttatatatgtttaacaccttgatatccagatcaagtgtattatgtagtattctctccgtaataggatctgacaaattgttaccaagacaacctttcctcaaccattacatttccttaatcacaaaatccttgatattgtgaatttcctttctatatgtctactcctctagggataatggattctttactttttggcaactacttttgtgtttgtcaagatgtaacactagtagttaatgaattgtttatacaatgccaaaaacagtacagaactttccttagactgaataagtattcttcctgcaactttaacattcagtctctctagtagagttagagactccggatcgggttttacacttctgcaaaaccactgctccacccccagagtaatcaccatcttatcagcagactttctagcatcaaggcaagtttagaaatctgatttggtgtagtctaagagtattaaataccacccttatcgactaacatatacttcctcttcttgatcttaagattcacttgattgtcttccaatgttcttttcctggattaatataatacctactcattactcccactca

SEQ ID NO: 351841 - DNA, 613 bp, Cannabis indica
tttattacaaaaaaaaaaaaagctgtcttgagtaaagaaaactactttatatgtaggtaactatataaacttgaataggcacactaaaatagactttagcatgtaacattggtttgaccattccttattggattgtcattcttggaacaacaattgtcaagatagttttgataagagcattgttattgggtatcagtggtgtctaagaccttctagatgtgtcgctttgtaattggctagcgatactctctaaaagttattacattaaactatatgagacccgatatttaatttgaccaatatcgatattgacacgtaggagggtgctaaacaccattgatgccttttagcatttttcttttgataagcatatgaaacaaagccccaaatagccaaaatcatagccatagctttgatcccatccatattttcatggaagaaaaacacagccataattgggacaataggtgaacccaaaacacttatgagttatgacattagagaagagtgaagagacttctagtactagacccactactccaatgaagtaaacttgccatgttatagtgatccataataatgtcatgactactttcccaagttgaaactcatt

SEQ ID NO: 351842 - DNA, 1577 bp, Cannabis indica
tcaagtatctaaattgtcctctcagactgaccgtcaatttgaggatgaaaagttgtactgaatcttaatttagtacccattgctcattgtaagctttcccaaaacttggatgtaaagtttggatctcgatctgagacgatcgactttggagcaccatgaagtcgaattatctccttaacatataaatcagcgtactgatctactatatacgtagtttgcactagtaaaaagtaggttgactttgtatatcggtccactattacatagatagaatcatagaataccattgttcttggtaatccaaccaaaaaattcatggctatatcctcccatttccgcttaggaatctttagaggttgaagtaatccccctggtctttgatgttttaccttgttgacaagttaaacattttgacacaaattccactatatcacccttcatacctagccaccagtacagtgcttttacatcttgatacattttagttgttcccaggtgtaataagtatggtgtggtatgagactcatctagaatctcctagttgataccatcatctgcaggaacacaaaccctatctttatactgcaataacccatttgatgaaattgagaactcctttgctaatccagcctcaaacttctttttatactcttgtaacattggatcactttggtgagcggtcttgattctctctagcaaatcagtctataatgtaatgttggctaatttcctaatcacaaactcgattcctgctctagtcatatcctcaaccaacttcggtgagatcttcttcagttcataaacttgcctcggaccttttcgacttagagcatccgctaacacatttgcttttccaagatggtataggatctcgtagtcatagtctttaacaaatttcaaccatcgtcgctgcctcatattcaagtccttctgagtgaaaaactatttgaggcttttgtgatccgtgtaaatttcacatttttcaccatacagataatgatgtcaaactttcaaggaaaaagccactactgccaattcaatattgtgtgtacgataccgctactcatattcctttagttgcctagatgcataggcaataacctttccgaactgcatcaaaatgtagcctaacccttgtttcaagacatcacaaaaaattacaaatttctcatcactaattggcaaagtcagtactggcggagtaatcaatctttatttcaactcctagaagctactttcaaacatgtcaatccaaacaaacttacagttctttcgggttaattccattaagggtgtagaaatcttggcaaacccttccacgaatcttctatagtatcctgctaatcccaggaaacttctagtttacattctgccagataactagaaattttgagagctccttcctttactatttttgaattcccctatcttgttcttcataattttcaagcctatagtgatagagtacatgcccacccatatcaagtcaagtactcaatcattatgtggaagactatgatgaatccaacatctgaaggataatcaagctcagattttgataatactctatggcagaa

SEQ ID NO: 351843 - DNA, 758 bp, Cannabis indica
ttttttttcaattttttcataaaatttttgagaaaaaaaaaaactatatttctgtacaaaaagtataaaaactcatcaaatttataatttcgtctattacactatataatacaaaataatttatttatatgtcattatgcattttatattagatatataaatataattttaattttctatacaatttatataagtaattattttttctcaagttttatataaataaataataaacatgtatattttatttataaaattatatattaaatatattagattaataatatataaatatatatgtaacgccctaaataattaggcacgctactcaaaatacttatgaattcttaatcccctaaacgggattactaataaaaatggcgtagaatttaaacttttataataaatagaaggaaaataaaacttgtataataagttaaactttataatctaaaagttacaaaaattgggatcccaaaaatatttacaaaatattattacaagtctctttctttcagccgacctaagcgacaaaatagagtatcaaaatacatcactagtagacccaacccgcttggtctagtatggcccggacatgtacattcttcgcccagctcctgaactcatggctgatcagctatagccttaccctttcctgcacagtagaacacccgtgagccaagcccaacaagatagtataaatcataaccataatatatgctcatcatgctatttaaacagtaatgccattcatatat

SEQ ID NO: 351844 - DNA, 303 bp, Cannabis indica
gaggaagcgtggcctctgcactgatatgttcaaggctccaagcgcccgtacgagtcgaatcgttggtaccagtctcaccactggtccccgggttactgcttgcaaaatgtgcagggggtgacaactgaactcaccctcccttatcgatctaacttggcatgattgcccaagttcgatctcgcaggtcttcagcatctcgcctgtgtagcctgagatagaccgcaccttcaattctatcaactcagcctcaaaggtgacattggggtcctgaggagtctttgatgtacgtggcttgggaggcat

SEQ ID NO: 351845 - DNA, 561 bp, Cannabis indica
agtgaaacactcaccagatacattctctgtattaaatacatccataaataagatagactcgtggactaaggctcattaacgccccaaccacgtaaaaaatcattctctaattttcttacagctctttaatcttataatattttattggttgccgaaaaactcggtcaacagtaaccaatttagttacttttgttctgaataagatattaattagttacttttccattaaaaaaattttatacatatatataataaaataatcattttaataagtgagaaacatatatttttatgtctactaaaaaagaatgactaatattaaaagtaacttttttgttttttttttatacttttaggctatattatgttattttattgcttaagataccttaaggttccttttccaaaaaaaaaaatgccttaaggttactttttttttaatgtaactcatatgaagtttactattcaatttatttacaattttttttattaatttattaaaatgattttataaaaataaagttatttttatttaatattataatatctaatataataata

SEQ ID NO: 351846 - DNA, 641 bp, Cannabis indica
gttggacaaaacaagttggattgttgataatggagctgttttgcttgaagatgtaatttggagttgaggagagaatactaatatttgcatactaaattacatcgcattagggttgagacatctttgactctaacaaatatttgtaaaagtatgtcattgccaaaaaaaaccattgttgttattatcagcttcatcttcatcttcatctttattgataaccaacttgtaacccttattgatcttcttcatcttcacatgtttaataagaatgtatatgaagtaattaatatgttgtgtttatatagatatttaacaaagattattacgtgggtacgtttaaaaagatttgataatattttttatttaaatgttattcattcaaagctgaaattacatatttacacgagaaaagatatataataaagagtggaaatttagaaaaatgttaacgataaagtgtgtttgttattattttttttaaggctaattagtaattttccctcgaattttgacatgtattaatcgtgccccttgaattttttgaccgttaaaaatcccctgaactattgatatataaatttaaagacttttgtctaattttagtaaaaaaattactaactatggatgaaagttcaaggggc

SEQ ID NO: 351847 - DNA, 509 bp, Cannabis indica
ttctttgattcgctctaaaagagtggattgtaaggtaatattagccaaccgccctacaaccaactcagttttagctcgggtcatctcatttgctaactactgggagatttgtttcacggtatttatctgactcggaccctttctgctcaaggcatcagcaactacgttggccttgccagggtgataaagaatttcataataataataatccttcactaactctagccagcatctctgtctcatattcaaatctctctgggtgaagaagtatttcagactcttatgatcagtgtatatctcacatttctcgccatataggtaatgccgcaaaatttttagcgcgaataccactgctgtgagttctagatcacgagtagggtactgctcatactcatttaactgtcgagaagcataggctcttacctttccagcttgcataagcacacagccgagaccctatctcgaggcatctgaataaaccacaaacttttccttatctgaaggaagag

SEQ ID NO: 351848 - DNA, 516 bp, Cannabis indica
tttaaaaaaattttaaagtgatttttttttaaaaaaaaaattagattcttaattaaaaaattaaaaaataaaaacaatatttttatttttttaactttgaaaataaaaaactaattgaaaaaagataccaaacgcactctaaatttgttattaactaatgaaatattactcaaaactaaaccataacttgccaaataaaaatttttctttattgaaaatatcgtgataacttgaatgttatattttatgggataaatgacggtaaaattcccattacttttacttttgttgtactttaactcacaaaatttaaattttggcggtaaaaccccaaaattaggaaaccgttagtaatttacagtttccatacattttaagtgctaagtgtcatgttggactgtctatgcgtacatctacgtggacaagatgtacatatgacacaattttattggtcacgtaaaaaattatttaacaaattaaaaattaaaaaataatttaaaataaaaaatatatttt

SEQ ID NO: 351849 - DNA, 785 bp, Cannabis indica
atctcaacatttaattgattaaatctatatgtacgcaaagcaagggacaattatatataggtgggtgtgtgagtgttgggggtcttgggttcgagtcccacgtaaaacattgttgtaatatataaacacttaaatcaaaaaaaagggacaattatatatactgaaattatattttggttatcttacttttataaatgtatatttgaaagtaaaatttatgattcttttttttcactcctacaaaaaggaaacgattatcaaaactcaaacacacatgtgtagaaaattatttggtaaaaaatgtatgaatgttgtagttgtagaagttatgtttcaattattaattaatgtttatttttattttatgttcactcatgaatatcaagccataactcatgattaaaatctgataatagaatcgagtttgattgaaatttaaaaaaaaaacataattctatattttcttttaggaaaagaaatgtgagggtattctacaaggtttcattaagtttaagaacataaaataaaaataatattcaaatagttagagggtaaacatgtctatatatatgtatatatatttatatatataactcattattttattttaaattttgagaaattattttttaattatttttttttattatttgtaccgtttagattgcgttaaatttatgtgggttgctatataaatatgagttgcgatttaaattgttctcttaattgctatgtgagttattacgtgaatttatgtaaaaaatacaaaaaaaaattattttaaa

SEQ ID NO: 351850 - DNA, 632 bp, Cannabis indica
taatatataaagtatcgaccttgagacggagcccggtcgatgaactccgatcggttgagtggggtgtgggcggtggtgggttatgggagggagggaactctggtcgtgtggggtttcgtggggtgtagaggctaggtggagcttgggacgagagagaggttaactgaaaaaaaacccttcaatatgggttttgcgatgtgggtttgttaatcggtgtgggttcgtcaaggtttttcaataggtaaggcttaacgattttatctagttttgtcaacattggaagttagagatgatagaggcaatctaaaatgagtatgctaggtcaactgaaatatggtatatatgtgggagaaacaattttttaatgggcccttataccggacggtttgaaactgtcgagtataagtgcccaataaatttacgaattccaattaaaactgtcacctattcctgtaattactattataaactatcgggaatactaatttttcctaacggtttcaaatagttacttaattttttagtgacggttccccaaaaaaatatttttaggactatcgtgaattctgaattttgtaatagtgattattcgcgatataagatggacacacatgtgttggaatttattttac

SEQ ID NO: 351851 - DNA, 621 bp, Cannabis indica
ttcatatataacataaatagcacacctaaaatttaaatgtatcacaataattatgtaaattataattaaaattctaattccaaattacatccaaattatttgttaattctcaaattaaacttaagcggtcattacaattatccggccgttaaaaggatttcatcctcaaaatctaacccgaataactatggacattgagccttcatgtctgactccaactcccaggcggcttcctccaccttactattcttccagagtaccttgacaaaagctatggtcttatttcgaaggacttcatcctttttatccaaaatctgtactcgtttctcttcataagataaatctggctggaattctaggttttcataatttagcacatgagtgggatccgaaacgtagtttcatgacatagaaacatgaaatatgttatggacttctgaaagtgctgaaggcaaggatagacagtaaagtactaatccaacctttttaaggatttcgaaaggcctgtcaacctagggcataacttgcccttttttgcaaaatgtttaattcccttcattggagacactcataggaatacgtgatctctatagcatcgttggttccttgcactgatctgca

SEQ ID NO: 351852 - DNA, 764 bp, Cannabis indica
ataatacccagatgcaccaaccattttccatttgttcccaaagacttcaaggcttaaccaggcatggaaacgatggattccaaggctgaggagcttccgactaatccacactaggggaaccctgtagcccgccatgggcgattctcacaagtgatccctaggggtataaatcatgtgagcgatcttaaaggtcctcctcaggctgataaagaattctagaggaaggttggcatggttgcagatgaagttgggaagggaattggcgtggtttctatcagaaaatccagccaacccaagacctaaacctgtgccagcagatatttgtgccaacctctttctggtatcgaggaatttcctaaggctgagaaagagatctcggcttcaggaaatgggatcttctgatgatgaggaggatgaggtctgtgcaaagatcaaggctccctacatgtggccggtctttctcaagctatgtgtagttggtctttctccgagctacgtgtagacggtctttctcaagctatatgaagatggtctttctcgagttcatcggcttcccctctcatcctttgtttaggaagatgacttaatggtttgcccctagtggcatttttgtaaagacaagtttgtaaccagttttaagttttttcttatcttaaatgccttgtaatgtttcattcgaacttaatacaattgtgtttgcttgcatttttattcacaatgtaaacaactatattttggtcaaatgttcagtacttttgggtttt

SEQ ID NO: 351853 - DNA, 647 bp, Cannabis indica
acagatacgctatgaattatccatttgttattgttatacccaaaattcagctatgctccaaaagctaacacgtgtccaatataaggaatataaatcaacactaaggacataataacattataatcaataattgcatactaaataactcgttattattacatagaggtttgatagataatattcaaaactcgttgactatatagtcaaaagcgagacaaggataataactattgagctgagattaacgagacatgtacatgcctcagaatatacagacaagaagggagatattcatccacttgagtagaatgaatgtaacaacataactacctcacattacacatagcgacaagatcacctcgcattattaaatgccaataaaagaatatgacgagataaactactccccaacacttagtattttttcttattaagacggacaaggaggataactcaaatcaagcgagatacaaccttccaatctagcaataactgtctaaagtgtaagagtaaaaagtggttgggtagttataagatattaatatacatgtgattaaatgaaacgtggggattaaccacgtttcatgaactgttaaattttgaatcaaaccctaaaagagtaactgccaacctatattcctataaat

SEQ ID NO: 351854 - DNA, 776 bp, Cannabis indica
ggggaactagggagacaatctggatacaactcagacgaggagattgagccgtatcatccacatatcatgaatacctttttctgtcgggattcaaaaacctgcatgtctcgtcgtatgacgcaaccactgattcggtctcgcatttaaacaactttaatacaacaatgcaagcgagtaatgtgacgaacaatttacgctgtattttgttccccaccttgcttgttagagcagcaagaagctggtttaacaagtttactcaccattcaataacttcctgggagcagctgtccaaggaatttaagaaacagttccaggctgctagggatagacgacctgaagcgacctcgctaaccaatataaagcagcagcctggtgagacacttaaggcatacttaagtttttttagcacgattgcggctaggattaggaatttggatgatagcacacaacttacagcccttcaggcggggatctctactgatccatcaatcgcagggggcgagttgtgggacgacttagaaggtcatccagtaagaaacataactgagttcaacgaaagggcccaagtattcgttcggaaagaagaagcccgaaaggaaatgaatttgttggaaacaagctcaggaagcaaacccagcaacgtttcaacaaagtgttgtttccacgagaattgataactcgagggcttctggttcgaagagaaaggacggttctaaggaatcgttaaaggataaaaagaaacagaagaagcacgataagtacgtgccagtgtatac

SEQ ID NO: 351855 - DNA, 587 bp, Cannabis indica
tgatatatatatatatatgtattttggcaattataaatgttgcttcattagagatgctcttaggtattttttatggtgtttaatattatactaatgtgacgcgttgtgagtgattaatttttcttatattatttattaattaaaatatttagaacctgataataaattacacaataacaacataacactgagcttgatactgtgaaaagagcaatttataatcttataaataatattcagtttcacatgagatagattctctaacactgccttcttaaaatgttattattattatcatctcgagttgagctcttctttactaaaatgttataaaagagaaatcaaattcaaaataaataaattttaagttctctaatttatcggagttaactaatgaataattgattcattatttttaaaaatatcatccaatcaattgttgattacctctctccaattataataaatatacacatcaaaattatttagtttcaacacacactttttattggagaattttgtcccccatggattaaatgtgaaagtattgagccatatataaaaacatggactactccactcattgc

SEQ ID NO: 351856 - DNA, 497 bp, Cannabis indica
ttgaagacaattcctaacatgaaaagagatacacaaaaaatataaacagttttcttataacacatttagattggattattattaaattttattttgacaaaaaaattagttcaggatcctatttgtactattttggaaaatacaagatccattttgtcatttaacaaaacagaaagttcaatttgataacttttgcaaaatacagagtccaaaataatatttaccaaaaaactaacctactttcaacacgtgtatataagaccttggttatattgagatacgatataaacttgggataagttgaaaaatacctcttttttttgtatccattaatcaaaaataccctcataatatattttattaaaatatattcacttttttgagtgggttgtctaatataacctcactctctaattaattttagcatataatttacattaacctaagggatctaatggggacatcatctataaaagtgaatatatcttaaaaaatat

SEQ ID NO: 351857 - DNA, 675 bp, Cannabis indica
cgtctgggcattggttccaggcggaacggttatgttatgaatgacttgtttgggtgcggaactgttattcccagtctcttgcacaccaggcgcgacttcatctataggagttgttacaccgttgcccacgttcgccagttgtccaggattaacagctggtggaacccttgtgtttcttgggttctgcaacgcaggatccactgtctgtgaatttgctggatcggtcaggcctctacgtgtgtgtaccatcgtatcagattttgattagagagcaatttcttgattctactctcaacgaaagcaccaaaatattgacttcgcttttagcgaacgacaatgagtctatttaataagcaataaacgatttgtagaaatcaatatataataaagcaatataaagacacaggaattttatagaggttcagctccgatctatacggtaatagcctaatcctcgttatttgtattgacttaagaacaaggagaacggttccttttcttatagctcttacaacagtatctccaaatatataattcttagataatctctttagagtatagtcttaactaaactatttttcgactagaaagctctctctttgcccagtgaacatgcatcactatttatagggctagtaagcttggtgaggaagagtttcccctcttgttacaatg

SEQ ID NO: 351858 - DNA, 713 bp, Cannabis indica
attccttaggacattctatttctaagaaatatagtgttgaaagctcaaaacaagattgggacataatggcaaaaaataaaataataatcccaactcgtggaaagggttaattcgacttaaattgggaatcttataatttaataaacctaagttcacttctcaaagccctagaaattatccaaaagcaaaattaaaaaatacttaaaccaaacatagtaaaagaagatgcaattggaagcaaaaaaaaaaaaaagtatcaatttaggaaaaagggaataagatagaataagaaataaaccacttactgtttttctgaagattttttagtagtaaataacttcgtgattgggatcatgatgaacgtgatgatgagctcaaagaatttctaaaattaaaaattaaatttgagaaaatacgtagaaaataggtcaaggacaatgagggcatgcaaggtgatttaaggcgaagatgattttttccaaaaaaagcttgaagtttcaaataagtgttttcacttgagttttatactttaaggatgatcaccattagattgaaagaataaagatgtaacagatgggaacaagagagaatcagaaagatgggcatttaatgctaatgatatgcctcgaaatcttcaaccacgaaaactcgaagcatgtaatttttcaaaatgtgattaattaagacaaaaatacccttgtaatcatttaaaa

SEQ ID NO: 351859 - DNA, 1806 bp, Cannabis indica
atgaatttcctaaaataatgaaataaacacatataaagttatagaaaatcttacattggtggcagcagaatataatggttcattccattcaattctctaacccttattccaatctgtcgtagagaattaccaagatctgaacctggatctccttagatgatggaattcttcacaatctttcacactatatttgagtattgacttgaaatgtgtgggcaagcactcaactcactaatgggatttcaaaaatatgaagaagacaagaggagggtgatttcgaattcaagataggctctctctttattttctaggttgtttgacaaagtagtctgataagccttatgtaaaagcatcttaatctatttataggatttcatctaaggttagaatttgaattatatagcattaaaaaaaagataaaataatggcttaatttaaaccttgttggtcgaaccttatgtgggccctataggtttcaattttgccattttatttaacaacttatcttttccttcacaaatgtcatatcctaatgctaactctataaatgtcaagtctatctatttaataattataattaattatcaaatataatttttatttaatcttatttattaattagaccttacaaagtctcttaattgataaataaaccctaaatattttctttcttctcaattaagtccttgcttagtgaaaattcataaacatgacgtagtcttatttagaattctaatttataaattaaaaccaattaactaagtctacaagccaatattatcttaactgatgcagagaccatgggcttacataatcaagctcccaataagtagatccaaaatttacaagtaaatttcctaacttattaattcttcctaactccaccatagattcagaattacactcttgattacattgaacgctatatatattccaaatatagacaccctattaattatccattgtttcaatccaaataatcaaagattctttatagatgatttacatcaagtatggatgaatttaccgttccacccctcaatgtatttaatccttaaaacacgctacagtgatttttcaattacagtgtcatctttgctaatcaaagaagtttccttgaaaagcatgtataattaaaatttttagattaaactaataaactttataaacttttatatatatatatttacaaaagtcaggatcccgtacttatacttctacaaaatattcaaaatacatttagttagatcgcataacgactacaaaataaaatcccagatgtcccgagactgaacactccaggtcgcgctgccatgacatgtacaacatcatcctagctcgaagctcactcatgttcagcttttgccttccctttacctacacatgaaagtagagttgtgagtcgacagactcagtaagaaaagcatataacaattcatataatatcgacttgtatctaggcgcccatacaccgatttataaggcttaacacatgagtaagaacgttctatactatggtacagccactgtaccacatacactacgtacctacactgtacgagtgttggtaggatttatttcgtaccctgagtaccactaagtgttgtaccacacactgttgggttttgtgctctaaataaaactcattttaatataatcagatttactaattaataaaagattagaaatcgcttttatgttgcatgtttcacatgatttatttcatgattaaacttattgtataaattctattaagtccataacatatataaatatttatatatgtgttcatgattatagtgtcgt

SEQ ID NO: 351860 - DNA, 738 bp, Cannabis indica
ttaatttttagttatcagtaaaagggtaataaatcttattttcctaattttggataacttaatatgatctctaacatattcttaatgtataaactttgattgtcctacctattatatgctcattataattttattattttattagtgatgtattacatccatatgtatatagttatataatattgttgatcaattaagtttcttgtatttttttcataaaaaaataactctgtttgttgtacaataaaaattgatatgaaactaaaaaaaaatgaataaaaaaggaggaaaaataaatagtgcgtgaagttagtataacatgtataagaggtattagtgtaattggaataatgtaaaaggtaaaaatatagaagtaaccttgtgaggatatagagataatattttggggtttttatatttgggataatttcacaaatacacaaaaacaacaaaaaaaattacaaaaatacagttttacgaaattttaaacattttatgattttttaattttatttacagaaaatacggtcttttatgttgttatcttgttaatttgttgttgattctttgttatatgtatgttattttttattattattttggtgttatttaaatgttattttctatgttacttttatgtagttttcttgttgttttcattgttatttctattgaaaaaccgtaaaaaatgtaaaaaaaaaaaaactaactttaaaacgtaaaaatagtaattttttt

SEQ ID NO: 351861 - DNA, 965 bp, Cannabis indica
ttttttttagtcgggttctaacccataacccgaaaataacattaatttttagtttatacattttactttttactgttcattcaatacctagtaggtggctacagtagatgaatagtctttcaaaacaataaaagagcaggagtctctatccctatgcaactatgcatttatactaaagaaaattaattaattgattaattttgtatataaaaaggtttactttattaatgtctttttccaagaaaaaaaaactccacactaatacactatattagagaggagagcttggagaccgtgcctactattacaattaagtattgtcttctttaatagtagggaccacctacttttcttggaaacccaaaagccatgagataaaaataaaagccaatgtgataaatgaaacttggttgttgagccttttgtcgagaatccaaaagccaatgtggtaaaattaaaaaaaaaatatggcatttttaaaaattaatattcatttgagctcagaaatgacatttgggctcagcccagtaacatccgaacccgaccacgcccaaatttgagtaatccgtagcacaactagctatctcagcacaaaatcaactaaaacaaacctatcttaaccccagaattcaaacccaaactagctgcacactatagaaccttaaatcactaaaatcatgcaattaacttatcttgagctaaagaaaaccataaagaagaaggctaagcattataccttgaattggacctcctatttctgattgaaaactctttaattgtagcaagggtagtttagtcatttaccactctcgacaaatccctgatatttccaatgccgaacaatagtaccccgctattgacattctaaatctcatggcccacgtcgctttccatcgttaccgaacacaagcacagaaaatgtgaaattcacatatatagcataattaatacatttgaatttaaat

SEQ ID NO: 351862 - DNA, 891 bp, Cannabis indica
caaattttaaaatattatgatatttcatagttgaataatcataacttatgatgagttttttactcaaattttgaaaattactatttcacataaagttatgacttatggatgttttaattaaattttcaacggtatcaaattcattcaaattggactggcagattgaaagttataacttaaatacaatgaaaatttttgaaaattccgtaataaatgaatcaaaccagtaattattgacttattttttactatttaaaaattagaatttaaataatattattttagacaaagatagatttttcaattatgttttaatagtatttaattcattgaaattgaattcataattaaatggaagcattatcatgaaataatatttattaaattgttaataatgaatattatgtatattttttaataatataaagaatattatattaaatagtgatatattcgctaaataattatagggtatatattattttacatgtattttgtaaaagttactaattaaattttttattttattaaatgacaaaatggacactatatttttcaaaatgataaaaataggactctgaactcaattttcaacaattttatatttaatataaccaactttaagataattcataatacgaacaaatatagaaaatgtaaccagatttatcacaacatctttagatcgaattattattaaatttattttgacaaaaaataaatatagggtcatatttgtacaattttgaaaaaatacattgtccattttgtaattttaataaaatagatggtctaattaataatttttacaaaacaaaaacaagatccaaaattttatatttaggaataattacataagacaccattttttataaaatatttatattttta

SEQ ID NO: 351863 - DNA, 740 bp, Cannabis indica
cggtccccgagctcctcactcattctgttcataacagcaaattccatctaaagagagttgagagagcgaggaagcccgattacccatggtagtcaatttcctttgcagattaaagcttatgtgggtttgaagctcaagaatcaatggctggaggtatttcgatccttaaattatagtgcatatatgtttgattaattccgcactttatacttaaacatatatatttcagtttgtacatataaatgtctaacaaaggaaatattaaatttttatttctacctctttttaattagttcaaacataagataaatagattaataaattaatattctttttattttttaaattttaaaatgttataattttagtaatttatatcattttagtatgaatgttttatagaatcttgtactattattattttataaatttcaatattataataatgaagatatataaaataaaaatattagatgaaaatattaaattaaaattaaaaaaaaaaaaacatacaaataacaaaaaaattaaacaacaaatacataaaaaaagtagtatttctgtaaataaaatacataaaaatcgtaaaaaaaatttaacattccgtacaatcgtattttgtaattttttttttgtttatttttgtgtatttgtaaataatccctaaataatgttgccaaaaactcatgagtttagaaaatggataattacataagacatcattttttgttaaaaaaaac

SEQ ID NO: 351864 - DNA, 700 bp, Cannabis indica
ctaattaaggttttgctaatccacttcaaaattctaaggtattacaataaccgtctatggataaagacaaaagagcagttgaacggttattcaatattatctcatatgcacaataatgaaacgtgagaaatatccatgtttcatgagcggttatgaattaatagatcctagagaataacagtcaccctacacaactataaacagggacagaatctagggtaaagggggatggaaaaatctagagaaaaaaaaaaagcaagatataattatcacttatattattgtattctgtattccaaattcttgttctaataatatggactcgtggactttgaagaattaacttcaaaaccatgttaagaactttctattgcttatttattgctgtaattaattttgtagttcatttattacaaacaagctaatatttttggttaacgaaaaatttgcattaacaaatatatatgtataaatatagacatatattgtataaatattaattcataacaaaataaataattaaaataatagctagcttagatgtgcttcatttagataaatatatatatgtatgtatatatatttagcgtatcaagactatgaaacaattcgagatcatatataacaaacactattataccttagttaaaaactcgtgataataacgtattataaaatattataatttagagaaagaaaa

SEQ ID NO: 351865 - DNA, 536 bp, Cannabis indica
aaaaataatatatgaaataatttgtttaattttttatacacatataatataattaaatattataatgtacataaaattgaaagttcttaaataatgaaatgatcttttcaaaataataataataataataatgaatgaagtggttgtggtaagttcatcaaaagatattttagtaccatcacatcaccacttttcttgcatttatgttgaaatctgtcggtattctctccctcaaataaattataataaatctctctgtcgtttgtttagtggttcatgtcggtctctcactccattaaagatagtggaaatttagtggtccacgcgcacttcatgttcacaaacaataaatataatccttgattcttttctgtcgcagaatataatcaagatctgagtccgaatgttattttttattgattctgaattctaaacagccttcctcattataaatgaggtactacttgatatgtgtaggtactactctatcacttagagggtttcgaaaaacagagaaggtagagagagagagagtg

SEQ ID NO: 351866 - DNA, 878 bp, Cannabis indica
atattcttttatttttaagtatattctgttaaaccaagaaatgttaaaccaagaaataccgttagatatgcacttttaatatataaagatatagaaatgttattgaaatacagaatgcaaatataacaatttctaaatatgatcacaaccaatatcttggtaatttcggagacttgatgactagtcaatttgaaaatattactgaaacttttactgttccaccaacttctaagggcttaatattcataaagtatgaataatattttttattgcgctatttttatattctcttcttaaattaattaggagtttttacaccacctactgaagtttttaatttttttactttttactgtgggacagattttttgttttaaaaactgtataagttttatactgtgtactgtgttaagttttcattgttgttccacggttgtttcaattattctgttttattgttttacggttgttttacaaattaaaaacaatatttttgtaagaaattttgtgcgacaataaaattgtaaatttttgttaaaaattcaatgtttttgtaaaaactcttataatttatctaattagtaattacacacttcataaaatttaagagtatttatggcataaatatataatattttaggtttatatatgtactaattattatttttttagcagctaatatacttaatattaatttttgttcatttctgttattacttaatactatacaatatgttcgacttcgtgtttggataaaaaatgaaaataaaatattattaaaaaataaatatttataatttatttatacttcttatttattttggtgctagaactgtgtatgaaaaaaatataattaatttgatgaatttaaaaatatt

SEQ ID NO: 351867 - DNA, 819 bp, Cannabis indica
aaaaaaaatgattacaaagatatattttttttttacgaataatttgtggtataaatatttaagtttaatttttgattacagataaatattaaagttttatttttgacttaagtttaacttagtttaattttttatgaaaattatacttaagttttatttttaaaacttcaataggtatctagtcattaagtgtcaagttaatgttctaattagttaaagtcattaaatttttatttttttatttaaacattaatttaaatatactaataagaaaatgacaagtggatcttaacaaccagatacctacaaaagtttaaaaaatataacttagatattattaccgtcaaaaattaaattaaagtatttatttacaaccgagagataaacttaggtatttacgttgtaaattactccttgacgataatattgcttaagttatatttctgaaacttccatagatacctgattgttaagtgttaaatcattattaacgtgtcattttttatcggtatattttaattaatttttgaataaaaataaaaatattatgacctgaccaattagagattgccacgtggtaatttatttaatgaccatgtgacagtcagttgtcccgtgatccgtaagggaaaataccggataagttgtgtaatcccacatcgcttaggaaaggttaagtgtgatgattttgatattttgtaggtgtgggactacacagttaaagagagtttaaaaggattgaatagtactacatatactaacaaggtgcatcttgttttctggtagctcatcacaaaaaaactccacagttaagcgtgc

SEQ ID NO: 351868 - DNA, 576 bp, Cannabis indica
ccctaaattagttgtatcgattgatccatagtaagataatattgtataaaaaattcatttgaattaaacttgtaatttagactctagcttgccaaacttcaattatactaaaaattaattaacaatgagatatctactcatgatataataggcatatcctaatcctaccatatcttatttggctaaaaatatatggcctaacctttttctttttgtacattttcattgatatcatcagtttcttttccattcatgttttgtctattattttttaacagtccatatttttttgtctttattttgtttatgtacattatatacatgtcaatcttttttaaatttattattacttttgtccaagaaattataagtatttttattaagtatataattagatcaatatatctgtagaagcatattactaattacattgcattctactaattttttccaattaatttataatattaattattattatcttttataaataaattataaatatatgatttttttttcattgatggatttttaattgatagatgctcaatacaacatgataccatccaaagaaca

SEQ ID NO: 351869 - DNA, 531 bp, Cannabis indica
tgccgcttaggtcggctagaaagaaaagacttgtaataaagtttgtaaatatttttgggatcccaactgtttaaaagtttaaatgtattgcaagttttattttcattttgtttaatattaaagtttaaattctgcgctattttgattagtaatcccgattaggagattagggtttcataagtattttgggtagcgtgctttattatttagggcattacaattactctattccaaataccccctaatggtgttataaaaagtacgttaaatttagcatatgttaaaagttatgttgaatttgacataatatatagtattttattaaatttaggccacaataaatgctaaaattatactatttttttatttactataatctattttttattgacttcataaagtgcttagtatattgttatttttttttagcacttttcaataaaaaagctctctaatggtatgctataagttgtgtcaaatttgacacatgctaaaaattaaaccgaatttgacacaagatatagcattgtg

SEQ ID NO: 351870 - DNA, 1422 bp, Cannabis indica
tactttcaagtggatataggcaatttctttttgcaaagaatgatcttgtcaaaaccacgatgaacaagatgcaaatgccatagatatattatagttgtggttatagtcttttgatgacttaggtctatatattataaagatttcttcaatagtccaagtggatccctggtcacagaatacaaaactcatattccctacattaacatacagttttgttatactcaaagttcggcaagcacatcagaagagaacacgtgtcgatctgggaaagactcaaacatgcaaacgacaagtatgcctagcatggaacaactcgttggaaatataattcacagagtatatttataactcggttggctgaatagtcttctacgagacagaaacatacgaactggtaacatatgtattgacgagaaaccatgtgggtgcacacgttcatgccgaggcctcaaccttgctgcgtgaaagagaaagcgacaacactaaatatacttagtgtatattatacgacatacaaactaagtgtaaatagtttgacgagcaaagatagcagacagcgaggtgtttttcttgtaggaagatcctctcgacgccagagaagtatagttatcagaaagataatattagtctcgagaagctaaaatgacaagcagctgctcgctatcaaagtgaccttggctccctccaaagcgaggcatccctatgagatacgacttactgtatatctttaattatgcgttcatctcggcccaataaaggcgggatattcaaaattgtgtaacaacgtcatttatttgatttgacttgatttgtaatcaaatcccacaattttagggataatggctgtaaatgaattttggccagcttcgtaattaaccaccactatgcaattataaatagtggaagacaggatcaaagaggggggacgaaaaaactcttacgcgagaggccctaaaaaaacatactcagaaatctgaagaagattgactcgtggactatgcagaattttaacttcaaaaccacgtaaaaaaccatggtgttcattttatatttttctatagctttatttttatttttgtgttgaattatcattgtgaggctcaaatttggttactgaaaatctgcgctaacaatttggtgctttcattgagagcctttctgaaaaagctcacaaaagaagcctactgacataaaagtgatggatgacaccataggtaataatcctcaagaaggaatcaatcatcgtcccggaaaagaaccattgagtcccaagggatctgctgaatcatcgcatgaacagaatgcaagccccaggaagacccaatattggggcccctggcttgacgaaccttggaagagcaacaatcggtcactccctaatcaggttgatgaggattgcccttacgacccaaccagatacat

SEQ ID NO: 351871 - DNA, 863 bp, Cannabis indica
gtgaacagagtcacacatgattaacaaagtagcaaatcacaatcggcctcctcgtactgagatagctcatcgtctaaccgaagggcatgttttgccaaccatgagctatagaaatcaaatcgcgagccacatgggacaaaactgctcccgaaaatatagacaataaagctataacgtcttcaaacaacaagtaccttctcacaattaaaagttgtcgccagagctagcaaatctgaaaaaacatcgcagcaccaaacaaaaaaacacagttatattagaataacaatcttcaaaataaaaattaaaaaacaaaaataaaattaacacacaacctttgtcactagtccaacattacaaaaaactaagtaaaattagccaacaaaatttctaagtaaaactagccaaaggtattactctctggctagttacaacaaactagcaccctaatttaaaattgctgaaaatcaatatcaaacagattatatttaaaaaataaatttattagtaaatactctttaagtgtaggccattcacaaaataatctacaaaataagaaaaataaactctattaccacacaatataatgggtaggggtgttcacaaagtatccgcacgatccaatccaatccaatccgcaaaatacggatatccgcacttgtgcggattggattggattgaaaaatctaaaatctgcacttgtgcggattggatgttgtttgacctcaaaaagtaaccgatccaatccaatccgcacttaattatatatatattttttaaaaaaatataatatataatatatgttaattaaaataagacacaaacttctaatttttaatcttttttagtaatatattgaattggtg

SEQ ID NO: 351872 - DNA, 553 bp, Cannabis indica
gagaccgcccacacccgtccacgcaagccgcccacacctgaccacccccaccgtccacacagccgactgcccccaccatcgggcccatcaaacccaacacaccaaaaaaaaaaagagagaacaacacataggcatcggtccccatcggacccactatcggaatcatcagaccctacacaattattttttgaaaaatcactcaacacaattgggccccatcggacccagcatcgggtgccatcgaacccaatgagaaaatccaacacaagcatcagaccccatcgagtccccatcgaacccatcgggttttcgtattccccaacccattcgcatgagcatcggacctacatcgggcttgcatcggactgcattgagcccagtagttcggtcgagatgggttcgtgctggaggaggtggatcggcgtgggttttcgtggtggtcagttttcgtggtggtcacggcgatcgaacggtgcggtggttacgacgatcgagtggtgcggtggaggaggtggatcgggcgtaggttttgtgtggtggaggaggtggctcg

SEQ ID NO: 351873 - DNA, 656 bp, Cannabis indica
atcagaagcattgaagcttagtgtaatgccctgaaccgcagggacaccacgtgtgtgcttttacaatttaatttatagtcaatctattagtttaagaaaagtgtggtttagttaaaactgtctgattaaactaaaaacataatttttagataaaatactgtagaatacggggatcccctgtttagaaacttttacaatctttcccaaaactagtattacaaaagtagggtttcattattcaaaatataattgaaagggtggatcctgcccagtggaagcctagacaccacggttgatatgtacatcgctgggagacctctgactcatggttgatccacgttttcctttccttttacatgcaccacgaagcactcgtgagtcacaaagactcgacaagaaaagaaagtaaatacaaacacatatattatgcattacgagaaaatcatagcaattcatagccaacaacttcatcatcataataaataaatattcaccctatacataatctcacattacacaatcaattaattgtcttataagacaatcccactttgatgcttcataaagcatccttaccactcgttgtccacgagctatgtatgtcactatcattgcctgataaagcactcaataagtaagaaacctatctgtggttt

SEQ ID NO: 351874 - DNA, 661 bp, Cannabis indica
ggggattagattacaaagatatggcacacccacgatcccatgatcagtgtattttgcatttatcccacgatctttgtattctgtatttatcccatgatcttttctgtttatatccatgataacgagaggggaaagacttcctctccaagttcacagccctataaatagtgatgcatgttcactgggcaaaaggtcgcaaacagttttgtcgagactttaccctagagatattatctaagaattcttattcagagatatttttgtaagagctataagaaaagaaacctttcctccttgttcttgagtcagtacaaataatgaggattaggctattaccgaactgctcggggctgagcctctataaaatccttgtgtctttacattgctttactatatatcgattgctataaatcacttatcgcttactaaataagactcattgtcgttggctacaagcgaggtcaatattttggtgctttcattgagagcaaaatcaagaatcgctcttcattcaaaatctaaccacaagtacgatggtggtgcaaactcgtaggggtcaggttgatccaggcaattcacagatgctagattcttcattgcaaaacctaggaaacagaagggttccaacagctattaatcctgaacagccggcaagcgtggg

SEQ ID NO: 351875 - DNA, 2134 bp, Cannabis indica
ctcattaaatctatcaatattctcaatctaaaaaaagggaagaaatcattataaaactgtataacctttctagcaaattaatcttgctagtaatcgatggttttaagtataattcttccaattcaccccaaactcctttcgacatcttctctgtgatgagttttctttgaacattatttgatagatacatgataatcgtgtagtatgtcatctcctccatttctgatttttcctttgggttctttcctgccaataacttctcatcccgaagaaccttggaatctttctagtgcataaggatccctttaagactttttctccatagagcaaagtcccagtgccatcgaatttctccaattcgaatctccccattgatgacagtgaaagtttctttaacattgcagcagaaagaatcttgattctgcgatcttgatcgattacatagccctaatttgtgggaaaattacgactaatgatgcagaatcaaatcaactaaactttaacaaccaaacaattatcaatgacaagattaccaaaccaagaacaataatcgacagaaaataggggcaaacagagtcttaaaagaaacaataaatgcataaaataaagaaagcaacaccaacatatatacttgttcaagtctgatatattgatgtgatctatggctctactctagctctgtaacactaccgtaatccttctttattaattgagcaagaataggtacaatacagttgagacgagattctctgttgagttctttcaaagtgtttcaactctcacacccaagaatcttcaactctcacacccaagaatcttcttcatctacagaagattcttcttacaaaaccctaacccaatgtctctcttttctttgcatctttctcactacctctcaatcttttctctcttaaactctcaatcttactttaacagatttctcaaactcatgtattcagtctgttgttaaatgataagtgaaggtggtatttataggcttagaatcaagatcctaaagtcagtggctgcaagaaacgaggttgttaagttagttagaaaaaactaacttaaccacctcctctttgagcgaagtctcatgtcggcttaagtatcaaagcttccgggatcatatatgagcatccagactcaaggaccacagactctcgctaaagacgcctatagaaaggatagagtctgctggagtcaactatctggatctaccattccaggagtgacaactagccagctggaactcctttccagggaagggctagttatctggaagactgaactcagagtgaacatgatagtcatctgggaactcccattcggacacgactatcattccacacgactcttttcaggatggacaagttagctgtctgggaacaaggtccaagagacacttaactttccaggaatgatattggagacctttttatttggaggaactataccatagttatgattttttttagtattaatagttgcaaataactattttaatctattaaaaaacttacaaacaactatttttgttaatattcattaaataacatctaattcaactttatttgtatttttttaaaaaaaaaaactaattcatatattttttttagattgtgttcataattctaaacaactatttttatctatcaaaacacctgttaaacaattattttctgacaatcaaccgtaaatgagatttaattcaataggtgttgttcatttttacacaaaaactattataatcctcgaaaacaccatatatacaactgtttctagctagatagaaaatgagattatatttgtatgcattagtatttgttcagttataatctaatctcatttatttattaagattaaccaattttctatatcattaattatttatctaatttccacaatctaaaaaatatttataaccatgaagaaaactttttaaaataacttaattaggaagaaaattgttagaaatttttgtaccttgaatttgttctctgattcgtttctaggtaagcttcgaagtttattcgatctccttgtattcaatttctttgacgatttgaatttttgattttaggttgtttttgtatttttttttttaggctaattagcaatttttccccccgaa

SEQ ID NO: 351876 - DNA, 1334 bp, Cannabis indica
ccccacccgacccccaaaaaaaaaagaaaatattgggaaatcaaatataatcaagtgtaaccgtcgaacgtgatgagaaaaaaccgagtttcgaggaactaattaagtcagagcattaattagccaaaaactgaaaagacgcctggtcagcctcacatcaaatcgcgaacaggcgcgcctaacacgtgtcaccaacacaaatgtaaaggcagcttggatgaagtctacaggcaacttcggaagtcccgtacggacttgggggcaaagttatcccaatttttgcactctgacgtggcatcacatgatggttacatgtggaattaactttatatacctgctcgtaagagatatgccgaacagagcacggcttatattcgcacggacgaagccttcttaaccggacagtgagcaatccaaacagcacgccaccacttagcagtgttagcactcaaatcgtgagtcacagaaggaatccctattttgggatcatatcacaaagatatggcaagctgtctgaatcccttgattagtgtattctatatttaatatgcaatctttccaattatattaattgtaatctaaagggatattcttcactcaaagcttatagccctataaatattgattcatagtcactgggcaaaggatcgaaaaacttgtctaagaattcatattcaaagatattattgtaagagctccaagaaagggaatcattatattctttgttcttaagccaatacaaactaaggggagtaggctattaccgaactgatcggggccgaacctctataagactcttgtgtctttatttacttcattatattacatatatatattatactacttgtcgcttacaatcaaccttcattgtcgtttgccaaaagtgaggccaacacttttgaaattctacggtgttaaatcgtttaatggttacatctattgcagatgtatcccactaaaaataaatcaatcatgtagaatcaacaatggagatcgaatatcttaaaacttaagcgcgcatcatttttaaaaaaattgaattttcatttagatatccaatttagtctgtttatgtaaatatttatatatttatttaattaaaattactaatgtcgataaatctaaatataaactttaatttttaatatttattaaaatctatactttggtagatttgaaaaataaataaaatttgtatttcatccttaatattaattttcaataaatattatgaaaattacataatttaagtttgtccaaaattaattacaattaattttcatatcacatttaattttctttaaatatatataatcataattcaaaatccaatg

SEQ ID NO: 351877 - DNA, 701 bp, Cannabis indica
attatcgcttctggtttggtccttttctgttgattgatttgtaaattatgagatcaaattgattgtctttcactaaatattaagaaaaaattacaataacacagttatactattcaccattactatttgtactttctttttacattaatttaaacatgacttaggagcaggaggagcttcttcttctgattcttccagaaaggaagagcctctagtcattgtcgtctgccatggatgatggctctctctcaccacaaaaagtaggacatgggcatggcttttgttcttctttacctgttatgtttatgtgtgtgaatgaactttggataagaataatgccctttatatgagaagatcataggctctttattgatatgtttgtctatgatgagtttcatatcaatttggggtggcagcaacaattctcaattctcataacaataccagtagtatgtaccacaaacacaaagatccagcttcaggttcattttctttttcctcacagagaaatgagaattgagattagttcattcatattaataaatgtaacataatgaatcataacactacattaatgttaactatttataatatataatggcaaaataatgttataatatgctatttaataacatgtgaataatataattaaatgtcaatacttttaattacatgggctatctttttttttgaatggaaaa

SEQ ID NO: 351878 - DNA, 526 bp, Cannabis indica
ggaatctaaaatttaaagtcaaagacttaaatttataccaaatatataatgagtaattattctcttttggactatcactactaatctaactctaagattaagttgccctaagtaagcacatacaagtaggagatttctaagatcgaggatttatatcatttcgggatagattgtcaagaaaatagtcatttgcgccattcaatttcataagaaaaattagagtgacatcataagcagatgatttataaaccattcatccaatgatacactatttaagcaaattcaaaataaaaaagctaagaggaataataaaggataactttgaattaaataagaatccaacgatatcccgtttaggcgagagtcaaagttattcttattttatgaatctctgcatgtttcatattgtaaacactagtctaagttgtcctctttgaatgtacaatgtaataaccaaaaatatttacctattattttctatagtatagatatcttgatgtggaaatagtgattgcttggaatatgt

SEQ ID NO: 351879 - DNA, 584 bp, Cannabis indica
tctattaaatcagcactcaactcgctatcctctattctgattgccatagacttaatccaccttttggagataactaactctctgccaggcagtagggtcacaaaccctgtttcataactatcatgcgatctatccaatttactaaaaattctggctgccacatatgaatgagtggccccagagtcaaacaacacagagaagtaagagttattgaccgaaagctgacctgttaccactgaggggctggcttctgcatcagcctgagttatcgcgaacacccttgctggagtgggtttcgctgcagtctttggtgcttcagtcctgagttagggacaatcccttttataattccctagcataccacaatgaaaacacccctgccctttacactcccccagatggtgctttttacaactagggctttctgggtaagtgtatcgggtttcgctgccactctggtgattgcctcgaccctagttccctcggaacctcttgttttgacctgagccgctggttgtagtacgtgccttcaaaaaatcataactaattcataaaaaatccaaattaggttctgtaaaagccta

SEQ ID NO: 351880 - DNA, 662 bp, Cannabis indica
taaaacttttcaaacaaaaagaaagtcactataaatatgtgataattattaaatgtgtgattaataaaaaataatagttataatattattattatcatataatcaatatatatatatatatggaatacttcttaatgggtaataaacaaatttaactataaatattaattttaaaaatattaaaccattagatcttggtccgatagcgaataataaaagagaaatttgaatttttatgcttaatttagctacttaattaaaaaaaaaaaatcaaaaaatgcctctttttacactatataaaaaatatgtttatatgtaaaatatttaagtcagcattagagatattatgtgtcaatagttaaggcagaatttttattttataaaaaaaataaaaataataatgatgttaactatacctcaatatatatattccatatgcataaagtaagaaaaataataagagcattctaattgagtttatgatgagagttatatttttaaagtgaatcacccctgatcaagtcaaatacgtatgaaataaaaaaaaataaaataaaaacctattaataataatattagaacaataagacatgcttaaaaaaaggagatatatacaaaataatagtttatgctgtatttttacttattatgtatatacaaat

SEQ ID NO: 351881 - DNA, 506 bp, Cannabis indica
gtattttacaaagcttttggttgttacaaactactagtacctgctataaagatgggtatagcaggttgttggttaaaattagttgaaggtggttattcctgttgttccttctttataatgagagtcatatattactcttattctacatggagaaccgattacaatgtaaggaaagtatgaaactatattcgtagcttaaaaacagttactaggtagtaacaactcagaacactaattacaacatgaactcctctaacaatggtttaatgttaatacaactcggtattgaaaagtatgcatatttgtttacatgtataaaaatagttttaaagttcaatcccaatccaaataccacatgtaacattatttacaatgcatgattggctacagtatgtgctacttgattagcatccctacaaataaaatttaaaccaattacacaatcaactgtaatattaatttattttaatatgaattaaaaatgtttattaatttatttttgagta

SEQ ID NO: 351882 - DNA, 842 bp, Cannabis indica
tacccactacaagaaatcgttgacgaagagaatgagaagcttggattatcgaaacggcacaaaaatcctgggagatggagcaatgtgggttcgacctctagagtgaaggaggagcttcttcagaagttactttctagtgagagagtaaaaagtgaaaagtgaagaggagtttccctccataaggcttttatagtttctgtgagactactccttcacttgccacacattgctcaactaaaaagcacgtagaaatataaagtcgtcaacttactgcaacaaatgagatcagatagtcaagagcaggtatttcaaagactaaaaatgcaacaatatttactcaattaaggctacatgagctccaatgtagctagtaagtccctattcacacaactgtctgcacagggacttggggcaaatgttatcctaattttttccacctgacgtggcatgtccacgtgaacaatattagcgccatgtggtagtacaactcaccaacaagaaggttaagtcatctactcagcatcctagccaacgggaggtctcggtactcaaaggggacgacgagtgacagaccatccacctcaaggaggctgggtagccacccttggtcggtcctatggccggccagcttctagatagcacaaggcctgtcagcctgcatcctacaggtgcatggatggccataacttggcatggcaagactttagtgcacatccttacatatggattgcaaactaaactgtgaatacttatttttaagtagtattttagtcatttataatttaccaatttaatatgtaaatatcttcttattttatttgttaattagggtttaagctctc

SEQ ID NO: 351883 - DNA, 617 bp, Cannabis indica
tagtttctatgggaccactccttcacttgccatgcagtgctcaactaaaaagtatttggaagtgcaatgacgttaacttactgcaacaaatgagatcaaacagtcaaatgccaatatttcaaagactaaaaatccagcaacatttacttagataaggctgcatcagtatgtggaggcaaatattatcctaatttttgcccacttgatgtggcatgactacatggacaatatcaatgccatgtggcagtacagatcaccaacaaggaggttaattcatctactcagcaccctagccaatgggcgtcccgatactcaaacaagactacgagtgacaaaccacgtctggccagcttctagaaagcacaaggccggccagcctacatcctacaagtgcatgaccagaaaacacttggcctggcaagactttggtgcacaacattgcacgtggactgcaagctggactgtgaattaggccttaacagccactaaagtagatggaaaatacctatttttaaggggcattttgatcatttgtattttactaatttaatatgtaaatatttgcttattttatttgtaattagagtttgagctctcctatataaagagtcttaact

SEQ ID NO: 351884 - DNA, 503 bp, Cannabis indica
gatctgcatggatcagaacacgtgttttttaagaactcaaccatgttcttcgtgttctttgtgttcttcgtgactcaaagaaccaagaatcacaactaatgttagattcagatctttttcatctagaaattacacattatctattctaaggctatcatgcagatcaaaatactaaaaggacaacaatctaacataacaatatgttttacctatggctggccagccttgggttgcaccatagccgaccagcctagcctccagaggggcctgcccaaccattagatgctctgcagggtatcccatgcacttctacatgtggacaacaagtcatgggctacgaattgggacctaaaagcccaatagaatggctaaaaaatatttagatgttggaaatattttaccaggatctagatttactacaaagtatgtttcattaacatcctaatatgaattctaaaacaatgaaataaacacataagtgtttaaaaaaaccttacattggg

SEQ ID NO: 351885 - DNA, 513 bp, Cannabis indica
ttaacatgccgaaaataaaattcaaactttctatcgcgtgactcttttatttagagggatacattataaaagtaccttataatatttatgttattgcaatatgatatgttaatttatcgaattttgccgattttacaatattattatctttaatctaattagtaagtttatttaaattattaattaaatataacaattgtggtaatttttgttaattaatatgatattatttttttattttattgaaaaactaatataataataaggaatatttttttagtgtaatttgtagtgttgtggttggagtagaaatactttttgacgctaaatttggtgatagtgttacaccaaatttggtgtttccttggagatgttataatatgcaacattatcttattaaagggctgcttgtatttatgattaattttgaaagcattctctctatctatcatttgtattattttaggcattgttgaccgagattttcggcaactaataaaatatgattataat

SEQ ID NO: 351886 - DNA, 957 bp, Cannabis indica
catgacataattcgaagtgtagggcagaaaagctggagtcagactattcaagattaaactaacttgagtcgtgtgatccatttcggctccatgattctgagcttcctggaaataacttgccatctggagaaggtgatcacgcacattctgatgaggactcatccgtgcatttataaacttccttgtcgcttcaaagcgagattggattgatgccataccgaatagattagttaactcagtcatgattcctgcagttatgtcagtctttacaaaccttgttttcaaggtgtctaccatgctagaaagtatgaagtatcgagctttgtcgttggcattttgccaacactcgtacttctcctttacagctttggttgcattatcacccggctgcccaggagacagttcagttaacacaaatagggcactttctatgagagcaatgttaatgttctctttccattttgggaagttagatccactcagcttattatcagtcaatagtgacaacatgggattggtcattgtcatgtgggatactacaaataacaataaatagaaatcaagtaaggtttaaaacaaaatctcattcagaaattgttagcatatagcaaataggaatggtaagcgaaaatactaaagtaacagacttaaataatttccaaggttttcaacaaactgatgcagtgtcccgtttaggcgagagtcaaaaataccattcattgaatagagttgtcatctcatctaaaatgataaacattctagcaaccttttattcgatcaagataagaattcagcattgtcccgtttaggcgagagtcaaggcaattctatcttatgagcttccaccattatttcgtactctttaagccctattaaagtcgccaccattagggtgatccatactaaaataaacactcacaaagaaaaatacttatctttcgagattctacggtgtta

SEQ ID NO: 351887 - DNA, 497 bp, Cannabis indica
cacctaagagtttagaaaaccttacattgattgtagcggaacaatatgactcctttcgcttaagatctctaacccttgttcctttatgtcacagagtaataacaagatttgagcctagatctctttctctcattcgaattgattaccaccgtctctcgcactatgattgagtacttgacttgctatgtatgggcatgtcactctatcactatggctcgattaatgaagaacaatgaaggaggctcgaaattactatagaaggtgtatctcatctactatttgttagagaatgaaaactaggtttagtttggttgaagtgaatagttggatgagatgagagcatgatgtcctttttatagtatttcaactagggtttaaatttgaattatatggattaaaaagaataaaataatggacaaaaattacacatagtggtcgaccactaatgagcctcactagttacaattttaccactttatttcaaccacttattcttc

SEQ ID NO: 351888 - DNA, 715 bp, Cannabis indica
ttttttctttgtgcaggccagtctgaagttggcctacacatactcccgggctaagtctactgcctccaagaacacggctttgtccaacaccatgagggcggaggtggacttggctaagaaggacgctgacgacgccagggtagaacttggagctgttcggatggagctgggtgaagccagcaagaagctctttaccgcccacaagaagatagctgagctgactaaggatctcgaggttcctgaccgtctttgagagaccatcgagaccttatctgctgaagtgaacaatcttcaagatgaaaggacttctctttgagcggttcttcatcgggtggaggaggagaagtagtctaaggaggaggagcttacggtcgaggtggcgaagctgaaagagaaagttaatgctctagagacagccggtcttgagctcttctatgacttttggaaggctaatcctcaggcaaacttcgactacttgggtgatgccaaggacatgtacctcgagttttgcgcttcccaaatggcttatggtgaaactgaggcggctgcttctacctccagccaaactgctgatgtacctcccgttcaaacaacagatcctccagctcctactggcccagaagacccgaaccaagagcctgggactccaactgtttaaacacttcttcttttatccttttatttttatatatcttattcggccataaggcctttt

SEQ ID NO: 351889 - DNA, 708 bp, Cannabis indica
catgtttttaatttccaaataagcggcattagtaagttctctttgatcatgatctaaccatgctagctcttggttacgcaggttgtttagactagatggacgccaggcgaaataccagaagccacggcaactcggttggatcaaatgaaggtcagggagcttagtttcccccaaatgttcggggctgaggtagaggtcccaggggtagggcacgtggtcggggtgatgctaacccgccacaggttgcccaggctacccaagctgctcaggatgcccgaaattggaaaaataggtttgcagcaatgcaagtcagaatcgaggaacaagataatgtaatccaacgattgagacatcagggtgatcctgcagtgcctgctccaaaaattccagtggcacctgcccctgctgttcaggccgaactagtggttgctgtgaatcggatggaacctctgtatcaatggttccgcaagcaagcaccttcagtttttctgggacgtccggatgttatgaaagccgagcaatggctaatagtgattactagaatcttgaattttatgggtgtcactggtaatgatagggtggtgtgtgccaccttcaaatttcaagaagacccactggtctggtgggacatggtgtccgtgattcatgatgtcacgacgatgacctgggaaaagttccaagaaagatgtaacaccctaattagcatag

SEQ ID NO: 351890 - DNA, 818 bp, Cannabis indica
ttaaaattaaaaaaaaaatgaatataacatttaagtattttaaaattatatactctcaatattaaaaataatatagtaatatttatatatatttaacttaatttaaaattaatataaattcaattagcttaaaataaataatattaatatttaaaattaatcctactaacactactaaatttaagggtaaatactattttggaccatgtgttttgtaaaagttaccaatttgaccatctgttttgttaaatgacaaaatagaccctatattttccaaaatggtaaaaatatgactctgagctcaattttcaataatttcatttttcgatataactaactttaaaacagaaaatgtaattagttttgtcatcagttttgtcataacatctctagatcaaattattattaagttttattttgataaaaaataagtttaggatcctatttgtacaattttagaaaatacatggtccattttgttatttaacaaaacaaaagtctaattggtaacttttgtaaaatacagggtccaaaatggtatttatcctaaatttaacgaaatattcttaaaacattctgttaaactaacaaaaactgtaagataactacattttatatatataaagatattatttggttggttttttttttatgggtaaatactattttagaccctgtgttttgcaaaagttaccaattggactctctgttttgttaaatgacaaaacataccctatattttctaaaatggtaaaaatatgacattgagctcaattttcagcaattttattttttaatataattaactttaagacaat

SEQ ID NO: 351891 - DNA, 509 bp, Cannabis indica
gaaaattctcatctcttctctattttatttttctaaattataatattacataatacattattagcacaagcctctaaccaaggtataataatgtttttatgtgatcttaaattgtttcaaaggtcatgatacactaaatatatatatactcatctgactgatacaattcgagctaatcattttttttatttatttattttgttatgaatcaatatttatacaatatatgtctatgcttatatatttatatagatgcctatatatttgtgttgatttgtttatcatattatattgtttaattttattttcttattctatgttttagtattttactgtctatgtgttatatttgttgtacttttattttctttcaaaagcttatgtataagtctaataatttaaactttatattgatatagtttttttcaaggcaaaccttgcaaaacttgaatttgtggcatttgatattttcggaagaaattatttatcatggattcttgatgctgaaa

SEQ ID NO: 351892 - DNA, 847 bp, Cannabis indica
cactatttatcctattaacaattttatataacaattcacaacacaatttattaagtttatgagttcaactaaataatttaattcaagtggtgtattttaaaattaaaagtagagttactttatatattatttcttattttatttttttaaatttagttattctagtactttttttaataatttttatacgagttgttatataaattttggttgtaatttagactgattcgtaacccttagttactatgaatatttttatattaatatttataaaaatacaaaaaaaatatatataaaaaaatcttattaaaaatctaaataaaaatgctctattattaatggtttcgttttcaaaagaaaaatgttatttgagggaaaaagaaggagaccaagaccaagacttcttagtcttcggctaatgcgcgctctcattctattttattttatttttatttatttattttgttttggtgaaagcgattaatatatgtatcacattgttataaagataaagcaaaaattagatttttcttttgcatcactatacctaccactaataaagaactttttttacaaatgaaacattaatattatatattgtaaattttaaattcatatatgatataggttaatttcatcatgactaataataatatttacacaattcacagttcatacattgattgagaaaggagtgtacgtacgaagtacctttgatatagtatatatatatatagatcatgacaatccacatgagcatactttttaggctaatgagtaatttttctccccgaattttgacatgtattaaatcgtgccccttgaactttattggccgttaaaaatt

SEQ ID NO: 351893 - DNA, 590 bp, Cannabis indica
aggttgagaagtataagttagagaccgggcagcagaaatcagaagtggagaggctcggagggaaagtgaatgccctagaaatagctagtctcaagatattctatgacttttgtaaggccaatcccaaacgaattttgaacacttgggcgattccaaagacatgtttctcgaatactgcactgctcaggcagcatacggggaatccgaggcgaccacttctacctttccaactgatcaaatgttggagtgcctcctgctcagacaaatgatcttctagctcaagctgacccagtggacccgtacaaagagcctgggactccagctgtttgaatgcttcctttttctatcttttttttatctgttcggacataacgccttttttaagacaaagtgaccgactaagcggtcgttaaacttggaatttatttttcattttttagacagctagctgactgggcaacctttaatcccgaacttgcatgcttttgatatccttaataaatttcattctctgtttataatcatcatgcaatagtgtttgtttattttttaccaaatgctttgtacaggtataggtgcccccatgtgac

SEQ ID NO: 351894 - DNA, 732 bp, Cannabis indica
acttaaagttgatagcccatcaacaaaaagtagctcagtattttaataaacaagtgaaggctcggaaattctttgtgggagatatggtcctaagaagtgtattcctaaacaccaaagacagtacggcaggtgtactcaaacctaattgggaaggaccatatcaggtggtcgaagtcctcgaatccggagcatacaaatgaggtaagtatgatgaaaaaatgcaacttgttctggaccacggtattggcatagagaacatttaagaaaatactaccaataaagtaccaggtcggacgaccatactaagtactgaaagaacatttacttttaagtgaatggcctgctgggcggactacgctcaaaggtttcgacaaaaatgaaaaagtactcaggtcggatgaccaccatttaaagtataatttctaatttctgcaatttgttttatttcatgttaggctaaaagatcagattagatcaaatagctctaatgtaagttactacggtaacaaacacatttttgatcaataaatgaataaagatgtttatttcaaaattcaaattgagtcgaaattactaacatgttgctaatttaccatccagtgcgtacacacggtctggtcgaacccaaaacccgaactagatgaaaaagtataacttgtaaaaaaaagtagaccaagagtcataagtctgctcggtcacttgaagggcacctatacctgtacaaagcacttg

SEQ ID NO: 351895 - DNA, 391 bp, Cannabis indica
atcctaattagcctaaatttattaattaatatacataaatttttatgaatatttattttattttatatttaataaacataaaagagatataatagttactattttattttatttaacttttctataataatatattagattcttgtactcaaccaaatactataatctaattaacaataatctaattagatattcccatagatataaccaaacatagtaataagtttacagataatcatattatccttcataatattcttcttaattagattattttgaaccccttattatttttactttctctgcttgtaatttattttttgaacttatcctctgtttgttgattattgtagggaatttttcagtcatattagcagaagttgttgcatta

SEQ ID NO: 351896 - DNA, 769 bp, Cannabis indica
aggaaaagtgggggttccaccaagactcggggtcactcgggcctcctaaagaaatttcaccgcaccctcagctctcaaagccttttcaaccatttcagcatatgtggttgcctcggtagtagtaatcaccaaatcgtgcctaatcttcgcactcaaaccggccaaatatttctctttcttgctaaattgtgttgcctgattcccatagcaagcttggccagacggtcaaactttgtagtatactcagtaaccgacattccctcggtttgaaccaatttagtgaactctttccgctttgcactacggacagcttcattgtaatatttgtagttaaacaactccttaaactcttcccaggtcataactgtgacgtcccgagtgagggttatcaattcccaccacacgagagcgttctcctgaaactagaaggtagcgcaggtcactcgatcattaccaaccactcccataaagttaaggatacgctcaatcactgtgagccactgctccgccatcattacatcaggacctcccagaaacactggaggtgcctgcttccggaacctttcgtacaacagctccatactgttgccaacaacaggttgttctgctggcaccgctggaactataacgacctgagcaacttattgaggaggcacgacaggaggaccctgttgcctcaatctctgaatctcttcatcttgttggcggatcgatcttgtatttccgcaaatctctgctcccaatctggaggagcttgaggtggatttac

SEQ ID NO: 351897 - DNA, 715 bp, Cannabis indica
gacctctgtctatatgggctctttcttcctcgccttcttgagctacccgtagctaagtattcatttaaaaaagtttcatcagaattgtcattacattctaaagttatgatattagtaacattcatattctcaaaaggatctggagaacttgctgaatccattgcctaaaaatatttttcgtagattataattgagaatgttagatgaatgagagtgtaaagtaatgtataaaatggagaagtaagtgaaggaagaatagaacatggtatatatagactttgtgagtactttgatgtgttaaaagatagtcgttaatatatagccattaaaatagagttgttaaactatagccgttaaaatatagtcgttttaatatcgccgttataatatagccgttaaatatagctgttaaaatatagccgttaacagtcaaaatgtagttgttgaaatgaaataatttaaataaaagataattcatttaataaaaatatagtcgttacaattagaaaagaacaatacataggaattgcaaatttaaaataatacataacaattcgataaaaatacataggaattacaaatttaaaatattagtcttaatatgagctaccaaattttcatgatcttttcttggctcaaaatttatatttgatgtgttaacgcagattttcgttaaccaaatttgagcctcacgatgataattcaacacaaaaaa

SEQ ID NO: 351898 - DNA, 909 bp, Cannabis indica
tggtttctaggtttagctaccttcaagagttcgttattaagcgcaaacggttcatctagtcttagaacataaagcccttgttccatagatgcaacacaaatttaaatgtcatttcgagaaatgattgaatcagaactcgaaaaattcaatttgtattgttgcaactgtaaacctgaaacaaaaatcaagtttctattgaaatttagaataaataagacattgtctaaatccaaaattctattctgaaacttgagtttggcttttcctctagctcttaacaataccattttgtcattaccaactttaagtttcaactctccaaattttaaataattccagttttcaagaaattgcaatgaacaacaaacatggttagtagatccagaatcaacaattctgatggatttgtcattctctaaaacactgattcaaaaactaaagcattacaattgttcttagtgttgagaagtctgggacaatttgattcagaatgtcccttctgttcataattagaacattgaataatatatctacttaactgttcttggaatatgttcttattgctggttcaatctattgtaaaagataatatgaggaagtggaatcattttctctatatttctcaactgagcctgaattagtaggattgtcaaaggaattattctcaatatcttcatctttccttttgcccttatctgcattactgaagaatgatctccatgcaagtgacaatgtccgttcataagcacgcaattcagcgtccagcttatctatgttagacgagttccaattaacaacgaattggttaaacttaggtgataaactattgagaataaaatgaacacttttctctccagataaaacaattcccagcatagctactttctggaattttatgttcatcatgag

SEQ ID NO: 351899 - DNA, 2048 bp, Cannabis indica
gatgttaatgaaacatacatggtagtaatctagatcctggtaaaatatttccaacaggtatctcacgttttctcatcttcctccatgaatataatgggaggctcctcggttttcaccttcttggaaggttctggggcgaatgccaactcgtcgttctttatctccttcacgtatcttttctaggcattattgctttcccctgcgatatgtggccctcccgaaattaccaggatgccctccccttcaacaagaataggttgtaacccctggttgtttgggttattgggcagactcgtctggttgtatccatggccttgtcgtttcatgtactgcttaaaatggccttgaacgacgagactttctatctcatctttcaattggcgacattcttcggtcgtatgcccaatatccttatggaatttacaatacttgttaggatccctcttactcctcgaattcctcatgggctcgggcttgccgaaggccaccttttgctcatgtgcgaggtaagtattctcctgagttttgttaagctcggtataaatagtatataccaacacatacttatcatgcttcttttgtttctttttagccttcgacggttccttaactctgtgctttctctttgaaccagaagcccccatattatcaattctcatggaaacagttcacgttgaaacattgctaggtttgcctcccgagcttgttctcaacagattcatttcctttcaagcttcttccttccgaacgaactattgagcccttttattgaaatcagtgatgcttctcactggacgaccttgtaagtcatcccacaacttgccccctacggttaatggatcagtagagatcccagcctgaagggatgtaagttgcgttctgtcatccaaattcctaaccctagttgcaaccgtgctaaaacgacttaagtacgccttaagtatctcgcggggttgctgctttatattggttagtgagaccgcttcgggttacctatccctagcagcctggaattgtttcttgaaatccgtggacagctgctcccaggaagttattgaatgatgagtaaacttgttaaaccagctactcgctgctccaacaagcaaggtggggaacaaaatatggcgtaaattgttcgtcacattactcgctcgccttattgtgttaaagttattcaaatgtgccactggatcagtggtcccgttatatgacgagacatgcgagtttttgaatcccgaaggaaaagtggtattcattatgtttggataatacggctcaagctcctcgtgagagtcgtatccagatagtttccctaattcccccacttgatatctcctaaacttgtcctccaactcgtttatctgcaattggatgggatcctcttgctttggaccaagctattggcgaaggttaggtttcttccaattcaagtgctctcgcagatccagttgggagtaattgctagcagaccttgtcttactcgcagatcgcgtcttactcatagactttgtctttgagtggctcgcggatttactggttcccatactttctcgatcattagctcgttgggtactttctcctcttcgagttgatcgactatgggttcttaaccgcctcgaagtcacacttgcttcttcacactctgttctttcctccctagagcgatttgtcgtatttcccccatcagggtttgtacgagtcctcgctctatgggtttgggaaggacgctagtgatttctagcaggtgacctccgttctttcagttgagtcccaagatcatcctcattctcatgagggatttctggttcataagtttccggttgtctcccatctggctgtttgttttgatttttagggggtgtctcattttccctgggttgttcttcctggcccttttcctgtctcctggttcgtgagccatgaggtttgcctcgtggtcttctcactcaaaagtttggttgattttgagcattcgtcccttgtgctgccttggatgaggctgcatcacgctctaacccaacgtttcgacgctgcgcctcttccaaacg

SEQ ID NO: 351900 - DNA, 1073 bp, Cannabis indica
taaaaatacataggaattacaaatttaaaatattagtcttaatatgagctaccaaattttcatgatcttttcttggctcaaaatttatatttgatgtgttaacgcagattttcgttaacaaaaaaagagcagcaccacgataataacaaaaacaaaaaaaaataaaagctatagaaaaataatgtatgaacacatggttttttacgtggttttgcagttaaaattctgcatagtccacaagtcaatcttattcaaatttctaagtatttttttaagggcctctttcataagagtttttttcgtccctcttttgagattgtttgccactatttataattgcatagtggcagttaattacaaagctgaccaaagtatgtttacagtcattgtctctgaaatcgtgggatctgattacatatcacgaaatgtaaatgcggtgtatgattttaaaaattgtatagctatgattttttcgcttttactgggtcaaaaatattgtgtattaaacacgtctttaatggctgaatatggagatgtctcgacagaaacttgattatagtgatccgaatggcgagctgggactattcttctttccgaggttgacaatgtatgtctacgtcgatcgcgggtataaataaattttctaacttgccaggattatgagcctcgctcctattagttggatgaagctattggaagtcttctcatagcgagatggtcatctcgcatacttgttcttcaagccgagacgacttttacccttagtttgcttattgcaagctaaggtatgcgccactcttcttcggtgcctcgttattcaccgacatatagtttctcgctaatacactaagtgcctatttgtacattgattcctcacctaagaccttacagtcagcgagttacaaatatactctgatacttacgtaattaatgagttattccataaaaagctattgtaccgattcacattccctttatcttgacacttgtcctccagtcgaattttgggtataacaattgtcccttaaaaagttcttttttagtaaaaaaggctttttaataattacagaggg

SEQ ID NO: 351901 - DNA, 559 bp, Cannabis indica
ttcaatttttagatccataaaaggcagatctcaaaaagttgaattggagttcccaaacaatccaactcaagtataatcaaaaaaaaatacatcaatactatagtaaaatgtttatcctggtgcagtttattgttttccaaatttctaatggtgaatttgttcatattaaattacaaaaagacatgtagatagagttatgtacatgaaaacactgttctgatttttaatgtttcacaacagttccattacagctgcattaaagttgcataaatattttgctaacagttatttcgtctgattgaaactttcgtttgatggaaccttcagccaaccacccagcaacgacccagaaactttcgtctgaatgaaaccttcatctgatgcaaccttcggccaaccaccatgcaaccatcgtctgattgaaaccttcgtctaatgcaaccaccgcgcaaccacgcagcaaccacgcagcaaccatcgtttgatggtgcaagtgatgatagtgtaagtggtatttggtaattaaattacataaaaagtataaatgttgactttacct

SEQ ID NO: 351902 - DNA, 536 bp, Cannabis indica
ttgtactcttcttgattaattttgaatcttatgtgttgattgttttgtagggatcatgctacaaaactttcagaggtcacagtgggacagtttcagcattatcagatgagttgttaggtgatggagttgggaacattttggctagtggaggtgaagatggtactgttcgcctttggtcacttgaagctggtgtcaaaagtggtcagcatgctctcaaggctacattatgtggccatgacaaaactgtaaagcttatgtctttggccaagtaagagttggtttcttaattttcatatctcaaatttgtgtagtaatttactctgtcatgttctcataattcttctacttctgttaggtacaaaccatctcatttggtgactgtgtccaaagattcaaaggtatttccagttaacatgtaaaacgttaatataagcccagataaaagtctaacattctaagttcttttttcggtcttcattaggtgagggtttgggatacaactgtatcaacggctgcaaattcatcaagctgtgtgg

SEQ ID NO: 351903 - DNA, 1006 bp, Cannabis indica
ttttgtcctagtgtttgctggttttgatcatgttgcacatcgtactctcttgtttcaaaagaaatacggtatacacatgatatgttgttgataactctacggtatagagttattttttatgcttttaaactaaaggtattgtgagaagagtagtgaaaatgtgtttgtttgcttaattttagttagttttagtgttattttctatttagtaagctaacttttaagtcttgtaaatattgatattgcttggtgtgttttttcaattaattgtgcttgtttgttgttgaaaaaggaagaattaaagtgacaggaaaaagattaagaagcaaggaagagtggaacataagctgaaattgaggcagattgctgaagcaatgctggagcaaattcagcatcctggcagtgacgtggaaacacgagttttactaatctacctcagtaaattcggcccagtcactcaaaacattctagctggctgttgtgggagaaaaaggactaaacctagtgggccaaagtggaaaagtttgggcttctattttggggtatgaagtttgtaccctaaaaacccaacacctaaaataagagcaaaaggggaagtacaccatcatcatcttgattatccaatatgtaagctgctgcaacatttttggagaattaactacagcagaagtacaattgagaagaaaggagaggggaccaagctttagtgtttgatttttcttttacccttctttaatagttttcttttctactttctttattgttgtttgtacttagtagtaaaaactatttgagattgtaaacttgggcaacagccatggatgagtatttttcagcttggattttagtttcttacttgactatgagctagacttttgaggcttgaatggctgtgaacttctaagttgggtatgattaatttttaagcttactttagcattttttttgcctttgttcattcaagtgagtttcattatatttgattgttgttcctttgccatgaata

SEQ ID NO: 351904 - DNA, 566 bp, Cannabis indica
ttgattacaattcatggtaataaataaaagatttggacatccacatagttattaatatttataacaaatattactttttttaattacttatttgtcacttattaatactatttattgacttcgaataatatatagggatttttttcattttttatacttaaaaacaattttctttgcatttttacgaaaattttacatagaaactgcctaaattgcaacaaaaaatcttatagaaactcatattgcaactagcgctgcaatcactttaaaaacccacaccgtaaatttaaaaaacaaaaagtaaaaaaatagtatatagagtaattctcctaatatatatttagaagatattaaaataatataaataaaattacttattatatatattttgaataaatattaatgataaaattaatttttatagctaatttatactttgtttattgcaacacaaatacaaaaaaaaaaggccaaatataattttatggtatattttagaccaaatttaatccaaaatgtacaccagagatggtctaatgagagaaacttcaaaaaattataatcga

SEQ ID NO: 351905 - DNA, 1168 bp, Cannabis indica
aatatgctcaaggctccaagcactcacactagttaaaccactgcaactggtctcaccactgcaccccggttactgctggcaaagcgtgcaggggggtagcaagtgaactcaccctttcctactaatctaacttggcatgattgcctaagttcgattccacaggttttcagcatctcacccgtgtagcctgagatagaacgcacctttggttctatcaactcagcctcgaaggtgacattgcgatcctgaggagttttatcttcctgttgggttcttactatgtgctccctaaccctagcatcgtttaactctaatttggaggtgggttgtgaagggttgagtttatatgggatggctgattatgtagggaactcaaactctaaaacttttggacgataaattcttgaactagagtgggacattgctgcaagcaaaaaccagtcccagaccctagagagaattttatcaaactggaaggtaatgagttagagatcttaaaacaacctacatagtgcctgaaccctagtatgaacagtttaaaccctaaaaaactaccaaaactagatgagatgataacgatacaaacaaatcaagtaactgatccacacagtgtaacaaacataagaaagaagtaagcaacttattgtttgaagttagggcttggggcaatgcctggtaattccgtctacaaatcttcgaatgaagtaaggattgctttgagaggatgaagtcggaggaaactcgcaggaaaaaggtcaaggacaaggatggcatgcaagtcttcgaacaaatttaatggtgatctttgatgaagaagtttaagggtttttatcaaactttctgaaatggagaaaatggtgcaaaggtggttcctattttcttactttatacccatgatagtggcttcgtcagatcaaagaaagatttgatcctatggacatgattcaaagcagaagtggaaaagagggtcatttaattttgatgtacctcgaaaccctacaacaaccaaaatcagaggatatgcatcttttcaaaaaagaggaacatgacggaaataccctttgtaatcattaaaaagctctttttaatttaaatgatctttttaaggggcaatttttatacccgaaattcggtaagcacatcagaggactgttggaattattttacc

SEQ ID NO: 351906 - DNA, 640 bp, Cannabis indica
tagaccaaaccaatccaccggcagtgcctgcacctccacagaatctgggggataatgtgggggttggcataatgttaatccgaatgctgattagtagcaaatattttaagaaatacgaggtatcatacttcgtcaagaggaagaattgcgtcggttgaggcaaccggcaccgacagctcctatagaataagttttaccaccagctcctgtgccagtggtgggtaaccagggatttgtattgctgctcagagattcagtgtttgaaaggttcgtaaagttgaaacctccaacgtttttgggagatactgatataattaaagctgagcaatggatgagtactatcactcgcatccttgataacatgggggcgacaagaacagagagagtgaactgtgctgcctttatgttacaagatcatgcccgcatatggtgggatattgtggggtagagtcgacatgttagtatgatgacttgggatgagttcaagagtttgtttaaggaaaaaaattataacattgctgtgagaacgtcacatacagaagactttgtgaaactaactcagggaaaaatatttgtggctgaatacactctagaatttgatcggctgtccaaatattttggtgatctagtgcctacagat

SEQ ID NO: 351907 - DNA, 856 bp, Cannabis indica
aggcaactttactaaagatagaccttactgctctttaggatattcatttcttcattcatgaaattgtaccacaattttaattcttttcattccacagttttgatttgtgttacaaattaatattatagttgaactcttattgtacataatgtaatcagtagaaaatcttgatactattataataaatcatcttaaggatgaaccaacaaactctctcaaagggtgaatggttcagcatgtatgttgtttagcaattgtaagcaattactaaataacatgacttattataattttatcaatgacttgtggattattaatgattagttatagattttcaataaccattaatcttaagggttattgtgaatcataattaatttaatactgttggaatatattttactagtatcaccaagatctgagcccgacactccttctgttgtttagattcttcacagtcttactcacaatgattgatgactaccttgctatgggtgggcatgcactcaatcactaaggctcgaatttgatagtgaagaagactatataggatttcgaaaggaagaagaagaggtctcaaactctctagttgtcagatatagaacgaaactaggtcaagagttattagaatcattagttggaaaatgagaccattcttttccttttatactaattctcatagggtagaattgatttatttagaataaaaaaatgataaaaatagagcaaaaataggctctagtggccggccatgaagtgggctcaactctagttagattttggccatttttcttaaccatttatctattttttacaaataccactttttgcactttcaattctataaatgccaaaa

SEQ ID NO: 351908 - DNA, 524 bp, Cannabis indica
attgtagaatcacccttaaatatgtatataattgtaataagtcaatgataacaattaatctatttaaaaaaataaataaataatggagaaagaaagaagagaaggaaacatggttggaaatataataataaaaaaatgtaaaattaaaaataatataataataattaattcatttaaaaaaaaattaatagttaatttaccttaatcttctttataataataataataataatacgggttaattacagcaaaacaacatgtttactaataaacaatgggaatctatcattcttttatatttgtttatttaatttattaaatttagaaaataaataacttaattaaataaaggagaacttccccaacaattttttaatgagtgtcattaagggtaatgaattttatttactttttaatattaaatttataataacaatttggaaaattctacaatgcacccccttaaaataataaaattgatacattgatgcacccttatctgttttagcactcgaaatattttt

SEQ ID NO: 351909 - DNA, 704 bp, Cannabis indica
gtgcagtgatagcatttttggaatcaggtaacattcttaaagagattaactctacgatcattacactggttcctaaatgtaaatgtcctaactctgttaaagattttaggccaattgcttgttgcaatgttatccataagattgcaacaaagcttttgagctctagaatcagcaatattcttcctgaaataatttcccattcacaagggggatttattaaaggaagattcataggacataatatcatgatttgccaagatttggtgagacactactgcaggaaagccaataagccaagttgtatgatcaaacttgacctccaaaaagcctatgacacagttgagtgggagttcctggaggaggttctaattgggctcaatttccccagcacatttattcaactcataatgaattgtgtatctactccaaagttctctcttatgttcaatgggaccttacatggtttctttgaatctaggaaaggacttagacaaggagaccccatgtctcccctgttgtttgtactgggtatggaatacttttctagattaatggggaagattggagagaaggaagattttcactttcatgacagatgttcgagcctccaattaaatcatctggcctttgcagataggaatgtcaatctgggctgttttcgcgggccgggccgggcccccggcccgacgggccgactgtggccc

SEQ ID NO: 351910 - DNA, 499 bp, Cannabis indica
ttatcacagtttttaataattaattattctactagtattaaactagtttataaaatcacacacgtggcgtccctatatattagggagttacaaaatgaagggccagattttctctaagtatgatcggcatgatgatcacagtacgagaagctggcctataaatacccttgagtacaattagatatgggtaactctttgaagaaaaaccattatattaacaactctataagaaattcctatcatgcttcctcttcttcaagaggaacgagaggaataaagagtttcagtctattgtacaccaatttatattattattgtaatgccctaatgctaaggcacgctacaataatttttcaattacagtgttgtttttgctaaccaaagaattttctcaaaattcgtgtaacattaaaacttttatattatatattaaacttataatctttacataaatatatacaaagtcgggatccagtttttaaacttttaacaacatatt

SEQ ID NO: 351911 - DNA, 1004 bp, Cannabis indica
ttgacttaagaacaaggagaaaggttccttttcttatagctcttacaacagtatctctgaatatgaaatcttagataatatctctagggtaaagtctcgactaaactgtttgcgaccttttgcccattgaacatgcatcactatttattgggttgtgaacttgaagaggaagtgtttcccttctcgttacaatggatataaacagaaagatcgcacgatcactgcagaatacactgatcgtgggataaatgaggaatacacgtgcaataaatgcagaatacactgatcgtgggatcgtgggtatgccatatctctgtaatctgatccccaaattatagggatttcttcaatgactcacaatgcaaaagttgaatttgctaagtgttggttattctgcacagattgctgatctctttgccttgggtattccagcgaggcatgctattcggactgtatcctccgagcagatactccaagttgattccacgtgtcaccattatgcggtgccacgtcagagtgcaaaaatagggataacatttgcccccaagtctgtacagaacatccaaagttgcgtgtagacttcatccgagctgtttctgccttttgatggggacacgtgtcgggccctactttccgggactcgatgtgaagctgactgggcatccatttggttttcggctaataaatgctctgacaattaatattgcaaaatccgattttctctcaccacggttgacagctgcacttgattaatttttatttcccatatttgcttttaggggggaaccgaggcgtctgacgtttctctgaaatgattacctcgtttcgtgacttgcattaaatatcaaccagcattggcacataaactcattttcaccatccttctttgctaagtgatttcagagcaaaaagagaggttcttggtttcaagcttgctgaagtgccttcatcgaaactgcttgatggattgacgttgctcgaaccctgatatctgactcttaagt

SEQ ID NO: 351912 - DNA, 605 bp, Cannabis indica
aaaaattataaaaatatggttgtacgaaatttatttttatgttgtaatcttgtttgtattgtgttttatacagaaagacaagaaacttaaagaggtattgaggagtgggcattgcatactaaagaaattccaaaagcaggaagatgatggctcagatcacctttacttcttctctcaagtagatatgagattagtgtgtagagttctaaacatgtcaaagataacgactgatcaacttgtttggtgtcacaataagctaagcaagatcaattttgttaagagaaaaatacatgtagaacattcatttttgttatttccttgctgaatgttaataaaaagttttttaacttttgagcaaatattattttagaccttaaattgattttttgtcaaattaaattaaagctaattagaatttttatcttctgaactttgacatgtaccaaatcatgcatcttgaacttttcaagccggtaaaaatttcccccgaactattgaaattgttaaatttaaagacttctgtccaatttcattcaattttactaatatgacaattattcatgtattaaatcattgttgctatatttttaaacactacgcaagta

SEQ ID NO: 351913 - DNA, 775 bp, Cannabis indica
ctatataaaggccttaaatctaacctagaaaagctaagctcacttaagcctaatacttgcgtccaagctctaatcctaaatctgataacttatctcttcttcgcttcctctctcacatgcccatacaagcaatatcacttaagatttgccattcttgattcgtacattgtatccttaagggtgctatagcagatcccatctatagtgatctagatagtattaaccctcggtattaatataaaagaaaggggagtgagtcattacccgctaccacatggtgccaaacctctataacaaatctgtgtgttataccaatttttgcactctgacgtggcattgcgccatggtgacacgtggaatcaactctatgtacttgttcacaagaaatatgtcgaataagacacaacatacattcactcggacaaagtcctcttagctgggcagtgagcaatccgtgcagcacgccaatacttagtaaattcaactttcacatcgtgagtcatcgaagaaatccctataactttgggatcagatcacggggatatggcaagttgtctgaatcccacgattggtgtactctgtatttactacgtaatctttccacttatatcaattgtaaatagaagggaattacttccctcccaagcttatagccctataaatagtgattcatactcactaggcaaaagggtcaaaaaacttgtctaagaatccatattcagcgatattattttaagagctctaagaaaaggaatcattctccttattcttaagt

SEQ ID NO: 351914 - DNA, 1133 bp, Cannabis indica
attatattatactcgtattatacaacttgtcgcttacaaagtagattcattgtcgttggctaaaagcgaggtcaacattttggtgctttcattgagagctgaactcaaggatcattctttatctcaaatctaatcgcaaatacaatagtggtacagactcccagaagcttggttgacctgacgaatccatagacagtggatcctgcactgcagaacccaaggaacacaagggttctgccaaccacaaatcctgaacaaccatcaactataggtcacggtgtgacgactcctgtggttgaaatcacgcctggtgtgtaagacacttggaatactagttcagcagccaaccagagcattcataacacagtcgttccgtccgtaccaatgttcaaacaaccattggagatgacactgaaatccagaaccttcgtgctactcttggagtcatgcagggtcataccaacaccctgcataatgatcaggaggaactccgtgctgcgctgaatctcgcgtttgaagtgcagaggcgcatgttcgttcaatggagagataaggagatggaaacgttaagggctcagcaagtagtcatcaccgatagtagtcggcaggccactgtgttgatacaaaaagcctatcagactaccggacaacagcctgtaaccatcatccccttgggcgagaccgacgaagatccagcgatgaacacctctcagactattaatggtcagctgcccaatccacggtcacaggttacacctgtgggccaagtggtaggcgggcagaccttgtctagtaattcatcagaagaagtcatacccaataattccaaccaagttaatggtcccagttagcaaatcggccaaaccaatcagtcactgaggcagccaggtgtttctatatttgatagattggggtaaactcatgatctcagaaatgatctaaataggaggagaggattggacgaccagcttgacgcgccaatcgtgtagcccggaacccatgcttaaaatcccgctcaaagagatgctgatgtgacttaggtcagccaagaggccgaacaggttagtccagtcgtgcaggcacagtagcatgtgttgggttttatgccctaaataaaactctgtttcaatgta

SEQ ID NO: 351915 - DNA, 619 bp, Cannabis indica
atgttagtcgataagggtggtattttaatactcttaaactacaccaaatcaggtttttagacttacgtttatgctagaaagtctactaatgaaatggtgattactctggtggtggagtagtgattttggagaagtgtaaaaaccaatctgaagtctctaactctaccagtgagactggatgttaaagttgcaggaaagatacttatttagtctatggaaagttctatacagtttttggcgttgtaccaataatttattaactattagtgttacttcttgactaacacaaatgtagttgccaaaaagtaaagaatgcagtatccctagaggagtagacatattgagaagaatttaacaatatcaagggttttgtgattaaggaaatgtaatggtatgaaaagattgtattgaatacaaacatgtcagatcttattacaaagataatactacatagtacacttgatctggatatcaaggtgttgagattaattgaaatgtactttttgttttatattagtgcaagtgggagtttgttgggctttgtcctctaaataaaatccatttcaatataatcatatttcctaattaataaaagatcagaaatcattttatgttgcat

SEQ ID NO: 351916 - DNA, 601 bp, Cannabis indica
aacatgtgaaccaaataataaatttgtttctttattgataaatgaatattcaagattacattgaaatagagttttagtaattaaagcacaaaacccaacaatgcatacaatatatacatacactcacatacacatacacatacgtatgcatacatacatacacatatatacacttatacatacataaatatacatacatacgcatatatatacatatatacacacatacgcatatacatacatatacacatttatatggaacacttcttgatggttattacttaattaaatacaaaaattaagcataaaaactcaatttttcctaatattatctatgaatgggtaatacccattaagagtgcacacatacatatacataaatattttaaaaaataataataataattaaaaattaaaaaatacctttaagaaatcagaggtggtggggttggtcgtccgcagtggtcgtccgtggtggtcgcgcgcgcgacaatggttttttcttttaaaaaaaaagagagaaatagagagggattgagagaatgattgagagagatagagatgaattgagagagagagagagagagaggagagagagaga

SEQ ID NO: 351917 - DNA, 521 bp, Cannabis indica
cctttttactttaatggttaaaacaaaaaataaaattattataaaaaagaaaaaatctttaattctattattcattaacataaaaacgtgtaaaaggtatttatttgaatctatttatcaattaccatgcaccacttcacttattttacaataaaattaaataaaatgtaatgaaaagactatgttaatgtaaaagttatatttcgagaggtattattaacaagtcatatactatagggagcataacttggtagtataaaaagttcagatgataaaaacactaattattctggaaacaaaagttagatttgaagtttttaaaacctcaaaagtactcgatcatgaaaaaaaaaaagttaaactaaagaattaccgaaattttaggtgtataacatgttaggttttatgccctaaataaaactcatttcaatataatcagatttacttattaatatagattagaaataatatttattgttgtatggttcacatgatttatttcattgattatatgtacataa

SEQ ID NO: 351918 - DNA, 472 bp, Cannabis indica
ttcgaaccaaaagcccccgagttatcaattctcgtggaaactgaacctgttgaaatatttctaggtttgcctcccaagcttgttttcaatagattcatttccttttgggcttcttctttccaaacaaatacctgaggcctttcattgaactcagtgatgcttctcactggacatccttgtaaggcatcccacaactcaccccctgtggtcaatggatcagtagagatccccgcctgaagggttgtaagttgcgtgctaccatccaaatttctaaccctggccgcagccgtgctaaaacgacttaattaagccttgagtgtcttgttaggctgctgctttatattggttagtgaggccgcttcgggttgcctatccctagcagcctgaaattactttttgaaatccctgaacagttgctcccaggaacttattgaataatgagtaaacttgttaaaccagctactcgctgctc

SEQ ID NO: 351919 - DNA, 500 bp, Cannabis indica
gagagagaaaaaaggaaaccaattttttttttttcgaaaattggtcaaggttaccttaaatggaaagaggaaacaacatatccccacaaaatctaagaattaaaaacccaaccaaatccgaaattgccaccaaaaaggaaaccacaaaataattaattaattaaaaacaagtttcctaaagcaccacaaaaaataagaccaaatcacaaaaataaaggaaacacaaaagataaaatgcaatgaaaacatgtttccattaaagaaaaaaaatagccaaaaaattgaaaaaattatgcccccctttttctttatttttttcaaaatatgccccccatattaatttgcaaagaacgaacaagacaacacataatgacacataaagcaccaatcaacacttaagagcaaaaatagtgcttaagaaaataatgaagcataacaagaaaataacaagaatttttagaaaagctcaattgacaaaatcggtcacaaaaatttattta

SEQ ID NO: 351920 - DNA, 848 bp, Cannabis indica
catcattctgaaaatttcctatcactagggtattttcctagaaggacttaggcaactgctagtaactaatcatagattgtatatgatcaccaatttgcaagtcgaatttatggggaggtaagtttgaatacaattcaaaaattcaacttaatgaactttgaactgcatatccaaatatttctccacacatatcacttcgcaagatctttaaccacttaccttaatatttttcaacattgctagaaaattcatgaaatttctcaaacaattcaaatttctttgcataaggtaaaatttagagtgattgtattaaaaatttaacaataactcatatccacacctaattatacatccatatgtttaaatatagatgatcttacttttaagtggatattggcatatttactctttacaaaaaatgatcttgtcaaaaccactatgaacaagatgcaaatgccatagatatttattatggttgaggtcacttaggtctagttacaataaagagttcttagaatagtccaagaggattctggtcacagaatactaaactcatattccatacattaacatacagtttgaatctattgacataaaatggatattaataacttgtgaaagtcatactgtattgtccaatgtattctaggaaactgaaatttaaaatttctattcagaatctaaaatttaaagtcaaagagttaaatttataccaaatatgcaatgagttttaaaatagcttggaccgccactactaatataactctatgtttaggttgcctaaagtcagcatatacaagtaggagatttttaagatcgaggatttatatcatttcgggatggaatgt

SEQ ID NO: 351921 - DNA, 810 bp, Cannabis indica
tatatagattgaatttaaaatttcaattaaccaccataaaaaatatattagttttaactttatatttttaaaatagccaaataacttatatgatatatatcataaaaatatataaatatatatatattaaaaaaaattatcttaattggttggtcgggttattttaagttgattgggcgggttatattttggtcgggttttttcagtttgtatttttcacttaagttactaattagaccatctgttttgttaaatgacaaaatagatcttatatttttcaaaatggtaaaaataggaccataggaccttaagctcaattttaataattttattttttaataaaatcaactttaagataatttctaacacgaacagatacaaaaaatataacaagttttgtcataacatctctagatcagattattattaagttattttgacaaaaaaattagttcagagttttatttatataattttaaaaaatacagaatttattttgtcattttctaaaatagatggttcaattaataacttttgcaaaatacaagttaatttaattattttagggaaattttatttacaccccaaaaattcctaagtacaccccattttaataatttttattttatataaaatttatatctttaattgtactaagtatttttaacttttttctttcaatttatattcttaaaaaatatacctatcaaacaaaattaaattatattttaaaaattatgacaaaaaaattaaaataaaaaattatatgaaattttcttagaaaaaaataaataaatatttacatgagtt

SEQ ID NO: 351922 - DNA, 1149 bp, Cannabis indica
atcgtgtaataaggtgttgtgtgttcaagaagaggttcaaaacattcttgagcattgtcactcatcgccttatggagggcattttggaggccaaagaacagctctaaaagtacttcaattggggtattattggccttccatttttaaggatgcttatgagtttgctaaacggtgtgacagatgccaacgggttggtaatatttttgctcgaaatgagatgcctttgcaagttattctcgaggtagagttgtttgatgtctggggcatcaatttcatgggaccctttcccctgtcctttaaaaatttgttcattttggtggttgtagaatatgtgtaaaaatgggtggaagaaatttcaaatcccaccaatgactctaaggtggtgatgaaaattctacacaagaatgtcttcactcgttttgggactccaatagctctcattagtgttgggggaactcattttgttaacaaagttttggcacctcttttggctaagtatagtgtgaagcacaagatagctacgacttaccatcctcaaacaaatggccaagcagaaatttctaatcgagaaatcaaaggaattttggagaaagtggtaaatcctactcaaaaagattggtctcaatggttgggtgatgctctttaggcctatagaactgctttcaaaactcctttgggcatgtctccttaccgtttagtttacgataaagcttgccatttgccagttgaattggaacacaaagcttattgggttatgaagaagttgaatatggatctcaaagcggcatgggaagctcgaaagttacaattgaatgagcttgaggaaatgaggttgttttcgtatgagaatgctaagctctataaagaaaatgccaagaagtggcatgacaaaagaattcaacctcaagtgtttgagaaggggcagcaagttttgctctttaactcgcggttgaagttatttctgggtaagttgaagtccagttggttgggcccattcaccatatcaaaagtttatcctcatggagttgtggatgtttgtaatgagcaatccgaaagggaatttaaactgaatgggcaacgtctaaagtattattttggtggtgaggtcgatcgagcaaagacctcaatcactttggaggatgcatgaag

SEQ ID NO: 351923 - DNA, 502 bp, Cannabis indica
gttgtgactaaaaagtctgtgtgactaattaataatattattcacaaaaattacaatttgttgtgactaaatatgtttttgtcacaatacttgttgtgactaaaactaagttagtgacaacttgtagctaaatactatattttagtcacttcttgtgactaaaaatcacatttagtcacaaaaaatttatattgtgactaaaaagttgttactaaaagtaactattttttgtagtgtgcatagtgagggggagcaaatccacgagggttgagaagaacaccgccgctgacctagttctttggcaacgttggaaaatccttgttgggccagctctgcaatcgtcggagggaggtgagaatctactaatattttctgatgaatggatgcatgatgatcgacattaaatcaagaaacaactttttttttttttgctttttcaactagtatgcctaagaccatctccaataggagatataaaaattgtgttatatttggcacaaaa

SEQ ID NO: 351924 - DNA, 417 bp, Cannabis indica
tcattggtgtaagaaacaatgctgttttccatccttcttttttttaggaaggcatgaagcttgatgtctagcttgaatatataggtccttagctagttgaaagttcctccctacatccccaattcgctctctattaaacttctctatggtgtgcttcagtctcataagcttcaagtataatcccaacatgccctctcttccaatcggtttgtaccaattgtcaataacttctcttttaaaatctgggtgatcagcccaaaaattataataccggaatggtttgaaaccaatatccacattggttgccattgaaaccacacacaaacagtgatctgaggttgtctcccaactatagtgcgctttggtcaagggaaagctatcattccaatcttcattcacaaaagtgtgatcaatttt

SEQ ID NO: 351925 - DNA, 529 bp, Cannabis indica
ttttttttttttttcttgagaaaggaacagccacatatcaacataaggtgagttttaattctttatcattcattatatatataatttttgatgatgcatgtatgatgcatatattgatggtttatatttattatcatgttttataattattttaattgaaaaacatcttctataatataaatgtcacattgacatatatagtttggtacaattgaatagtccaacttaatcagtaatcaccatcatcatatgtaattttaatttttatattatttatatacaattgaatggtcatagtactatatcttctcacatcttctcacccttctcatatatttcataatatatatatatcataatgtatataagtcttctctatcttcccatatatatacatatatgtcttctatttttttttgaaagatatatgtcttcttacaatatatatatatatatcttcagataaaaagaaactcatatatctcatggtataacataataaaacttaaataccaatgaaaagcttcaa

SEQ ID NO: 351926 - DNA, 633 bp, Cannabis indica
ccgacttgaaagaggcagctgactgatttattcacaagagtagggtgtcgtgagacaacatagttgtttgaactatgtggaaaccaaggattattaagaatagatacattttccccattagcaattgttctttgagcacaggcgtggataagatcttttgcttcaagaatactacgccaaatgaaactaggattgtcccccaatacagcgaaaaaaagattaccagaagcataatatttagccttataaagcctactaactaaagaatcagcattaaccaataaacaccaatattgcttccccaaaagagccaaatttaaatctcgcaagcttcaaaatcccaatcccaatccccctgcatgttgatggcgacacaaccgctcccagctcatccaattaatacccttaccgctacttgaatctgagtgccaccaaaacttggccataagccgctctaactccttgcaagtgtctgacggcaagaggaaaacattcatagcataactcggcaagacttgagcaatagatttcaacaatacctcctttcccacatgagataagatacgcccttcccacccttgaattctctttcggagcttatccttaagaaaaccaaggatagcattcttattt

SEQ ID NO: 351927 - DNA, 453 bp, Cannabis indica
aataatatataaatattaaagaagttaacaaatttttaaatcttaccataattggaaatatttcaaaatacaaatatttcaaattagaaatattttaaaaatggaaatatttcaaattagaaatatttaaaattggaaaaatctaaaattggaaaaatcgaattttgggaaacaacccataaaaaatcagatttttggggaaaaaccacaaaaatcgcagtatgggctagctgcccaagaggggctgcacgcagcctcggacgcgcacagaatagggggaatgcatccacatcaaccaagaaatctcggtgggctgcatcgttccctgggcgagacgcaggggcggatgcagtgtctcatgcgcgcgcggatcctccttgaccgaagggtctgcgcgtgcgattgatcatgtgcactcgatttttccaaatttgtaatcgagttccgtaaaaa

SEQ ID NO: 351928 - DNA, 859 bp, Cannabis indica
attgttgtagtaatttgtggcataaatactttagttttaattccctgttgcagataaatatttatgtttaaattttgacggtaataatgttgaagttatatttatagaaattttgtaagtacctaatcgttaaacggtccagatcattaaatttttattttttatttaaaaatagatctaaatataccaataaaaaagtgatacgtggataatgacttaacatttacctacagaagttctagaaatataacttaagtattattacgtcaaaaattaaacttagatatttatctgcaatcaagagttaaacttagtgttattccaatttttgttagatacgcaagtatacgcagtcaaacaagtaataaagtgataagtaagatcgtctccacaaggattgcaaacaaagtttgatgtaaaaccaactaattacaacttaaagtaagaggaattaacatgcaaatggttgtgtaacgattcaaaattaaaaatgacatgaattaaacttgctagaattaaaactactgctgctagaaaaattgactgcaagataaaaattgtaatatggtaaaaatggcttgagtagctaattccttctagtcaggttttttttccaggtgttacagcattacaccagcattctgcacagagataacaaaaattcctctacgcttgtgagaattttccaacactcacaaattcaagtctactacttagcttaatatattcctatatcaaaccagcaagcagaacactattcaaacattaattttatatgcaaggtaaatgaaatattcctattccacttacatagaaaaaacctaaatctaggtttctcacttgctccaatcaagttgaa

SEQ ID NO: 351929 - DNA, 837 bp, Cannabis indica
aacataaataactgctaatttccaaattaactaagcgggctttacagtttctattagtttgatagaatattttaaaaatataagaatattccgttaaatttaacggtgttaatagggttagttttataaatatatatacatattaaaattatttatttttagattaattttaatatatatataaatattaatattatttattttaggttaattgaacttatactaattttagattaacttaaatacatataaatattaatatattattttgtaacattattattttttattgttatttttaatattgagagtatgttcaattttaatatttttaatctttatatttatttttctcaaatttttaaaagtttaaatattattttttttaaaaaaattaaataattaataagtaatttactttaatttataaaattttaaaaatacacataacaaaaataaaaattaaaaatataactaaatataggtacaatacaaaagcactcttattttatgtttaataattctatttatgtaatacaaaatcacttaatttaatttgacaacaatatttttttttttttatagaaaaacaatattttatttaggaaccaaaagaaatccaataaaaattctaaaccaaaaaaaaaaaaaagaaatttaataaaagtaaaataaatatatctattctatataaaatgtagctatataacagaattcttggtttatgaaaaattatttggtgactttttttaaaaaaaataataagaaaaaataacaaattattagatgttgccacgtaaaggggtcagcatccatgtagttagttaaatctaaata

SEQ ID NO: 351930 - DNA, 1177 bp, Cannabis indica
atcaaataaagttcaagactttattgtgaagaacataatctgccggctaggactgccttacaagatagtttcagataatggcaagaagtttgacagccaatccttcattgacttttgtgcgaaccatggtatcatcaaaagtttctccgcagtggcgcatcctcaagcaaatggtcaagttgaagaagtcaacaagaccttgaaagatacacggaagaaaaaacttgaagatgccaaatgaaacaagccagaagagcttcacgaagttctatggtcatatcggacaactgagaaaaatggcaaccggacagacaccattcgcaatggcatacggatatgaagctatgctacctgtagaactcgagccaccttcccatagaagattgatgtacaatccatttaccaatcacatactactagcagaattacttgatgaaatcaaagagaaatgagccactacaaacttgaaggctcgatatttcaacaaacaagtgaaggctcgaaaattcttcgtgggagatatggtcctgagaagggtattcttaaacattaaagacattacggcaagtgtacttggacctaactgggaaggaccatatcaagtggtcaaagttctcgaatccgaagcatacaaattaggtatgtatgacgatgcaactcattctagtatcacggtattcgaatggggaacatttaagaaaatactaccaataaagtaccaggtcggacgaccacattaagtactgaatgaacatttactcctaaataaatgacctgttgggcggactgcgctcaaaggttttgacaaaagaaacaaagtactcagatcaggtgaccaccatttaaagtacagtttcttatttctacaatttgttttatttcatgttaagctgaaagatcagattggatcaaatagctcagatgtaagttactacggtaaaaaataaatttttcgatcaataaatgaataaagatagttatttcaaaattcaaattgagtcaaaattatcaacatgtttttaatttaccatccattgcgtataaaaggtttggtcaaacccaaaacaccgaacagatgaaaaatatacttgtaaaaacaagtgaccaagagtcgtacgtctgctcgctcacttgggggtcatctatacctgtacaaagcatttggtaaaaataaaac

SEQ ID NO: 351931 - DNA, 662 bp, Cannabis indica
tagacgatgcgatatattggtgccaagttgtggcacgggctcacctaattaagtgatgcaattatgtaccgagggtaggtacgggctcgtctaattagatgatgcaatatattggtgcttggtgaggcacgggctcacctgatcaggtgatgtaattatgtaccggacgtaggtacgggctcgtctaattaggtgatgcgacatattggtactaggttatggcacgggctcacctaattaggtgatgcaattatatgatatataggtgcatgtttttggcatgggctcacctgattacatggtgcagttatgagatacatgagtgccacgctatggcacgggcttgcttgattaggcaatgtaatacaagattatcagattaaagcatcgacttgcctgattaggcaatgtgatgtaatgaaaatggttactttatgagataacataaacatatatatataatttgtatttttaaatgaatatgattcatatttttggtataataattttgtattaccagatatatgtatattgatgcttattcatggcagatgccagtagtgatttggattttatcttatgaacaatgcgtaacggtttgattctgattgtgtataaatgataatattcgaataataaactatatgattattattattatt

SEQ ID NO: 351932 - DNA, 996 bp, Cannabis indica
  modified_base (829)..(829): a, c, t, g, unknown or other
tcaatattttagattccgaccagacccggatctaaatctctccccacggccctgacgttgaattcggtctctgacccaaacccgaatctgactcttagactcgacttaaataaaatcaaaaaataaaaataaaaatagattttacagaacacacttttatttttgtttttaaaattgaaaaacaacagtggttacagaatacatttttattttttaaaaataaaatttttatttgtgttgtgattaaaaaattaaaaaataaaaatattgccaaacgacactataattaaattacgagtattgctattaggcaccagtggtgcctagcaccttctcgacatgtcgcgttgcgattggctaacgatattctctaaaagctattatattaaattatatgggaccccatacttagttgaatcaataataatattaacacgagtgctaagcactactagtgtcctttaaattaatgctggtaaacgagtttcatggggtcaaatattaatcacataccaccaaatgttatcatgaaggtggtcccaatagccacatgcataattttgtcaaaataaaaaatagtaaaaatgcaatattgcaagggaaatttgattttttatgcttacatttggttaaaaatttttttctaaacaaataataactaatatttgtaggatatgacaacttttatgatatccctaaaatactcccatttacatcaccccatttacaccattggcccacccatcgggccacccatctgaccacccatcagacccatcagaccacccatcggaccagatttgcttacctaattttttttttttttttnttttttttacatacaaagtagcatcaggtgaccatcggaccccattggacttaccattttttttttaatgtttttaacattaaaaaagtattggaaaatttgagtaggggtattttaagttttagataagtggtcatatattttcaatggtgatatgtattagttta

SEQ ID NO: 351933 - DNA, 933 bp, Cannabis indica
ctaaaaatcgcagttcttggcgataaggtggacctcggcagtcaacatcatttgtatgtcagattctatctgagagagctgactcgaaggagctgtgaaccccattgagtggtgtctggagctgattaatgaaggtaccatgagcacgccttcctatagcgagatgggtgcctcgctattagttgtttggatttacccgattgttatacttagtctgtataagttgtattatacactaagtgtcttaccagtcaccatgtctcgtctcctaatgcgtagtgaggttgatgtctcaccttgtacatttaaagtcgtatggtttctcgttaatgtacgactcaacagttggtgtatcttcatcttgcgtaaaacctttcaatcgacaagttgtaaatatactctgtcaattctgcattaatgagttattcctttttcaaatataattaccattacattcattgactcgtattcttcccaatttgacacgtgtcctcctttgaaatgatagctgaattttgggtataacaattacccattaaaaagtatttttttaataaaaagtgctttttaaatgatcacatagggtatattcatcataatccctttttaaaattttgaatgcctttgattttggcagcttcattgcttcgagggtcattattagcattaattttactcgagtgatgatctgtcttacgcctcattacttcgtttagttcaacatctagggttcatatattttttttattaggcatattttatgttagctatattccatagacccctggtttggtaaatttcatcgagaaattgagattatcattctcctgtggagatgtagttggaattatattttaccaggaacttagatctactcacaagtatgttgatttaacaacctaaaattgaacttctaaaacgatgaactaaaca

SEQ ID NO: 351934 - DNA, 662 bp, Cannabis indica
aaaacaagaagggggaaaaattttaaacacaaaacatcatacgaataaacacaacaaccagaaaaaactaaacaaaaattgaaaaacaacataacccaacttacatccttggcagatttcgaagattttgctctctttgtcttacgagactcaatcttatttggaataggtcttttcttagaaccagatggctctgcaacatcactcattcctttcttcgcaatgcgcttcaaactcatcttaggatcaactttagatgaatttgtaggaggtttcttagaaattttagaaatttttttagctggggaaggtaacttcgaacccgacttagtggtggccatttatagaagaagagaagacaatgtgggaggaacaacttacagagcttatggaagataatggagatagtgacatagatgagaggttgaaaaatcgtgggttagggctttggacgggatgatcgtgggttgtggtaatgaagaaccaaggaaagagaaacagaaaataaaaaaaaaaaaaaaaaaaaaaagaaaggaggagttatggaagtggtggagtgtaagaagagagaaaaccatgacataagcatagggataggtatatttgtaattatgaaacttttgaaaatgtaaaattaaaaaataaaacttgtataaaagttt

SEQ ID NO: 351935 - DNA, 424 bp, Cannabis indica
atggcacaattttattagtcaatataagtaaattattttaaaaattatacatatttttcataaagttgcataaagtaacttatttttttaaggaaatatactcatttaatattttgtatttttgtgaaaaaaaaaatatttggtaccttgtgttttaaataatgctcagttgatatagggttagggtcgaggtaggggtaggggttcgtgttcggtgtaccaatctaggtcaaggttcggatcggatcggggtccaggttgcaagatctagattgacgtttaaagatttttttttatttataaaattttgattctcaactaaaaaattgaaaaatgaaaaaaaaaaaaaattaccctatatactgtttttaacttttttttcaaatttacgattttggtctctaaagtggttgcaatgctagtt

SEQ ID NO: 351936 - DNA, 607 bp, Cannabis indica
ccaaacaaacaaaataaaatgacaaaaaacctcatttcttacatgtataaaactagtacaaactgggttttataaaatgcatatattttcttgaattttgttccagacattcattatcaaaggtgtttcagaaagaagaacaaaaaggaagaaaagaaaacacgaagcttaccgtaaaaggggacatcgatccctaaccgctcaggtgccggcctcgggtaccctttctttcccattaaaatttcttgcacaatcgtcacttgtatcagattttgccctaaattgtgagtgtttgttcgtttttcagttcactgtgtgttggtttctttacaggggagacttgagacttaatggggtttattattagaattttaggcttttattcaacaagttatttttttttaatttcttcccttttcttattttgttatttaaaaaaaataattatacaaaaagaaagggatcccgttatttttccctccaacctgagtcaattacaattttaacctttaatcttatgccacatcagcaaataaacgggagtctgttaaaaaacccaacagaaggggtacaataatatactggttatatattagggagatttttt

SEQ ID NO: 351937 - DNA, 888 bp, Cannabis indica
catagtacatttgtgtcggagatataaattgttctatagtaattaaaagtgaaaatttccagttctatagtagagtcatgatgaattaataaattagaatttacgaggtaatttataacatttattgaaagtttgattatataggctcatggttaccacaaagcctgtgataatatcatcttgtagaaatcaattaattggtttggttaatcaattaaaattcataaactaactatgtcatctttaagaatttacactaattataacgccctaacccgtaaggcgccacatgtggttttataaattatcttataataataaattaacgatttacaaaaagtgaattaattaaaactttagaaactaattaaagtataacataaattttttttttttttttcaaaatattagtggattcagggattcccttgattacaaccttttactaaactgccactgtattagtttattacaaatattaaagtataatcaaaatattataaaagctggatcctgtgaactgagcgtaaaagacagtgggcttgatatgtacattcgccaagagacctataacttatggttgattcactctttttttcctaccaaaaaacacccgtgagtcatgaagactcaacaagaaaagcgaaaaaaatacaaatatcatatatagaataaaattctaagcagcaataaacatacactaaaacatataattttaacaactatttacaatataaacaaatgctagtaatcaactatttgtctaataaaacaaaccaatataaagtatcattaaccctcgttaccaactagttactaatatcactatcgttgcctaataaagcaaccaataagtaagaaacctaacaacagtttcaaattagagta

SEQ ID NO: 351938 - DNA, 819 bp, Cannabis indica
cttcatataaatattaaatatactactattttatatgttaattaactatggctataactatatgataatttgacaaagtcctaaaaaaaatttattttcatttgatcatgtgctgatgggtgtttttattaatttattactttggtttctagacagcagctgagactgtgagttgtgcagttcaactcagctatcttcgagaggattcgtttgtcttatattatagttaagtacgcactagctgaatatacaagtcactattttgaaatttgaaataatatttaaggaaaaaaaaataaaaaaaagaaatagctggcaaaaaaggggaatcacacaataaacaatagttatcggcaatggggtatcggtttccttgcgcaatgagaagatatgcatcacttctttccatttcgtatcgcaattggatcattcaagagataccaaaacgtgttggttatgcttatatacatgcatcttcttagtgaaacaggatctcccacccagattgtattttcaagagcattgttattagtggtgtttggtttgatgtaatataatagtaatagtaatagtaatagtaatgtaatggaataagaatggtaataggaattgattataatgtttggtttgtagttagaatgaacactgtaatcaaaattattatgtttggtttggcatgagaatataatgaaataaaatgtgtattgactaaaataaccctattactttttattataaaagggaaatttcactatttgcccttaataatatacctcatatcaaaatttatacctttccttaatttgtacaaatttagtc

SEQ ID NO: 351939 - DNA, 554 bp, Cannabis indica
gtcaaaaaagatggcgaaaaaaagttctccaggttgcataatgttttgactacatgttcatgtaatacatctaacttatccaattttaattccttcccacacaacttattaaagaaatgcaaacatgtgtcaaacactctcgaacatttttcggcaagactgatctaatagaaattggaagtagatgttgcattaacacatgtcaatgatgtgattttagacccattagtttcaattcagcttcatttaccaagtttttgattttagacgagtaaccatcatgtacttttatatttgcatatgatttgcaaactatttgtttttcctttttaaacaaagtgaaacaagcagaaggtaaatataatcgtttacctttcttctcaggtgccaaagattgtcgtatacccatttcaacgagacctaaatgactattcagaccatccttagttttgcagggaatatcaagtaaggtaccgataatactctcacacacattttttttcaatatgcatgacaaccaaacaatgtcgaacaagtaaacttttccaatatgg

SEQ ID NO: 351940 - DNA, 1456 bp, Cannabis indica
cttgtcttttgacatggtgtgaaagttttcttgtgttggtctggttactgttttgctgatttttgtctcggtttgttgttttttcgatcatggctagttcaagtggggtagcaaatggaggtaaagaggacgtctatagttttcagattgaagaagaagagttggcaaagttaacagtagggaatgagggagaggaggaggggattgatgacagatggtgtcttgtaggaagatttttgtctaatcggatgatagacttcgataaaatacagaatattttggcttcgttatggcaaccaggaatgggaatgtttgtcaaaaaacttgatgataaccgattcttatttcaattctaccatgaagtggatattcaaggagtcgttaatgggagcccgtggacttttgatagaatgcagttgatcatccaacgtttgcctgtgggaggggatctgaattcgcttcagttaaatcaccttgatatatgggttcaaattcatgatgttaaaccagagtgtatgaaggaagggacagttcgaggggttggtaatactctggggaagtttattgagttggatccgaataattttataggtgtttggagggattatcttagagtgagggttactcttgatattaggaaaccgctgaggagacgtatgaagttaactcatgaaaatggtagttggttctgggttcattttaagtatgaaagagttccaaccttttgtttcatatgtggtttaatcgaccactccgataagttttgtagcagattatttcagcagcctttagactagattgtgaaaccatatatggtgattttataaaagcgttgccacaaagaacttacaagaacatcggggcaaggtggctccaaaatagagggtggcagccggtggggataactggggacaatgcacctggacaaagctccaatcagccgaatatggaaagaaatccttcagttgacttggccgcaagtcatgcccacggaaatctactgcataatggtgagaatcatgacatggataacattatgatggaaggtgttcaagatgaggaattttcgagtattaaagagggagaagtcaatggtgctatatatggcaagaataaggaaaaggagttattggatgaatacaattcttgtgtggttatctatgatagtaagaaaaggaaggttggtggagagggacatttgggtcacgtggggtaggcccaagatggtagtggactctcaaaaaactcatcagtggcgggccttggttctggggctcgccagacattatgaaaatattaagctggtgttgccgagtgaatttcgcaacaccaaattatattatttgattaatacaaaagagaattttcagagaaacgacaagtgcgagtattcaacctggaacggcgagtactcgacaaggaatgtgagaacactcaacaaaaccggaaaatatca

SEQ ID NO: 351941 - DNA, 569 bp, Cannabis indica
tatttttgccaaaagataatttttttaataaaaaatccaataaaataaaatgttaaacctaacatattcctaatcttataattttaattgacaaaatatattttgaaaataacaaatttgaaaaagatatgatatggttagcaaattttgaaattagtacaagagtatttttaaaagaatatttttaatatcaaagtaagatcatttaaaattttaataaagaaaataatatctaatcttataattaaaataaatagagtaatctaaaatttcaaaattaaccataaggctattttgtgagaaatcaaacttttaaaattcaaagcctactaatatctaaaactaaatttaattaattaaaaaataataaaaattagtttgattctgacaattagatttttaatggaaaattcagattctacacaaaattttaacaaaaatttgcttttgtttcaatgtctgtccagacagggcttgtccgagaaaccatggtcagcaatgtctgaatgcacgtgcgtgtccgagcggtcccaagggccgtgcgcgcgcgtgtgtgcattcaaatcttg

SEQ ID NO: 351942 - DNA, 668 bp, Cannabis indica
tggtaaaataatttccagcaccataaagatcctacaactcgattaggcaactaaaacttgctacatgttagatcgcttaaaaaactgtaattcagtacgacactatgtggtcaaatttactcgattattatggatcaagacctaaaatgtgcattaaatattgtacacctctcctaattaagtggtcttttaaaatgatagtacgattcgattaggaaactgaaacttggtacatggtggatcactcaaataactatagttcactatgatactgctatacccgaaattcggctgccatctcagtggaggacacgtgtcaagataaaaagagaatatggatcgagagtatatttgtgacctgctatattagcgagaaaccatatgtcgatgaatgcgaatagcgaggcatcaaggacagtacacatcggaagacaaaagcaacatctatcaattgaaaaagcccttagtgtataatttacaaactaagtgtaacagtcggatcggctcgagaccgagtaagcgaggtgcccatctcactatgggaagacttcctataacttcatccagttacgtcagcgaggcttacaaccctggcgagtcagaagctaacattcaaatgagcttcgaaaaactttttgtaaataagaaccgcgatcgtcacaagacat

SEQ ID NO: 351943 - DNA, 776 bp, Cannabis indica
gctttatggtacaggtaaggggaaagcaaaggttgagcagcctcgagttcgaggtcgtagcagcaatgtacatatcggtcgcagtggctcggcccagtgaacaggatgctccgttttgatagtattttgggattgcaaaatttatgttgtaaaagtactaataaactagcttgtaatattttgaaaacagggggtccccgtggttctcattacttatcttttactataaagaagtttttatatgcttgattttaattatcaagaatttaattacccacacttttggtataattatatagtacttaagtaagaattttataaaaacacacgtgtggcgtccctgttagacagggcgttacaattttgttattgctcttgctcttactattcttttgaatcttgagagggcttaagagttgagttgatgcactcagccacgaagtctgcaagagcttgaccctttatggctgcttttagttggtatgtgatctcgaactggccaagctctgtggcccatttgagtagtcggccagaagctttaggtttctacaaaacctatcacagtggttgatcggtgtacaccttatatggggtgtgcttgaaattagggtctcaactttctagaagctaagagcaagttgtaggtcagcttctccatgagtggttatcgactttctgcatcgactagccttttgctaatgtagtatttagggtgctatacactgccttcttctcttgtgagtgttgggttttgtgccctaaataaaacccattac

SEQ ID NO: 351944 - DNA, 878 bp, Cannabis indica
acctcgcatataaagtcattgaacaacttgtcaacttccttttttagtgcccttgcctctcgaaattcaagggtctccttatctgtctcttcgctgggtagtttggatcaacatttaaatgatggcagataatattgggtcaatcactatcatatctccatggctctaggcgaactaatcctggtttgcctttagaaaacttattagtttctatttgagatgctcgtctaggttattcccaatttgtacacactttgtgggatttcctaggtcgatgataacctcttcaaatccctcaattggtttttaataagttcctctcatcttgaactcgggggtcaagatcttcacctttcttttcatttttcttctgccaagatagccatcaactgatgaccgactttcctatgctacaactctacgcgatagcaatcgtgagccaacattcggtcgccccacaccactccactccttctagtgtttcgaatttcaagaataggtgcttgatcgaactgactgcccgtagtccgatcaatgctcgacgacccaacaatatgttataagccgatggcaggtcgacaactaagaagtcttgcataacagtggtagataggggtgcctcgcctaaggttaatgcgagctcgattatgcaaagacttgcaatgttgtctccggtgaatcggtaaagattcaccatacaaggccttaatttgggcttttctagccccatctttcgtaaagtttccttataagagatagttaccaagctcccattttctattaacactctcttgatccttttattggcgagtttaatggtaatcaccaatggatcgacgtgaggatatctcacgtttttctcatcttcctctgtgaat

SEQ ID NO: 351945 - DNA, 609 bp, Cannabis indica
agttcagttgcattatttatgttcttcaatctgttagttaaagtcgaccaatagatcttctcgtgacatatagattaagaatatggtagttcaattgagtgggagcgctaatcatagatacgaaatctatagcttttatctggacataaaatgaaatgatgatttcctatgagcttagcataatagagataaatggttgagtactcattttagtgattatattagttcattgaaatatcatttataagtagctaagtattttaaagataaaatatattgaagagtgtaacggtaaatttgtccctactcagtgtagatcatctatagagaatcaatgattattaggattataacaaatggataatccatagcattttttatatcgtggaacatatagagctctatttaattaagagtgcaattccaaatctgtagtgatgcaaggaggaattaataagttagggaatttacttggtaaattctagatctacttattgaaagctcggttatataggcccatggtccccatactagttgagacattactacttgtaagactcagttaattgattttaattaataatcatatataattctaaattagactat

SEQ ID NO: 351946 - DNA, 1162 bp, Cannabis indica
ggaatgtagcagtccaagtcgcccacgtatccatcctggtcgagagaccgaaggcgcgcctcagtaaccttggacagagggcttacccacctggcgcccaaggcaccctgccttctatgaggaacagccgcaataagttcctcactgacgtagtccacgccctcaaccaagacgtctctgtcagcatcgactggctccccagcctcgttgactccccgtagtttgggggtgcaacctctgcctcttcctcctcctcggaggaacttccaggatgtacatcgtcctgcccctcaatctcttggacctcagcatccccttcatgatcctcctccatctagatggctggatggtattcagcgttgggcaaagcagcatgccgagccacttgagggtcagacgcgtcagctagacgcgtagttttctttatacgagccatcattctatggttgggtatagggtttgaagaatgtccttcgctagaggaaggtggactagaacaaagacgaggattaccctcgtgtagaagttgaagtaggtcctggtcaatccgatgtccgttttcccaagactcacctgaattcatctaaaaaagacaacgcacaagatgagtggttggtcggaatatcaaacgataaacaagcaaatatgccaactaggagtacccaacaaattaaagaatgattatgtttaaataaaagtcagaactcaagaagtcaaaaattttctcgagttagggcaataaacttcacgaagcttagaataagcaagatgaaagatagatgttacgcagttcagaaacaagtgttatgactgtaaaatcgcacgaagacatgataaagaagaatcgcagaggtttctgggcctagggtttcctatacatttttctacaacatagtagaggatgcatttgatatataatatgcaaagataagcataaaggaagcaagagacttactcgagggttagatgtctgggtgcgagcaacgtcaatccaacaagtagtttttatgcaggcgctttggaaacttagtcctaagtcatcgaaagattacaaccacattctttatgaatctatggcacttgatcttgttcatggtggttttgacaagatccattctctgcaaagagtcaatatgcctatatccactgaaagtaagttcat

SEQ ID NO: 351947 - DNA, 820 bp, Cannabis indica
tttttaattgtatcactttcaaataacatagaaaaaacttagcataaaatttagtatacgtgcctcgcacgtagctttttgctagtatatatatatatattgggatatgattttgtcccgtgatgtactttcacggaatatattctgtggtacattagatgggtctcagggtacattaaatgagtgtcagggtacgtttttactttttaaccctaattacccctagatcaatctcagtcgtcagatcaaataactccctcatctgactgctgccgtacatcacagattacaatccgtgaaagtataataacgagacaaaatcatatccctatatatattttatctaagagtttgtttgactttataatattgttcagtggaatcgcgaaccgacttaatagtaatctaacttttaatattaattatacccttgtcccatgaaaattgtctaattctttaatttgaattacagaatattgttattttcccaagtcaagaacatatatgatctatattcaaattagtcaaagatgcattaactctctaccaaaaaaaaaaaaaaaaactaggtatctagacaacatttattttaaggttaattagcaatttttttccctaaattttgacatgtactaaatatgtcccctgaactttttgaccgttaaaaattccctctgaactattaagattgttagatttatggacttttatctaattttattaaaaaaaatactaacatggatgaaagttcaggggacataatttagtacatattaaagtttgaggggcatgatttggtagatatcaaagtctggggagc

SEQ ID NO: 351948 - DNA, 572 bp, Cannabis indica
ttatcaatcgttatattatttttttttcaattctatttttttatataaatttaatcacaccaaaataacattgatccaattactaaaactctatcatatgtacaataaataaattaattaataattataatttatcgagttcaaaataattgaaaaaattaagactctaaaatattaatttatttttcttgtgttattaagagttaagaaatgaaattttgaatagacactcactattaaaaatgttatataaaaatgtcaaaatttaaaatttgatataattttataatttaattattattaaataaaatacaaccgcacgcgaagcgcggtttgtttcctagtttaaacatatgacactaacgtaatactaaactaagtattaacgtgtgacacatgtgacatcacacatgttacacaataacacggttatttagttataatagttcagaaattttattgggttgaaaaaaaaaaaataataaataataattggtgaacaaaaattttaaaaatcctatttgtcacttaaaaaactcaagtttttttaatattatatataggctaattag

SEQ ID NO: 351949 - DNA, 846 bp, Cannabis indica
aatatttatcaaactttcctttaaagatattatttctacatgcttactcattttaattctaacttttaaattgttaaagaaaatcaaaacaaataatttcaatgcaaagcgacatcaataatatggatgtacatagaatttattaacaaaaaaaaccacaaagttttcaatctattttttattattttacaagagtttttacattcgttcctctcagaaaaatacacaaacatattgtaaactatctataaaaaattatcatcaaattaataaaaaaaaatatatcatcaacttattcattataatgggatcaatcatgtcttttcattttttttttaatatttatcaccattagtattaatgcaaaaaaaattatcatcaaattattcattaatgagatcaataatgtcttttcatcttctgataaatatcacaattaaaaaatgcgcatacatattgtaaactgtaaaaaaaaataattcatcatcaaatcatattaatggggtgaatattactcaaaatattgaaaacattgatctacttttttaatttatatgtataaaatttttgtaaaaaaatatacatatatataggaaaaattacatgtgctacttaataattagtattattttcataaaaatttaaaatgaaacagaattaattactacactacttttttagtagtaaatttactacgaattattgtaattaatataattcaatttattttttattacatttaatctacttaaaaactaactattatatgtgagaattgtagcttttgtaagcatctgatgctatataaataacattattattattattattattattattatttca

SEQ ID NO: 351950 - DNA, 646 bp, Cannabis indica
actaactgttaacgcagattttcgttaactaataatgagcctttttcgtaataaatttaacacagatatatgtaggaaaattaataggtataataattataataacaccaaatattttatgtggttttgtagttagatctgtatactccacgagtctatcttattcaagatatttctgagtatttgatacaatattacaattagtgatctttttctctcaaagatttgccatctctttttctgtagaatctgcccctatttataggagtataggttgacagttatttacatttaaatttgaactacataaccgtttcatgaaacgtgggatttgatcacatttcatttaaacacgtgtagataacaattgagaactgcataaccacttatcattcttatcttcaaggcggttgacgctgacgtgggtagtggcatctcgccttggctatagatgatcaatgatgacttggctaatcacatgccttccagtataatagcatgagcaccagtgtactaagaaaacttaagaactgctctttgaccatatggcctcacaaactggacaatcatgtcctacatatttccaagttaatacactttagttattataatgtgaaaaatacgctaagtgtttaacaaccgattc

SEQ ID NO: 351951 - DNA, 650 bp, Cannabis indica
ttaaggcagcagggtcttcttgcagtgactccacagcaagctcaggccgttgtagctccagtggtgccagctatgcagcctgttgctggcaaccgtatggagtcgttatacgaaaagttctgtaagcaagcacctccagtgtttctgggaggtccagatgtgatgaaggctgagcattggctcacggtgattgaacgaattttgaattttatgggggtggttggtaatgatcgagtgacctgcgccagttttcagttccaggaagacgccctagtgtggtgggaattggtgtccctcagccgggatgtcactgttatgacctgggaagaattccaggagttattcaatgccaagtattacaatgaagctatccgtagtgctaagcggaaagagttcactgagttagtgcaaaccgaggggatgtcagttactgaatataccacaaagtttgaccgtttggctaaaatcaccgtgtgtatcatgccaacagatttcagtaataaagaaaagtatctggccggtttgaatgtgaagattacacatgatctggtgattagtactaatgaagcaacatcatatgtggagatggttgaaaaggccctgcgagccgagggtgcggtgaaattccttcaggagccccgagtgactcc

SEQ ID NO: 351952 - DNA, 598 bp, Cannabis indica
tttttaaaaaaaatattacactttatgacatcttatcatagtagacacgcctactttcagcgtctactattagtagacatgtaaacatatatttaaaaaaaaataatttaatagaaaactattaatgtctctcgttggtagacatacaaagactttaggtgtctcaccatgggagacacataaagaaggtatatgcatctctttatgggagacaccaaaagtctttctgtgtctaccttaataagacacttatatggtactttcaatgtttttggaattcatgcctcacattgtcagaattattttaccaggatctagatttactaccatgtatgttatttaacatcctaaatatgtatttctaaaacaatgtaaataaacacatataaagtttgagaaaccttatattgggtgcagtggaattaaatgactcattccgctcagatctctaacccttgtatcctttctgtagcagagtatcaccaagatctgagccccaaactccttccttgtgtttggattcttcacagtcttacatattatgattgaggaccaacttgatgtgtgtgggcacttactcaatcattaatggctgaat

SEQ ID NO: 351953 - DNA, 519 bp, Cannabis indica
attcatcaaatccataaaagctgcatgagcattggtcagtccaaaagacataactagaaattcataatgtccatacctagtgcggaaagctgtctttgggatatcctcctctcgaattctcaactgatgatagcccgatcggagatcaatctttgaaaagacacttttcccctgaagttgatcaaaacgatcttcgatgctaggtaaaggatatttattattaattgttagtttattcagttcccggtagtcaatgaacatccgtaaagacccatctttcttcttaacaaacaatactggagctccctagggtgacacgctgggtcgagaaaacccaatgtcaagcaacccctggagttgaattttcaattctttaagttcttgtggagccaaccagtaaggagccttggaaaccggttctgctccaggtgccaagtcaataacaaaatcaatttctctctgaggtggtaaacctggaagttcgtcgagaaaaacatctagaaattcccgaaccacctt

SEQ ID NO: 351954 - DNA, 510 bp, Cannabis indica
ttgatctctgcacatacctcattctcctcatcgtcagatcccatttcctgaagctgagatcttttccctagtctcagggaatttcttaatatcaaaaagaggttggcaccaacatcttttggcataggtttggctcttcagttggctggattctctgatagaaaccacaccaattcccttcctagcttcatctgcagccatgccaaatttcctcaggaattctttattagcttgaggaggacctttaagatcgctcgcaagatctttacccttagggatcacttgtgaggatcacccatggcaggctatggggttcccttggtttggattggttggaaactcctcagccttagaatccatcgtttccggctccagttgaggattgaagtctttaggaacaaatggaaaatggttggtgcatctgggtattatgagtttggaagaatgaacttctgaactcagaagggacattttggcaggaaagagatgatccattctgaaaatggatct

SEQ ID NO: 351955 - DNA, 641 bp, Cannabis indica
ttttagcgcttggtacctcgcggggtccattttgtggcgcttctgtcggacacctcgcgcttcggggtcaatgtcaagcgatgaaacatgacctgcggagatataccgaccatatctgaatgtttccaagcaaaaacatcaagattttgtttgagaaaagtcattagttgctctcactgctgaaaagtcaatttagaaccaattttcaaaactttattattatctatggggtctataggtacctcaataatgtcttccgaggcttgggccgctgtggcatgatcgaggatccttggatccagatctggtccatccgtgtgcggcacctcttcgatcctaaggacctcttggcgaggaggtggtgcctccaataaatagatgacatttattgacttcttctctgcgagtttgaccgctgcattgtagcattctcgcgagtctgactggattcctcgcacagaacctactccaacgggagtagggaacttcattgtgagatgatagatcgatgttacgatcttcatctccttcaagattggtcgaccaatcacggcattgtatgccgaatactggtcaattaccgcaaagtcagccattgacttggctgttacaggggcggttcccaaggtaaccgggagttt

SEQ ID NO: 351956 - DNA, 650 bp, Cannabis indica
ttaacatcctaatatgaacttctaaaacgatatgaaatagacacatataaagtataagaaaccttacagtggttacagcggaatataatgtctccttccactcagatctgtaacccttgtatcctttctgtagcagagtatcaccaagatctgagtccgaatgttcttctcttgaatctggattcttcacaaccttacacactatgattgagataccacttgacgtgtgtgggcactcactcactcaatatagggttcagttttcataagagaggaagagagagaaggtggcggctaggtataggaagaaggcattgagtttttctctgaaggaatgagatgcatcatctttttccttaagccatcactacctatttatagcaaaccacctaggattaggttagatttatttggaaataaaataataaaaaaaataaattaatagactacatagtggccgaccatagatatgataatgtgcgctactttgtaattttgccattttgtcatttttccatcttattttctcaaaaacgccaattttccaatttaaccacttaaatgctaattctaattatttaataactagcttttctctcggttttgctctagcagcttgaagctggagctatggcgaaaactaggtcaaa

SEQ ID NO: 351957 - DNA, 593 bp, Cannabis indica
ttaatttttttcatattttttctagaattagaagcaaattacttaaaaattatggtataactatattagttttgttaaaatcttttttattttaaatttatgtcaattcttttaatttttatgggttattataattttttggtatattgattttgtggcatagtatatttttattttgttgtatggtatattattattcttagatgatatttattttttattttattatgtataatagtgatatataattttgttagtattaatacaaaataattttcttatcatgctatatatatttaattattattattatattttttaattgtatgatatattatttatttttattttattatatacaatgctggtatataattttattgtcatgatatatatatatacatttaaattaggatatataatttagttagtatataatacatatatattagtaatatacatatatttattattattgttagtatatatattttggtgaatggtatagatatttttttgttaaacggtatatcattttttttaaaaacaatatttaagttctattttctattgtacttttgttgacatgacat

SEQ ID NO: 351958 - DNA, 572 bp, Cannabis indica
ccaaatgccattaaaattcttaggataagattttacgaacgtagcaatatagccacaagcactcctaaccaccctctccaacatgaaaccagatttcagatcgtgaatctcaacccagaagtcgatcttgtgtagtgtcacaaccttagggtcttctcccttcttcagtcgatgaaagacaagaggacacctattaaatgtccaagggctcccgtctataacagtttggacatccaattcatggaaaaactgaaagagatatctattcatacccaactctttgatgaaaacacccttacccggctgccaaagtgaggccatcaaatgcctcattgcattaaaatccaccgccctacccgtaagaaatttccccaccaagcaccatcgatcatcaaataacgtttcctcagcctcatcatccccaccaatcaagattccttcttcctcatcctccagacttatcagagcatattgctcgttcaaatcaaacgtagcatgactactagaagccatgaagaacaaaagacaaacaaaacaatcttaaaaacttgagagaacttttaccaacatgt

SEQ ID NO: 351959 - DNA, 648 bp, Cannabis indica
gcttggttcgaggaaggtctggactgatggactatggccgagcgattggaggcatccatgttgtgttggtcgatttggaagcacagaaatgaactggtttggaatgctaaaaaaccggaggtgagtgatgttgtaacattagcaaaactaaactttattaattggtataatgcccaaaagaataaccagccttctcatgagattaatggctcggttgatacaaatttggagcatcggacccctcctcaatttcctacaataaaagttaaatgttgatggtgcaattttcacaaacgaaaggcgttttggtattggtttgatggcaagaacggctgctggaatagtgttacaagccaagacgatgagcaaagtgggtattttgaagccacatgtggttgaagctattggcatcaaggaagcattgagttggattaaagcaaatgcttggacaaatgtggtagttgagtcggattgcttaagagtcattagagatattcaaaagtttaaatatatggcctcgccttatggtcatattatttctgaatgtatgactttgtgttcgggtattgtgggtgtttctttcaattttgttaaacgatctgctaataaggttagacatgttcttgcgcgatcttctctttttgaggc

SEQ ID NO: 351960 - DNA, 1577 bp, Cannabis indica
taaaataatttccaacaaagtgcacaactttacatttctcattttcgacattggaaactcgctcggaaatgaagagttttgagtctctcatttctgcagaacaacgacatctccgagaatcggtgaatgactttgccagaacacatagactaagtgatgtgaaaatatcacttaggcatcttaaagtacatcccctagacgtcatatgtcaacttgtgcacagggatgtcaacttgaaaacggatataactcactcaatattgatctaattgacacgattcaacttgcgtttcaaagctaattcaattctctatcaagtcatgtctcacacttcaatcgcaattttaagttatcaattaaatttatagtcagataggtaggcagttaattacatttaaattcgaatcccataacaatactccccgaaattgtgggctataattacgttctacttaaatacgtgtagataacgttagaaaatcacatagctgtgacttaaactatctttaaggcggtcaacgctaacaggaatggtaactcccttccaaaggtatctcgccttgtacatagatgacttagtttattcatatatcttccaccaatggcatgagcaccagtgtactgagcaaacttaagaactgctctttgaccacaaggccttgcagattgaacaatcatgtcctctaagttctcaagctattacacttagttattataacgtatattatatgctaagtgttttaataaccaattcacctcatcaatacctctttacatgcaacgaggtagatgcctcgttatgcgttgtccatgtctcccttgggattatgccttctgagacaagatagtttctcgtcaatacatgaattgatagtttttatattcttatctcgcttaatactatacagtcagcgagttaagaatttactctattaattccacatttaatgagttattccattttgcatttaatgatataactatcattatattcgttgattcatattccttgagattgacacgtgtcactttctaagtaaccgaattttgggtataacagtaggatcatctatatttgaacatatggatgtacattcaagggtggatatgagttaaatttaaattctaaaacaatcactctagattataccttgtataaagaaatttgaaatatttgagaaatttcatgaatttctatcattgttgaaaaatattgaggtaagtggttatagatcttgcaaactgatatgggtggagaaatatttggttatgaagttcaaagatcattaagttgaacttcaaattgtatccaaacttacccccccccccaagaaatttggattgaatattgatgaaaatgaaaggtctatgattagttactagtagctgcctaagtccttctagagaaatatcctagtgataggaaaatctcagaatgatggaatggtcatatacttagggtacaccattactagattcatgatgtcttgatcatgaggataataccattaatattcctagacagaaagtcacggtacttcgtcgtagtgagagagtttcaaggaactcaccttgtt

SEQ ID NO: 351961 - DNA, 640 bp, Cannabis indica
ttgcacagcttacccggtatttccccttatggatcacgagactactgactgtcacaacttgaacccagacgcttgattccttgagtaagttctcgatttcctttatgtttactttgcacatttactttctgaatgcagtttcgattttgctatagaggagatgtagaaaccctaagtttagaaactctgcgattttcttttattacggttcatgagatttcatcgtctgtaatgcttatcttttaaactgcataatgcttgtctttcatcttgcttattctaagcttcatgaaattttttgcccaaactcgtgaaaatctcaagcttcctgagttttgacttttcgttgaatattctcattcttcaatctgttgagtactcctggtcgacatatttgcttgttttgatgtttgatattctgaccaaacactcatcttgtgtgttgtcttttgttgatgaacccaggtgagttttggggaaacgaacaacaaattgactaggatctacttcaactcttgcacgaggatcatcctcgtctacgttctagtccaacttcttcgagtgacatacattcttccttaaatcttttgtctagccatagaatgatggctcgtacaaaaaagacaatgcgtagggtcga

SEQ ID NO: 351962 - DNA, 580 bp, Cannabis indica
agtcgtcatccatctcctcgaccgcaacgtcagaggaatgcctggagtgaataagataatcgcgggctgacaccatagactcgctgtctcgaatatcaatgccccctggttcagcaagctcctacaccattttctcgatgtccgcggaagacatcagacttaattctatacctacagtaggtgcgatctcctcttttgagatcaaagttaggataaaactatcttccccctggtcctcgtcaccgtcgaatgcattgcctcccgagctgaggagctgactatccgacaggtcgctcatctgaaagatagaagatcttttcaacgtggtgaatgtgtgaaaaacaaaataagtgatctcacccgcatataaactataaaattgtatttgatagaatggtccgcattctcgcgattactgaccaccccatcaatatgcgagcagagtgaatactaaatatgcgaatagaaaaacatcccaataaattgttaggagtgtcttggtaacctcagcgacatgcgtctttcggcatgaccctgaggtgacgaggagacacccaccatttcaaggagtccaactaaa

SEQ ID NO: 351963 - DNA, 734 bp, Cannabis indica
gtgtagtgactttatgtgtaatgccatattgtttcattaaatgttcaaaaggcctattacaaaagtgtgtaccattatcactaatgatggcacgtggtgaaccaaatcgtgagaaaatattttctttcaaaaacttaagcacaactttgtggtcattagtgtgacatgcaatagcttctacccatttagacacataatcaacaccaacaagaatgtataaattaccaaaagaattaggaaatggacccataaaatcaatgccccaaacatcaaatatttcaacaataagaataggatttaaaggcatcatgtttcttctagttacacttcctaatttttgacaacgttcacaagatttgcaatacatataagtgtcatgaaaaatagtaggccaataaaatccacattgtaaaattttcaaagcagttttcttaccactaaaatgtccaccacatgcatgatcatgacaaaaagatatgattttagattgatcacagtttggaatgcatcttcttattatttgatcagggcaatatttaaacaaataaggatcatcccacatgaaatttttcacttcagcataaaatttagatttatcttgtttagaccaatgagaaggaatttcaccagtgaccaaataattgacaatatcagcataccaaggaaaagaagatacatgcatgagttgttcatcaggaaaagtttcaatgatagtggtggaatcatgattagtt

SEQ ID NO: 351964 - DNA, 521 bp, Cannabis indica
tgaggaagcaacttgggagttagagtcgcagatgcgagagcagtatctcgagttgttcagataaattttgagtacgaaatttctaaaaggagggaatggttgtaatatctcagaaacctaattatgaataattaggatttattatatattatggttgatcaggtaataatcagaaagaatatgatctgactaatctaaatttagcgtaaattatgaattttgccataagtagataaataagcgtaatttattaattacaaaaatttatttgaaatatgtgggtattgttgggttttgtgccctaaataaaattcatttcaatataatcagatttactaattaataaagatcagaaattatattttatgttgcatggttcaaatgatttatttcatgattgtttaatgtataaaatctattaagtccagaacatatttatttattaatgattatagtgtcgtcagcacaatggaatataatcatgattatgtgttcaaaagtttaatttccatgatttgtca

SEQ ID NO: 351965 - DNA, 778 bp, Cannabis indica
attgatttacttgcttcttatttgcattttttctttatttactttctaattttaattttctcttaattttgatataagtacttaactacaatccttgtgagatcgacctcactctttgtgagtctattacttgctaacgatacgtatgcttgcgtgttgagaataccacaacactatcacttgtgacaagtcaaattcataacttaatattcacctttttgccaaagttgaacatcggcaaatttttcacaaatcggtttctgaacagcctttagtaaaatggccaaaacttactcaatattactttgatcgatgcgaatctagtttcgtttgaaatcgcttttcaagatttttctatgcaattctcatactcatatctcaatttagaagatctgaagtcaaaaaaaagtctccaagtcgaaatgcgtttgtccgggttcagggtctagtttagtgaattatatggacatggtaatcttatgtgatatgtatgattatatatgtgtgtgtgaatttgtgaaaggacataaatgcccttactagttgttatgctaatttttagaccctaggggaaaaatagtcatttgactatattttactaaattatgtttaagacatatttttttagccgagtaagataaaaatcaaactttttttttggtttctaaccctctccatcgacccctcttagggatgtaaacggggcgggtgcgggaattgctcctatccccatacccgcttcttaaattcacccccatactcgccccaatacccgttt

SEQ ID NO: 351966 - DNA, 504 bp, Cannabis indica
atgacataaaaacttatataaatagtaaaaaaaaataaaaaataataaaaaaaaaactcataatcccatggtattatttatttatgtcataaaaaagtaaatttttataatttttccatatatcgtgtaattttactatattgtttgacttgtttttaaaatcaaaaaataaaattaataatgatgataaaattatgaaataatataattaaggtatttacaaacagtaaaacaatgatttttataaataaaattaacatatttattaatttttatcattttttactcaataattaataatttgttccctaaatttttgacaatactgtttcttccccttaaaatatacggcttgttaaggattccctgaacttttacatttacaaaaatttagtcattcttttagattatgtcatattattccgtttaaatggtagtgtatcttgattaattagtatttttgcctcatataccttgacaattatcaaatcgtaccctttaaaa

SEQ ID NO: 351967 - DNA, 490 bp, Cannabis indica
aaaaaaattgtgagctgtacggatggtatgcacaacataccacccgcgcgcgctgcaagcaaccattccgcgctcgtggaggggtgattaccatcctgatttttcgattttcaaaaattcattacaattcaaataaaatcgaaattgagttctgtaaaaaggtaaattgcttaattttttccaaactatccaataaaaataaatccaaaatcgaaaattcaattattttcccataatttcacaaccatcaatcaatcatcaatacaacacacaaaacaacatgataccatccaaatcacaaacaaatcattttaagtccaaatttcttgcacattgagtcaagtagtagctcacgcaagtgaggtagaaccacagggaattggactaattactactaaattatacttatgattactatctggtaaaacaatactttttgtgaattaaataaaacaattcagaaaatcaaaagaataaatgaagattaatc

SEQ ID NO: 351968 - DNA, 830 bp, Cannabis indica
aaacaaaagtgttaccaaacgctgcttatatttatgggaataaacttcagtatatttgatttttctcaaaaaaaaatgtagatttatttaagtaaacataatatatttttattttaatttatcattttttttaaaataattttatatttttatttattttctttatttgttaagatatgagtttatgaatataaataagtttgattttttctttaaaaaatcttagtttatttaaattatttattagattcttaataattttggcttgattttttaagatatgtgtttataaataaaataaagtttgacaatgtatattttttgggactaatttaatttttttttaagtaaaattaatattttttttaattattaatttatatatagtttaggttttttaataatttttattatttttttttagaattaatagaatattaaaattgcttaaaaaatagaatattatagtttttacaattatttttttaataaaatagggtaaaattttgtattggtcaaagctcagggataaaaatgctaatttttaacggtaagataacagaaccttacagaaagagcataattatgtaactgttatattttagggagaatttttaataaaccgtatattttagtgagcaaaattaagtagtgtcaaaagttcaggggtaaaaatagagtaaaagaaatcaattaattaaattaaataaagtagaataaaaaattaaaggctaattagaatttttgccccctgaactttgacatgtaccacatcatgccctctgaacttttaaagtcgttaaaaaggttccctaaactattaagattgt

SEQ ID NO: 351969 - DNA, 931 bp, Cannabis indica
aatataattagatttattaattaaaaagaaatcattttatattgtatggtttacatgatttatttcatgattgtatgtttaatgaataaatttaaattctattaagtccaaaacatatagttattcatgattatagtgttgtcaacacagtagaatataattatgattatatgttcaaaagtttatgtctcatgatttgttagtacactggatttagactgatatgataatcagcgataaagtatacctgcaccttggataagtgttatgtcttttccatgacattaacaaagtatgttaggattggatgtatagagtatacattggactggactgatattgaactttgataagatattataaacttaccgttatatctatctaagtcagtatcaattagttgatcttaggtcaatagatctcaatcttgatatggttaggttctgtttacatgtattatttatgttcttagagttgttcgttaaagctcggccggcgtaatacttacatcttgggaacatgatagtataattgagtgggagcgctgattataaatatagaatttatagcttttataagtatttagaaatgaaacgataatttccttcgagcttggcttaatagagataaatgattgatgcctcatttcaataattatattaggttactaaaatatcatttataggtagctaagtgttttaaagataaaatacattgaatggtagaatggtaaatttgtccctattcgatgtatataatctatagaggatctttgactatttgaattgaaataagggaaatttgataaattatgctaaaacattagattatgtgtttaattatacccaattatcacacataaaaaaactatcccattctttcaattttcttccaaaaatacccctgtcttttcaaacttctctcattccct

SEQ ID NO: 351970 - DNA, 850 bp, Cannabis indica
aattctctagcgagtagagaaagggaaggacaagcgccggtcacccataccgcggtcacgatctcgcagtccacgagggaagagctccagggcccgaagcccaagaagacgcagcccgcgaagacagcgaagtccgaagctggccaagtctcctctgaggaaggaatcctcgccaaaaaggaaaggtggacctcgcttcgtcaattatactgaactcgcagtccctcgagaccatatctacgcaatcgaagaaagaaacagagtcttcaagaagccgccccctatcccgggaaatcgcgataggagagaccctaaaaaattctgtaagtaccacaaggacattggtcacactactttagaatgttgggtcttgcaggatgaaatcgaggagctaatccggagagggaaattcgacaagtataagaagaacgaggaaagtcgtccccaagcggatgacaaaggagaaaaccagaatgcgagtagctccagaacacctcacaacgtcctgactataattggaggacgtcatatcgcagggaactctcgcaaatcacaagaacggtatgccagagaagccaaggagaagccgcttaccaatgtgaatattcttagtgagcggcccgagaagctgtttaagaaagaatgcgacgacatcacctttatggagagtgatgcgagatgggtccattacccgcattctgatgcactagtgatagtcgccaatattggtggggataatgtccatcgcatacttgttgacaatgggagttcagtgaatctgctgaatttccaagcattcaaacaaaggggttgcaggagaaggatatgcgacctatgacatcgagcattt

SEQ ID NO: 351971 - DNA, 166 bp, Cannabis indica
aaaacagcaaaattgcaaaagtgggacccattatccacatacatggctgacctgccaaataattctaaccctaccctagtggtttgctataaataggtagtgatggcttcagaaaatataacacatctttcttcagaaaaactgagtgccttctctccctaaacct

SEQ ID NO: 351972 - DNA, 700 bp, Cannabis indica
tctcaatagttcagggggctatttttaatgactttaaaagttcaggtggcatgatttggtacatgtcaaagttcatggaacaaaaattctaattagcctaaaatatatttatatgatattaaaataatataaataaaattaattattttgtatattttgaaaaagcatggtaattttgacttttgtagttggaccaaatataattttatagtgtgttttgaatcaaatttaattcaaaatatacatcattcattggagatgatgtaagtttatttacttaattttatgtataagaaaaaaaaggtggaaaataaaaagactttattttcactatatatataaatatataaagaatattttgaatgggtattattcatggatggttactaaataatttaactataaatattaattttaaaaatattaaactattagattttgatcttatgacaaataataaaagagaaatttcaatttttatgcttaatttaactacttaacaaaaaaataatcaaaaaatatcactttttgtattatatcaaaaatatgtttatatacaaatatattagtcaaactcaattttatttgctaaaaaactttttttaatttttttttagtctaatagaacaacgtcaactcatataatataaaaatgagagattttttttaattagatagaaaaattaagcataaaactcaa

SEQ ID NO: 351973 - DNA, 976 bp, Cannabis indica
gataaactaaatttcattaatttatattaatcaacttaactatagaaacaattaatttaacactttacaacaattctcaagattgtgattgatgaaatgacatctaaactttaaaaaaaaataattaggaaaaaatatcattacaaatttcttaaacctaattaattaaatatgtagtatatttatataaataaatattgtattaattaaggaaaaacaaattaaaattgacatctttgtatttatgtctttagaaaatgatcaattaaattaattcaatacctcctaaacataaaaaaaaaatatatatatttacaactactctctaatatttaattatatataaaaaaaactactaatataaaaataactagaagaatattatcaattattattaaaaattttaaaaatcattatagctatctttatttacattaaaaatgtttataaaaaatatattatttacttaaagtctccaactttttttatttatttcttttcatttaaaaatatttatggaactttttaggggctcgaagaaagatatacacaattagcttttgttcccttcacatcataacttttttattattattattttggtagattcataaataaaaataaataaataattaattaaagaagggtttagcaatattttttaaaaatttttttatcataaaaataaaaatggttatagaatacatttttattttataattttagaaaacaaactataacttttattttttaattttatttataagtcaggtttaagtctggagccgtagtccgagtctaggactggggcaagacaaagtctagattctaagattcagttgggatcggagtccaaaatataaaataagagaaaaaactctttaaaaaaattataaaagtgatttttttttatttttaaacttttaatttttaattaaaatattaaaaacaaatttataaaatatatttttgaaaa

SEQ ID NO: 351974 - DNA, 595 bp, Cannabis indica
aatatatatttttatttattttctgttaattctataattttttattatttttaatttttttaattaagatatcacgtttgcaattgcatggctattttttcttaaacttaattttatatatagacacatgtttaccaacatcaatttacactttctctctctcaaaaagctcaacccctgtaaagattatggtttttattctcatccttttgtttatctatctttcgaatcaaattaaaagcctcatatcatatcagtattataattatgtttttcttaattgcacacaacacacttcgtttagactacatttttccatttatatttgtgtgttttgttagtaaaattttttagttcaccccatacatatttctttatttattattaacaaaatattttattttattataatactaattatatgtattgtccatatttctaatattttgccagttattctttattttcttttttttgattgtaaggtttttattatttgttctttttgttaatagttggtctaattaattaaatatatctttatatattaaaagtgcctatctaacggcatttcttggtttaacattcttggttt

SEQ ID NO: 351975 - DNA, 544 bp, Cannabis indica
ttaatgggccggcccaaagtatttttgtaattttttttccttttttgtatttttttgttttttttccctaaatttaattacaacacagtttatctaattaccaaaattttattataaagttaaaacttgagaactactaatataataaactcaaattactaaaattcttacttttcttgtactaagtaccaaaaaaaaattgtggtaattttacaatccaaaaaaaaaaaaattagaatatttgggtactttagttacaaattttcctatttaattttagattgtagaaccagaaacttcttcgactaagacattagactagaagaagaaccagaataaagctttcaaagtctatattttgcaggacctcaaattttgttacaaaatttgtaaacatacaacacaaatttagatcaatctaaggttagataatcaacaagaattaaagtgacaaaaccagaaatataaacagtataattagaacatgaaaaacagagagaaaacacagaaaattatcctggttcggatctcaaatattgagtcc

SEQ ID NO: 351976 - DNA, 585 bp, Cannabis indica
attacgagtagataataaacaaacatgtgaccatctagttgatgcatctatcaataccataaaatatctgaatggtccacatggtgggcaaataggcccacatatgtcgccctgaatttgttcaagaaatctaggggattcaattccaacatttaccagtgagggcttaatgattaactgtccttgaaaacaagtagcacatgagaactcactggataatagaatcttctggttctttaatggatgacaatgtgagttctctattactgtacgcatcatgattgaacagggatggcctaactggtcatgccaaataacaaatgaatttttctggtttgtgaacttctcgttcacaataaaatgagtttctattgtgcttatacgtgtaatgtacaaacctgaagacaaaccaggtaatttttccaatatgcacatttttcttgaaacaataaacgtaatgcaaagatactcaaaattattttcatatattgtctcaatatgatatctattacgacgcatatctttgaaactcagcatattcctttttgatttggtggataataaggcatcatctataataatttt

SEQ ID NO: 351977 - DNA, 944 bp, Cannabis indica
aagtctggaatttgagagtagtatagatgtagtccgagaccgcctggtcgtactgtttcttgccgttctccttctcagattccaggtcgcgagacatctcttcaatcttcgccttggcttcaagctcgacttgctccttggccttacgaatttcctctaattctttggccttggaagacgcatcttgcttcagcttcttaacttcttcttggagatgagtaatatgcttcttcgcggtttcagcttctttgggccctatagcaaaagccttcgcaaatgtagccatcaactgcgaagctaactccgcagcacgaggaagcagctcctctgaagatgacttgtcaatcttcgacaaaaactcatcgctgacaaacctctcctgaaggtacagcacatgacgagctcgagccgctggatcgatcacgaccttcttccctttctcttgaacacccttagcaggcctcttggaggaatctgcgataggagtgaccaccacatcacttttcctcttctgggacgtaataggagaagtcactgctgtcccgggttttagtttgcggttgagcataggagcggactttaggaaagtcatttctgcaattacaaaaaaaaagggttaatataactagggataaaattctaacaccttaagtctgcgtatgcgataaaatacctgatgatggtcgaggagtttgcttagaaaggcgtttatcaattcgctcttgctacttttcagaaggttccttatacaccggctctctccaaagactcgcgttctcagggatcagtttatgttcgcgaagtttagcagtcgtacataacaatcgccagtcgcgatcctgtacaggaaggcttccaagaatttcagctgtttctctgcgagtcgcgtcgagtgtgggacgagacggtctatctgcgaaaaccaaaagaaaagagcaagtcag

SEQ ID NO: 351978 - DNA, 653 bp, Cannabis indica
ttgaatactctagatatgatctggaaaagaattcgtgaccttgacggccactttaatttcccgaagctttctattacccctgatgctctggaagcctcagccttccgtttgtgctttgggttgccactgttggtccccttactgatattaccactagcaggaggatttgataccgtgacggcatgtcttgcagcctgctcttaattacttgctgctcgaccttctcagcaattaaggccaagtctaccactctcttatatagagtgtcatgtgatgtggtaattttcaagtcccgactgattgtagcactcagtcctcgaacatacttctgctttctggtgaaatctgtaggtaccagatctccagcaaatctagataaccggtcaaactccagagtatactcggccacagacatcttcccctgagtcaacttcacaaaatcttcttgatgtgaagtccttacatcaacattataaaactttttctcaaaaagtttcttgaactcttcccatgtcattacactgacatctcgagtttgatccactatatcccaccagacgagggcatgatcttgaaacataaagaccgcacaattcaccctctctgttcccgtcatacccatattatcgaggatacgggtaacagtgctcatc

SEQ ID NO: 351979 - DNA, 534 bp, Cannabis indica
acttccccttaggcttcttatttttctcattccccatttcctctttatcattttctacttcctcttccacttcaatattaggcatatcattatcttctataaccacatcttgtatttctatattaatatccataactccacctaaataattaaattaattttagactatgacaaaataaatttcatacacaaaaataatcaaaacaaacaagatcaaaaataaaaaataaaaacaaaaatttcagttattcaaaaatctatttttatttatatttaagtttacaattaaacatataaagcagtttattttattttgtacaaataaaaaaaattaaataatatatatataaatctaagttattcagcatattaaacatattttcacacataaattcaaagttattttaaatttattctgtacaaataaaaaataataataataatatatatataaataataccatacctaaggaaatgaggagatcggctaagctgtggagtgtcgacggtccggcgaagtggctggaaaaaggt

SEQ ID NO: 351980 - DNA, 526 bp, Cannabis indica
ttaaataattagaattggcatttcagtggttaaatttgaaaaatggcatttttgagaaaataagttgaaaaatgagaaaaatagaaaaattgcaaagtgggggcccagtatccatggccggccactagggaagcaatttgccactttattttttcattattttaatgctaattaaatctaacctaaccctaagtgaaaaacataagtgagttcaatgaaagagctctagtgtttgttcgaaaagaggaagcgagaaaagagatgaagttgttaaagattggctcaggaggtaaatccagcattgccttaacaagcaccgtctcaaccaaggctgacaatctggaccctctagttcaaagaggaaagctaactctaaggagtcagccaaggacaagaaaaagcaaaagaagcacgataagtacgtgccaatttacaccgtttataccgagcttaatgaaactcgggaaaacatttatctcgcacatgagcacagggttgcatttcgtaaacctgagcccatgaggca

SEQ ID NO: 351981 - DNA, 491 bp, Cannabis indica
atattttataattatttttttaaaattaatattacgtggaccactaaaaatttgccatgtgtacaagtgtgtacacgtggacagtccaccatggcacttaactgtaatttttggacggaggtgtgcaaagcaaaacggaaccaaggtttaggtagtttagccgccaaaaattcagtttttgtggttaagtgttacaaaccgtaaagttcaggtggtttagccgccaatatccctattacaaatatattatgagttagccaaataaacttttatacaatctctcccccaaaaattacaaaaatacctcttcctctacaaatgtaggcgcaacatcatcgcaaaagagaaatgaagccaactcgcaatagaaggacttcgacaatgatgaaccgaagtcggcggacgaagaaactgttggaaattattagagagaaaggctcaggtttttctctgaaggaaaaatagaaaattttaagtgtaattttcctgaa

SEQ ID NO: 351982 - DNA, 545 bp, Cannabis indica
agttggcaaaagaaccaactgtcgtcaaattaacaccaacagccaactgctgccaacacgctttggcaaaagagcaatccaccaagcaatggtatatggtttcatcagttactttccacacagggcagatggtatcaataggcacatgtctagaacaaagtctggatttcgtaagtagacagttagtagcagcacgccataacaagtctttcactttcggagaaacacttagcttccaaatagtattccaagagacggaattatcatcctatgcacccgcttttcgatatttttttaatactaccaacttgaagataatttttagtacaaacaatccaaatataaaactggtgtaattcaatttataattacatttgatactaacattttcgaaatccatttatataaaactaatttaattcaatttatttaatatatattatatttatttatgtataataaaaaatatctatatttcatttttactttttttttttataattttgtatggagcttactatatctaattatagaaacccttaaaa

SEQ ID NO: 351983 - DNA, 616 bp, Cannabis indica
ggttaaaggaaggtgattctaacactgcttttttccacttaagtattagagaaagaagaagacaaaataggattctctctattgttgatgctagaggggaaagaattgaggatcaagataagatcactccagctttcttcagtattataaagagctgttggggtacaaaatgaaggagagaaagaagattaaagcagtggtgattgaagagggtcccgtgattacagaggtacaggctgctttactgatgacagagttcactaaagaagaaattaaagcagctgttttagcattccaggggggaaaattctgggaccagatggctttgaaagttttttcttccaagacaattggagctagttggaaatgatatatgtgatgctattacctcattcttgaagtcaggtaatcttttaaaagagattaattcaactgtcattactctaattcctaagattacatgccctaataaagttaaagatttttggcctatatcttgttgtaatgtgctatataaggttgctgccaaattgatatgtacaaggctcaaaagtatcctccctgattcagtctctctaaatcagggtggatttataaaaggtagatatatagcaca

SEQ ID NO: 351984 - DNA, 503 bp, Cannabis indica
tcagcaaccaggctctgatctttctgctatcgatctccatctccaagatatgcaatcagacctgaaagacaataatgaacaatccaagataccacacaaactcacacgatatattagaactaaccaaaaatatcaattagctagcgaaatcatttgtagaatgaaactagctatttatagacaatagttcaactgacctaagaacaattaatagcaacagttaaaacataacagacccacacgaactttaatagaaagctggtatgcagttatagcagatttaaaccacagatacgactggactcactattaatataatctgtcaaaataatgacccttacaatctaacgattaatgacttcaaaagatatccaataacatagagctatggcacaatgtaatgtctttggatcataaacatagcaaaccctaaacccatatcaaaagaaaaacttgagactatagacatctcccccttcattgaacatgagctgattgctcca

SEQ ID NO: 351985 - DNA, 1000 bp, Cannabis indica
agatcctggtaaaataaattccaacataaactgcaataggcccgacggagcgagacctctcaccaagtggttcccaactccacagggtttaatggaacaattcttatcccaatggggacagtgaggcttccagtcaccttgtgcctggacacgccctagggcacttttaagtactgcatgttcgtggtggtggactgcccgacagcctacaacgcaatccttggccgaccgaccttggtagaatttggtgcagtcacatcaatacggcacttgtgcctgaaattcccaacccaggaagctgtgataaggacagtgagaggaaatcaaggggaggcgaggcaatgttataacgttgctacccacctacccatgctgatggtccgagaaactattgagccagaaatggctgaagaagacgagttggatccccgtgtgggatccaaaaaaatcgtagaaccaatggaggatgtcgaggagatatcagtgtgcgacctcgactccaccaaagtactccggctaggaaagagcctagacccagaggaaaaagaaaaaataataaagacactgaagggtgccattgacgttttcgcgtggtgccaggaggacatgactggcataagtccccacgtcatcacccatgtcctcaatgtcaacccggacatgccaccggtccagcagaaacgacgtcccctcgactcagtgaaggccgaagccttagagaaagaggtggacaagctattaacaagcggcatgatccgcgatgtttactacccggaatggctagccaatccggtcctggtgccgaagcctaacaggacctggcgagtttgtatagacttcacttatctaaacaaagcttgcgcaaaggactgtttccctctgcccaggatcgatcagatggtagatgctacctccagattcaaattaatgtccttcatggatgcatacgccggttataaccaaataaaaatgcacacagcagatcaagagtgcactagct

SEQ ID NO: 351986 - DNA, 362 bp, Cannabis indica
gccaatgtcctggaaaggacaaaacacttatccaaggtgtaagcatacctatcgctgattatcatgctagtctaaatccagtgaactgacaaatgtgggaattaaacttacgaacaataatcatgattatattccactgtactgacaacactttaatcctgtacaaatacatatgttctggacctaatagaatttatacattaaatataatcatgtgaaccaatgcaatataaaaggttatttactagatctttattaactagtaaatctgattatattgaaatgggtttatttagggcacaaaacccaacaatgatcatgataggaactttagatttcaactgagaaagtaaatactaacc

SEQ ID NO: 351987 - DNA, 438 bp, Cannabis indica
tcctatatgcatctaagccgaaaagcaaacatataggctcacataggtcaaatgatgtggatgggccctatcatgcttctaggtttacacaaatgaaagaaattgcaaaatttacctgttacaaattatttataagatctattgactattggactacgattaaaatcagatcattggatctgtcaaaaagttaatcatagtaattcagatcagataaataataggtttgtaaaaaaattttgaataaataaataaacaaatattacaaacatgtaacagataactggaaagaggttgaaatatgtctattttaaaattaaaatatatcttaaccagaatttaaaatttaggttgttagacaatatttaaaaatatttaaaatctaacaaatctcctaaaaatctaaaattctaactgaaattcaaatatataaccaat

SEQ ID NO: 351988 - DNA, 858 bp, Cannabis indica
ggaatctaaaatttaaagtcaaagacttaaatttataccaaatatacaatgagtatgattctttcttggaccaccactactagtctaactctaagcctaatttgcttaaagtaaacatatacaagtagaagatttctaagatcgaggatttatataatttcaggatagaatgttaagaatatagtcatccgcgccattcattttcatagaagaaagtagaatgacatcaaaagcaaaccattcatccaatgatatattatcataccaaattcgaaatgaaaaagagaagaggaaacattaaaggataatttcgaataaaataagaatctaacgatgtctcggtaggcaagagtcaaagttattcttattttataaacttcttcattgtttcatattgtaaatactagtctaagttgtcatctttggatgtacaactagatgtcgcatttacaaatacttattagttgagatctaacactactatgtttgtctaatgatgataatcctttgggatttgtcccattaaaaacaacaagtcaagttagaccaacaatgaagactcgaaatttataactacaattaataacaaaaaacaacatggttcaatataaattcatacacatttagaaattatcatatatttagcaagtaaaaaagacatgtgaaaatacaaaacaaggacatcttaaataatttctaaggtttccaataaactgatacagtgtcccagtaagtgatagtcaaagatatcattcattgaatagagttgtcagctcatctaaaatgaaaaccattctaacaaccttttattcgatcaaaataagaatccaatattgtcctagtaggagagagtcaagg

SEQ ID NO: 351989 - DNA, 735 bp, Cannabis indica
acccaagcttactttaatcaatgcactggaaaggacatagtacctatccaaggtgaaagtaaactacattgtagattatcctattagttaaaccatgtgtactgataaatcataggaatacatttaatcgcacaatcttgattactttccactgtgttgacaacacaataaacaagaatatgagtgtgataaggatttgaatgaatttataaatcaaataaacaaataacacattaaataaataatgaaaataaatctattactttattgataattaaataaaaagattacattataatagagttttatttagggcacaaagcccaacaaactcctgcttgcactaacataaaactatcagtacatttcaattaatcctaaattcagtctgtgcttttcaaatgtagttgttgaccgaggttttcggcaaccaatatgataatatataagaaagttgtaagaagtttaatacacaagatttttacatggttggggcattaatgagccttagtccacgagtcttttttttttatttatgagagtatttattacagagaacgttcttggtgacttttctctttggttcttatgaaacccaaaattctcgacccctgccttaatgagattggggggtatttatagtgtttttgtggggtgatccctagaaccgaggtacatgtctttttgtattattcagtaacgccacacattcccaacgagtgtatcataggaaat

SEQ ID NO: 351990 - DNA, 1037 bp, Cannabis indica
tagccccaaacccaaagagaccaaaactcgagcccaaacacggtcttgtagccagacctggcgcaagtgtcggtttgggtcttggtatcgatcctcgtttgggtccgggttcatgttcggttctgcatctagatcttatttttggaccaggtccagttccagatccaaggtcctcattccgattcttgttccgatttcgggtcccgagtccgagtctagatttgggtcctggtctagaaacggttccaggtttgggtcttggtacgattccaagatcgagaaactaactacgggttgggtccaagccccgggtcatgggtcaagattcggatcccaatcttgggtctcggtctcgttctgattcggatactgggtcctagtccgtgtctgtgtacgtgtccgtgtccgggtctgggtccgggtcgcggactgaaaccggggtcgggtcttgggtcccaatcccactcctgggtcccgattttggttctaatttcaagtttggttccccaatctagggttgggacttgggtccaagtctgagtctccaatcccggtccgggttgtgcgtctgggtttgggtccaagtccgtgtttgggtttcggtttgtgtcctgagtcccgatctgagttttaattcggctccgtgtcccggtccaggtctgggtcttggtcctagtcagattctagttccgggaatgagactgggtcccagtccctcggtcttgttcccgggttcgggtacgcttacaattccgcatccagtttcgggtcacggggtacaggtttaggtccgagtccgggtctgtgttcaggtttaggtctgagtctgggtctgggtctaggtttaggtccgagctgggtctaggttttagtccgggtttgggtcctagatccaaacatcgactatgtgttaggtttaagacacaggtctaaatcaagatccttgtctcaggtcctagtctagttccacttcgggtcctaggtcttggtcctagtccgggttttggatctgggtccggggtcaggtcctgggtctc

SEQ ID NO: 351991 - DNA, 718 bp, Cannabis indica
agagatgtggtagagtacgtatcaaagtgtttaacctaccagcaaatcaaagtcgaacatcagaggctgacagggttattgcaaccattagcctttccaaagtggaagtgagaggatattggaatggatttggtggttggtttgcctagaaccacgagaatgtttaattcagtatgggtcatagtagaccgttttacaaagtcagctcattttctgccagtgaagattacttatacagtggatcagtatgctgagttgtatgtgaaggagatagttcgtcttcatggagctcctaaatccattgtttctgacagtgatccaaagtttacatcgaaattctgggtaagtcttcaaagagctacgggcacaaagctgaaatttagtacaactttccatcctcaaaatgatgggcaatcagaaagaacaatttagatagaagatttacaacgagcctgtgtcatggacattgagggttcatggagtaagtacttgactctaattgattctactacaacaacagctaccaaagtacaatagggatggctccctatgagatgttatatggtagaaaatgtcgttctcctattcattgggacgagacaggagaaaggaagtacctgggtccagagttagtgcagaggaccaatgaagctattgataagatcaaggctcggatgcttgcttctcaaagcaggcagaaaagttatgctgatccgaa

SEQ ID NO: 351992 - DNA, 704 bp, Cannabis indica
tgagctaaaatggtgaaatgggggtgattttccgcagtggttggtggagagggtttggggtttctctagtttgggagtttttgggttggctaatcgaatgaggaagacgaagggcaggctagggttataaaccctttttgcgttagttatttcctaataaccgacgccataagtggcgtaaaatttccgtctaaaaattttcaaccctacgccgtataagggtcgtattgtattaaataataaataacactatgtttgaattaagcaatgtactgtattaattattacgaccaaattttttaatacaatgtatgttgtgttatttaatacataataaatgatccgtattagcttgtattataatatatatttacaaaggatttggagtcaacaccaatctccgactcggacctagatattgaccacagaccccggacccggactcgaactcggactcggaccccggactcggacccgggccctgaccctgacctggacccggacccagattcggacccagaccctggactacgggcatggacctgggatcccagactcggacccggacccggacccgtagttggtgttgggatcgagtgtattaaaaatatattataactttacacaatcaattaatacaagtcaataccaaacattgtattgtattaaataatactaatacaatacaatacaacacaatccaa

SEQ ID NO: 351993 - DNA, 1329 bp, Cannabis indica
tatgatgttctgggcaacaaagttaagaaccttcgtggaggggattattaccaggggtttagcttctgtccatttggtgaagtactctactccgacgacaacaaactgtacccctcctttcctctttgggagctgaccaattaggtatatcccccacactgggaagggccaaaggagactacatcatcatgagcttgttgggtggagctcttgtgatttttgaaaatctctagcacttgtcacattttctgacatagtccatcaagtcttcaatcattgttggccaaaagtacccctgtcggagtatcttcttggataggcttctcccccgacatggttgccacaaaagccttcatgcactttctaccattagccatcaaactaaggatttagtgacacacctcaagagaggcattgaaaagctttgtctgtactttatcccatctaggatcaggtaccttgcagcttttcttttcagtttgtttgcttcatttttttattctggcaaggctccggtttggaggaatgttacgataggtgtcatccaacatgtcaacttcttctgggatggtaatgctaggttcctctaagaattgtataggcaccaagtttgctttgccagcaatggtgctgcttgctagaccggcaagtacatctgctgtagcattatgctctctgggaatcggcctgattgtgtagcctttgagctaacttagctagtatttgatttttctcaagtaggccaccattttcttacctcgaggtgtatattcacctagaacttgattcgcaataagttgagaataactgaatatgtctaggtggttagttcgtactttatgtgccagcttgaggccggctattaaggctttgtattcagcctcattgttcgaggctttgaagccaaattttattgctctgtgtagttgtttccctttaggtgtggtaagggcaatgcttgtgtcgaacaattggtcagtgcatcttccgtcaacatggagtttccatgttagttctttgggattttgctgctgcccttgctcccgcttcttctttgggtcttgtttttctcttgagtcttgagggatctcaagagttgaaatggtgcattcagccaagaagtctgtaagggcttgaccctttattgctgttcttggttggtatgtgatctcaaactggccaagctcaatggcccatgtgatctcaaacacatgtgcctggaagtagggccttagctttttggaagccaagaccaagttttacatcagcttttccatgagtgggtaccgactttcagcatcgattagccttttgctgatgtagtataca

SEQ ID NO: 351994 - DNA, 699 bp, Cannabis indica
aacaacataatttattttttttttcaaaaactacataaaaattagattttctttttgaaagaaaacccaaaacgtgtgggtataaaaattcaagaagacctctgagtcgtatgatatctctgattccactagatctccccctagattgttgattctttctcattggtttcatggatatctccacacagtgatctcgttgccatggtagtacatctaagaaaaacttcttgtcggcgttaatggagatcagggcaaaattcttcgccggcgttcatggagatcgcaaaatagtttctacatcatcggtggttgatgatttcaaatctccatcccttaataagagttgttgacaatggagagaaactcattattttgctctgcaagaaggagaaattcttttgcggaagaagaagtctctgtgtcgtatttttgaaaaaaaaaaacttttttctttgagtcaaagtgaaaattttattcaaacactttcagccattacaatagacttaaaatcaacagaaacattatgctgattaaaaacacaatctgacgaaaaacaagactctctagcaagacaatgagcaaccctatttgcagatcgtttaacaaattttaaagaaacattatttaaagacgagattaatgttagaattattttaccaagatctagatttactaccaagtatgtttgattaacatcct

SEQ ID NO: 351995 - DNA, 512 bp, Cannabis indica
aacctggaaaaatagaaagtgagataagaggagattgaacctctagtttctgtcttgaagcgcgaatgagttcgagtttctggatcgaaagggaaagtgattctcctaatctgaaaaaaatgaacacaatcaatcaataatctctaaaccagagatagaaagaggaataaaggagaagaaaaaaaaccttgatttttggcgtgtgtacggaacagagggtttttgaagtagagagataagggtttgggttagagaggagctgagaagaaaggaacttcgacttgggctctcatgggcttccacttggggaatcatcgggcagaatcgtcaagagagtggagaagaaaggagctgccgtcgatcagatcgccaggaaaatttcgacccttggggtcattggtctgaaattttcgagcgtaattggtagacggtctgaataatgttttgtttattaatggcttcttatttttcttttgtaaacgacaacgttttatgtattacatatatatata

SEQ ID NO: 351996 - DNA, 590 bp, Cannabis indica
tttgacaaaaaaataaataataacactaaaccaaaaattctcttacatagtggcaaccccaaaagagagatcagaccctatatcacgagtcactgagcgtattagaactgaaaaaacctgatgacttcgcaagcatggttttaataattagaccactcaatatttatataccttacataaacgtttttattttcttatggaatgaatttgtggtcgtcatcgatatcacatggagatacatatatttatttaattacatattattgttacatgtgttacacactatattcggttaaatttaatgatatttattttattatatataaataataaataacacatgataaattattttatttttattaataaattatttaatttttaatataaataaaaagtcactcataaatttctcataaaccaagaattctgttatattggcacactttatatagaatagatatataaatgtatatacctattattatactaggtgattgttacgtgccaagccacgtagtgttagttttatttaatattttagttttttattttaattaataattaaaatagtataattatttgaacga

SEQ ID NO: 351997 - DNA, 698 bp, Cannabis indica
cataagttaaaggcagtgggtaaatgtgatggaaagtacgccaaccaaaatttttaattttaggagggagtttttgattccagaaaaatttccaccatttattataaaaactagtattagaagaggaaggaggtaaggaagaggtattggctagatgataagcagatttcagtgtaaggaggcccgaggaatttcctttccaaatgaggcaatctgctttgtcatggccaccaataggaacttgaagaatgttttcaacagtgtcatggtcaaagtaagttgataattgatttaaatcccaagtgccattagccttaataaaaaagcttactctgtcagaaggaagagatgcattatctttgcatctaagggtcctgagattaggaatctaagtgtcctgcagggtacaaatattctgaccattaccaactttccaaatgagcccatttttaagaagatctctaccccagaggagactagaccaggaataagaaggtgaatgacccttgtaacgccccgatttcccgagacgtcacacttactagtccgtttaaaaccatttatagaaaaacaataaactaatttattgaaaataattaaagcatgagatctcattattttaaaacaaaaactcttgattcctttataaatttttaaacattaacttttacaaaagtaatcgagccataatctttaaa

SEQ ID NO: 351998 - DNA, 597 bp, Cannabis indica
tataaaaacccatctataataattcaagctccatcagtgaagatataactttgtaaattcgaaattaccagaaagttattcaactgaagaaaattctacactgtattatctctattttaatctttaaagaatgagagatatgtcttctgtttattcagatgtacttaataagcagtaaggatttcagtatcccttgatgagtaaagcatatagtaaaggatgttgcataatgttttatgaacttggttccagaaatttgggttgagtcaaatatactacacttgatctgaagatcaagacaacagattgattggaatgcacaacttgttttatgttagtgcaagtgggagtttgttgggattttatgcctaaataaaacccattacaatctaatctgatttgttatcaataagagaattagaagtgatttatgttaacatgtagttttcatgcttatggtttaatatatgcacaaaatctgttaagtccagaacatatagtcattcacaattacagtgatgtcaacacagtggaatgtgattgtgattatatgattcgaaagactaagtccctatttcatcagtgttttggatttac

SEQ ID NO: 351999 - DNA, 977 bp, Cannabis indica
atattttgatcaaatacaatctttaaaatattttcttaaacatatattgattaaaatacaatattcaaataatcttatttatcaatttcaatttttagattaatggagaatcgagacagtgatgtagcaatctaaaaatagtataatatagttatataattatcaccaaacaaaaaccaactgcacaaaacgcgatttgttttcttgaattttgttaaaggtatcgcatctatggaaatgtgtgtgtttgtgtttgtgtgggtaattttatggggctaatacaataggtattgtaatttttacctatcaataggatagtaatttgtagcctttgatttaatcaaatggctcaaattaactcttgaaaattaaaccatcattaatatatttttttatttataattaattatgaatattattagttacaattagttcaactaacaaattccaaacctaattttttttttacttatttatcttatgactagttataatttttaattaattattttttttaatttgaaatttatatataaatttataattaattttattttctacttaacacaataattgtagctaaaaaagtacaaaatattcaagttatttaatcctacaataatcaatacaaccaataatataataatagtgtaaatggtaaaattattgtatatcaagtacaatgacatgagttcaatcctttcaaaagatataatttttttttttaatttgagatttcaaattaatttaataatttgaatttctttatttttttttttctaaacaatagttcatttttttttaatatttactaatatggaacaattcttatactataaaatttttaaagtttgtaattattttggtgaaaagtcttaaacttttatttgttaatatatgttgatggttgtattacataaagtataatagtgaacaataaaataacacatgcaataataaatcaaataaaaaaattt

SEQ ID NO: 352000 - DNA, 778 bp, Cannabis indica
gtgggatgattctgagactgtgtaggtatggaactacacagttgaagatggcttaaatggattgattggtactacctatatcaataaggtgcatactatttttcggtagcccatcacgtaagaactccacagttaagcgtgcttggccaggagcaattttaggatgggtgacctcttgagaagttttcctaggaagcgtgcgagtgaggacaaagcacgctggaaacactcttgttggtttgtagggtcagtcgtcagtccatgaagcagctagaaagatgtacttgtgtataagaggcattcattctgtgggtgtaagggcccaatggatgcttgaagcggggcattatagaatcattaaagaactggctgaggccaaaatcagtgatagaaatttggagtttcctcaatttagcagggtattaccgacgtttcgtcgagggattctctaaaatctctatgccactgaccaagttaactaagaaaaattagtgattcgtgtggtcagacaaatatgaagacggttttgaggagttgaagcaatgtttaataacaactctagtgttagctttgccatcagatcaagagaaattcattgtttattgtgatgcatccagacagggtctgcgatgtgttttgatgcaagctgactgagtcatagcttatgcctctcgtcaactgaaggattatgtacagtggtacccaactcatgacctagagcatgctactgtggtttttgctctaaagatatggctgcattatctttatggtgaaaaat

SEQ ID NO: 352001 - DNA, 535 bp, Cannabis indica
ttcttcttgacgaagtatgatacctcgcatttcttaaaacatctgctgccagtcagcaggaggattagcattgccaacccccgcatcatcccctggattcagcagaggcgcaggtagtgtcggtggattggtttggtctacagcaggctttactagctcgccctgtggtttggatgattaaagagggtccattctacaaataacccaataatcaacaacccagtgagttaggcaccaataccacacttacgcacttattgcctttaaaccctaactcagctatttacctcatattaatattcacttaaacaaatagcatttaaaacatggcatcacataacacatacatactctagatggtcacatactgcctaaaatggaaagcggtaaacagatgatcacataaacagtagagtctttactctcaatacttaatgcaccatgagccgagcttgtctctgacgatgaatgtcctgtcggaaattattttaccaggatctagatttactaacaagtatgttggattaacaaccta

SEQ ID NO: 352002 - DNA, 553 bp, Cannabis indica
tgcctagtggttctttggcacgctctccctttgtagagaaagaacattttgtcatttttccttctaggcaagattcacaaactagtaattcacttaaggtgatattttttaatggactgtctttggttaacttgtgaagtctattatagcctatatgacctagacgtaagtgccatagatatgtttcatcttcattatctatcttttgctttttgtggtttctaggtttagttatttgaaacagttcgttattaagcgcaaatggttcatctagtctaagaacataaagcccttgttccatagatgcaacacaaatttgaacatcattgtgagaaatgatagaaccagaacacgaaaaattcaatttatattgttgcaactgtaaacatgaaatagaaagcaagtttctactgaaatttagaatatacaaaacattgtctaaactcaaagttatgttctaaaacttgattttttttcttttcctctagctctaaccgatatcatttcgccattaccaactttaagtttcaactctctagattttaaataattc

SEQ ID NO: 352003 - DNA, 509 bp, Cannabis indica
gatgttaatgaaacatacatggtagtaaatctagatcctggtaaaatatttccgacattaatcccctgtacccaacttgtatatggtttctctggccaaagcattgcacctctaaggcaaatctgtctacccctcattgttggataaggtttgaggagcataactgtgatggcacaattcttgacaattgatgtcccgtcagctttcaatgtcatgttaggccgaccagccctatatgacttaaaagttatcacatcagtttttcattgtgcatcaagttcccaacaaagaatggggtagggtgcctcaaagggaattaaagaatagtatgggaatgctataacttgccctaactaaggtcaaaaaggaaaatacccctggccagagttcaggcaagggaaaaagtattgcccaatagggagtcgcccaaggcggggacgaagatgtggatccccaacttggggaaccaaatacaaatgtagggccggtggaagaactggaagaagtag

SEQ ID NO: 352004 - DNA, 688 bp, Cannabis indica
ttcatcaccatggcttacgatcaaaaaacacatacccctgctgcatcactttgtctctttattctaaactttgaaatctgataatgaagatgcctttggctagcaatccaaccttaacaacctcatccttacagattctcctcacgaacccttccactaggctaattggaggattagctccaataacataacaaaccacagatggttgccagaaattaacttcatcttcgatatcggcaaactcaatctcgaccttcctctttgttccttccttccctgtatcgttcttcaattgatcaaacgaaaattccaggttcctgactatgttagatatgagaatcgggggagaaatcctcttcccagaattaagatcttgagtagctcgattcgcaacagtaagccagtcagagaaatcttggcgaatctcaccctgcctaataatcagttcctctgattcctccggagagaagactttttcaacatactgttccatttagtgatggcactgttccattggatcttcagcttcctcaacttctagttcttgaatcccgagtacagtatccatagatcgagtcttaatgactctatccgaggatgagggaccagctttcttgcccttcgatttccctttcccggccattttcgctcttttcgccatagctccggtgaaacaccgaaagagaga

SEQ ID NO: 352005 - DNA, 752 bp, Cannabis indica
tctctcctctctctcttttcttccaccctagagcagctagggttactttgctcttcaaatattcaggaaattcaacaaggttttaagtggttttaatcaaggtaaaggttcttagcctttctcttcatattttcatgaattgtaagagaataaattttgcatgaaatgttgttttgctgctgtagttgctgtagttgtttgttattgttttcagtagttaatttatgattgtataaggtgatttgagcaggttttgatagttagttagtaggatgagcaagctttgagtttttgaactcaagcttggctcatcaatggttgttttgaattttgtgcatgggtagttgttttatctgttagaaattatttattggggtataatatgcaggtctggaaagtttggttgagtttggaaacgatttggttaggggtttgatttttgtaggttttctgggtaaaaccggctaaccggttttacactgcttgtaaaaacggttacctagattttgtagcagggaggaaaactggttttttagctaattgtttagtgtcagtttcaggtttctaattagttgatttccctgctagtttgggatattagtatattaagttgcagtagatagggttttagttttaaaccttagtcccggttgtgatttagcgagtcacttatccgtgttgttatcgatgtgatttaggagcctataattggccgagcagttgttccactcaggttgaccgacacaccttaa

SEQ ID NO: 352006 - DNA, 583 bp, Cannabis indica
tctcttctccgtctcttcaatcttctctttctcgcctttcctctcgcctaacttctgaccagcccagggctcactccggccaccgacaacccaaacggaggccacttcgagcttctccgattcctaaatgtcccaaccccgagcctcaccctcttgatcacctctgtcggcgtccatgggattcacctgtcgatcgcccagatcggccccgttcacctagtgctcgagctttgctccgaatttgcgagtctgggctggaaggaagctcgatcggagatcagagcaagaacaaggaagctccaactctgtttgaatgtttcacttttcaagtgcccaggaagtgggtttcaagaatttttttttactggtatctctctagtctaggtttcaatctcttatctaagcaattccaccaactgatattaatgcacttgctggtttgtcaattcgattaggtgtttacttcattttttaattaagttctgaaacttgaaatctgatggttttgttttgtaagtatttttttaattgaataagctggtttgttgattttttttttctgaaaaggcttgttgattcatct

SEQ ID NO: 352007 - DNA, 1104 bp, Cannabis indica
ttatgctggtatcacggtactctcagacaacaatcactataccaatacactctataccttaaccgtataagtgttggtagtgcaactaatattttaagcatgcatatacacataacatatacatacattcagttattgatatcacacattatattcagttcttaccttctttctgaattcaagtgtgctggccgacctgaacggaaagtctcgcgctagacggatgccctaatcacattatgaaatcgggtaagttacacgaacaatactctaatcccgggaaacccaaaaccataaccctaggttctgttacactttctagggattacacaaactctggaaataggaaagcacccaaccacgacactgaaatggacgaaaattgagaaaacgaagcattcgaggatcctgccaaaaccagctagccggtttacaccagtccacaccaaatttttcatttcttgctcaatcctccaccaaatgcaaccaaaccttccagagtacctaattagggtataaacaatatattatagccattatttcacagaaaaactcaaggaaattcaacttgccattaatgatcaaagctttgagttcaaagcttaaacttgcataaaaccaacaccacatactaaaagcagctgctaggacccttaatcaactcaaactaagcctagaattcgaaccctaagcatacctaaacctaacagccccttactagcaaaatcacacaattaaaccaagtaaaaacttaaaaattaaagaagggtgctactagggcttaccttgggttcaagaacctttgaatccctattgaaattccagaaaaaaggttgaattgaggtgattctcctttgatttttgtcccaaccgaaagagagaaagatttttatcttttttggtttttcctttaattttccctatttttcaaaaatgagaataatgaaattgattaaccttggctgaataatttgagtggccagctgccaacaccaaactcagccaccaaatcccctaattaaaaagactaaaatgccctttaagtcaaaacttaggtattttccaagactaggggtaaaatggtcaaattccataaccccgctc

SEQ ID NO: 352008 - DNA, 923 bp, Cannabis indica
cagcaaggttacccacacgtgactgctagaagccataacaaccgaaaagcaaaaccacaaactggaagtaactccccaacaaccttaaaccgtagcagtaacaacacaccacacacagacaaatcctgtagacaagaacaaaagaattctcaccacctcatacgtataacacactcaaaagagagagacatatttctattgaatcatttaaaattgattgtttggattgttacattatttagtcttttggttatttgactttaaggagttttttattttatttttctttaactaaatttcttcccttttcatgttttccttttgactttgatttatataaatatatatatataaacaatatatatggtatgattgaatataattttctttttaaaaaaaaaaaaatgaagaatgaatgatactgattacacgtgacaaaaactatccacattaattcaaattaaataaaaacattatccacaaaactcatcacgtggtagtaggtctatctatgctttccctctccttatatgatttttgtttctaaggaagacagtgaggttgtatgcttatatttttagttttcagtttttaaattgttttttaaaaaataagaatagaaaaaaaatattattttaaaaatttaatagtgtttggtttaagttttttaagactatatttagattctttttactattctacactagggtgtacgttggtcggtttagtcggtttattttacattttatttaatccaatataaaaatcggattataaaaatctaagtgcaacctactcaattaagaaaaaaaaaagtttcaacccgttcaatgaattggtcagtttagtcgggttaactcgtccaatttttttttctacatgcaattgttatattttagttattgtgataatgagataaatat

SEQ ID NO: 352009 - DNA, 666 bp, Cannabis indica
gtacctccatcactaatgatagcgcgtggtgtgctaaacggaaaaaatattttctttcaagaaacgaaccaccactttgtggtcatttgtgtgacatgcaacagcttcgacccatttggataatcaactccaaaaagaatatataaatttccaaatgagttaggaaaaggtcccataaaatcaataccccaaacattaaatacatcaacaataagaatagggtttgaaggcatcatgtttcttctaaacagacttcctaacttttgacaacgttcacaggctttacagtatgcatatgaatcatgaaaaactatgggctaataaaaacgacattgtaaaatttttacaacagtctttttactactgaaatggcctccataggcatgatcatgataaaaagatatgactttagtttgatcacaattcgggatacatccacgtactatctgatcaggacaatatttaaacaagtatggatcatcccagataaaaatgttcacatcagaataaaatttatttttatcttgtttagaccaatgagatggtattttactgctaacaagataattcacaatgtcagcataccaaggtagagaagaaacatacatcaattgtgttgggctctgtgccctaaataaaactctatttcaatgtaatcttttctat

SEQ ID NO: 352010 - DNA, 992 bp, Cannabis indica
ctacctcaggcccaaatgtttcaggtctgctggagtcaaataccaccgctagaaatcctacacaaccactgcatagtaaatccctagccctcaacacagaaataaccgggatccgagacccctgaactgatccaacataaacaaatggatcttcaccttccggctgaaaagtcaccattttacgcctacaatctatactggccgaatacttggacagataatccattcccagtataatatcaaactccgttaatttcaattctataaggtcaatactcaattccctatcttcgatcctaattggcatagacctaatgcgcctattagagataaccaattccccgctaggcattagggttccaaaccctcttacaagaaaatcataaagtctatccaaaagattaaatactctcgataccacatacgagtatatagtcccaaagtcaaataatacattaaaatgggagttgttgataagaagctaacctttcaccatagaaggactggatgcaacatcagcctgagtgataacaaatgtctgagcaagtacaggctttacttccagcttctgcttatctttctttgcctgagggcaatttctcttaaagtgcccaaccatgccacacaggaagcatgcttttcggttgcactctccgggatgatgtttcttgcatcgcgggcactcagggtaagaataatccttgcgtacacccttgccttgatttcctcggaaccgcttgttccgttttaaacccaccactgacgacgtaggtttactcttctgctcaaccatggagcccctaccacctctgccataactagaaatatggcaagcggtatcccaatttcgtggcataacctcttgaggtcctaaaatacattctttagggcttccagtccagagagcattcttcatatctgaatctccctgaaggactgtaggttcatgtatccaaattttctcatgcaatgatcccacttggttataagcc

SEQ ID NO: 352011 - DNA, 937 bp, Cannabis indica
ctcgggaatgttgcagccagtattaagattcggaactttgctagggccgaattagagagttagggtaggactagcttgattgttttttaagtgtttactgttttcacatatattctaacacttaactcttttctcttgttgcagcagctaatcccatggaggcaattttggccacccttgccggagctcacattcctgatgtggtgcgcaagcgcaaaggcaagatggtagctgaggagacacctaaacggccgcggagggtggacactccggctccgagccatgatttcgggatccctcccgaggcggaggaatttacagtgcctcctagtattgtgttgacttcggttcccggagatgaggcgaggcaggagcttcggatagccaagtacaattatgcccttgacgagtaatcccgagggcatgctgaggtggaggccttgaggagggttttgcgagaggaggtgcgaaatttccttaacgaggagaactaccagaacccgtgggatctaaacctggaccgccctgacggactggttcaatcgtttcctcgggcctaccttggctccttttgtacgcggagatgaccggcgagtacgtctctacaactaacccggtgcgcgcctaagcggtacgctgcttgtgcatccttgaactccgtcttccaagctcaaggatctcagccacctccttggccgcggtaagtattctgtgattttacttcttttttcacttattttgcttaaggcctttactcactcttgcttccttttccagcttgctgcagacggccgggggagaagaagaagaagcttgacgccatgctggaggcgcgcattggtcctcgccttcctccccgaattgactaggccgttatgaattcaacccagatttttctttatctctttttttttttattttacagccaattctctta

SEQ ID NO: 352012 - DNA, 561 bp, Cannabis indica
ttacatacaaatgtaatctcaaataatagagaagaaaactcccactaacctaaaggagcaaaagattatagcatgcccatataaacatgtttattaaacaaaattgtacttaatcttttggttagaggatttgctattatcgacttggtcatacattattctatcacaatgtctcctttcttgaccaagtctctaacaataagatactttattttcatatatttggaagcactactaatctcattaattattctttgaaaaaaaaaataacattattcttatcacaataaattagtataggagaagaaatagaatcaactagtcgtgtaacaccctaataactaggcgcgctacagtaattttctaattaacgtgccacatttcttaatcaaagagttttccttaaaaatcgtaccaaattaaaacttttgatttaaactaataaattttataaacttttatatatttatctatataaaccggatcccgtatttaaacttttacaaacattatcaaaatacatttataaacttgtcgcacagcgactacaaaatataatcc

SEQ ID NO: 352013 - DNA, 1281 bp, Cannabis indica
tatttattgagaattattactaagatggaaaattaattttattttatttttcagatctatctaagtataattttaaaaatattaaattaaaatctatatttagagttacctaaattggtaattttaattgaataaatatatatatattaaaataaatattagatgaaaatacactttaaataatgagttttattataacgatattcgatctccattattggttctacatagttcttgttttagtgagtaatcatccctaatggatgaatgttcattagcaatttaacgtagtagaatcttgaatgataagtattatttgtaagtgtttttcttaataacgtccaagctaatggtggctgctaagagtaagacttacaaaagtatgaaacaatggtggaagctcatgaaataggaatgaccttgactctcgcctaaatggaacaatgtcggattctctttttgatcgaataaaaggttgctagaatgtttgtcattttagatgagctgactactctattcaatggatgatatctttaactctcgcctaaatgggacactgctatcagttagttggaaaccttagaaattatttatgattgcatggttttgtattttcacttgtcattcctccttgctaagtgccaataatttctgaatgtgtatgattttgtattaaaccttacttgatttatattattgatatttgtagtatccaatatgactatgaacaaccccatggtgtcactgttgactgacaacaatgtctctggagctaactttgtcaaattgagagagaacattaatattgctctcattggtgaaaatgtcctatttgtgttgactgaaaagtcctgagcagccaggtgagaatgcgacctaggcagtcaaggaaaagttcgagtgttggcaaaatactaacaataaagctcgatactttatgctgtctagcatggtcgacaccttgaaaacaaggttttccaatactctcaccactgcagatatcatgaaccagttaactgaactgtttgggatggtgtcaaatcaagctcgttttgaggtggccaagaattgcatcaatgcacggatgaaacctcatcagaacgtatgtgatcacctgctctaaatgactagttacttccaggaggttgagaatcatggatctattatagatcagacaagtcaaatgagtttgatcttgaatagtttgactccagcttttctaccctttacataaaattatgtcatgaccaagttaaattttgacttccacgagttaatcaa

SEQ ID NO: 352014 - DNA, 1421 bp, Cannabis indica
aaattttcatagagacctggtgctccgaagagtattcttgaacactaaagactcaacaacaggagtgttggggcctaattgggaaggctcctatcaagttacagagataactagtatgggagcctacaagctggaaaggtacaacaagaacatggaacttgttctcctaccaagatactagaatggagagcaccttcgcaaatactatcagtcaccagcttacaaaacactactccaaagtagcaattctacctactcaatattagagtacaaaagagctagtgcccatggcctttttggtgtggtctcccaccgttcatcaacggtggcctctgctatgcaaggcaagcaagggtagctatttgacatctagaagctaaatctttgtaatgtaagcttataaattcaatatatgtgagttgcacaacagcaaagaccaatcaatgaataaaaataatgtttatgttctatttattgtgtttaaacaactttctcacaagattgacttcttaaagttactcttttagttccacatgcgtactatggagcaccccaagaaagaacccaggcaaggtttgagaaacttggtgaatagcaagtgactaagagacctgtttgaatggtcacttgggggcacccatactatacaatgcatcaagctagcacaaagaatttatgtagagaaatcgtaatgcttagaataagctactaaacctacctctaagtcgtgcgggcatactttgacttgacaaagtaaatttagaccctaacttgtcaaggccataagaagatatccatgattgaagaccgtccggtcggtcacacaatccataataaaaaagcaacaaggtcaagcaatagtagtgttcaaaaatagtgggcctatagaccaaagatacaaacatgaaggccttggggctaaaaataagtagtgttctaaaaaggccataggccacatggaacatgaaaatatgtagtgttctaaatgtaaaaggccacaagccatacagaacatgaaaatattgtctatattatacaaatatgatgttgaatactactaaaaaaaaatattgtatatgtctgtgcaggggtaggtggagccaagtttgaagctacaagatcaggattgtcaaattctaggttggccacaacatcaccaagctggccgaccacctcctcagcaggtgggccagttagcctctcatcatggttccttgatgatgacccctctcgataggcagcgacctggtccgcttccatccagctctcgaagagtgcctttccttagggcaacatgttctccacaaaagcctcattgcccatgtatgacagattagctctagggttgcgcaacttgaactcataagtgagttcagaggacaagttagcatactcctcccttatggcctgctggccatcaa

SEQ ID NO: 352015 - DNA, 568 bp, Cannabis indica
ctcagccccattcgaaagataccaagtatcaaacgcaggaaacaaacttctttcttgagcttttctccactgatcaagagtgatacgagccaaattgatatcgaactccactcgacttttcctacccttccataagaggtgattttgtgcgaaataaattgcccaaaccagcatcactgcctgaacactttattcctcacccaatcgtgagaacaaatgaagaaatcagtcccaaaacgactttgcatcaactagaatcatagccaaacccgctagccgccaacaattctctgcaaaatcacaggaactaaacagtgaaaaattaattcacttgccccatgacaaatcgaacccaacaaagaaatattcatatgtttagtcttcaactgaactctcgtaaaaagacacccactaaccgccctccatacataatttttttgcctttggaagaaactttaattgccaaaacttcttccaaaacgccacaacctccatgtccacactgctatcatgatttgcttgtaataatttaaatgcactcttaatcaattcaattaattaatcatac

SEQ ID NO: 352016 - DNA, 1216 bp, Cannabis indica
ccgccacgtctggccaaacggcgaatagcgggcttggtgatgccctggatgttgtccctgagaaccttgcgatgcctcttggctcctcccttgcccaaaccctttcctccttttcctcttcctgacattttcgatttctttctttctctgcaaattggcgtgtaaattagagtggttgatattggtgatgacgataagactatttgtagatgtagatgatatgaggcttcaccgttggattagagagcgatccgcgtatacatgaagtttgacttgtcagccgttcgatttaatataagagcatttgattggtggaaatcgttataagcggattcggaaatatttgaaatctatggctggcgggaacttacattttttagtggtttttttttagcacttttggttgttctacatatttattttcctgatattttttgttttattttattacatggtatttttgttgttttagatgagtattaaatttttctttttgagaaaagttctgttatcattaattggaagcgtcatttacaacaatagaaaaaagagtaggagagcaatcctcataccacgtacaatcattatccaatactaatgcttgttttgccaagccatgagcagcttgatttgtatctcttcgaacgtgagacacacaaacattagggaaataggacaattgatttctaacatcagaaataagatcagaaaaacctaaatttctagatgctaaactttttaaactagtaactaacagtaggcaatctaactccacaaaatctagattaatatgcaaagagtgagcccattggagaccataatagagagctttagcctccatttcatgaggtttcaaagatccaggcattggcttagataaagcagctttaacatgcccccaagaatcccttataattgctccaaaccccattgtattttttttatagttttaagttaatattaaaagttaggtgtgtaattagatatttaattaaaaaattaatccaatctaattagtaattagattagattttgaggtttaattggattggatcggatcatgatttttcaaatctaattaccaaatgaatttgatcaaataagtaaaaaaatattagaatgaatcggatgtccaaccctacttagggcactcacaataacttctctaaatagagaagttttaaaaatgagattctttcacaaaaacaacaaaaaa

SEQ ID NO: 352017 - DNA, 640 bp, Cannabis indica
tttggatgaaaatatctgaaatcgggttgcatacacgcgggcgcatgaaaatttgaaaaattggttagtttaggtttgaatagaaattttagggtttctaaccataaaatttttaaacttattttattttattttttaccaaaattggtaatatcctaaccataaaatatcttatttttcaaattgtttattttgtaatatttaatttattaaattataagattaagaatataatattaggaatatctaaattttaaaaatcaagatattatattatattatcttattagaaatttaactaatttaaattttgaataaacttgaaatttgaaaaattggttagatatttgaatttaagttagaatttatgatatttaggagatttgttagtttttttgaattttttcaaatattccctaccaacctaaattttaaattctagttaagatatattttaaatttaaaatagagatatcctagcctactttccagttatctgttacttgttttgtttgtattgtttgattattttttatatattcaattttttttttcttacaaatctattatttatttgatctaaattgctatgattaacttgttgatagatccaatgatctgattttaatcatagttcaat

SEQ ID NO: 352018 - DNA, 881 bp, Cannabis indica
aatagtttaaaattttatgaattctgaattcaaatttatttatttgattacatataattgagaactgtttgattaaattaataaaactgtattgattaaattttattttagggtaccaaatatgtataattttaaaaaaataaggtaccaattaagtattattaaaaatataaggtaccaactatatttttggtaaagacacaatatactaaatgagcatattccctaatttttattagttggtgctggaacttggtagatgcgtgagaccgaaggaaaataatatataatggattcaaagtcattatagttgcagcaaaaacaagcaacacaataacatacatctttattactggaaagttcgcattccagcagaagggatgtataaatgaactttcaatttgtttccacatctaaaaaaaaaattagtcaattttttttttttttatgatgatgtatttatagttattttaaatgttgtataaaatttaaaaaaagaatatttgcggcataaatactatatgttttcaattttatacacttaaataccacatattttttttttgacggattaaataccttaagttacatttccgtcattacttttctgttaaatcctattcaaacatagagtatttggagcataaatacttgatgttttaaatttcatacacttatataccatatgtttttgcttttgacggattaaatacttaaagctacatttacattactttcatcactacaagtctcttaaattctattataagggattttttcaatattatacctaaaattgattttatttacaaaaatatcttcaacaaatttatttgcacaaataggaagaaacaagaaaagatataactataaatagtatt

SEQ ID NO: 352019 - DNA, 702 bp, Cannabis indica
tccaggaagttgaggagctagacgaggtgtgtacgagcagtccttccgaggtgaagggagaggaagaagttgaaccccctaacttcggggagtacaatgaggctaggcagccagtcgatgctgacggagacgtcctggttgagggcgtggactacgtcagtgaggagcttgctgaggcggttcctcataggaggcaaggtgccttaggcgccacgtgggtaagtcctctgaactctcgaccaggacgggtacctgggtgagctggactactatattgacgcccacgacaattgcgccacaaatcctgataagggaatgtgcgcctggtcgggggctaacggccagcaatttgcgctgatgcccttgcaaaagtactttagggatgtggcggacttctttggcctctgcccagcccaaattactccaaagggcattaagtatttgtcgactctcttcgtcctctacgtttcccaaggatgggatgctccttctccccatgaggtcgcttggttctttgacctgaagtctacccccaagcaatgcaggtcggggtatttctacttctctcagccaggcttcaagtggttgagcggcacggacgacaaggccatcagcaaaatagggcgttttgttgatgagtacttcatggtgaaggatccgagtatcacccagactcggtttcagtagattctgacatatcac

SEQ ID NO: 352020 - DNA, 1079 bp, Cannabis indica
acatgaaggaatcaaacttcttgtaccactgtctaggtgcctgtttgagtccatataagctttttctaagcttgcacacaagattctcttttcccttgactttgaaaccctctggctgctccatgtaaatttcttcttccaagtcactatgaagaaatgcagttttcacatcaagttgttctacttctaaattcaagcgagcagctaaaccaagaacaactctaatagaggacattttcacaacaggagaaaatatttcttcaaagtcaatacctttcttctgaccgaaccctttcacaaccaatcgtgccttgtaccgttgtgagccattgttttcagtcttatgcctgtaaacccatttgttcttgagagctttcttccctttaggcaacttcaccaagtcatatgtgtgattctcatgtagggatcccatgtgtttttgcatggctccatcccactaattattatgctcatgtagaatagcttcttggtaatgtagaatagcttcttggtaagtttctgggtctcccccatcagtgagcattacatactaacgagggttgtatcttgaaattggtttacgctctcttgtagatcttcttactagagtctcaactggtggtggtggaggtgcttcttgatcctattcagttagctcaccatcatcatgaacattataatcaatattcttaccacgatcttcttgttcatttgcttcttcattgacatgttcttcatgattttcctattcatctcccccatgatcatcatgcactatgggtgaaggaactgagctagtactcacaggaacattaacagggaacttttgcttctaaactttgtcactgtcttcaaacatttgatattcaagaaacactacatccttgcttctaataatctttttgttcactggatcccataatttgtacccaaacttcatgattgtaccctaagaaaatacatggttttgccttatcatcaagcttggatctctcatctttaggaatatgaacaaatgctctgcacccaaagactctcaaatgaccatatgagacatttttccctctccatactctctc

SEQ ID NO: 352021 - DNA, 615 bp, Cannabis indica
actttcaacgcctcagctatctttaagctggtgatcaaggcttcgtactcatccttgttatttgatgcgtcaaattggaaccttagagcatagtgaaacttatagccttctggcagtattaatattacccctgcacccgaaccctgttcgttggacgcaccatccacgtataattcccaggtttccacgtgtcactgaataagtggaatttcctttggagttattccttctatcgagaagtcagcgaaagcttggcccttgatggaggttcgaggatgatatgttatgtccaactgccccagttcaattgaccattttatcaatcttctagaagcatctagttttgataaaacttttcttaagggctcatcggttaacacttttatgtggtgtgctggaagtatggccgtagcttatgagatgcatggactaggcacaatgcgagtttttctagagggggatatgtaaccttttacttacatagtaagtaggttgctggtgcttgccctcttctcgcacaatagctgcactaaccgcatctttcgagatggctcaatagagaaacaccgtctctccaggtattggtttcgccaaaactagaggcgttgctagatg

SEQ ID NO: 352022 - DNA, 1181 bp, Cannabis indica
ccactttggaggaagttatgaagagccctgttgcctaggagaactatacttctcgcgccaatggctgggaagcagatgagctccattctaccttggtctgtgctcatcagctcgagaagattgtgaccgtggtaggcatcaagccatctgcgtctggggtctttcaccgcttgcctcgagacgaagagacgcccaatcacaactatggggggttcggagcttggagccaaaaccaaccttatgtctggggccatgctccctcttcaagactactttgtcaatttccttgtttttgtcggccttgcgccttatcaattaattccacaagcttaccgcctgctcttaggcttgtttattttttaccgtgcccagaggtctaggcttcacctagcccggctggaattttatactttcatgaacttgtatctgtccccaagaaagcggacaagtttaagacgattttttcaccctccgggcccatcttaaatgagggcccggtcccttttaatcatcaaaagaatgtaaaggagtaccaccatcgcttattcttttcttccggcttccaagccgtggaccgcccggagcttctcacggagtgggtcaggattccccctcttctccgcactgctcctacccgtctgtttctccaacatgccaagaccttctccacttacgacaaaaaagacctcaacatgggagacttggttatgtgagaaaactgccggatggccaaattgatctccgggagccggtcggtggatgacttcaatctctcaaaggttctctgccctaacatctgcaccccggccgcagagaaagcgctccgggtggagattatagcctcgacagaggaccagtaccagaagtacctctttaggatggaacatgagctggcttatatcaaagctcaggccgtcgccaggaggacccttcgcttggaagcaggcacggatcggatgccttccaggcctaagtctttggtcctgtttccttatactggggctctcgatgccagaacatccagctccgttaagtctcctttaacggtctatcatgttccttcagtccaagagtattcccagtataggcctgtagggttcgacgaacgtcttcttaagtttaggatgccctccactcagtgggggatcatgcctaaggccttttacttttcccatttaggt

SEQ ID NO: 352023 - DNA, 599 bp, Cannabis indica
tattattattaataatataattatgtaaaaatataaaaatattttaatttttattattatatataaaaaattataaatagataaatatatataagttttttaataaaaacaaaatttactattttctctactactccagcttcagtaatagcaaaacaggtcaaagtaaagtcaatacgaacacgatatgattttttacaagtcgagtcagggttgaaaattagacacgagttaaaaacggatcgacttgcctaacacgaaatatagaagtgggtcacataaaatatgatatgaacacgacacgataacatgttttgttacccctacttttagacacctcaacaaattatgtatttgcaaagagcattgtattaggtaccataaagtacccaacacaatactgaggtggcacgttgtgagtggttagtagttccatatattatttattaaatcaaaatatataggacccaatattaaattacactaataacaataacaatatacactacaagaaatgtcacttttaccatcacagttcgctactgcgctggtaaaagtaacttttaccagcacatttcacaaactgtgctggcaaagag

SEQ ID NO: 352024 - DNA, 594 bp, Cannabis indica
ggtaacctctagggagtataaaagaacctagggttatggattcgagtttcccgggtttaaggttttgatcatgtaacttacccagtttcataatgtgattagggcatccatctagcacaggacttttcgttcaggtcgaccagctcacttgaatctcgaaagaaggtaagaactgtatataatatgtgatattaatgtctgaatgtatgtatatgttatgtgtatatgcatgcttatatgttgtgattcataatctaccaacacttgtacggttgcggtacagagtgcattggttaggtgtatgatgtctgaaagttcatcgtggtgtaaccagcacttgtacgggaaggtacaaggtgtctgtggtacaacacttaatagtactcaaggtgcggtccataccctacctacattagtacagaggtatattgagtgcatgtggtacatggtacatggtacatggtcgtatactagttagaacgttcttactcatctgttgagccttgtaaataggtgtatgggcgcctacaagtcggaaattatatgatatgttatatgcttttcttagtgagtttgtcgactcacagttctgct

SEQ ID NO: 352025 - DNA, 677 bp, Cannabis indica
cagtgagcagaaggtgagcaaaagctgggcaagtcaaaagctccttccactggaacatctgcccaactcccccattacccaaataattcaagctcaaatggtaaatgttccaacaacaacaataggcaagggaatgggaagaagggaaagttcaccagcaaaaccaagcaagctccccgggagaatcaagtaaagtacactgcatttaccatcttgactgaggatatagaaagtgtctacatggtcactcagtcgctagttccgtacaagaaacccgcgcccacgaagaaggatgttagcaagagagacatgaccaagttttgtcaatttcacggagactacgaccacgacaccaatgaatgcaacaatctgaagcgggaaactgaattcctgataaggaaaaataacctgcacttacaaaagtatgtcaaagccgatcagaatcagaggaacgataataaccaagacttgctacctccaccggtagatggacatctgcaagtcatcattggaggtccacacatagctggagattcgggcaaagctcgggaaaggtatgcccgaacagcaaagtacgagcaagaagaagttatcctggccgtagaagaaaggagacccaaaatcccacgggcagaaaggcctacaataaccttcaacgatgaagatgctgtcaaaat

SEQ ID NO: 352026 - DNA, 576 bp, Cannabis indica
aaatattactcccactaaccttctggtatataattattttcataattcttttttcaaacctaaaggaaaagaataatgaaaataccaatttttgagatgtttgtcttcatccacatgtagacttttaaagcttgcatatgctcactactattagaggaaaatctttatgacagtctgtataccttctcctctagttaactgtttggaatttattaatgaattgaaacgagcaataaatgtcaaggtctataatagaatcttttataaagacaagtgagaatgtaaatctcatttgttattgattcttagttcaaaataaacttcttagcaatgaatatcttttatatctttatgtttctcaatgttttctaatgagtattattagtgaaaagcctatgcttaattaatgttctccaccccataaggcaactttactaaagataaacttcatttctctttaagatattcatttcttcattcatggcatattgtactacgatttcaattctttgcattccacggtttaatttgcgtctcaaatgaatattgtagttgaactcttattgtacaaaatgt

SEQ ID NO: 352027 - DNA, 1100 bp, Cannabis indica
tcattatccatgtgtcattttcttattgatatattttaaagaattttttttttttgtagaactaataataatttaatgactttgaccaattaagaattgtcacgtgataatttactcaacacttaaaggtcaggcacctacagaagttccaaaattatagcttaggtattattattgcaaaaaattaaacatatgtatttatttacaactgagagttaaacttaagtgtttgtaccgtaatttactctacataaaacatcaaaaaaattatagaaatacagttgtacagaattttaaatatttttacgattttatttatagaaattacggtttttttatggtgtactcttgttaatttgttattaatttttattatctataagttattttttgttgttattttgatgttattttcctattactttaatgtaattttttctgtttatttttatacaacaccgtaaaaatatacaaaagaatctttaaacataagaatgtaaacattttgaatattctttttatcaataaagaaacaaatttatttcattacttgtttaatgtgttatttggttcacatgtttatttcatgatcatttgtttgatttataaattcatccaaattcttatcactttgatattcttgattattgtgatgtcaacacagtggaaagtaatcaagattatatgattaaataaatttctatgatttatcagtatacatgatttaactgatatgataatctacaatgtagtttacttgcaccttggataagtgcaatgtcctttccagggcattggttaaagtaatcttcaattggatgtatgaagtatgcatcggaatgggccgatattgaacttgaataagatataataaatttaccttaatatctatctaatttaatatcacctagttgatcttagatccatgatctaaatcgggatggttaggttctagttgagttgtattatttatgttcttcaatttgttcgttaatgttgaccaatgaatcttctcgtgacatatatattaaggacatggttgtttaatttagtgggagcactaataatagatacaaaatctatagcttctataaatgtat

SEQ ID NO: 352028 - DNA, 862 bp, Cannabis indica
cgatctctttctcaaaaggagatgtcgctcaagtcaatttctcgaacaacgatcttatcggctgcaagatggaggtggatgtggacgacatgcttgtaaagtccaaaaaggctaggggcatgtggaggacctaggcgaatgctaaaaaaatcctccgcagctataacatgaagcttaactccctcaaacattcttttgaagtaggcttatgaaaattccttgacttcatagttaaagcaagggaatagaagcaaactcagacaagatccaagccctttggacatgaagtcacccacaactatcaaggaagtacaaagcctaacaagacgcattgctgcactaagcagattcgtgtccgagtctacagaaaaatgtttacccttcttcaacattcttagaggcaacaaaaaattcgagtggacagaggaatgtgaaaccacattccaagagctaaagaaacaattggctcaaccacatgtgttgtcgaaacccttagataatgaaaagctaagcgtgtacctagtagtcatagaacatgttgtgagtgttgtcctcagaagagaagaagacggtgtaaaacaccttgtatacaacataaccaagagattaatcgatgttgaaagtcagtacccactcatggagaagctaacctataacttgctcttggcttctagaaagctaaggccctacctccaggcacaccctatgaaagtgtagaccaatcaaccattacggtaggttttcccaaaatctgtagcacctgaccaagactcggccaatataaggccacttgtcaccaaacatggccatcaaaggccaagctctcaccagcttcatgcctaatcatagaagcatatctccc

SEQ ID NO: 352029 - DNA, 758 bp, Cannabis indica
ccttttgctttacaatgtctatagttggtaagaacatatattacatatttagaatacacagattgtggaatttagacagcttgccatatctctatgatacgatcccagacttatagggattgctttcatgcttcacgatgcaagtcttggaattgctaagtgttgatacgttactcgaattatccactgctcggttgaggaacacattatctgtgcaggtgtatgctgagctttgctcggaacatccccttcaatcagatgcaaggagtaaggtccatgtgtcactagtatgtgctaccacgtcatagtgcaaaaaatggaataatatttgcccccaagtctgcacgggactttcggaatcacgtgtagacttcgacctaacgccgaccgtcgcatcaggatgggtgacacgtgttgggtgcgtctggtcgtgatctggtccatatgtcacaataatgttaaaccgataattaaatcaatttaatccgttctaagactactcaaaatcaaaagttttcctatcgataaatagcatgccaatacccctaaatatagagaaaataaaaaaattaagtaggcgatccaaactactggtcctaactggttcaccgagatctcacctggtcaaccaaatttacaagttccgattacctagttcccatccagttcactggattacactagttggaaaaacttcgagttttgaaactcaatattgcctcaaccttgcaccaactcatccggaacatttttaaaca

SEQ ID NO: 352030 - DNA, 725 bp, Cannabis indica
atatgatcctactaatctatttcagacataaaattaaattttagctataagtgagtaaataagcgtaatttataaattacagagatttatatagtctgtgtgaatgtaatatgagctatatgtagtaataaaaattattttcagatttggtgactctagagatccgttaagtagataaataagcaaagtttgttaattacaaagatttatttgaaatacgtggatataatatcagttatttatgaaataaaaatattcttaaattcggcgactctagagacccgattgaaggccaaaaatatcacaacagttttagttagaaatattgataggattattgggataagttgatttttgaaatactggagtattttagggtactcggagttggccaaataacctaaaaatatagatttcttaatggctaataaataatgagataacaatcaataataaaattattattattattattattattattattattattattataatattattttatatataaaaaacttattacaagttagtatatcttacaatatactaagagcctatttacccttttatagcaaaaattcgtttaaccttttcttttaatttcattaatatcctatttatttgttatggtgtaccacgtatggtacttgtttataattaattgttttagttatatctattctatataaagtgtacctatataactgaaattcttggtt

SEQ ID NO: 352031 - DNA, 896 bp, Cannabis indica
taagtatttatctgccctcttcggtctctacgcttcccaatggtggggtactccttctcctcacgaagttgcttggttcttggatttgaagtccaccctcaaacacggcaggttggggtacttttatttctctcaactaggcttcaagcggttgacaggcatcgacgacaaggccaccagcaagatagggcgttttgttgatgagtacttcatggtgaaagatgcgagcattacccggactcggttccagcagattccgacatatcaccgttctcccctcactctagctcttagggatagagctcaaaaacttgcctgggtgccgggggaagatcggaacattatccagttgacctctgaggataactttgtgaggtacgggctctatcccaaggactttactcttaagttcgtggcggggaagaagaggaaatctggtgttgcccggactgaacgaactcatccagagaatgagttgattcaactgaagcgtgaagctcagttgaaaggaggtgcaagggccaagcaatatgctcaggagccctttgaatcctgaagatgaagctgaggaagagcaggtgactccttgaagaggaagaataaactcccggcctcgcccaggcctgttgaacatgcaattcgcataagggagcccatttcacgtgttcgaccatctcttcccgtgttcggaaaagggaaagccatcatgtttgagataagatcaatgtcaggtgatgatggacttctgagtcttgttcaggcggtcaccttgcattttactttatcttgtttttgagcttcttgactttcatgccttgtgcttctgatggctgtcttctactcggtagatgctcgacgctctgaggaagagaatgggccgaagctctagcacctct

SEQ ID NO: 352032 - DNA, 969 bp, Cannabis indica
catgggtcgcccccaacctttcgaatacagaagtgcctggctaccttagcaattgatttgcttggttgacaggtggaatggcaccattgatcttgttggaaccatcaggtatgacttctcctgatgaattactagacaaggtctgcccgcctaccgctaggcccacgagtggaactcgtgattggggattgggcggctgacctatttgtagtgtgggaagtattcatcgctggatcttcatccgtctaacccaggggaatgacatggtaggcttttcgtattagcacggtagcttgctgactacaatttttaatctcgtccatgatgaggccttaatgcctccatctctctatctctccacttggtaaacatacgcctttattcttcgaacgagagatttatcgcagtatggagttcgtcttgagtgtttgttcctggcggaacagttgtgttatgaatgccctggttgggtacagaactgttattcccagtcccctgcacaccaagtgcgatttcatctaaaggagttgttacaccattacccacgtttgcctgctgtccaggattaacagttgggggaacccttgtgtttcctgggttctgcaatgcaggatccaccgtctgtgaatttgctcgatcagtcaagcctctacgagtctacactatcgtatttgtggttagattttgaataaagagcaattcttgattctgctctcaatgaaagcacagaaatgttgacctcgcttttagcccacgacaacgagtctaatttagtaagacataagtgatttatagcaatcgatatataacaaagcaatataaagacacaagaatttatagaggttcaaccccgagacgtttggtaatagcctaatcctcgttactgtattgacttaagagcaaggagaaaggttcattttcttatagtctcttacaacagtatctctgaatatgtattcttagtataat

SEQ ID NO: 352033 - DNA, 594 bp, Cannabis indica
gtaatgggttttatttagggcacaaaacccaacaatatgaattgacatcaaaacagatttcaccaagaccaaccaaccagcaaaggataaatgcttggtgctccaaactctgatccgagcagtcattttctgcactaaaccgctacaatctgatgtagaaatccttctagcacaaatgggcacacccaagtacttgaatggatcatgatgtcttgcaaatctggacatgtctaacacccttttaatttcatttttcactcattccactacaatagattgctgattttgcattgttaggctgtaaccctgatgttgcagagaacaatttgagagctttcatttagatagatacttttaaaatcccctctacagaacaataacacatcatcagcaaagcttaagtggtttaagcccagttcagcacatctctcatgatatccaaagtcttttttctttcctagtttcttcattattctactgagatactccattccaagaacaaacatgtaacgccctaatgctaaggcacgctacagtgctttttcaaatattgtgcaatctttgctaatcaaagatatttctcgaaaaacgtgt

SEQ ID NO: 352034 - DNA, 857 bp, Cannabis indica
tgtgattatctttgttattgcattaaacttaaatatttgcatgaattgtctttgggatttttaaatttctaaaattagcttaaatttccaattcacccccctcttggaaacatatcttgggctaacagttttgattctgaaaaaagagttaagattccagcagttaggccccataccaaaccctaaaccaagaaaaagggaatgggggtcccgtaaccgctggaaagaggcccctccagacatctgtcaaacagaaaatcctagaaggatttcctggacaaaagtcgggtgcaatgaactcacagaagacaatatcgcgcgtaaaagaaaaataaagggcagaaaatcgagaaaaacaaagtcttctctatgccctagaaaggccagtacacgaaaagcgtatggtcctttgtaaaaataacaacaaacacatgacaagagtagccctaacaccagaaatggtgaatctagacctgttacgtgaagaacccaaaagtatacatttccagaaacttcaaataccaaacccagaaaaacaacaaacagataagtaaagcatgccatgtacattaacagtaaggcaagggatgcgagaaacttacaatgaagtgttgaaactgggggttatgttgtcgatcaaacaagggaaggtcgactgatagtagtgaatgaaggttaactgggaagtttgtgaagtgttcaagggtgttctcttggtctgaggattttttcttttctttctgggtaaatcgagcaaagttggcaagaaatgagaagtaaccgaaatgaaggaaaggtggtggcttttataggaaaaaatgcatgaggaacaggcactatcacctaccaatcgaacg

SEQ ID NO: 352035 - DNA, 850 bp, Cannabis indica
ctctaatattttcacccgaaatgactttttgcttgaacaattctacatttgttattaattaataattatatcacatatatatataatgtaatatctaaacagatataaattaattaaataaatttttaatttaaataattaatcacacatgtaattaatatttaaatattcaactacattacagtataatccaaagtaaacttccatatttaataaagtatattaataatttttgcaatattacacatagattttcttcacttttgatatctctttttgaagattgaaataagtgggatgaacttatcacaacataaaaaaaaaagagaaacttttgttaaataaattaaaaaaacataatcaataataaaatgagtggcaatgtgtgaatatgaaatacttaaaaagtttatgaatcacaacactaagtgaaaagtgtttatgtattgattaatgatattttgcacctaaaataattttaaattcataagtgatataaatttaatgtttataaaactgtaatttttctttgattttgtcagtacaaactttgttattgtcttaaacaaggtacatatacgactcagattttagattattagaatctaaacaaaaacatagggaaatttacaccctatactgttttttcccaatttataactttttttactgttgcacggaaattgcaacatttatactgttttttttttttttttttttttggtcagtttactggcctttaaaactttagtctttttttttttttttttattttaagttgtataaaaaaatgtatgtgatgggaattgtcactatttgtggctagcttttttttttttttttctttctt

SEQ ID NO: 352036 - DNA, 1760 bp, Cannabis indica
aaggctattttctttccaattttttaattttaggctaaaaggtatacacaaatgtatatctaaataaattaaaaattaaagaatatatttagattataacacttaaataaagttcactaaaagacaagggattaaatggccaaaaagatcattttacccctcacaaaaccaaaaagtttctaactcacttaggggtattttggtcattctactacttcgaataatttccgacattcccaatgtctaactaagttgccccactactactaaaatactaaaatataattctaatggccaaacaccgcgttccgatgttgccaggcacataacatgaaaagatataaaattccatatatggcataaacaatacaccttgaattcaaataaatctccataaaatgataaatcataattaatattctagtttcataattaaaccctaattatctgctaatttccaaaacaaagctaagcagtctttacaattatccccctgttaaaaggatttcgtcttcgaaatctaacctaaatagctctgggtattgagccctcatgtcggactcgaactcccaggtggcttcgtccaccttactgtttctccatagcaccttgaccaaaactatggtcttgttccaaagaactttatctttcctgtctaagatctaaaatggttgttcttcgtatgatagatccggttgtagctcaagattctcataacttagcacatgagtaggatctgaaacgtacttccataacatagaaacatgaacacattgtgaactgctaaaagtggcagaggcaaggctagatgatatgctaccagtcaaaccttctcaacaatctcgaaaggccctgtaaacctagggcatagcttgccctttccccgaaacatccgatccccttcattggagacacccgtaggaacacatgatctcctacctgaaactttacatttctgcgcttcagatctgcataactctttcgcctactctgagaggcaagcattctggccttaatcttttctatggcttcattagtccaatgcactgattccaaacctagatatttctttttctctcgtttcatcctagtgaataggagatctacactttctgccatacaacatctcgtaaggagccatccctatactactttggtaactgttgttgtaaaaaaactctatcagttgaaggtacttgctctaggagccctcaaaatccaacacacaggctcgcaacatgtcttccaatatctgaattgtcctttcaaattgttcatcagtctaaggatggaaaactgtactgaacttcagtttggtacccatagccctctgaagactctgctaaaacttcatagtaaacttcagatctctattcgatataatggactttgaagcaccatgtaacctcactatctctttcacgtataaatctgcatattgatccactgtaaaggttatttttaccgatagaaaatgtgcagactttgtgaatcagtctaccataacccaaattgaattgtacaatcccgtggttctaggtaacctgaccacaaagtccatagtgacatcctcccacttccactcaagaagtgacagtggctgcaataaccctgtcggtctctgatgtttagccatgacctgttgacaagttaagcaccgggatacaaattccaccacatctttcttcatcccgcaccaccagtagtagggtttaagatcttgatacatcttggtagtgccaggatgcagtgaatatgga

SEQ ID NO: 352037 - DNA, 667 bp, Cannabis indica
actagcaacttccttcgtaagcttctcagtaagcccatgcatgcaaaaaataccctccttgtaagcaagcaacttctttgatttgaagagatcaacatcataggatttagtacaatccaaactagttattatggaaaactcttcaatttcgaaacgaacagccttgtctcccaatttgaaccaaagctcgacatcatctctttcggtgtgaatctgctgcaaaagaacgagatgaatcaattgtatctgatagttaaagttgctcacatcaagaaaatgcccaaatggagacttgcgaaacaactccttctgatcatctaacaggttctcattgatatcatcaatgacattataaggattgtagagttgaggtttctcagcaaacctcttcttaacatcaattttaaaataatattcctatgagagaaaaaacaatataaacaatcgaaattaaaaaaacaactccaccacatccttagattttcttttctttgacgcactagcgtcatcactaacagtttttctttttttgcttgaaacaggttttgttacaactttctcagtttgaaaattatcatcactcgctactggaaggacattagtatccttctactaacttttttagaacggtgtttcgagaaacatgatcagcaacatcggctttagc

SEQ ID NO: 352038 - DNA, 1119 bp, Cannabis indica
taagaaatggattagaaaaaaccataattagataattaagaataattgaggaattatatcattatatagttcaatatatgtggattaatatgatttataacatggtcggaccccgttggtgagctaggggcattttagtaattatgacctgagaagggtaaaatgataaaattaatttaattacatgcttaatagaactatattattgtatagtatgcctatgttgtcttttcaggtgtgttttgacaggttggcgcggtatagtcacaaccgggtgtttcgggctgaaccgggttcgggaccgaaattaaatttgaattgaaataattggaatttttatttaatggtgataatcttaaattatattggatatatgtgtgcatgaaatgactaaaccacccttgtatgtgtgaatatgcgagaattggccctaggggctgttatagtgagatttctctcacctagaaactcgagaccagactcctgtttcgaggacacgtgtattcaattttcccaagaaaatgtaagatgtcaatgagagactcctcgagtttaaacctcgcctgacctagaattagcgagatgatgcgaaaaatgaccaaagtccagtcgcattcgtgtgactcgcattatgtaggaccaaggaacggatttaactcgcatgtaccaggatatgtaccaggaacggatttaacagattgaccctctatgatgcgagctagtctcaatgacccaacggcctcgataaatcaatatagactcgcgtgtctaggttctatctgctcgttatacgatgttcgtaagtgcgactatacaagaacgcagacatcttagacttaattaaatgttgggtatatcctaagcccgtgagattaggatagaatatgaacagccaactcgaacattagaagtcgcatatgttgttgtatttagtgaatagaaactgttactcatttattgatgtttacgttttagtttaattactgtaaatcaatgtataaacgcattgataatgaatgcaatccttgtataactaactagacacttgctttgtatataaaagagtgatccaccatgaaatgggacactacgaaactcttgcaatagtggactaagcag

SEQ ID NO: 352039 - DNA, 887 bp, Cannabis indica
atctttctattcatttttatgttactttaaaatgttttttatttttataatgcttcttttttatttctacggtggcattaattttttattcacttttacagctttttttccttttttttttgccaaaactgatttatccttctcatttcctagccaaaatcaaatcgaagtccgtacaaaaaattcacgattgcccccacttgaaagattttttttccgtctcgccttcccatccttcgccggagttttgtgaaatattggtaacccccactgagtagtgtcccgaaatggagcctccattaaagtaagcactgactgtcgtaagctgatgaatatccaaatcaaaatctctaaagttatctattttaagtgagttgtgcttaggattatagctatttgggtctgttgagaaataattatttttctttatcatttgaattcattttctctagttaatgaatatatatacatgttataatctaagattcaaattggtcttgtacgctttgtgtttgtaatattaaatttcaagatgattaccatatatatatataactatcatataagtatatctattctatataaagggtgcctatataacaaaaaattcatggatgactttttatttatattaaaaataaaataatttatgaaaaattcatgagtcactttttatttatatataataaaataaataaaataaatagcttaatttaattctctccttaattctctcatatttttaattttttattaaattaataaatattaatcaattaattaatctactaatattaaaatatctactaaatttttttaaagtttagcattactaattaataaaaacatcaaaatatcgtccattcctatttcatatatatacaaaa

SEQ ID NO: 352040 - DNA, 689 bp, Cannabis indica
tggtgtttggtggggaggtttttgaatgcgagatcgatagattttgaagctatgaaacacacgttggtggggttatggaaaccaggcaaaggattgtttgtcaaggaattggggccgaaccttttcttatttcagttttatcatgagatcgacattaagcgggttattaatggcagcccttggactttcaataggctaccattgatatttggtagagttccacgaggtggagatccgaaggctgtaaagcttaatcaacttgatatgtgggtacagattcatggcctttctacgggatttatgacggagaaaattgtctctacagctgcaaactacattggctcctttgttgaatcggatcctaagaataatggtctttggcgggattatctccgagtcagagtgacggtgaacattgatgtcccattgaaaagacgaatgaagcttaagaaaacgggtggtgagtggttttatgctaattttaaatacgaatttgctccgacgttttgctttatctgtggtttgataggtcattcggaaaacttttgtcctaagttatttgatacacctgaggatgagattgttaaaccttatgggagctttatgcgtgcgcaaccacgaaggaaaaattatctattgaactctcagtatttgcgtacgggtacggaggccgatgagcagtttgacca

SEQ ID NO: 352041 - DNA, 634 bp, Cannabis indica
ccaagtctcctaccatgtaggcttggtttttattaattttttctatttaggaaaatggccttgtagccgagacaatggttttgccccttgtggcgcttttttaaagactgatttgcaaagttggatggccaacttttcatttattttatcttttgttgaatgtctcgtacgttttatatttgaacttgatatatttgtttgtttccatttttattcacaacttaaacaattatattttgatcaaatttaaaatactttcagcctttccattgctcatatttttcttcaatattatttaagtagttagtaatctactatgtgcgcgagcagttattatctgctatgcttttgatttgcgagaagttaacagttatgcttcgcataaacagttataatctgctttaagcaaacttaaatatacttttaatgattcatcactttgtatatttttaattgcttatatgaatagttaggccttctattcatatattagattaagtattttttctaggcatcttggtgtctcgtttaatactttcctacaaaatgcgagtcattagtattcagctttgtatgtagcttaatgttatttttatgagttatatctcatttataactgctacttttgactttc

SEQ ID NO: 352042 - DNA, 1250 bp, Cannabis indica
ctgatacttaggcgcactatagtgattttttaatcaacgtgcacctttgctaatcaaagggtttttcatgacattgtgccaaattaaatttttgattcaaacttttaaactttataatcatatatatatttacataagcggggatcctgtgtttaaacttttacaatcattattaaaatacttttacaaacttgtcgcacaatgactagaaaatgtagcccaagtcgtcttgagaccgaacactcgaggtcatgtcgtttcgacatgtacaatcatcacctaagctcggaattgactcctatttagcctttgcctttccttttattacacaccaaaatgacatttgtgagttaacaaacttagtaagaaaagcatatacataatataataccaacttgcatctaggcgcccatacacctatccacaaggcttataagataagtaagaatattctttactaaggtatgaccactataccacatacactacataccgttactgtacgagtattggtagggttttgtaggcccgtattaaaagtttactaaactcaaaagataattttaatatattataattatataaacatataggtcgagatcccgagtatcaaaatatgatttaaaagtatcttactagcatatacatatctatactattttatttttttacaaattcgtgaacagacaactcaaaacacagactcaaaatagtaaaagaccgaaaccctccaggttgcactgccgcgatatgtacaatctctaccgagctccatctcactgttcctccagcttcgcttttcctttacctacaccaggtagcaaactgatgagtcaacagactcagtaagataaacaagacatatatataagtaatgtgatgtcggctttatgcttaagccgccctgagctcagaaattgagctcaccgactggataagaatgttcttaaggaaagtacgacctctgtaccaaatgcactacagtaccaaccctgtactcgtgttggtagagccattattgtactcccaggaattactaagtgttgtaccacatgcacgacgtactccctgatactcgtgttggtaacactgtaatcctactaataatctacattgtactaacactctttaaaacatatacatattagtgttagtagttccaaacattcaaataagcatttattcacatatatgtaatattcatgctatcttacctcgctccgtgctcaagtgtgccggtcagcctgagt

SEQ ID NO: 352043 - DNA, 515 bp, Cannabis indica
ccggtttgcaccaggtttcccaaaaccttccattcaatgctcaatcctccaccaaatgcaatgaaaccttccagagtacctaattagggcataaacaataatttccaaccaatatttcacagaacaaaccattataattcaagttgccattaaagctcaaagcttgagtttcaaaactcaagcttgcttagaactaacatgaagcatcaaaatcaacaagtagaacctttaatcaatcaatattgagcataaaaaccgaaccctaaccatttttaaacctaacagtccctaaaacccaatttcacatattcaacctaaactttaaattcaagaactaggctaggagttgctagagcttaccttggtttcatttcttgttgaatcccttgcttcaaacaccaaaaatccacaacaaaaccccctggttttggctgcttcgaagagagagagagaaaatggcaagagttgttcttcaatttcggtctttttcttaatttcactaaatgaggtaaaag

SEQ ID NO: 352044 - DNA, 1634 bp, Cannabis indica
tgtcgcctgtgactaaacagcaaaagccctggtgtctcgaggattgtacactccaggcctgaccgccccgacatgtacaatcttcacctactcgctctcacgactcctcaactttagctttgtcgttacctacacatagccaatagcactgtgcgttgacagactcagtaaggaaagcataacatataacatacaaataacccgggttataacctggcgcccatacacctgatcataaccctaatccccgtgtcccacacggtactgagtctaggacatccatacgtcaatactatcgaccataatgtcagcctctactcaatatgctaatcatactctagccatattgatgtgacagcatcgatcagtatttcagccaacatacatttattagtaatccgtacaactctatgtatactattactgctatcaatgtaatctaacatgcataaacaacatgtacgctaaacgtgtaataacatatgcataacattatactaatcttaccttgattccgaattcaggtgtgctggccaacctgagtggaacaactgctcgatgaattacaggctcctaaatcacatcaatcataacataggtaagtgacacgctaaatcactttccgggacttaaactttaaactaaaagtttccctaccgatggataacatggcaataccttaaacatcacaaaaatgggaaaaactagggttcccaaaactgccccaaccggtagaccggttcccaactagaattccagttttgaggggtttcctggggaccaaccggaattccggttcctacaggtccccctgaaccggaatttcggttcagtgcatgaatccaacaaaaattaataactcaaccaattcaaccccaaacttagtgaaaccttctagacctgttctaagcatcccaataaacaaattcaaggtgccaaaacacaacaacatgcactgaaacaaaacttgccattaaagagccaagcttgagttctaaaactcaaagcttgctcaaacctaataacaacccacaattcaagcttaactcaacataatctagcataatcaaacctctaaaaagaatactaaataactacgataaccacagcagcaaaaacactaattcatgcaaaatttcattttcttaaaacccaagaaactaaagagaaggatacaagaaatttacctagagcttaatatctcctgctggaacaagcttaaaatgcagaaaaacaacccaaaccctagctggttctaggtgggttcgaaggagagagagagcttgagagaaaatttgatttttgcttatatttgatattttgaaaaattaaatgaaataatattgattttactcaataaatatcagcttgaaacacataaaataagattttagtaaaataattcaagtctcactaaaggacaaaataaagaattacaaaatgactatccctccatactaatagccactaacggtcactaaggggtaaattgggaaattttaaaatcccaacaattctcgacattcccaatgtctaaactatatcgccccgctatactaaaaatactaggatgtgactctaatagccaaacaccgcgttccaatgttaccaagcactgaatatgcaaaattatg

SEQ ID NO: 352045 - DNA, 624 bp, Cannabis indica
gtttagagaatttcagcaaagaataacctcctccttgctgggttgatggttcgaaggaaagagagagaaagaattggagtttgctttgaaatttccaagttaatttcacaagaaatcccttttcatgcttttctattgtacactacaagccaaaaaggtgaaaggacctaaatgcccctctttctaaataaagtaattataacctcccaagggcaaaatggtcaaataccaaaccccaaaaattctaacgcctcttatatctaacaataataccccgataatattctaaattacataaaatacaattttctaaaggcccaacgtcgctttccacggcttccgaacacaatcacagaaattgagtaatttacataaaatagcataataacatatatgatattaaatatatttccaaaatatgcatttcataaatattaatttaatctcatacataaaccctaattatttaataattcaaggtgctaatcatatgcggtctttacaataaaaactttctactaatattttttaatcaatgcaacgaaaaggcaaactttaattttcgtatgaaaaattaaactctcaatcccaataatcaatagaaacaacatcaaatttcaagtt

SEQ ID NO: 352046 - DNA, 499 bp, Cannabis indica
ccgaaatacaattttgggattttttattggcattttaattaagtttgattaatctaaaatttaattgggaatatttatgttgaaaatgactatgtcatccttggaatgcttttatgtgttatttggccctaggggcattttggtaaattggccttttggattaattgcaacaaaaaggaattattttgcattttagaaaaaaaaattcagggctttttcctcttccctagccgaaccccctctccctctttttctccatattttaaatttgctaagtgttggaaaattcatcttgaaagcttggattcttggtgggttttgtgcttagcttggtttggagcttgatgtagttcttagtgttgggattttatgccctaaataaaacccatttcaatataatctaatttgttatcaataaaagattagaagtcatttatgtttacatgtagttttcatgtttatggtttaatatgcacaaaatctgttaagtccagaacat

SEQ ID NO: 352047 - DNA, 586 bp, Cannabis indica
tactctagccatattgatgtgacagcatcgatcagtatttcagccaacatagatttatcagtaatcagtacaactctaagtatactatcactgctatcaatgtaatctaacaggcataaataacatgtatattaaacatgtaataacatatgcatgacattatactaatcttaccttaattccaaattcaagtgtgccggccaacttgagtggaaaaactgctcggcgaattgcaggctcctaaatcacatcgataataacatggataagtgatacgctaaatcagaaccggggacttaggttttaaaccaaaaacctatctactgtaacctaagatgacaacaccctaaactagtaaggaattaaccaactaaacctctgaaactagcacaaatcgacaacacaaattttttggggaacccagcagcaaatttgggtaatcagttttacaggttcggtaaaaccggtaagacagtttataccaaaaagcccaaataattccaaaatctaaccaaatcaattcgaaactttaccaaacctttcagaccttcatattataccccaatagacatattccaagtaataa

SEQ ID NO: 352048 - DNA, 1261 bp, Cannabis indica
ttctacggttcagtaagcttttattgctttagtagtttatttaattattatgaaataagaaaagcctgataggaagcatgttagtagcctgatagtagaataggcgcatgtttttaatttccaaattaagcggcattagtaagctcttgttgatcatgacctgatgtgccaactcttggtttcccaggctgttcagactagatggacgccaggcagaacaccaggagtcagggcaactcggtcgggtcaaatcagggccaaggagctcaatttcccccgcatgctaggggtcgtggtagaggtcccaggggcagggcccgtggtcggggtgacgataacccgccacaggctgcccaggctgcccaagccgatcaggaagcccagaattgggagactaggtttgctgaaatgcaagccagaatagaggagcaagattaggagattcagagattgagacagcagggtgctcctgcagtgccggttctaaaagttccagtgccacccgcccatgttgcccaggccgagataatggtagcggcaaacagaatggaacccttgtatgaaaggttctggaagcaggcacctccggtttttctgggaggtccggatgtcatgaaagccgagcagtggctaacggtgataaccaagatactgaactttatgggtgtcaccgggaatgacagggtggtgtgtgccaccttccaatttcaagaagacgccttagtctggtgggacatggtgtctcagattcatgatgtcaccactatgacctgggaaaggttccaggaactcttcaacgcgaaatactacaatgaggccgttagaagtgccaagaggaaaagagttcacccacctgacccagaaggagaacatgagtgtgacagaatataccacctagtttgatcggttggcgaggttggcctcgggaattgtgccaactgacttcagtaagaaagaaaaatatcttgatggacttgatgtgaagatcaagcatgaccttatgatcaccaccgatgacaaaccacctatgctgagatggtggagaaagcactgcgagctgagggcgcagttggatgtatgtcggagtcggctaggactccagtgagtggcggggctcctactcctcttgcatcaggctatagcaggggaggtagtggttcagccatggaccagaagaggaaagcatccactgcatccggtggctcggggcagaacagaggttccgggggaaccagagtagaggtagtcgtcagagtggtgc

SEQ ID NO: 352049 - DNA, 590 bp, Cannabis indica
tttttaatatattatttttaatatctaaatgaattttttaataaaaaataaataactttttaaatctcttaattagtttcaaaattttaatttatttttttaattttttaaatcattcaaaataattttttcttaagatctatattaattttataagatttattaaagaaagtgttaaatctttctcatgtttattttaaagggatacaatttgatagttgtcaaaatttaaggggcaaagttgctaatttactaagacgcattatcatttaaatggaataatgggacagaacctaacacaaggactaaatttctgtagattgcaaagttcaggagaattctcagcaagccgtatatttcagggagcaaaaacaatattgtcgaaagttcaggggtaatatttgctaattattctttttttttaaaaaaaaaaaaacactacttttttgtcaaaaaagcccaataaaattaggaaaattttatttatactccaaaaatttctaaagacaccctattttaataattgtcattttatataaaattatatctttaattatactaatattttttttactttttttttcttaatt

SEQ ID NO: 352050 - DNA, 549 bp, Cannabis indica
taagccattccttaatgtcagtcatttttttttgatattgttaccaataatcaaaatctcatcaacataaaggaccagaaatactaccacttgattatccttgagttagtaagcacaaggttcatcatcgttttggtgaaagccgtaggttttgattatttcatcaaaccttttgttccaagaatgaaaagcttgcttaagtccataaatggacctattgagtttgcaaactttctcttcttgtcgtggaagcttataaccttctggttgctccatatatatggtttcttcaagaatttcgttcatgaaaggtgttttgacatctattttccaaatttaataattgaaagcggcagttatggagagaagtattatgatagattggaacatggcgaccagactaaaagtatcctcatagtccacacctcctctttgggtacaaccctttgactagtctaactttaaaagttttgacttttccaccagcacctctttttcttcttgtagacccacttacatgtaattggatgataatcattaggtgcatct

SEQ ID NO: 352051 - DNA, 614 bp, Cannabis indica
tagaaccgaacacagacctagcctcagacccaaactgagtctggaactcgggcaaggacacggtcgtgtacccagacaggaactgagacccggacctaaatctaggacccgatcccaaacacatacttgacctatatagggatccggatacgaacctggactaggacaaagaccaagacggggatcaaaatgctggaactagatctagaccgaaatcctaacccagaccaaaacttggacccgcactggggacccgaacttggacctagacccgaacctagtcccagatcggggtcgagacctggacacaaacccagacacaaactcggacccgaactcaaacacccacacttagaatcagaaccaaagctagacctggacccggacccaaacttgaacccagaccaggatcagcaccaaggagttagaccaagaattcaatctagactcagattgggattggaacttgtgactcggacccaacctataccaagacccaatacgcgaacccacacccggagcctgatcttgacctagactgaaatctggacctgaacccaaactcagaccaggactagaactcttaaccgaactcaaacccgaactcgaactca

SEQ ID NO: 352052 - DNA, 595 bp, Cannabis indica
  modified_base (90)..(90): a, c, t, g, unknown or other
taaagaaagtgaaaaggaaaaaaaagtgagaattgttgtgtgtgaggaattaataaatatgtcatcatttttaaaagtatgtaaatttangttcataatacgactaatatgacgcatataagaaaattaattttctttaagtaaataaataaataagtttagacatttttaaacaatataactaatataaattttttataaaatgtgattaattaattaaattgatgtctaatttaaattaaaattaaaatttacatatatataataattatttaattttgttgatattttaaataattatttaagttatattttaataaataaattaaatttaaatatttaaaactattttttttcgaaaaaaaaaatacttaattgattagtttaactgtattagttttaagttaatagaaaaataaaaaataaaaaattataaattaatttctgttaaatagccaagtgtaagaaaaaagatattatatttttatagggatatgattttgtcctgttattgtacttttacggattgtaatccgtgatgtacgacagccgtcagatgagggagttatttgatctgacggctgagattgatcta

SEQ ID NO: 352053 - DNA, 729 bp, Cannabis indica
caggcctcttgaaccggaatccagttcagtgcaggaatggttcaaaatttcatatctcgaccaaaacaaccccaaaccacatgagactctctagacctgttctaaacatcctagaggtcaataccaaagcaaataaaatatagcttcatgcacaattacaaaaatcaccattgatgagtcaagcttgagttcaaaaactcaaagcttgctcatcccacaaactagctatcaaaacctgatcaattcaccttatataaccataatacaacatcagaaaacaaacccaaacacaaacaacaacaacagtagctaaatcatcatttcaccattaaagccaaagttttgagttcaaactccaaacttacttaaaaccatctaacaaacacaaaaacctgcttaaatcttcatattaaaacaatattaagctttagaaaacaacaacaatcacatacagcagccacaacatcaaaatcaccaagcatgcaaaattttctttcttaaaactcaaggaaactagcaagaaagttacacaaggattaccttagcttggattgaacttaaaattgatgcaacacactgatttgaagcagcaaaaaccagaaccatagctggttctaagtggttcgaaaatgagagagagagagagaggagtgaaaatgcaatttttccttttctttgttttttgaaaaatgatgaaataacatggttttacttgaattaatttcagca

SEQ ID NO: 352054 - DNA, 547 bp, Cannabis indica
aaaaagccaacccattaagagttggtcatgtgtaatccaaagctcatactccggatttggaacaggatttcagcttcagtactttctgaaggaagaaactctgggggacatggttttaaaccattgagaaatccctcaagacgatgcactcttataatggttaaaaccattattttccacaaagggaaattgcttctgtcgagcttcatggtgaatggctgacttaaggtgttgctgaagggagtagcttttgttgcagaacttgcagaaaacgatcctgtcgacacaaaacctggattggcttgtgatgcttgtcctggtgttcttcctggagtctgagattcattagatgccatgactggagtacaaccgtgctctgataccaagtgagaaagtaaagcaaatacagaggatgatgataaatctcagctcaatgagcatgagtgaattcattgctatttaaggttttttacaaatgattacagccattggatacaagggacagatggcagtagaattaaaacaaaaggaatattgctgaaaacaa

SEQ ID NO: 352055 - DNA, 643 bp, Cannabis indica
atcggagctgaatcttttatcctaactaatgaaggaaacaaataattcaccaccgactttgtcgatacctaatataactattagtaaaagtacatatatgtatacataagatagattgactttgagatttagtgagccttaataaagatatttattgaaccaaattagaaaaatatatgatattttaaaaaattactatagaaaatatacatatttttaaaagatcaataataataataaaaaatcttagaccccttgtttaggtaggctctaggtatagacgtagctcgtcttagcctaggccctaatttggagattttgaactctgttcatagccaaaattgtcaagaatccactacaaaaaatcttacttttagtcacaaaaaaaagttgtgactaaaaaatctgtagctaaatatactaagcacaaaaattaaattttgttgtgattaaatatgtttttactcacaatacttgttgtgattaaaactaaattagtaacaactgttgaccaaaagtcattcactcatttattttgatgataaacaaatatttgattattatttgttactaatcttttcttgattattttgcaagcaagttcacagagtatctatatttgctcggtaaagtcaaacataat

SEQ ID NO: 352056 - DNA, 488 bp, Cannabis indica
tctgttgctcggagtttgtatgctccttggccaactatctttgtaatctggtaaggcccctcccaattgggtcctaagttgcctgctccttcttccttcgtcttttggaacactcgtcgtagtatccattctccttccttgaattgtcggaccctaatgttcttattgaaatgttgggccacctttggctggtatgctgctattctgatgagcgattgttctctcttttcatctaacgaatcaagttctctattcatgctctattgatttagatcatccttcgagtgttcatatctgatggtttgtatttcgatttccgctgggatgaccacttcagttccatatgtcaacgcaaatgggatctctcccgtcaaggtctttgttgttgttcggtaagaccacagtacccctggtaactcatctgcacatctccctttggctttctctagtcgtttcttgggtgtgttgactattgtcttattggttga

SEQ ID NO: 352057 - DNA, 1115 bp, Cannabis indica
gttcaggaatttttagatgtttttcctgatgaatttctgggtttacacccacaaagagaaattgattttattattgatttggcacctggagcagaaccggtttctaaggcaccttacagaatggctccagcggaacttaaggaattaaaaattcaacttcaagggttgcttgaccttgggttttcacgacctagtgtgtcaccctggggagcactcatattatttgtcaagaagaaagatggatctttgcgtatgtgcattgactaccgagagttgaataaactaactgtcaagaacaagtatcctttacctaggatcgatgatctttttgatcaacttcaggggaagacggtcttatcaaagattgatctctgatcgggatatcatcaattgagaatccaagaggaggacattctaaagacaacttttcgcactaggtgtgggcattatgaatttctaggtatgtcttttggattaaccaatgctcctgcaacttttatggatttgaagaatatggtattcaaggatttccttgagatttgtattattgtatttatcgacaacatccttttgtactctcaatcagaagaaaagcatgagtaatatcttcgaatggtccttcaacaactatgagaatataaactatatgccaaattcaagaagtgcgagttttggctatctcaggtgtcttttcttggacacattgtcagtaaagatggaatcaaggtaaatccaagaaagattgaatgtatcaaggattggctgagatcgaaaaatagttacaaaggttagaagtttcttgggtctggctggttattatcgtcgatttttagagggattttctaaaatttctacgcctttaaccaagctcactaaaaagaatcagcggtttgtgtggatagacaagtgtgaagcaagctttcaagagctgaaatagagattgattatcgctccggtattagccctactgtcagataaagaaaagtttgtagtttactgttatgcatccagacagggtctggggtctgtactagtgtaggctgattgggttattacctatgcatcccgtcatttgaaagagtatgaacagcgatacccgactcatgatttagaat

SEQ ID NO: 352058 - DNA, 598 bp, Cannabis indica
aattagtgcacactgacctttggggtccctctcacattgtgtccaaagataactacaagtactatatcatttttattgatgactacagtcgcttttcttggatttttccattaactcttaaatctcaggcatttgaagttttcatcagattcaagagtttcgtggaaaaacaatttaacttgcctataaaggctgtccaaactgatgaaggaggagaatatcgaccatttgaaaagtttctaagtgatcaaggtataaagtttcaattgtcttgccctcatactcatgagcaaaatggaagagtggaaaggaaacatcgtcatgttactgaaactgggttaaccttgttagctcactctggtcttgacatgtcttattggtggcatgcattccaatgtgctatgtatgccattaaccgaatgcctactgcagtttttggaaatctcagtccttttgaatgtttgctccatcaaaaaccagactacaagattcaaaagacttttggctgctcatgtttccctcatttaaggccatattctcatcacaaaatggaattcaaatctcaagaatgtattttccttggctactctccaaagca

SEQ ID NO: 352059 - DNA, 832 bp, Cannabis indica
ctaacagggttcggggtaagatagtttcatgtcatggtatggtgcaaaatattaaatttttttagtaagaaaaaatctaaatatagttttagaaaatttgtgtcaaacatcattaaacttataaaatgacaaaatctcttttctattctcacttttgaaaacacaattctcaaaactataaactgaaaatacaaccaaatagtctctattttctagaattttcatcactttctatttcaaattatttatttcattattattgcaaacttttttttttaaaaaaaaaaaatctatctataaatatatgtattaatttttaaactaatttggaaaactaaaactattctttaaagaaaacagaaccaatatttgtttcttctaaaaaaattacgaaaattgtgtaagaaaataataatactaaacaaactataataattttcttttaaaaaaaccatttttaattttttaaatctgaataaagataaatatttaaaaatttataataaataatgaaaaaaaataaagtataaaaatagtatggaacgaaagaaaaaaaaagtgacaaaagagaacttcatgtgagagaaaatgatatgcttaataaagtgatgcatgagaaaataatataagtaatatgagaaaaatagtttatatctagagaattcactaacctttcttaggtgtataactacttaggttaacttaggtggccatagggatatgggagggtgcctgtgtgggaatactgttagacaatttatatgtataaactgaaacatacatgattatgaataaagtgcggaattaataaatcatatatgcactataattt

SEQ ID NO: 352060 - DNA, 1072 bp, Cannabis indica
ttgttgtatgaaaattctatcattggtaagaacttgctccatgagccttcaaaatccatcacacaggctcgtaacatatccccaagtatctcaattgtcctctcggtctgttcgttagtctaaggatggaaagctgtactgattttcaactttgcacccatggctcgctggagactttgccaaaactttgaggtaaacttcggatctctatccgatataatggactttggagccccatgtaacctcagcatactgatcgactgtaaatgttgttttcactggtagaaaatgtgtagacttagtaaatcgatctaccacaatctaaatagaatcgaacattcccgtggttctaggtaacccaactacaaaattcatggtgacatcctcccatttccactaaggttacaacaaccctgtaggtctctagtgttcaaataataaaataatcaagaatatattttctagtgtaaattttagtgttgtggttggggaattggaaaaaaatttaatattgtatccttttggtgttgatttaacactaaatttgggtttccccattggagttgcccttataaatagctttgtctacagtgtcccaccaaatttagtgggtactgtagaccacactattttttctttttaagtttttaataattaaataatactttttaagagaaaaaattaaataattatatatatttagtattaaaatatttttattatattaataaaataataaataatataaaatttggtgtaatttttagtgctgtgattggaataaaaaaaaaattagcattgaaataataatcttttggtgttgatttaacactaaatttaggtttattttaccattggagatggcctaagggtagtgctactcaattctaattgatagcagtttgttcactggggcagaggaaaattttgatcgagaactgtcagaggcacaaaaccagccgtgaagttaatttgggtatgagcctttgtggatatttgttctataaatcattgagtatcatgtgaaactttcttatcctttgtcagtgtaatatccagattaaaatagtat

SEQ ID NO: 352061 - DNA, 535 bp, Cannabis indica
agatcctggtaaaataatatccaacagaaatttgtattttttctgctacttttgatgaaatgattaatttatttaataataaaaaatacatggtaaaactattttttaataaccattttctaaactgaagcaataacatcattgaatttgacacaaaaaataatatttctagaatctttcgtttgtaatgaaaacatgaaatcttcagtcttgtacacttattcattaattgatttacagggttcacagattcaaaactagtattacaaggttcacatctattcacatgtttgaaactggtttaacaagttttaagagttttgaaactagtttcacaagtctaaaggattttgtaatggggttgctctgttttatgatgttattataaattttgattttaagtttctttttattattatagttctaggttcgaaattggttttcaaacttatattttatcttaagaatattgttgtgcattgtatgttttaattatatttgtagaatttttttttttttatttttgttatttttt

SEQ ID NO: 352062 - DNA, 1119 bp, Cannabis indica
ccagtgtatactatttatggcgagcttaatgaaactcgggagaatattaacctcgcacatgagtagaaggtagcctttgggtaaacccgagcctaggaggaattcgaggagcaaaagagatcctaacaaatattgtaaattccataaggatattgggcatacaatcgacgaatgtcgccaactgaaagacgagatggaaagtctcatcgctcgaggccattttaagcagtacgtgaaaagacagggctaggtatacaaccaacccagtttgcccaataacccaaacaaccaggggctacaacctattcctctggaaggagaggacatcctggttatttcgggagggccacatattgtaggggaaagcaataacgcccagaaaagatatgtgaaagaaataaagaacgagcaatcggcctttgcccagaaccttccaagaaggtgaaaactgaggaacctcccattgtattcatggaggaagatgagaaaaacgtgaggtatcctcacgtcgatccactggtgataaccattcaactcgctaataagaggatcaagagagtgttaatagacaatgggagctcggtaaatatcctttataaggaaactctaaagaaaatggggctcaaaaaagccaagttaaggccttgtatggtaaacctttgtggattcaccggagacagcatcgctagccttggcataatcgagctcgcattaaccttaggcgaggcacctttaactgctactgttatgcaagacttcttagttgttgacctgccctcaacttaaaacatattgttaggtcgtctagcactgatcgaactagggacatccagttcgatcaagcacctatccttgaaattccaaacaccagactgcgtgagagtagtgcgtggcgaccaagtgccggctcgcaattactatcgcatagagttacaacatagagaagccggtcattagttgatgatgatctcggcagaagaaaacgagaagaaagacgaagatcttaatccttgagttcaagatgaaaggaacctactaaaaccaatcgaagaattggaagaggttattctcgacctaggaaatcccacaaaatgtgtatacattgggaagaacctagac

SEQ ID NO: 352063 - DNA, 885 bp, Cannabis indica
taataaaatatattaaaaaataataaatttttgaaaaataatatttatggttagcaatttaaaattatctagattatctttaatttttttactattttaatatttaaataaaatcatttcatttcttactaattaaataaatgaaatacgtaaatatctcatcttataattaaaattcataaataaaataaaaaataatcaaattttaaactaaccataatagtaaatttgtaaaaaaatatctatttttaaattcaaagtcttctaatatctaaaattaattaattttaatatgataattaattttaaaatttgaaaaataaaaatccacagaaaaaatctaccaaaaatttgaacaaaatggatgcaacacatggacattatgcactgcatactgtcggcgcgtgcggacaagggcgaatgaccgtgggatgctgagggacaaggctgaatgcaacctcatttgcgtacgtatagggggttcaaacagtgtacgaccaacaaaacttggacaagccttctccgaaaccagaattttgtctgagcggttcacagcatccgcgcgcgtaaggggtaaacgctatcccaatttttcaaatacttcaaaatatcataactttttcaattgtaatcaaaattaaattctgtaaaaagggaatttgcttaatttctcaccaaattttcaaatttttagaatgaaaagaaaaatatttttcatagaaaatttcgtaattcacattcaatcatcaaataaccaacatgaacacatctaaattaaccaaacatcgttttaaatttatatgtcatgaaaataaattattaccgtggctctgagcctaattgttagaattttttttataaggatctagattttctaacatgtat

SEQ ID NO: 352064 - DNA, 657 bp, Cannabis indica
aatagtggcttatgggggatactatcctaccgaattagcagggtatgcacccaaagtccagctcccgggaaccctaccaacgactactccaccaatgagcggcatacaattttctgctacccctagagataatcagaatcaggcattcgctcctgcatcttctcattatgggaatccttctgggataagtggacaagtcccgtctcactccgctcctgctgcaagcctagcgggaccttctcaaggctctcggagcaaaaggtcctcgaaaggtagcacctggacggaggacaagcgacaaaaaaaggggtacactccccaatacacccagtacacggaattgacggactcccaggaatgtgtatatttcaccactaggcaaaatacgcactaccagagaccgcctcctctgtatagagatagctcctgaagggaccccaacaaaagatgcgagtaccataatgacattggacacagcaccaatgaatgcaaaaaccttaaagatcagatcaaaaacttgattcgattgggtcatctttatgagtggatcaagaactggctgactcatctcaacccggttcaggcatcaggacctttgccccaaggagcaccaggggatgcgtccggagcattggctcttgggttttatgccctaaa

SEQ ID NO: 352065 - DNA, 1303 bp, Cannabis indica
tgtaatatcctggaaaatatattaatatttaattaggcacattttattaaatatgtgactatatggatattggagtaagattataatcttacttaagctaaatgagggttaattagtgtaaatttgataaatgactaaataaagcgtaatttatcaattacagagattttatcaaattatgcaggtatagtagaaacaatttttgaaataaaataattttgggttcgggggccgtagaaactcgaaggagtgatcagaaatatcacattgttaaaagttaagatgtattggttgttaccagattagtttagaaagtggggttgtcagttttgccaggatagctagaaaatagccaaattaaccctaggccttatttgaagtaaatgtttagtgggaggggtagattagtcttttgttaaggttataatcgtttgccttattaggaaacctaaagtttactaggctgaaaatgaattttattgttaagttattagaaaccaaatttagtaattaaggaaaaatctagaaaatcaaagaaaataacctatcttcaccgtcctcttccttcgaaccctaaggacagtagaccaaaggagatttcttcatcaatttgtccacttttagcttgtttagcaagatttagaaggtgtctaagctttgaggtaagctttctttgtgtttgtttaaggatttcttaagatttaagtaaagttttggttaggttctttatgattttgggactgtgtggttagtcttagttcagagcttgttctggtataattttaagattgtttaggttctaattggttgaattttatggttgtttggtttggaattaggaactttagtttaataactcaatttttggttctaacatggtgaattggatattgcaatgttttgttgtgaattaataattggaatacattgtttttatgttattgatctattttggagcaattgagtaggtttggttgagctttggatcagttttggggaagaaaaccaaagattttcttacttgccagaaccggttgacccattccttctagtatagtagaaccggtcgactggttggtctgtaggggagaatcccaattttcttcaaggtttatttttggctcggggtgatttccaggacctaatttaggttatttaggtgttgtatagtccattttgaggctaatgaaagttaggtttgtttggttttggtattagggtttgtgttaaaacttgattaagttatttactagattttgttgtcatgatataggacccgggatcgtcaagctttgtttccatt

SEQ ID NO: 352066 - DNA, 697 bp, Cannabis indica
gaccactcatcaatatacatatatatatatatatgtagaacaataatattcctacacttatgtagtcactaaatgattatatttaataataagaaaaatactaaaataatactaagcatccatcatataactcatccctaattgttaatagctatttaaatgatgtagaccacccattaataattaggtacatactcaatcattaaaagaatagttcattaatatctaaaataggactaagctaatcacactattctccatcaacgattccctctcaccaacaagtacaaatttgagttcctggaagaggaaatatagggagcaagcttataaagcccaataagaaaacaactaatatcaaaggaccaacaatttaataaaaaaaatccttgcatggttagctcttaaaacaaaacttttcatcatcatcatcatcattgtgtataaacaaaacagagagaccacaaatagtcataagagacaagctacccatgcatatcacaccgtccactatacccctagctctcaataccaatcatataaacgacatctaaaacggatagtcgcccagatctaattcgcttcatgtacagattttaggtctttcacctacaggtgagtgcacacctgatctacctatgatgacacgtaaagactaggtcctgaaacaacaatatgcacaaattatgatcacatg

SEQ ID NO: 352067 - DNA, 1055 bp, Cannabis indica
gatcttccagcacctctgccatatattccatatccaaaactagaataggagctattgctgccacttccacgattgtatcctcctctattgctgcctcggttagaagaagaaaactgagatggataattgtaccttgagaatggagattgctttctgaaattaccaaagttgtttctgaagttggcaagattagcttctggatgatcaatgtcaagtgaagcaacctgagcactgacttcaacctctcgatcagtcttcttgattctggattctgaagcaagaagtagagactcaatctctgcaacagaatacgtctctaatctggtattggtggatatgacaaaagtgtcatattcactcggaagtcccttgaagatggcagctacatgatcttttgccgtgtacacttcaccaactgaggcaagcagatcaacgtgatgtttaactttgaggagataaccagatagagatagtgagcctttcttcaagttttgaagcttggttcgaaactcaagaatcttggcagaaacttgaagagtaaagaacttctccaatgtcgaccagatctgatttgatgtctcgcatccaaccatgcgtgtgaggagattctcagacattgaagacacaagccaggacatgagaagctgatcttggacttcccaatccagataggcagggttatacgtctcagattcacgatctgcatcagacagaaatttagcagggggattggaattgatgtatcgttgtaacctgttgccacgaatcgcagctaaaacctgttgtttccacaacagaaagttgtgatcatttaaaaagacaggagagaactcatcgtgatctcgtgttcttcctcggttgagagatggttgacgattggcaggttgagcagaaccacctccattgtcgccgtcaccagagttggttcttgaaccattcagaccagctcctccagaaactacattcgccattaatggcggaaattgctctgataccatattgaatctattgccataccagaaaacagagaaggagaagaaaagagagaaaggcag

SEQ ID NO: 352068 - DNA, 612 bp, Cannabis indica
tttttattttgttattttttttactgtggtacagaatttttttaaaaatgttgtattttaaaaaaaaaaatactacgtaagttttatacggtatattatgttaaattttcacggtcatttttttagttgtttcactgttgttttagttgttctttgttgttttacggtggttttataaaaatacaatatttttgtaaaaaattccgtgtaatagtaacattataaatatttgtccaaaattaagtatttttataaaaatcactttattatatggtaacttcagaaactccacataaatcaactttagcaaatttcaactttttttctatgcaggtctacactaatataaatatatacaccaggcatatataactaagaaatttccatagaagagaagagacaaaagttaaagttttcaaagattaatgttagtaggaacattggcggttaaactacttgaactttaaattttttaacactcaactacaaaaacgattttttgggagaaaaactacctaaactcccattctgttttgctctgtacccctccgtccaaaaatcacagttaagtgtcgcagtagactgcccacgtgtacacacttgtacacgtgg

SEQ ID NO: 352069 - DNA, 1085 bp, Cannabis indica
aatttgattcagtgactttttttgggattttctggttggaatatgttgtgtatacattgtttaggtactcttgaaagtttggaggcaattggacaagttttgagcaaattggatgttttttggggagaactggcagaaaccagttatccagtttaccactgcctgtaaaactggttaatcggttttaccggttaaccggctttggcaggttccccgagaaatcggtttttttctcaattctcatcaattttagtgccttagttgggtgtttccctgtttcctaggttaatataatccctaaagagtataacaaagcctagagttgtagactcgggtttttagaattagggtttcagacatatgatttacccggttataatatgtgattagggcatccatccagcacgagactttccgttcaggtcggccaactcacttgaatctggaaacgaagtaggaactatatataatgtgtgatatggatatgcgaatgtatgtatgtgttaaggtatatgcatgcttgttgtgattcatacactactaatacttgtacagtaccagtacagagtgcattgatacagtgtatgatgtctgaagagtacatcacggtgttaccagcactagtacggaaaggtacaaggtgtatgtggtacaacacttaacagtactcaaggtgcggttcataccatacctacactagtacgatggtagtactgagtgcatgtggtacagtggtacatggtcgtatcttagttagaacgttcttactcatctgttaagccctgtaaataggtgtatgggcgcctagatacaagtcgatattatatgatatgttatatgcttaggtaaaggaaaggcgaaagctgaacaggagtgagcctaggatgagatgaggttgtacatgtcatggcggtaccacttggagtgttcggtcttgagacatctgcgattattattttgtagtcgttgtgcgacctggttatgtattttgtgtattttgtattaaagtttaaaatcgggatctcggtacttgaatgattatgtaaagttataaatttaatatttagtataaaagtttttaattt

SEQ ID NO: 352070 - DNA, 667 bp, Cannabis indica
acatttctcgccataaaggtaatgccgccaaatctttagcgcaaataccactgctgcgagttctaaatcgtgagtagggtacctctgctcgtactcctttaactgccgagaagcataagctattacctttccagcctgcataagcacacagccgagaccctgtctcgaggcatcacaatataccacaaacttttccttatctgaaggaagagttagtacaggagcggtaatcaagcgttgctttaactccaggaaacttttctcacaccgatcagtccaaacaaacttctggttctttcgagtcagctccgttaagggtacaacaatctttgaaaaaccctcaacgaaccgacgataataaccagctaaacccagaaaacttctgacctctgtagctgatttcggtgctggccaatcccgaacagcttcaattttggccggatccaccatgatcccatctttatccactatgtgccccaaaaatgagacacgagataaccagaattcacactttttgaatttagcatagagcttgtgatcccgtaaccgttgcaaaaccgctctgagatgcaactcatgctcttcttctgtctcagagtacaccaaaatgtcatcaataaacacaatcacgcacctatccaggtagtctttgaacacctgattcatt

SEQ ID NO: 352071 - DNA, 514 bp, Cannabis indica
aggcgagacaggagctccggatagctaaacacaactacgccaaggatgcatactcccagggatacgctgaggtggaagcccttaggagggttctgcgggttgagttgcaagacaccatcaataacccggagtaccagaatccgtgggacctgaacttggaccccctatcggactggttcggtcgcttccttgggcccaccttagctccctttgctgcggagatgactggcgagtttgcgtctcagcttacccggtgcgcgcctaagcggttcgctgcttgtgcatccttgaactccatcttccaagtccaggatctcagccactccctcactgtggtaagtgttttgtaattttgtttttccccttattgttttcttttttggagattctcttatacttgtattgttttttaacttgctgctgaagctggccgtctctccaagaacataatcaaccatggcttcctcctgtccgattttggggacatgaacgaagtcaggaaggttcttcagga

SEQ ID NO: 352072 - DNA, 548 bp, Cannabis indica
ttgctcggctttcataacattaggacttccaggaaactggaggttcctgcttacggaacctttcatacaggggttccatccggttcattacaaccaccggttcggcctggatagcaggagcaggagctactggtatctctggtgcaggaactacaagagtaccatgctgtcttaattgtcgaatcacttcctcattttctttgattttagtctgcatttctgcaaacctgctttcccaattctgggcatcctgagcagcttgggcaacctgtggcggattagcatcaccccgaccacgtgccctgccccggggacctcagcctcagccccaaacatttgggggaatctgagctccctgaccttcttttgatccaaccaagttgccctggctactggtgtatcgcctggcgtccatactaatctgaacaccctgcgtaaccaagagctagtctcgtcagatcatgatcaaaggaaaacttactaaagcgcttatttggaaattaaaaacatgcgcctattctatcaggctactaacatgcttcctaaca

SEQ ID NO: 352073 - DNA, 665 bp, Cannabis indica
gactaggcgtctctttggtttttgactaataaatgctctgacgcaatcaatgcttcgaaattcgattttctctcacaacgtttgacggttgcacttgattgcttttgatttctaatattcacttttgggggaaccgaggcgtctgaggtttttaaaatgattacccctttttgttgtttcccctataaatatgactgagcattgttcacaaactcattttcaccaactttctttgttaagcaagttcagagcaaaaatagaggtttttagcttcaagtttgttgaaaatttttcataagaactgttcgttcagctttgcgtaaactgaatctagatgtcgatcattgagtaagttctagatttcttttacttttactttgcacatttactttcagaatgcgaccttaactttgctgtagaaaatatgtagaaaaccctaggttcaggaactctgcgattttcctttgtaatgattcatgcgacttcaccattcatgatgcttgctttttgactgcacaatggctgtctttcatcttgtttattcaaagctttgtgattttttttccctaactatcgaaaattttaaacttatgagttttgacttttccttgaatatttctattctttaatctgttgagtactcttggtcgacatatttgcttgtt

SEQ ID NO: 352074 - DNA, 896 bp, Cannabis indica
ataagatatgtctattatatataaatttaataattctatagaaaaagaaagtgaagctttttcaatcaaaatcataaatgttcttttttattattattagtattattattattattatccaacaaaatgataaccactagatttggatatgaaaaaaaataaaatcacaactaattaagtaattttttttttttaaatcaatacaattgattttttttttttttaaaaaaagtaaatacttagagcaaattaattttaaaaggttaatgagaaaattaagcatcaaccaaaataaagatttttgtatacaaatggtaggccaccaaactagcattactgttatggcatacttatattagttaacaatgtgcaattaacagttttggaaaagttaaaaaaatatttttttaatcaattacaataatgtaagggaaatttcactatttgcccttaataatataccccatatcaaaatttataccctaaactaatttgtacaaattaatgcctataattttaaaagatatccaaattaccctttaattaaaatttctctctaacagtttcccttcctctctctcttcccacttcgtcttccccaaccccccacctacctccgagaaacccaaccagcgaggcacctccattgaaggcgttcccgacctccattccctctctctctttccacttcgtcttccccaacctccattccctctccctcgccacaacgaaagtccgagaacccaaacccacttcgtcttcgtgtgcatccaatcgacgaacccacaacccagtcgaggacgacaaaacccacgaaacaaccaccacaaaatccagtcgacacccaccaccgtcctcaatcgacacccacttcagtcaaaaaggtaccatttttt

SEQ ID NO: 352075 - DNA, 1167 bp, Cannabis indica
gtaaagttttgttacatggcaagacaattaaaaaagtttagaaatccactctatttcttttagaattatgtgctcttgctgctacgtttggcggggattttctttatcaattgtcaaagacaaagtttcaacttttcatttgcaccatgtgtagtatctagtctatacagaaatcaagagtttatggccgcataacaaagtctatgctgcaatgggctctccaacatagtttgcaaattaaacatgttgaaacaatgttcgttactagtttcttttatcatttgtgggtacacacatctcacttgtcttgttttcaagattttattgttgatgtttatgatctttaatcatttttcgtagaagtgagttttttcaaaatttactcttgattggataagattgtatttgttagaggttgttctacttccaatttaagctgttgttgtaatggtttgtattcattaacaataacagtttgttttccttaaaaaaaaaagaaaaaaaaactttaaaaaatataaattgagaacaataatctttaattcctatatggatatgtctatattgttttgtctctataataagaaagtttttatagtccttcataatagatctaatggtaataactaaataagtatatatacataattaatatttagagcacattaaattatttcttatttattctttactaatattttattaataaacaataatttattaaattaattaaaatatattttctctctcctctctttctctctaattgtagtttctttctctctctcactcatcttctcttcctctctttccctctaattatagtctgtctcactcccacttatcttctcttatctaagtttgcaaaattttgaataccaccacaatccacagctacttattgactatatgaagagtaattgctgttagaagtcatcacctcctctaaacttctagaaatttctagttattacatatttgttagttaattgtaattaccaaagattagtagaaaagtctagataaatgtaagaaatgggtagaaaataattttcaaaaaattttttagaaaacatagtcactagatgtttctagtattttgggacaagcccaatgctagaaattctctagcaaaaattgagaaggcttcatcaaccaaacccatga

SEQ ID NO: 352076 - DNA, 483 bp, Cannabis indica
atttttggttatggtatgtttttaagaataccttaaaatgaaataaggttaaagagggtattttaaatgatattgtctattagctatgtattggtttatattttaggaatatttagcatagaaggaaagtggctggaattaagtatttagactatattattataattattttagttatttgaagaattgaaatcacgaggatcctgtaataaaaggtggtggaatactaatggtctgaagaagattaatgaatcatttttttggaaagtcaaattattatgcaatgtttgtaatctaatttgaataggaaagtattatcctaaatgttttatggtaataaaaaggatatggttggttttttggaaagttacaactgtttccctaaataataaataaggaaattttgtcttaataccgaatttagttttaagtaattattcaattcaatagctaacaattatggtaattggttaaaattacaag

SEQ ID NO: 352077 - DNA, 654 bp, Cannabis indica
tttagggaataaaacccaacaggtaagggttccaaaccctgattcataacgatcgtgcggtctatctaatttactaaagattcttgttgccacataagaatgtgtggccccaaagtcaaatactatagagtaaaaagacttgttgaccgagagctgacctgttaccactgaagggctggcttctgcattaacttgagttatggcgaacaccattgctggagtgggtttcgctggagccttcggtgcttctgttctgagttgagggaaatgcctcttgtaatgccctggcaggccacactcgaaagcaccgttgtcctctacactcccccagatggtgccttttacaactagggcactctgggtaagagtatcaggtctcagaacaaccctggcgactgcctggaccatggttcccccggaacctcttgttctgacgtgaggcaccggttgtagcggatgctttacttttctgattcatggtcgaaccactacctcccctgctaaaacctgatgtaggaggggtaggagccccgccaaccactggagtccgaacaaactttgtcatgcatccaactgcgccctcagctcacagtgccttatccaccatttcagcataggtggttttgtcgtctgtagtaatcattagatcatgtc

SEQ ID NO: 352078 - DNA, 739 bp, Cannabis indica
aaggtttagagcatgtggtatttttataaatatttggatgtgggctgtataaatgttcaaagagccagtctatagtatatttgttaatttttttcctttttgtattcttgtttttttccttttattcatctattatgtcaattgtcaaatatatgatagtttggttatttttaaagatattttcttgttggttataagagaattaatagttctcaattacttcacaaattcaaagcatggagaaagaaacaccacaaagatgaggacatttaaaattattgcattctaattattataagacaatatatctctattctatataaagtgtgcttatataacaaaattcttggttttatgaaaaattcatgggtaactttttatttatattaaaaataaaatgatttattaataaaaataaaatggtttatgagaaattcatggtttaaaatatttaatttgatatcttaattattaataaacaataccataaatatacatctacgatcatataagaattttattctaaaactatacgatcatagattaagtggtcaaggtccaaagaaaaataataatttcttataatctgaaatcaagacacgaaaaacagaaactaattgaataggactctattcaattgaggtgtcgaccatgcatggtaagtaaaaagctatatattaaattttatgccatgatacaattaaaaattaaataagaatttactactatttatattata

SEQ ID NO: 352079 - DNA, 1209 bp, Cannabis indica
agtagacatatatagcttttgtccttttttttgaacatagtaagtgaccaacactagggaattgcagctcttgatttagcctcccccaattcttattgctgcgacactattaaagtaatttttgagtaattagggttctagcaaaacttgagaattgttttgcgtttttttttttttcttcccccaatatctttgtacatgcactacaagatgggaaatgaaaattttttatttctcattttatgtatttttagctatatacaaaatacaaaaccgaaactaagtgacaataaagtgattaagtaaggccatttttttggttatatgaaaacaatacatatataattgtgtagtatgtgtctatttatgtgtatgttattacttcttatcaatattcaatattttattacgtactaatcaaacaatctttattactttaaaagaatttctacctagcaacccgaatcaaacaaacaaaagtagatcaaaatattctgtgacacagcctaaacctcaaattcaatcatcaaaaaacttccaaagcaaggatctcttacagaatatccaaccaaaacttctaccacacaattggagagcaatttatgaaattgtatcaacgtggcctaaaggagaagttgcagatgtgataatctcaaacgatgaatttcaccaagatatgaggggttttttcatagaaaatgatgatatatttgagtttcttgcagaggatcaaatagggaggatcaaatagggcagtgtgtgatttgctgctacttaaggtatcatagtttaaatttaagatcaatttatgtttatttattaaatttgagaaataaagttagttaactatattttcatattattttcttatgtagttatttatatacttgacttgccgataacaatagacaacacttgtggatgtttgtaaatttaaattaagttgcaattttgataactaagcatgacgaccgggttagtttcttggtggagtttttttttacttgtcaagcaataacaattcttgttccttgaaatcatgggtaagcttaattaataagtatatatatacatattatacgtatgataatataatatatgttcaatatataatatttatttttatgatttaattaattcatttctcttttatattttgtagctaatagataaaaaatcatatccaaaagctatgattgacgagatgag

SEQ ID NO: 352080 - DNA, 593 bp, Cannabis indica
caaaattataactagagattggcactttaagtgagcgactctggtgttatttttgccaatattttattctttttaaatccatataattcagccctaagccctagttgaaacactatagaaggaacatgatgctctcatctcatcctctagtcaacttgttcttcaccattcgaacccatagtgaaagagtgccatgcccacacatagctagtcaaatactcaaacatagtgagtaaaacggtagtaaccaaacccaaaggagagtaagagatccaggttcagatcttgataatgctctgctacaaaaagtaattaagggctagagatcttaaacggaatgagtcattatatttcgctacaattaatgtgaggttttcttaacctttatgtgtttatttcatcattttagagatattcatatttaggacgttaatcaacatacttgttagtacatttagatcctggtaaaatattctcaacaactggcctccgagccattgtaatgatttgctttcatgtaatatgaatttaaaacgatgaatattgtttgtgttgttgatttggatgtgtttattttggtttatgtgttattt

SEQ ID NO: 352081 - DNA, 768 bp, Cannabis indica
aatcattaagtttttttaaacactaatatattgcattcagtattcaataataatctcactttcaaataacatagaaaaaacctagcataaaatttaatatacgtgtctcgcatgtagttttttgctagtatatatatataaaggagaagtatgatggggtaacatggtattttaaaatcactctaaaactatatttctttctctccttaattctctcaattttaatattttattctatttttctctctttttattctattttctaataataaaaaaattaaatatttaagttatgaatattaactaattaaaaaacttccgtggcataaaaaatctttcaatttcactcaaaaaatttataaggttaaatctcacaatttcactcaaaaattttatgagatttatttatattataagtggttgtcacattcaattttcatggagccatttgtataaatatttgagtaggagtacacttcacttagcccaatccaaaaaattccaaggtttgatttgatggagtacaacaacaaatatcaaagataggtaaagctagcatcatttgtttatttttttttttcaaatttaatatcaagagatagtatataaatttaatattgagagatagtatatagaaatttttatatgaaaaatccattttacacaatttattacaaaattactcatacacgcttatacctacttttttacttacaaagtttgttttattacacatataccacttagtcatcattccatccatcatca

SEQ ID NO: 352082 - DNA, 890 bp, Cannabis indica
ggaaaccgcggtttaaatccggatcactacaatccgaaccattataaaccgtaatcggggaaaccgtttttggtggtttggtcaatccagaccatttacgtcgtaatggttcggttgcggttcgtaatatataattaacggttaaaccggaccggaccgtttataataaataattaatttatatatatatttttttttatatatgactatatgtatagtttagaacttttttgtgtgtcaagttttttattgcaaaatttttagatttttatgttatgtttgacttttgagaatgtgtttatatcattatttatatcttatagatctattacttatcatgttaaatatattttgaaaataaaattaaaaacttagtaaaaatagtacaattactaaaaaaatatgaattattaattccacataaacagtggtttcgaaccaaaccaaaccgttcttaagggtttggtttgagaaattttttggtctggtttggtttctaatattgaaaaaactgttatactggtttggttcaaaacttatgaaaatccggaccaaaccaatccgtgaacaccgctaatcttggtccagaagggctagatctagtagttcaatttgaatgtagcaagtgaaaacctagatttaggtttttctttgtaagtggaatagtaatatttcaattaccttgcataacttaaggattgatgtttgaatagtgttttgcttgctggtttgatataggaatatattgagccaagtggtagactttaatttgtgagttttagaaaattctcacaagcctagaggaatttatgttatctctgtgcgaaatgctggagtaatgctaaattgatgttgtaacacctgggaaaaaaacctgactagaaagaatt

SEQ ID NO: 352083 - DNA, 1086 bp, Cannabis indica
tactgcttgtagactcagtttaattaggttttaattaatcaatttataattactaaaatttagacttatagtcttatttatgtaattttcactaagctaggacttaattgtgaaagaaagtaaattttagggtttatttgttaattgagagactttgtaaagtctaattaataaaataagttaaataggcaattttatttaataattaattataattattaaataaatagttttgacatttataggattgaaattagaaaatatagcattattgaaagaaaagatgaattatgaaataaaatggtaaaattattactagtggggcccactatgtatggccggccactagagtgatttttacctattattttatcttttttttaattccatataattaaatcttaagccctagttgaaatactataaaaagaataagatgctctcattctcatccaacaaataacctagttttctaactttgtcagacaactagaaattaagagtctccttctatagtgatttcgaattccttcttgttgttcttcatcaaattctagcctttagtgatagagtaccatgcctactcatagcaagtcaagtactcaattataatgtggaagactgtggttaaccaaactaaaggagagaagatccaggttcagatcttgataatgctctgctacagaaaggaatcaagggctagaaatctgaacgaaaggagacatattattccgctgccatcaatgtaaggttttctaaactttatatgtgtttatttcatcgtattaggaaattcatatttaggatgttagattataattaataatcaaacatacatgttagtatatctagttcttgataaaataatttccaacacaatatacatatttctagttctatatgtcatgacatattgcttgccactaatgatataggcttattgcacaaaaccaagagatttccatctaagtaatttgagatgaaaggtcttggtgacgcctcttttgttttaggaattcagatacatcaagatcgttctcaaagtattcttagattatcacaaaagagctatatcaataaagtact

SEQ ID NO: 352084 - DNA, 845 bp, Cannabis indica
aaatcacgtaatacgcctaaggtagttagggtgttacagagtgcttgacttgctatgggtgggcatgcactctttcactataggctcgaaatttatgaagagggagagagaggatttcgaataggagaaggaataggggctctcaaaaacactagttgtctaacagaatgtaaactaggttataagagttggatgagaatgagaccatcctattccttttatactatttcacctagggttaggatttaaatttgatggcataaaaaatgataaaataatagcaaaaataagcaataagtggtcggccatatagatgggccccactagttataattttgccatatttttaaccatttatcttttatttcacaaatgtcatattttctaatttcaattctataaatgccaaaactatttatttaataattataattaattatcaaataaaattgtcatttatcttatttattaattagactttacaaagtctcttaattaacaaataaaccctaaaattttttttcttcacaattaagtcattgcttagtgaaaattcataaacaagacatagtctaattttcgaattataattgattaattaaaatggacctatataatcaagcttctaataagtagctctagaatttaccaattaaactctctaacttattaattcctccttcgccattatagagttagaattgcactcttaattatataaaacgctctatatattctacgatataaatacgctatgaattatctattgttataatcctaataatcaatgatcctctatagatgatctacatcaagtaggaataaccgttacacccttcaatgta

SEQ ID NO: 352085 - DNA, 474 bp, Cannabis indica
gtgctttcattgagagaagaatcgcaaatcactcttttcaacattcgacacgatggtgcaaactcgtagaggcctgtctgacccagcaaactcacagacgctggatccgacattacagaacccagggagttcaagggttccactcgctgtcaatcctggacagacgggaagcgtggtgaatggtgggacaactcctattattgaaactgcgcctggtgtgcaacagactgggaataacagttccgcacacagccagggcgttcataacacgactattccaccaggcatcagtgcccaaacgaacatcgaagacacaaccgaattgaaaaatctccgtgctgcgctcggactcatgcagggtcacagcaatactctgcatcatgattaggaggaactacgtgctgcagtaaaccttgcgttcaacaaacagaggcgtatgttcgccgaatggagggacaaagagatggaggcatt

SEQ ID NO: 352086 - DNA, 546 bp, Cannabis indica
ttccgcttggcactacggaccgcctcattataatatttggcgttaaacaagtcccggaattcttcccaggtcattctagcaacatccatagtgagggataccatctcccaccacaccaaagcatcttcctgaattgaaaagtggcacatgccaccctatcatttccggccacacccatgaaaatcaatattctttcaattacagtcaaccactgctctactttaagtacatcaagacctcccaaaaatactggaggtgcttgcttcctgaacctctcatataaaggctccatacagttaccagcaacatgcaaatctgctagcaccgcaggaaccgtagtaggcggttgcaggggaggctcaacatgagcatccctttgcttgagccttcgaatctcttcttcttgttgagcaattttggcttgcatctcagcaaacctatgctcccagtcaaacagagcctgaggtggatcctcttgcccacctctcagagcactaccgcggcctctaccgcgtccatgggggttttggggatttctaccacccc

SEQ ID NO: 352087 - DNA, 557 bp, Cannabis indica
atttaatttaaaaaaatatatatatatctgaccataaatttaaaaaataagataagatataatacaaattaaaaaataagataaaaaatcaagcaaaaaaatagatatttactttttttaaaattcaaattacactaatatcaaagattaattttaaaaaattcaaattaatttatttctaatattagatttgaaaattgaatagtcaaaatctaaatacaaaactacacaaaaaatcggaagttaaatccatgaaacagcatgaaaaatcgaagaaaaatgaaaaaaatccgagctgtacggacagtatgttgtgcatactgcccgcgcgcgcaagggggagtgcacagccgaggttcctcagtgcaggggtgaagctgcagcatatccgcgtgcggagaggggggtttcagatacccctgcgcgtgtttctcggacaaaaccttttccgaacacgcgtctgaccgaggatcactcggttccgcgcgcgtgggtgagtgcatcatcctgatatttttttgaaacttcacaaaatcataactaattccaattaaatc

SEQ ID NO: 352088 - DNA, 875 bp, Cannabis indica
tactcctaattttttagtgacccacacttttatgcgtgtcactatatagtgtcactagaagcctaatttgtagtagtgtattgttagtgatcaatagttaatgggcttagcatctatgcgtgtaaagtatatgtgaagcagaagtgtgagtttttcttgtgtaagatgatgttcctacccaagaggccaattctgacctcaagtgacacgttcgctcattatggtcccgacctccgtaaagtatggattgttgatcgccttgtatgccatcatttgattttcttctagaactgtttgggatacccatgcttttggtcctcaccctaattggaccttgtacaatatttagattatcatggtgtgttctagttgttttttcagtacctgtttcagtattttttttttatttaaaaactaaatttgattttttttgcgactttgatatgaaccctaacaaccaacataattaactttgatcaaggtcggtcttagtcaactctagggtatccattagtcgttggtgtggtattttgcatgcaagtgtatgtatcataacaagtaatagactcaccaggagtgaagttgatcccacgaggattgtagttaagtacattaaaataaaacttttacttctatttggttgaataaaaatttgagatacaattaaatttagaaaaataagacaaatagcgaaagtaggaagcaagtaaattaataaggaaattaatagtgaataagtgttagggctttcgatttcaattgtatctattgattatggcctaatatgactatcttcttattaccaatttttattcaatagcaggtttactaaggtaattaatggtcttctcagatatataaatctcaattacatg

SEQ ID NO: 352089 - DNA, 645 bp, Cannabis indica
cctgtatgaaaccataacaccaagaacattagcaaaaaataatgtaattcttataaggttgagattttcttctaggacaaagacaaagacaagacattatggaccctaagtcaactcaaatatcaaagatcatgaagaacacaaacattaaacagtacacttttgtgagtgtatttgagttgcttactgagatgacatggtccacattttccttcaacttctttacccaatttaggtaatcctcgaacaatccctgcaatggataattctttcagatttttgtaatgaatgtgtccaaatttatcatgccataaatcagtggtgttatcaataacagagtgacaagtagcataggtagtgatggtgtaacaattatcattagatctgaacccttgcaaaatagtttcatcacgattaataagaacataacaatgactgctatcaaaattaacagtgtaaccctgatcacaaatttgactaatgctaaggagattagcacttagtccttcaaccaacattacgttcttaagcctaggtagacctttaaaattaagagttcccatccctatgacttttccaacaagaccattaccaaaagtaacttccccacattgcattggtttaatgttgtcaagatagtctttt

SEQ ID NO: 352090 - DNA, 1510 bp, Cannabis indica
tttaattattctcattctttcgttgaatgatattacagactaaaatcttactctcttttcttttccaccgtaaagctacggtgtcattcttgcagtttcatagttgttactcactcatcgatagacacttattccatgacacttggaaataaacatgtaagctctttagaaggtcttctatatataaatatgtttctatttcgaccacctttttgtctaacattcacttcttgatatcctttattcatgtattcattgcacttgtcacgccttcctattttcctaggtaaccgctgttgattttcttttgtagtctctttattgtatcactctattgtattttctttgctaatctcatatggtgcttggtcttctattactcctctcaatcaaattgacttgattatgaggttagctagttttccatactaacttttgtctactttggtattacatcgatatagtggtgaagtttaaatctataatgctgacatatatgttcaatgattgcttcttttactatactaaccctctaggtatcacattagttaagtaagatcataccatcatgcatgtgctaaaatatcgtaagtgcactagtaaccctttaaaacgaattcaaccctaacatgggctaggtagcccaactatttatttatcattgactcttagcaataggttaatcatctactctcataaatatttaatcagtcaagtttccgaggtaaggataccatatacataattggcaaaacatgccaaacagaccttactctgttcattttttattataccttctacaccccacttgtatctgattttctactagagactcactttttataattatttagttagggctctttgactcgtacgtcctaaactacctctaaaaataagtcgataatttacttaggcatttttatttcatatctgaatgcaatcatgttaccaatatatacctcccttgttcttctcttctaatttttccactttcaattggacgaaacttagttgtgtgcaataagttggttattgtcggcttgagagagtccttccaaagaatctttgttactggctttttagattgagaaaaacatctaatatttttccgaattctttactcttaacaattttagcttttgacaaatccattatcattcttttctcgggcactatagggcctagaaacaccatctcttttcatcagggctagactctgtgagtttttctcttagtctctcattatgatgacactccaacatacttattctattgtccataatatcagtcgtaattggattgtagtatcatttgcttacgttgtgccttgaattattttatgttgtatgagcattctctgaccccaacacttatcagaaacttgtatagtccttgacatgccatgaaattcttcaatatgtattactttggtcctaattgtgtctcacttttctcctgtctctaagtgaagctttcccaaccttttctcattgagctatactccaca

SEQ ID NO: 352091 - DNA, 796 bp, Cannabis indica
taaataaaatagcttaaacaaaaatattcaatcaacatgctctaacacaccaaataattacactcgtaccatatctacctcaaaaatactcattcattatgtctatataactggttctattttaattatttagtttgagttattttgtgttatttatttttattaattataacattgttataaaattggttcattataacactgttatagaaccgattctattttagttataaccagtttaagttcttttgtgttatttgtttttattcactatgttccagaaccggttatattttaattataaccggtttgcgttattttgtgttatttatttttattcattatgttataaaactagttctatttttaaattataactggtttctgagttattgtgtgttatttgtttttagtcattttgttgtggaaccgagtctattttaatttatgtcatctcgttttttatttaaggcatattggcagctaaaccacccgaactttacagtttgtaacacttaaccacaaaaaccgaatttttggcggctaaactacgtaaaccctggttctgttttgctctgcacacctccgtccaacaatcacagttaagtgccacggtggactgtccacgtgtacatagttatacacgtggcaagttttaaagtggtccacgtaatattagttttaaaaaataataaaaaattttaaaaaaaaattaagaaattaattttttttactttttttttctttttctttcttctttcttcttcttcttcattcgatactccaaactcaccat

SEQ ID NO: 352092 - DNA, 1023 bp, Cannabis indica
gctccagcaggaggccctttacctcagggaggacatgggggtgtgcccggagaacaagtagccggtgtaccccccggaggagcactccctccacaggtgcccgaattaccaccacggccaaatgggagagtggccatgatctccagtgggcctcatatcggaggaaccactagaaacgaactaaagcattacgctagggccataaaagacaatgaagtatgggaaatcactcaactcccagcacaaagaccccgactcatggaccaacctatcactttcacagaagatgatgcaaaatcggtgcgtttccctcaccatgatcctctgattatagagactcccatcgccaataaggtcgtgacaaggatactggtagataacgggagctccatgaatctattgttcaaagaagccttcatggcaatagggctcacggacagggatttgtcacccagcggctcccaactcacaggatttaacggaacaatgcttatcccaatggggaaagtgcggcttcctatcaccctatgcccagacaccccacaaagcactttcaaatactacacctttgttgtggtagattgcccaacagtgtacaatgccatccttggccgaccgaccttagtagattttggagcgattacctccatcctgcacctatgcctcaatttctctacccgagaagctggagtgggaacattgagggaaaaccaaggagaggcgagacaatgctacaacgtcgcaatgcacctgtcagtattagtagtttacaggggtgaagagccaagattcatggagcaagacgagttggatccccgcataggatccgaaacaactgtagaacctatggaggacaccgaggaagtagtgtgtgtgacctcgactccacttaggttatccgtctaggaaagaacctagagctagaggaaagaagcaagatcattgaaacattaaagacagccacagattttttcccgtggtgccaaggggatatgaccggcataagtgttgggttttatgccc

SEQ ID NO: 352093 - DNA, 518 bp, Cannabis indica
ttgccttcctaagaagctaggtgttttggctttcgagaaggaaagaaatggaatattacccttatggccaaatttatttgggccatctcaaaaaagcaagacaacttgtgggttcgatgggtgaatgccgcttacttaaaaggtcaagatttttgggaataaaaaatatttatatcaaatttatgaatccagtttatatatatacacactcaaatttagttatgtaagttatgattaagaatatattaaattacaatatatatgcattatcagatacgttacctgattaaaaaaaaaaaacttaaaaaaacgttcatatataattacatctaaatgacaatccaatgtagcaatagctaaaaaaatttcttatagatcaaaatctcaaaccctatttcaaaagttttttttaaaaaatattacctaattaaaaaaaattaaacatacatgtattgcactcagcatcacctaattgaacctaattaaaaagaaaattaattatacgtgcattgcacgta

SEQ ID NO: 352094 - DNA, 919 bp, Cannabis indica
aaaggccctaaaaaaccatcagaaatctaataagattgactcgtggactatgcagaattttaatagcaaaatcacgtaaaaaattctgtgttcatactttttcctttactgtttttatttttttgcgcgagattatcattattaggctcatatttggttaacgaaaatctgcgttaacagtttggtgctttcattgagagccttcgtgaaaaagctaaaaaaaaatcctccttacataaaaaatagtatttctcttatggttgaaaacgaagaaaataatccttatgaaggagccaatcatcgtcctgaaaaagagccactaagtccccaaggaacatttgacttatcatttgagcaagccccaagctccagggaaacctaggattcgggaaacagacttgaagggcctaagataagcaacagccggtctcttcctaatctagttgacgaggatggcgcttatgatccaacaaggtacataccaatcgttgaattagaaaatcgccatctcaggtgtcgattggaggaagcaaaattgcgtaatgctgaattagaacgtgaggtagtagcagcaagggcggcctaggggaatagctcccaaaatcaacctgaccttggagaaagagaatcacgaggcaaacctcgtgactcgcaaaccagggagcaggaggcatcccaaaggtatcctcagaacgctcaggagagacaacctgaggaaattgggggatacgttgaaggtgagatgtcatatgatcagccaagaaccaagaaatcgaaagttccccacaagaataagggaaatctggggacacagcctgggatacatggatcatcgttcagggatcgccaaccttctctccaagctcataggaaatgatctcgcacaaatcccaatagggggaacgagacgaattaaacc

SEQ ID NO: 352095 - DNA, 533 bp, Cannabis indica
aggagttcagtatttaattttatttttagcattttgtaaaaggattgtaggttagttgaccaaaataatattttttaataaaataatgaactagtgacattacgcgcataaaaagtgttaatataatttgagaaaacacaacaagtgactcaaggcatacacccttgacttgagtcacttggagagtagttaaagaatacaaccaaaaaataagtatctatcagggaggcatgacacgacagaaaaaatataaccataagtacctatcagggaagcatgggacaacctacctgcaaaaatacatatatatatatatattatatatatgggtgcactcttaggctcgtttggaacgtcgtattaggtcgtattgtattgtattgtattatattgaattgcattttatacaatatttttatttaaaactatatgtagtattatcttttatggacacttaaatatataatattttagtataaattaaagtttaacatagtattatataaaaatatgatatataattcaattcaata

SEQ ID NO: 352096 - DNA, 604 bp, Cannabis indica
tgggcccttgaatagaaggtattttgaggaattgggggcagttccaaaagagctaatgccatctactgaaaagcctccagaacttgaattgaaggtgctgcctagtcacttgaggtatgagtttttgggtaaagataaaaagctgccagttattgtgtcagcttccctttctgatgtggaaactgatagactactgagggtacttcgagctcacaacaaggccatcgcttggacactaggtgatgtcaaaggaattagtccttcaacggtgatgcgctgaattctaatggaagacaatgccaaaccgacaatcgacgctcaacgaagactcaatccacccatgaaggaagttttcagaaaggaagtagtaaagttgttggatgctggagttgcttatcccatttcagatagtaagtgggttagcccagtgcaagtggttccaaagaaaggtggaatcactgtgattaagaatgaaaataatgagttgattcctacaagaacagtcaccggttggaggatttgcatcgactataggaaactcaacaaagcaacacgaaaaagatcactttcctttgcccttcattgatcaaatgctagacagatt

SEQ ID NO: 352097 - DNA, 774 bp, Cannabis indica
tttacaaaatataggatccaaaatagtatttaccctatgtttattagtataatttaatggctaattaggaaaattttcccccgaactttgacatgtaccaaatcatgcctcctgaacttttttgaccgttaaaaattccccctaaactattaagattgttagatttaaagacttttatataattttagtaaaaaattctaacatggatgaaagttcagggggcaggatttagtatatatcaaagtttgatcaggggcatattttggtagatatcaaagtctggggagcatggtttagtacatgaacaatcactgaaacagtaaaattgaatgaaattagacaaaagtccttaaatcaaacaatctcaatagttccagggtaattttacggccaaaaaagttcagggaacatgatttggtatacgtcaaaattcgagggaaaaaattactaattagcctaatttaataatatatcaaattttatataatttaatttgataaatattataataaaatattaattattaattacaaaacactacttcattataatattaaagagttttttttttcaaaaaaaatatatatattatttacaattttacgattttaaatttttatttataaaaatatgatttcgtaaaaaaaaataaaacaaaataactaaaaaacaaatgaataaatcaaatctaacaatagttattaatcaaactattaataaactataaaataaccaaaaaaaaaaactaaacctacatgactattataaataaat

SEQ ID NO: 352098 - DNA, 656 bp, Cannabis indica
tccacgtgtcccctctcgactggtccacgtattttgggcgaattctggagcaacatattgaaatgagtttatttagggcataaaacccaacacggacttgggcaacggaactaggacagggacccaagacccgaccccaaacccggacttaaatctaggaaccaactcgtgactcgacacacgaaatggaacccgaccaagacccgagatcaggatcgagatctagacctcggacttggtccgaatccgtagtcggtgtttggatctgggacccagcctcgaactcgaacctagactgggacccgaaactagacgcaaacctcaacccagccccaaatcgcaacctggacccgaacccgtaccttgtgagccaaaattagaaccgaaacttgaagtagactgggacccgggaacaggttcggaaccaggacttggacttggacctggaaccataatcagacctagacctagacttggaaccgtaagcgaactaggacccaaattccaacccagacctagacccgaaccgaaacccgtacctagatcccaacacaaacctacactcgatgccgaacctggacccgacctcagacccaaacatggaaccagactcgggacacaaaattggggttggaacctagaaccgcaccccaatc

SEQ ID NO: 352099 - DNA, 649 bp, Cannabis indica
aaattatggaccctataatgtgattattagagaacattgtccgtcatatataagaacatgagctactcatctcttgcaggaactgagaggattattttatatccattgataaaaatgattatatgtttcagtgaaataatttcttgtttagagggattcttatttggttggatgggggaaattactagactataagtatgatttatttacaatttgtgggaatatattctgaacaatgaaagcatttgagtttagagaggtagtggctaaggctgtgtttggttagaggtattgaaatgaaatggaattgaaaagaatcaattttgtttagtaagttaataataataataataaagtttgtgcatttttgattcaggtcatttgtgtatggtggatcaattggattgtatgtttatgggttttgcatacattacttattgtataagagatcagatatgtcaggttccttacaactctcattcttcttaggatacatggcttgcatttgctatgcccttttcttgatgtttggtagtgttggtttcttagcctcttatctctttcttcgccaaatttaccattctcttcattactcaaaaacttgatatagctgatgacatgagatgagataattgtattacatcttttt

SEQ ID NO: 352100 - DNA, 785 bp, Cannabis indica
tctctctctctctctctctctctctctctctctctctctctctctttgaattttttgagcctatagtgaaagagtacatgcccacccatagcaagtcaagtactcaattatagtgtgtaagactgtgaagaatccaacacttgatggagaatcagatcttgataatactctacgatggaaaggaacaagggttagagatctgagtgggaggagacatattattctgctgccaccaatgtaaggtttcttatactttatatgtggttaattctattgttttagagaattcatatttagggtgttaatcaacatacttgttagtaaatctagatcctggtaaaatatattccaacaagttgtacataatgtattccatatttcaatattgagaaaatatgtgtcaaacttgactaatatcttgagtgacgaagccctagaactacagtcatatttgtcttatgaggaatagccagttcagatcctcgatacataggaaaaggtttctcggcacaagaccataacattggtcaaagtactgtagacgaacagtaaggtggaggaagccacctgggaatcagaattcggcatgagggctcaatatccagaaatttaggttagatttcagggacaaaatcattttaacggggggatgattgtaataaccgcatgattagaatatgaattagtagggcaattagagttaattacttttattttattattatatttgaatatgtatgttgtgggctccattttcaaaaaataggcattagagttataatttc

SEQ ID NO: 352101 - DNA, 593 bp, Cannabis indica
tcatgttttaggagctcatccctattgaattgggaacaaagaaaatccatatccctctcgtgctcagcgagaatgcaccttagctcagcttcctttctagatattacagacgaagcttggagcaattcagtcctaacagaaatcattttcagagaaaggtcatcgaaacgatcattaagattgtcaaggtgacgaagatgatcgcgacattcatgccctaatacggttagtgtcatcagattcattaagcgtacgttctagaaaacgtacacggctacgcaaatcattgacatatgatagagcttcagaaggaagctcacttaactcaccaactacattgagaggtgtaggacgggaaacatggctattcccagatgacatttttttagcgctgctaatagataaaatgatatgaaataagtatacaacaaggtatatttatatacagtcttcaagggatgttcaccataaaaagtagcaaaggactatagagcgcgtatcgaggaactacataaagtgtcagtatattgtctgcataaagaaaatacaatcttctctatagagacagggggctaaatgttgataaataaaag

SEQ ID NO: 352102 - DNA, 663 bp, Cannabis indica
catgggttgatcagttaacaccttaattgaatgtgcctggatgtaaggccttaatatgtgagatgtatgaattaggcatagggcaagtttttcaagaggtggatatctcgattattcccccagtaaccttttactaacatagtaatctggttgttggtgctttccctcttctcgcactaacgctgcactaatcacattttctgagacaaccaagtaaaggagtaatgtttctctagttattggtttagccaaaactggagttgttgacaagtgcctctttatgctttttaaggcttcctcgcactcaactgtccactcgaattttttgttgccccgtaatacattaaagaattgtaggcacttatcagttgatttcgagatgaatctgttaagagctgccattcttcctgttaaggcctagacttcttttggttttgttggtgatggtacttctatcaaagccttaattttctcaggatttgcttcaatgctcctcgtgttgactatgaatcccaaaaattttcctgaagagactccaaaggaacacatttttgggttaagcttcatattgtactttctcagtatctcaaagcactccgcgaggtcttttgcgtgatctccactttttatcgacttcaccaacatatcatcgacgtagacctc

SEQ ID NO: 352103 - DNA, 847 bp, Cannabis indica
aatgagctccctatatgcatctaggcccaaagcaaacatataagcacaggcacacactaatttggatagatcctatcatgttactaggtttatatacagatgaaagaagattataaaatttacctgttacaaattatttatttgagctattgacaattagattatggttaaaatcagatcattggatctgtcaacaagttgaccatatcaatttagattaaacaatagtagattttataaaacaagtttgaatataaacaataaataaaacacacatgcaaaaacattggatagctagttataggatttatttaatttaaattaaataattaattacattaattttcaaaatatctaaataattaaatattattttaaaaaataagttaaactaataatttaaaattaaacctataaattttaaaatttaagtttataacaaacttaaatatctttacaaaactatcaactaacttttaaaaaattttgttctttttaaaagaaaataaaataaatatctaatgaaacagaatgataaacaaatataatttatctaattttataatttaatttaaataaaataataaatttttaaaagttgataaaatatctagttagtatttttttccaaaattttctagattattttattaaaatatatcatatttttaaatttaaaataaggtcatttataggaattatttaaataattaaaatataaaatatatgaccttaaatttaaaaattaaataaaataatcaaatttaaaaataagataatcaattaagcaaaaaaacgtagatattttcttttcaagttcaaaatttactaatatctaaaattaatt

SEQ ID NO: 352104 - DNA, 779 bp, Cannabis indica
tttgaattgtttatctaagaaaagtttgaaatgcatgattgccatgtcattgttgctagctacgattatgtcatcgacatagattagaatagctagaaaaaagtgtttgtgttttggataaaaagtgagttatctaatagggatctagtgaagcctgtattggtgagggtggtactgatttttttgtaccattgtcgagaggcttgttttaatccatagatgctcttattaagcttgcagaccgaatcgggtggtgcattatatcctggaggtaatttcatatacactgcttcatggaggtcaccaagcagaaatgcattattgatgtctagttggtgaacattccagttattcatagcaacaagaactaataatattttgagtgtattgaactttcccacaggtgcatatgtttgaaggtaatcaatgtcatgtttttgattgaaccctttggctacaagaggagctttgaattgttcaacctcaccttgttcattgtatttaactttctatacccatttgcatccaatggctttatggccaagggtaatttgtgacagtccacgtgtggtttttttcgagagcctgagtttcaatatccatagcgaggagccaatgtttgaattgagaagcttcactataagatgtaggaataatgtgtgaatatgctgctaaaacagccgctcggaagtgagggctgagtttggcatatgagataaactcctcaatgggataggcagtggagtgagtgttacaaacataatccttgagatgggatg

SEQ ID NO: 352105 - DNA, 607 bp, Cannabis indica
atttcaaattttaaatacctcgaatttcccctaaaagtgcacattatgcactcaattacctgaaggacaaccgtcaaaacgtgctaattcttaagcgtggtttgagttacatgtcaatcaacattaatgagcccaaaagtgaagagacccttggtcagagtcacatcgggtcatcaactgaactttgaacaattgctacccgttcaaataaagatccaaaccgagtgaagtccacgtgcgaccacaaaggtcccgcgcagacttgggggaaatgttatctcattttttgcacaatgatgtggcagaatacacaagtgacacgtgtcctgcattcctcgcatctgggcggagataaatgtgccaaacaaactccatattacacatctgcatgtattacttctaattacccgagcagtgtggaaggcagactatctgagcaggaacaagtttggctttccaaactacttatcaggacttaactatttcagaatgatctcgtgaagtccaagcacgaagaaaatctctacaattgtgggattgagtcagaggaatatggtaacctgttccaattttcctgtttagtgtagcataattatgtaatgaatat

SEQ ID NO: 352106 - DNA, 582 bp, Cannabis indica
atgataatacaatggaaacctagggtgataagcaagcacacacaagatgaataaacacaaatttcggccaaaagtgtgtggaaagtgcttgttggattttaaacttggaagctcattaatctcaattggataggttaggtgcatgacataaatgctcagccaactttgtgtgaaaatcaagttttagtgttggggtgaaaagtagtcgtttatggccattagcacgcattctaagacaaattcaaccgtgaactgggattctggatgggaaccggaatttcggatggctaacagtgggaaaattagcatttttccgaactaaaacttgtataacttcttactcgattatccgattttagaaattccaattttgttcgattatccgattttagaaattctaattttgttctcttagttaaatgcaatgtgatttataaatccaattaaaaaaattttgaactatcaagtgagaaaacttgttgcacaagttagtgagtgggccaaaatttgaatttaaaaatcctagtgtgctatgcaaatcactttaacaagacaaaagtaaatttataccatttgattttg

SEQ ID NO: 352107 - DNA, 572 bp, Cannabis indica
taatttaataaattttttttcaaaaaaataaagtatcataccactctagccagctcggtacgatcggacgacacacctatgtggtgggttaagtgtgtgtgtgtgtcctcacctattcgcacaaaattagttacctcaacttagaatgtgcaagtagttagaaattaccggttatccctaagataaaatagcccagtcaaaatactactatattggaactctatattggaactctattgtagaatggaaaattgttgaaataccacacccaaaaaccctaatgcttagattacttactcatataatataatcaaaataataaattttaaaataatttttagtgaggacaacaaatctttttttaccaattaagtaaacatgtttaaaaactattttaattaattaaataaaaataaaaatttaataaataaattttctctaaaaaataaagtttcacaccacaccagctcaatacaattagacgatacgcttatatggttggtcaagtatatttccttacccattcctacaaaactaagtactccttagagccttatcccaaagtactaagg

SEQ ID NO: 352108 - DNA, 722 bp, Cannabis indica
ctttacaaaaagtgtcactatatctttttttttattattgttatttttggagatatagtgacacacaaaaagtgccactacatttaatatttttctaaaaaaatataatatttatttttttttaattcaaatttaatataatataaatgataattaattaattatatagtaatacaattaaatatacaaataataatttaaattaacgaaatataaacaatactaaatttcaattaaaactaaaaaactaaaaaagaaaatacaaagctgaaaatatttatttttattaagattattaactaaaataatacaatctttacacacaattttacactcaaattacaactgatatgaaacttaatacaaactcatatctgtttctattaaaaaatacaaaaacatgaaacaaaacccaaatcagattatttttccggtgttcatttagaatgaaataatcccaaatcactttcaaaatattacacaatgtacactttgaacaaaataaacctaaacaacaaaaacaaactcagatctaaagtctacactatcaacaacacactgtcaaacatggctttagaatgaaataatcccaaatccatgtttgaactcaaatcccacacactgccgaacccaaccccttcgaacacgaacgtctatcgtgtacctagaaccacaaaaacattaaaggcaagacccccgaggaccttcaaacatcttccacc

SEQ ID NO: 352109 - DNA, 518 bp, Cannabis indica
atgccttgaaaaaaaatacttaacctaatgtctaaataggaggcataaccattcatacaagcaatcaaaaatatacaaagtgatgaatcattaagagtatattcaagttttcttaaaacatattataattgcttatgaaaaacaaaattgataactgcctgcaaatcaaaatcatagcagataataacggctcgcgcacatagtagattaccaactacttaaataaaatcaaaggaaaatatgaacaatggaaatgcttaaagtattttaaatttgatcaaaatataattgtttaagttgtgaatgcaaatgcaaataggcaaatatattaaagttcaaatgcagaatatgaggcattagataaaagataaaataaaagcaaaagttggccatccaactttgcaaatctgtctttacaaaagtaccacaaggggcgaaaccattatcttggctataaagccagtttcctagataaaaaaaataaataaaaaccaaagcctacatggtaggagacttgg

SEQ ID NO: 352110 - DNA, 655 bp, Cannabis indica
gcaacaaggaagctaaggccttattttcaagctcatcctgttcgggtaaacaacaaccaaccactttgacaaatactgcaaaagccagatgcctctgcacggttactcaaatgggcggtaaaattgggtcagtatgaaatcaacttccaaccccgaacatcaatcaagggccaagccttggccaactttgtagtggaatgcacaagcaaaaaagaaagcataccagaaagcaatcccgagccagtagcacaaccaagtatcaatgaagacaaactgacctggaaactacatgtggatgggtcagcaacagatcaactatctggtgcacgaattgcccttgtcacacctgaggggcaacacctgcacgctgtggtcaagttcagattcaaggcttctaacaacgaagccgaatacgaggctctaattgctggacttaagttagccaaggaaatgaaggccgaacacattgagatctgtagttattcacagctggtggtaaatcatgtatccggcgaatatgaggctcgtggagaaaaaatgatagcatatctgagcaaaatacatgacctgctcgcacaattcaaaagctacggtctcagacaaattcaagagaagaaaatacaactgcagaggcgttggctcaattggcaagcag

SEQ ID NO: 352111 - DNA, 526 bp, Cannabis indica
ttttttttttttttgctttcttcggttttgtcactaaactcaatcagcggtaccgtagaactttagtcaaccttagatcggagattggagaggaggaattccgtttcacttgtttcgctcacaacaggtaatttacttagggttttgaggctgttattgaatacaaaaaagcgatggaaactatgtttggttgtttgagttttgtcaagtgcttcaatctgtttttgtgacaacctgtagggatttgatttagctactattcaattctttaatgatagttaggtttgtcttcataatgtttagtgctaagatttagaaattgttaccatttgaaacgttacagtatgaatatctgttagtaatgaatcatacgaaatttgttggatgtgtagatttgaaacgtaagaaattttcatgattttctgattttttggttcaataaaaaacttgctgtttctttcatgtgaatcgatctcatttgcattgtatttgttctacatatattttatttcagtactgtgtttaa

SEQ ID NO: 352112 - DNA, 649 bp, Cannabis indica
tgattacttggtcttaagcaagtattgaatattaatgttaatactagattgttgtgttgatgacttagtctggaaggaacttacagttttagactcagataatatgtcacaacaagatatccctgaaaaacaatagtaagaggttaaatgtacttctatgtatgaattaaccagactcctactgttgagtgggagccaactgataagtaatcaaacaaggaacattaaaagacagtcgagaaaatttctgaaagtggcatgtatgttagatgataggggtgtatattagaagtccttatatctacaccaactcataaaggatctgagatggtgattactcttggggtggagaaattattctagaaggatgtaaaaacccatctatgataatttaagcttcatcagtgaagatacataacttttaaatttcgaaaattttggaaagttattcaactgaaaaaaaattctacactgtgttatctctattccaatgtggatagaattagagatatgtcttctgtttattaagatgcacttaataagcagtaaagaattcagtatccctagatgagtaatgcatatagtaaataatgttgcataatgttttatgaacacaaaggaagtaatggtggagaaagcagtagcttac

SEQ ID NO: 352113 - DNA, 689 bp, Cannabis indica
ggggcttaaggtttcgcaccattgtccaatcaatattccgttgtggctgtacttgattatcataaggatattgtggaacattattagcaacacacaattgagttataactcccgctaggccaattcccgcatgtgttgatcctgcgaccatgttatctaagctattcagaattatacccccaactggcacagtaatccccttcattattgcataaacaacctaaacaaccctgagtctatccaatggaaaatctgataaatgcttactaggcataagcctagaacttacgaaaaacatctaagcgtgagcaatttgattcaattcacagcgataaagcatttggggctcatcatccacctcatgcaatctcaaccccggaaaaccaactgtttttgccaagtccacaagatcaaacgttgtctccataaacgatttgtagtgttgtctattcacaatttccaagttaaacagtctatggatggaaccataagttgcaagcacatttgttttgcggacccgtaccctatcgttttctgcctcaggccaattggctaaaaattcaagagccagagtttgattgattctttctggaattcgcactaactgctcccattggcgggtctgaatttgttgcctcatgctctcgaataatgggctattcggggtgggattgccatcatattcgata

SEQ ID NO: 352114 - DNA, 672 bp, Cannabis indica
taaatttttaaaaaaaaaaatcagggaaggggtcacttccttgtgcgtacgcacactgagtgtcactcggtcagcacgcgtgttcggacaattcttgttcgaggaagcttgcccaggagcttgtctgaaccctcgtccgcgcatggtgatgctgcatgcagcctcatctgccaaggtttctcagtcagccctcttgaagcacgcgcgtggatggtatgcaatgcataccatctgcaccaaatgcaattctttcaaattttttcatggaatttaatttcgattttttgtgtagatttttaatttttaaatctcaagtctaattattagtttgaaattaattattattttattaattaattatagatattagtagattttgaacttgaaaaatgataatttttacttttttttttgcttaattggttattttaattttaaaatttgattattttatcttatttttaaatttaaggtcaaatattctctttttttgattatttaaataatttttataaaatgatcttaatttaaaatttaaaaatatgatattttaataaaatattctagataattttaaaaaactaaccaaatattttatcaactttcaaaagtttgttagtttttttttaaatttaaattataaaaattggataaatgatatttatttatcat

SEQ ID NO: 352115 - DNA, 412 bp, Cannabis indica
aacagatacaaaaaatggaaacagttttgtaataacacctttagatcggattattattaactttttttttgacaaaaaattagttcagggtcctatttgtaccattttagaaaatacagggtctattttgtcatttaacaaaacagatggtctaattagtaacttttagcaaaacacaggatctaaaatggttatttaccctaaaaaataactataagttgaaaaacaactaaaagtaatacataaaaataacaaaataaatatacatatgtacaataaaaatattacctgaaatagaccaaaatatacacaataaaaaaatacacataaactaaacaacaaactgtaccaaaaaaaacacataaaaataactatagaacaactacagaacacttaaacaacaacataaaaa

SEQ ID NO: 352116 - DNA, 887 bp, Cannabis indica
ttatttagtccaatcatagataacactctcacatattccatcaaatggctaaataattattatcattgcattctatattcaaaatcgagtccaatgacatataatatgactatatttaaagtttggatttttgaaaactcgcttaagcagtgcacattaactatcggtatttgtaaaaattggtgtaccgaaaacatcaccaaaaataggggtagcatatatcaaaataaccacctcgaccagtagatcacacccatgctaactgtttgtcaaaacagtacacgatattgcaagaaagtcaccgggacggggcgaagctacaaaaatatcaccgaaaaaagtagcgagttgggtaaaatggtttagtgtaggttgttctctacgacaagctgagtctagtggtgaagacgactcgtcaaatggacaccagaggtggtcaaaaaatccattcaaagtttgaacctccaaactttgacttgcgatcccgggctaacgacggcgaaaggagcgacaccgctttggggttgaggtcgccggcacctgggggtttaaatggtccagcgcgtggggctggaaggtggccggagatgggtcgccagtcacgctagtgatggggttttgtgggttttctattgtggttttgaagagagatatagagagagagggagagagaggttctgttttgttttttaattagtatatatatatatatattttattatatatatatatttcttctccttttgactcggtcaaactgaggtcttacactagcatactatgtcaaatgtcctaaaaaaaacatttacacttatctaaaggtgtaaagtttttatcgttgactatcatataagtgtaaattcagtgcattgatgaatcatgggaca

SEQ ID NO: 352117 - DNA, 720 bp, Cannabis indica
tgattaactttccttgagaacaagaagcacatgagaactcactggataatagaatcttctggttcttcaatgtatgaccatgtcagttctctattattctacgcatcatgattgaatcggaatggcctaactggtcatgccaaacaataaatgaatttttctggtgtgtgcacttctcgttcacaattacatgggttcctattgtacttatacatgtaacatacaaacttgaacacaaactaggtaatttttctaatatatactttttcgtgaaaagataaatgtaatgtaaatatactcaaaattattttcatctattgtctcaatatgatatttattacgatgtatatctttgaaacttaacaaattcctatttgatttagtggataggcattatctataataatttttgttcctccaggcatcaatataatggcttttctggagccttcaattaaacttgcaatgcctattaatattttccttcattctttataaatttgaaaagtatttatcacttcaaagtattgtagaatgatgtatccttaccattatttatagaatcatgtataagatgacaaatattcattacttcgctaaccaaaaataaagaaaagcataaacatcacaaataaaataaatacctcaaagtaaataaataataataataaaaattaaaaaaaaaacaataacaaagaaaagtgactaattgtggacatt

SEQ ID NO: 352118 - DNA, 763 bp, Cannabis indica
aatcacgtaatacgcctatgttagttagggtgttacatttcaagagagattactctcaggtgaagaaagaagagcagaagttagagattacactcaagctgatgctgcagcagtctgtttgtggtgacaggtcagcttcttatcaataaatccttgtatactatgttatttgattcgggagctacacgctcatatgtggctacacgggtaattgatcttttggctacgccttgtgattttcttgaaagagggtttagaaccctgatgcctaacggggagttggttatctccattaggtgctttaggtctattccaattaggatcgaggatagggagttgagtgctgaccttatagaattagaattaactgagtttgacatcatactggggatagattttttatccaagtattcggccagtatagactgtaagcggaaaatggtgacttttcagccagaaggtgatgatccatttgtttatgttggatcaattcaggggtcttgaaccccgattattttagtattaaggcctaggaatctaatacacagtggatgtgtatgatttttagcggttgtgattgactccaacagacccgaaacatttgggcctgaggtagtccgggtggctaaagattttcttgatgtatttcctgagcagttgcctggattaccgccacaacgagaaattgactttgtgattagtttgacacctagaggcgaacctatttttaaagatctgtataggatggctccagcagaactca

SEQ ID NO: 352119 - DNA, 804 bp, Cannabis indica
aggatatatgcgagtatccccatagatcctcctgcgaaaacatagagatcgactctctatgttgcgagctggtcccgttgacccaacaaccttgataaaccaatatagactcgcatgtcttggctctatcagcttgttatatgatgtcggtacaagcgactttgaaaggacccatacatcttagactcgactagtctcgaatgcatcctaagcctgcgagctgatccaagaatatgaacagccaacttgcaccggagaagtcgcatacgttgctgtatttagtgaattaagctggaaactgttcttcatttattatgtttacgttttttagtttaattattgtaattcaatgtataaacggattgataatgaatgcaatccttgtgtaaatgataggacacttgctttgtatataaaggggtgatccaccgtgaaataaacaagatagaatccttgcaacagtggactaagcagactgagatctgactgaaccactatattctcttggtgttcattattttttagtcttttgctaagtatttttgttattaatttgaatattcgtcattctgggtcgagtactcgcaattattattcatataacattattagtatttatttttggtgttgtaaaaattccttcaacaacagtaggatctgtaattctgtacaacaaaatacattctataattttacaaattaagcataaaatcaactccctatatagaaaactaacaacaataatactcttgaagaagctttcaaaaaaatataataaataaataaataatacttagcaccggc

SEQ ID NO: 352120 - DNA, 573 bp, Cannabis indica
atgtgcaattaaacttattacaaattgcatgtgggtaaaaatataaagagcattgctatgaggcaccaatggtgcctagcaccttttcgacatgtctcgttgcgattggttagcgatactccctaaatgctattatattaaattatataggacacgatacttagtttaaccaatagcgatattgacatgtaggagggtgctaggcaccactggtgtcctttagcatttctcaaatataaatgcacaaaattacaatcggacctcccacgtgtcatcctctcattggttgcatgtggacacgtggcgaggggagagaaagccacgtggaaagtggctgggctgaagttggagacggcagaatggagaaccactcgcgcgcttgggaagtggcgcgcacacacggcccaggagaagccgtgtgcgtcacgcacgcgtgggaagcaggaggggacaaaggtgctggcggtggcagctgcgggctaatgggaacctgccacgtggcaaggcgttccctgaagattgaaattgggccagttgggcttttgtccttttgtgctctcttttgggcttcaa

SEQ ID NO: 352121 - DNA, 571 bp, Cannabis indica
acgacacgatacaaaaaatatgtccttcagcatgacacgacacgagaagcatgaaaggcacaccaggaaagttcgaatagactagcccaaaatactcgacacgtgaaaaacctaaaaaatatgacacgacaaattaaaaacccttataataataataataataataataataataataataataataataagatatgaatttattaattataaataataataataaaatttaaatataatactaaatatgataatgatataattaaacatattgcaacataaaaaattatagttatatattaatttatttataggttgtgatataataatttgaaaatttataagtaaatatttaaattctaataatggtaatagtttttttatataattatctgtaatatattattgaaaatttatataaatataacgaaagttataaaatatatatgtactttagtcattgtaagaaaatataaaaaaataaagcacgaatttaagtttagatttgaaaatggactcgtctgtataagaaatacgggctattacgagcaaagcacgacacgaaaatatc

SEQ ID NO: 352122 - DNA, 812 bp, Cannabis indica
aagtatcatgtaaaaaatgagcacacattgggctcgccaatttgcgattatgaaaaaatgggtattgcaatacacttataaataattatgcaagaaataagtgtcatgtttcgctctattttgcaaataaaatagctttattatgcattcaggtgcatttctattccccttagataattatgtatcaaatatgaaatgattatttgaccaaagtgttggacttgataaaaataaaggtaaaagtgcacctggtaatatgcagatgttgggctatccgtatacatcgtgtccatgcattgattaattcctttccgctttttctaatgtctcgtgcctctttatttttatatatccgatatataagagggtggtatttaccaagtgggccatcgaaccctaaaatgagacaaaagagtcttttggctttggtaattaattcatcgcccgaaccttttcagtaggttcgattctttcattttttttgagatgttagccagcaaaacctttcgggtttgtgctgcccgattgaatcggagtggtgcctaagcgaggcattgaccatatctgcgatgtgctaatgggtaaaaataattgagcactatcgcgagttcgccatatacttagtattttagtatacaaaaaattagattttgagcttgcctctttgagagtgcataagcatagttgtgaacttgtcaaataattttgcaagaaatgagcacacacagggctcgccaatttgcaaatagaaatataatagcgagtttgttaaatgataacacaaaaatgagcattatatcaggctcgcctat

SEQ ID NO: 352123 - DNA, 541 bp, Cannabis indica
aacttgtcctttgttggaagggctcatcttaaatatatatttttccaattaattaaatgttagaaaatataatttagttactagaaataactatttagaatatatttcattaaactatgtgtattttctctaaattaattttaaaataatccaataaaaaattaatttatttattttaaaattgattatgttgctaatcaattttaattaggttaaactaatatattagcataatataattatttaaataaggtaaataagccttcacagtttcggtagttcatgtgagggagggctgggttcactatgtcgtacccactactatggtccctaacggaatttaacctttaactaaataattgttattattgaataaatcgaatactaattggcctaaaaaaactatcatggtgatatttttattttagcaacctagtgcatttaaatcttaaatgagtttcctatatgcatctaagtccaatagcaaacatataagctcacacaggacaaatgatttggataggccctatcatgttactag

SEQ ID NO: 352124 - DNA, 781 bp, Cannabis indica
atttgactttttatagtcaaaaggtcagagatttatatacatatatgtattacatatgtatgtatatatatggctttactctctgttcatattaatttttagtattttgtattgaattgctcatcaaagttaaattgttctattatactatttaattacatttaaaaaatgtaattaaatgtcaatacttttaattacatgggctgtcttaacagttgctaaaatgttataaaatacatttaattacattttttcagtgttatcgtaaatgttttttcttgtagtgatgtttggtaagtcttaataaattttaacataaatgattgaaattaatattatacatatatacatatattttattcgtacgtataataattattaataatgtcactaaatttattttgtagtggtagcctctagagattattaattaatgagagtagctttgactgccaactttacagctcttacatttatttccaaattaattatgtaatgtttgctctttgggattcactttctaaatttgaatttcgagtacctctacaacaattttcaaaatttaaaatttcatttaaaaaaatattatttttagtaataattttttagtcgcaattgtgactaaatgtgatttttaattacaataaaaaattatttgtaactaaaatacagtatttaaatacaaattattattaatataatatttagatacaagtgtataatgactaaaaacacattaaattacaacaaattgtgatttttgtaattaatatctttaacc

SEQ ID NO: 352125 - DNA, 703 bp, Cannabis indica
cctagttcggttctagttccatttgcgattctaagttttaatttgggttttagttcgggtcggagttcgattcctggtctaagtttgggctggggtccggatttcagtctaggtccagatcaggctccgggtgtgggtttgtgtccttggtcttggtctagattgggtgagagtcctaagttccaatattgatctaagtctggagtcagttttgggtctaagtccttggttctgatcttggtctgggttcgagttcgggtccaggtacgggtctacctttgtgtcttattctaggtatgggtgtttgagtttgggtccgagtctgtgtctgagtttgtgtcaaggtctggaccccaagctgggtctaggttcgggtcctagtccatgttccagtcccgagtgcaattccaagtttgggtcagggtcaggatctcgatccagatctaggtccagcattttgatttcagtctgggtcttggtctgagtctatgttcgtatccagatccctatctttgtccacgtctgtgttttggattgggtcctagattttggtgcaggtccgagtctcagttccggtctaggtctgtgttcggttctaggttcgggtccgggtcctggtcctggtcgcggtcctagtcttgttctagtgtcttggttcggcgattcttgttcaggttctattttgggtcccaggtctaggtct

SEQ ID NO: 352126 - DNA, 733 bp, Cannabis indica
tatatcaattattctaaaattaattcaatatgtttgtttttttttaatacagttcaattgttctaaaaatttcaactagctaggggtcttagggtttataggcttatttgaagtacaagagcttgaaaaatcatatttataatgttaattctatttttaacatttttaatttgacaaaaatattttataatttcaatattaacttcaactcaattgttatttgatttctatatttttgtgttgattgaattatatatgaaagaaattatatctagtttttttatttatggaaagtaaggtatactcaccatttttttatttattcagctgtgtatatttgattatttgtgagttttttaatatgtttgattagatttcttgtgaagaaaaccgaaacaagactttcattttataaaaggaaagtcgcacttgctgctctaaattctgtaagtacaaaaaaagaaattcctaagataattgatgatcttttttagggaattgccttgtgagttgtggtcttgttcagatcgtgtatgagctgtcaataaagtgtatattgattataaatacatcttatagtaactaggtcatgtatctcttttatatactttaaattgtattcatatcttaagaaaaaagagtctttgtttgtaaagaagagtgtgttcatctcttacccggtttatatgtattttatattatcttgagtttgtactcaagtctgcaaaagaag

SEQ ID NO: 352127 - DNA, 544 bp, Cannabis indica
tagcttatgcttctcggcagttaaaggagtacgagcagaggtatcctactcacgacctagaactcccagcagtactatttgcgctgaagatttggcgacattacttatatggcgagaaatgtgagatttacactgatcataaaagtttgaaatacttcttcacccagaaagacctgaacatgagacaaagacattggcttgagttggtaaacgattatgagtgagattctttatcatcttgggaaggccaacgttgtagttgatgccctgagcaggaaaggaaagagtaagatgaatgcagtgaagcagatttccaaacagttggcatatgagatgacccgagctaggattgagtttattgtggggcagttggctaacattaccctgcaatatactcttctagaatgaattaaagaagcacaattgcaagatctagagttagtgaaatcccaagataggatttcggctggaaagactagtgactttacagtggatgatatagggatgctacggtttatgaaccgtgtttgtgtgcctatggatg

SEQ ID NO: 352128 - DNA, 776 bp, Cannabis indica
tttaatattgtgtcaaaaaataaaatctaaatacgacccatgtaatctttttataaatggtggagtgagatacgatgatgacaataatgattttgagatcatatatatgatcatttttttttttttataaatttattgattttttttaggccttaattttgtgtaagggttttttaaattttcttttttaatataatatttgaagatatatctttattttttttatttattaaataggaattgtatgatggattttattttatttttacatttttgaattaaaaaattagtacaacagttactcattttttttacaaaatttaaaatttgtatatatcattaaacaaaatataaccgtacgcgaagcgcagattatttcctttatttattaaaggaatcattacataaaaaatataaattcacattttatttacaaaaatactttcataaggtaaagacaatatttatactttttatgtgattttaattaccaaaataccacttacactatcgtcacttacacaatcaaacaatggttgcagggtggttactgcgtggttgcatggtggttgcatcagacgaattagatgatggttgcagggtggttgctaggtggttggctgaaggttgcatcagacgaaggtttcaatcagacgaaataactgttaacaaaatgtttaggcaactgtaatgcaactgtagtgcaactgttgtgaaacattaaaaatcaaaacagtgtttccacgtaagtaactctatctacatgtctcttaatg

SEQ ID NO: 352129 - DNA, 531 bp, Cannabis indica
taaagagcctcgaaacaagaggagtaaacacattgagagtaaataccacatcattagagaatatgtggcaagaggagacatacaggtagaaaagcttgatactgaaaacaacctagccgacctattcaccaagactttgacagagacaacatttgaaaagcataaagagaatctaggattaattgaaatgtactgattgtttcatattagtacaagtaggagtttgttaggttttgtgccctaactaaaactttatttcaatgttatcttgaatatttttttatcaataaatgaataaaattattttattacttgtttaatttattgcttagttcacatgtttgcttcatgatcatttgtttgatttataaatttatttaaattcttatcacattattttttttaggattattgtgttgtctacacatgttgggttttatgccttaaataaaactctatttcaatgtaatccagattattcaatatcaataaagtaacagacgtatttttcattcagttgtgtatgttttg

SEQ ID NO: 352130 - DNA, 934 bp, Cannabis indica
atcgaaattattgttatcttgtttttttctgtccatttatacatcatcaatgggtaaaaattagaattatcatggatgttggtgttgaaggagtttttcctgtttgtttgtttgtttatagttattttgtagttgtattatagttttgtaacttgcatatgctcattcattatatttactttctttgtaaaatgcaggattgggttaacaaattcagtcacaatgatttctacagatcaaagtgcgtatgtacgagcaatttctctgttattgctaacattaagaatactttatctgttaatttgttaacaatgttctgagatacgcagtttgggcattttttagatattcctggctttgtttttcacccccaagtagttcacagccttcttttgagggaggtttaccagcccaatcccaaagaatttggggctaaggttgctggtcgttgtatacggttcaatgccaaagaattttacttgatcactggtcttgattgttttggggattgcaataaactgttgttttcccaagaatcaaaccatttaattgaggtatgtttccctggcataaaaacgattgatcataaggctatagaggatgctttcttgggcagtaggtggggacaggatgaatccctaggattaaaactctctgtgttgtatttcatcgaatgtttccttcttaccaatactccggataaggaagtttctaggtttgatttagatgtcattgacagcggtcgatgggatgagtattgttggggtagggagtcatttgagttgactattgattcttttaaaggcagaatagagcatggtattaaaatgaaaaataaaaaagaggagaagggaggtcagtcctacgatggttggtacagagcgttgggctgtccttgggtgttcatagtatggttttatgaatgttgtcctgc

SEQ ID NO: 352131 - DNA, 507 bp, Cannabis indica
gatctgtgtgtgttcaaaataaatttgaagctttgcaaattgaagaaagtttcgaggattgtcaagtgaaaaacaatccaaaacttgtaaaagaaaattttaaggaggatgaagacgaggacaacgacgatggaggaggataaaacttgtaaaggttttggagtggttgtgacatatgcgagaagtggtttcgaaaaggatgaagacgataatttttcttggggcaatcccctatagcgatgatttaaaaccgtcggctatactataggccacagtttaaaactatcggctatagtatagccgacggttttaaactgtggcctatagttgttataccaaaattcagatacactttagaatttgacacgtgtccaacaaaaggaatgcgaatcaattctaaatgatacaacgatatcattaaattcataataaataactcgttattatttaaaggttaaatagataatattcaaaaactcatttgactttatagtcaatagcgagaca

SEQ ID NO: 352132 - DNA, 634 bp, Cannabis indica
tcttattttggataaatcttgtggattgtggagaggtgcgcaacgtcaagaaggtagtattttttcactcaacgttgtcaagcgcgcccccatccttttgttgacccgagctttagagaaggttagtggtcccttctctttgattcgtcatttaacggaagaagaacgttttcttgcagaccgttattataagaggatgactttcaaggtttgtggagcggatgatgctgttgctaggggtaagactaatttacttggaaagaggtctaagaagaccacaagtcatgttgtgaaatctcgagttcctgctaaggaacatggagccggtagctctcagttgccagctgatggtgtggttgcggcttctccactgaggggtgacaacgagttgtctattgaggagagtatgatcaacctgtccatctcttccaacatttcggcctactctgaccctgcttctatcgaaggtcatgttgaggctcttctccatccgagagatgaagagcgtttgaggggcatcagagttttatgccctaaataaaactctatttcaatgtaatctagattattcaatatcaaaaagtaacagaagtatttttcattcatttgtgtatgttttggttcacttaatcaa

SEQ ID NO: 352133 - DNA, 1013 bp, Cannabis indica
tattttgtaataaccaatgtcatatgtctttatataaccctctacagctatcatcctcctcaaactccaaaataaccagcagcccttcttcctctcaaacccacaaaatcctcgcccaaccacccctttcttccccccgtttcttcattttgtatccgttttacttttttttaaaaaaaaacaaaaaatcttacttttttcatatctataacacacaaacccagagtttgataatcttttgaataattttttagggtaaaccgaacttaaaggtggtggttgttgtagtggtagcttcggtcgctgcttttgatggagaaatcgttgaatctcaacgtccataaatgtataaatctaatctctaatagttttattttatgtaaatcgatttatttattattttataaattttttttaggattttctaatattgttaagattgtgttcttgtggttgtacatggtagctggattttggtcagtattggtggccagatttcagtaaataagataaaaatctaaactttaatagtaaatatgtatgtattttgtattttaatgaatgtgtattgtatgtatacatattttgtaattatatatttattgtattgtatatgtatgtatactaatattataattatattgtatatttctttatgtgttgtatatgtatatattgaatattttaaactaaaagttttgttaacttttacgaattagaatgagataggagagtattaaataaaaatttagaaattaatttttaaaaattagtttagaaattaattctaaattttatcatttttttttctatttttaattttattcatgtgtttttattttatagcagctagtaaatagttagttacaactacttaacaagttataatttttatttctattgatgtatttttattactaactagttaccagggacggacacaggtgtattaatgtgggggctatagcccctactaacaaaaatattgcctttaaaaaaattaaatgtaattt

SEQ ID NO: 352134 - DNA, 518 bp, Cannabis indica
gtggactcactctcctcaaggagtgttgagctatcagaaggagaccacttgagtataaacctcgcttgaactagactcagcgagatgatgtgaccctgacaaagtcttgtcgtattattatgcctcgcacgatgcaggaccgaagactgggtttaagactcgcatataccaagatatatgccatgtccataaaggttttcctgcgagttagtaaagattgattctttactcaacgaactggttcagatgacctaccgcactcgataacccgataaggactcgcatgtcctaagttatcgattttttacagaatatccgtatacgtgactcaaataggacacatatatctcaaatacataagactcgattagtcttatgtacgcatcttaagaacgtgagcttatgtgaggatatgaacgaacaactcacaccaccaagatcgcatacgttgttgtagttagtgaattgggtcgaaattgttcttcatttattatttttacgtttctattgatttaaat

SEQ ID NO: 352135 - DNA, 835 bp, Cannabis indica
tctatcaaccttactaaaagttctggctgccacataagagttgctgactgagagctgacctgttatgactgagggactagcctccgcatctacctgaggtagagcaaacaccctcgctggagcgggttttccagcagtcttttgttcttctttcttaagctggggacagtctcttttatagtgccctggcataccacactggaagcacccttgccctctacactcacccagatgatgctttttacaactggggcattccaggtaagtgtatcaggtttcaaaactaccctgacggttgcctcgtccctagttccctcggaacctcttactctgacctaagccaccgggtgcagtcggtgcctttcgtttcttatatgtggctgagccactaccacccctactataactagtggaggagtaggagccccaccaacgacatgagtccctcgagactcttgactacactccactgcgcccttagctcgcagtgcctttcccaccatatcagcataggtggtgttgtcatcagtggtaatcataagattatgtcttatcttcgaattcaatccatccaactaattctctttcttactgaaattgattggcacttttctcgaggacaatcttgccaatagatcaaactgagttgtgttttcagtaacactcatattttctttttgggtcagctgagtaaattccttccttttcgcacttttaactgcttcattataatacttcgcattgaacaactcctgaaacttttcccagatcatagcagtaacatcaaaagttaggaacaccatgttccaccaaactagagcatcttcttgaaact

SEQ ID NO: 352136 - DNA, 976 bp, Cannabis indica
ccattcacacgcactcacatcatctattttttttctttttctaacttttattttttcctgaagcttctcaattttacaacatttagtacattatattgttgatattaaaaaataatttctcttcctttttttcttttataaattaaataagttactattttttttatttttatatttgtagattatataaaaataaatttatttttataaaaatattttaataagtttataaaataatttgaaaataaattaaataatatctacaacatcatatgagttacattaaaaaaaaataaagtaacattaaggtatcttaaacaataaaataacataacatagtctaaaaatataaaaaaagaaacaaaaaagtttctcttaatatttagtcttttttttagagacaaaaaaaaatatatgtttctcacatagtaaaattgatttattttattattttatatatgtgtaaaaattctgaaataaaatttttaatgaaaaagtaaccaattgatatcttattcacatcaaaaagcaactatataattgcttttttcaaaactctcaaaaagcgaaaatttctggaaatgagatttttctaattttttctattttcggtaattgttttgaatttcggtatgtatttcggtaattgttttgtccaaataattttcttaaaagtattttttataaataaaattaattttaggtataatattaaaaaaacccctaaaaatattgtataaaatacaattcaatataatattatacaatacaatacgatgtaataagacgtaccaaacgaacccttagtgaactattattgggaatatacttgtttgtttggtatattgtgtttgattgaatataattttggtattttatattctcgctaatgatacacactagcattgttagactatatatatagtgtatgtaatatagcatatacaaacgatatgaaatgcggaaaacaaactgt

SEQ ID NO: 352137 - DNA, 522 bp, Cannabis indica
taataataataataataaagtatgattgtgtaataagtggtaatttttttattaaaaatataaaataaataacatactttttttttaaagaaatcatataattttattaatagcaatctgtgactaataacctaatcaaaacacatcatttgttggaaacctaactagaatcagaataaaaaaaatgagccaactaattagtcgcctgattgttagatcgttttacaaaagaaactaaaattaaattagatgaaaaagattgcaacgtcgtaattaacattaagtcacttatatttagtttactccaccactcaaaaagacatgaaaatgaatctattacagcaggttgatttaaccccttagcttaagcattcaactattgtataaggtacgtaactacacccctagagaacttgttattaccaaccaataataacaatttgatagtgaggcatcaaagaacaaaaagacaaaccaacaacaaaataaaataaaacaaaatcatgtcacagagacaagact

SEQ ID NO: 352138 - DNA, 543 bp, Cannabis indica
ctctctctctctctctctccgagtttctctctcaaaaatgcaattcaaaggtgctaaaattcaaaccctaaaagtcttataaatattcctaaaaattagggatgtcaattatacccgcgggtaccctcgcccctatttgggcaagacagggcttgactttcgagggctgaggcaagtttaaatgttcatacctgagtcagaaatggggtaggagcagggagatagatactcgccccgatatgatatatatatttaagttttaaataataactactacaattaaaataacttcatgttttaggttttttattgattatagtaatgagacatttcagttttcatgaaaatacatgtggtgatgtatattaataatcacacttaactgctttaaaaaaaaatgacatttaactatttttttcgattactaattttgtatttactatacacactattccactcatgtttattgttttaatgagtttttataattatttttttaaattctctttgagacatcattttttttcaaaaatatatatgtaa

SEQ ID NO: 352139 - DNA, 664 bp, Cannabis indica
tcgtagaaaagaagaagcatatgaataggaaggttaaaaggggaacgactcaaaaggattcgaagtactgatatagcattacagtattggacttatgagtccatcctagagcttgctaagaaatttgcgatcagaaaattgcattgctttcctagaacggtcaattgggagagtaaggaggtgtcactcggcaaggatgaagtcattagattgtttgcaaaaaacgtaagttttttaattcattgtacttgttcacgtttatttatttatttcattttaatttatttatttcattttaatctaagtttaataatctttttgttcatatttgcagttgacagtgtgctctgttttatgtttgcggtctaatgaagcagagtttttgagcaacgtcattggaggtgaggtgcctttatttgtagatatggaggaattggttgatggtagtgatggacaacctactcaggatagtttacgtagtcagacttcgaagcttgcacataccctatttcagagagcggaggaagctgaaatcttcaaagatgatacaccaccaccagtagcagacccaggattttaatcgtagtgtgggcgtaaatttttttcatatgtaaaaatattccaaaaaaaattataaatataaagaaaaacacaattcaatatt

SEQ ID NO: 352140 - DNA, 785 bp, Cannabis indica
tgtcttccgaagatcgtcatgacatgtacaatcatcatcaacagtcacctcatttcacgattcagtaagcttttattgctttagtagtttattttctatagtatgatctaagaaatgcctgttaggaaacatggtagcctgatagtagaataggtgcatgttactaatttccaaataagcagcattaataggtaattcttgatcgcgatctgactagactagttggtagtttacgggctgttatagtagtatggacgccaggaaaaataccaagagttagggtaactcggtcaaattcagtggcggccagggagttttgtattcccctaaatgatgtggcagaagtagaggccttagaagcagggcacatggtcggggtgatgttaacccaccacagactacccaagctgcccatgattgggaaaatcggttcgtagtgatgcaagccaggatcaatgagcacgatgaaagattcggcggttgagacagcagggtgcttctaaagttcttgttccaaaaataccagtggcacctgcccctgcattgcaagccgaacctctagttgcagtgaaccgaatggaatccctgtatgaaaggctctgtaagcaagcacctccagttttcctgggaggttctgatgttatgaaagccgaccactggctaacagtgattaccagaatcttaaactttatgggcgtcaccggtaatgatagggtggcctgtgccacattccaattttaagaggacgctctagtatggtgggacatggtgttcctaactcatga

SEQ ID NO: 352141 - DNA, 1931 bp, Cannabis indica
acgggctagctcatctgctattgtactttccactcttggaatctgcttgaggctatagcttttgaattgtgcgagcagatcatgtattttgctcagatatgctatcattttttctccccgagcctcgtattcgccagatacatgatttaccactagctgtgagtcactgcagatctcgatgtgctcggctttcatttccttcgctagtttgagtccagcgattagggcttcgtattcggcctcattgttggaggctttgaatccgaatttgaccgctgcatgcaggtgttgccccccggtgtgacaagggcaattcctgcgccggatagctgatctgtggccgatccatccacatgaagcttccaggtcggcttgttttcagtgctgttcggctgtggtgttggctcgggatcgccttctgggatgctttcagtttttcctgtgcattccaccacaaagtcggccaaggcttggcctttgatagctgttcggggttggaagttgatttcgtactgccccaattccaccgcccacttgagtaatcgcccagaggcatctggcttttgcagtatttgccgtagtggttggtcggtgtacacccgaacaggatgagcttgaaagtaaggtcttagctttcttgttgctaagatgaggcagtaggcgagcttttctatcaacggatatcggccttcggcctcgatgagtcttttactgatgtaatagactggatgctgcacgccatcttcttctctgattagtacggcgcttatggcatgctccgttactgctaggtatatccccagttcctcaccgtccagaggtttagagaggacgggaggttttgcgagctgtgcctttaggtcttgaaaagctctttcacattcttctgtccattcaaactttttgtttcctcgcaggatgttgaagaatgggacacatttatccgttgattttgacacgaatctgctaagtgcggcgattcgaccagttaggctttgtacctctttggtttttgttggcgagttcatatccaggagggcttggattttttccggattggcttcaattcctcgagcgttgacgatgaagcctagaaactttcccgagctgactccgaaggagcattttaggggattcagtttcatgttgtattttctgaggactttgaaacattcgtccaggtcgtctatgtgccccccagcctttctggatttgacgagcatatcatccacgtacacttccatatttctgccgatctgatctttaaacattttgttgaccagtctttggtatgtagctccggcgtttttaagaccaaatggcatgactttgtagcagtagagacccatatctgtccggaaacttgtatgttcttggtctggtggatgcatcttgatttgattgtagcccgaataagcatccatgaagcttaatatttcgtgcccggctgttgcatcgacgagctgatcgattcttggaagtgggaaacagtctttagggcacgctttgttgaggtctgtgaagtcaatacagactcgccatttcttgttcggcttaggcacgagtacggggttcgcaacccaagccgggtaaaaggcttcaatgatgaagttgttgttgcgcagcttttcaacttcgtctttcagggctactgctcgttctttatccagcaatcttcgtttttgctgaactggccggatattaggatcgatattcaggacgtgcgaaataatagaaggatcgattccgaccatatccgcatgtgaccaggcgaaaacatctaggtttgctctcagaaattttatcaattccgattttacttcgagcaacaaaccctttccaattttcagctttctggccgggatagctggatcgatctcgatctcttctaattcttccacaggtccaacattgctgcttgggtccccaag

SEQ ID NO: 352142 - DNA, 495 bp, Cannabis indica
tctctctttttcttttttttttctttttcttctttttctttttcctctttttcttcattttcttctttttgttggagtagaccagcagcctcttcctctttcattttttttttccatctatgcatatatatatgcaatgataatgaaacccttcaacgcaacccttttacaaaataaaacaataatgaagcccatttttttcacttgtcttttctttgctttgtatttttcttgtaaacctttaatcacactaaaagcatattagcccattaataaataaaatgaacttggaaaaagatatttggacttcaattagagtttggtaaattaatcaactacatcaaccacctaattcaaattgttctctattttgaccattttgacacttaataagtccaaattttacatttgatctcttatcaaatatacacaatattgagaataatatttttaaaatgggaaactaaataaaattgataaaatattacaaaaatt

SEQ ID NO: 352143 - DNA, 538 bp, Cannabis indica
aggcaagcctaaatgaccatttcgtctatccttacctgagcctaacactacaagcctagaaagaccttctgattcttgggtgtgcattgatttatattagtggagaatagtaagtattgcaagcatatggaattttggattagtggattgatggttgaaattggcatgcataaagtggttcaattgttaattaattgcgtttgatagtttcatgagctgaatgaaattaaattgaagtgtgtcaaaggcataattaaactgaaattctggattgtattgtgaaatttttcataatcatgttattgagtctacttgaaaattactcatattttggagattgacttgttaacttttgtttttttattttagtgttttacttgaggtcgagaaaatatttagtttagggaaatttgttaggttattataatattatttttagataattctagtgtattttttaatttagttttattcgtgtttggagtaattttacgcttgttatcttttatttttgcagatttaaaatagaagaagatta

SEQ ID NO: 352144 - DNA, 591 bp, Cannabis indica
gtttggaaaattctctctctttcaacctctctctctcacgaaatcccttagagcagctagggttctggaattttgtcttaacatcttgccattttacagcagctcttagtgatttcaagcaagggtaagcttctagacaactttcctttagtttccttgaaattcaagttttgaaattatgcatgtttgagagtttgagtttcatagttgctgttgttgtttgaatcatgtttctggagttagattatgaattgttatgttgatttaggcttgaattagtggttgtttgaagttttagacaagctttgagtttaagaactcaagcttgaagctttaatggtgaaaattgattctaagctttgattgttgttttgttgcttggaaaatgtttattggagtgtaatatgcaggtctggaaagtttggttgagttttgaaacattttggttggggtttgatttttgttggttttctgggttaaaccggctaaccggttttacactgcttgtaaaactggttacccggattttgcagcagccggtgaaaaccagttttttcggcttgtcgtttcgtgttagtttcaggttttcag

SEQ ID NO: 352145 - DNA, 798 bp, Cannabis indica
cactggcaggttcaatttgattcctcgcatggcctgttgaaatggatccgaaagtccaagggatttaggtttcgaagatgtgttaaaatggcttcagttgctgctctggtgtatgtcatttggagagctagaaatgaattgatttggaactcaaataggcaacaaaatactgaaattgttaagcaagttaaatgggctgtaaaaaatagaatattgtttgaattgccaaaaaaagttaagcaaaaagatagagattggttccaagtattgtaaataaagttgtatagataatattaaggccatttatggtgcttttaggttgtatatatgaagttcgaaaaaaaaattgttgttttaaaaataatatatatttattgtgttggcaccgatactaaattttgacatcaatccaagtattactattacaaaatatggaaattccgtcggtcagaaatcaattcttttttaggatcgatgctataaaattgagtttatcggtataaaatcgacgtctatttatagaattataatcaaacttaaagggttatagagaccttttagaaaatttttagaagagaagtgttgattacaacctctaagtcaatctccacgttcgaaatcacatgctgaaatattttttttaatttttttatagcggtattacgttatagttacaatatcatccctgtaaatttttgaaaatttctgaatagtttacaagtatcgaaaacagagttcttgatatttcagtttaccattttaaaaaactttaaacgtattttcggcactgtaaactat

SEQ ID NO: 352146 - DNA, 583 bp, Cannabis indica
tctgttgacaaagaggcgggccgcggcatgctaagtccatgccgcggcccgtgtggcctttaggttgcttacgtggtcttcttccaagtaggcgggccgtggcatgctaataccatgccgcggcccgtgttgatctctgcacccaacctccacttgtttctatctttatccgactttgatcttgatattttccaccaggatattttcattcgaaattttatcctttttcttctgatattttctaactcttcatctatttttaaatctgcaaaactaaaagataaaagcgtaaaaatgctccaaccataatttaaattaaaccgaaaaatgtgctaaaattaacctaaattaaatactaaaaatatcctaacaattgacacccaaaattctaattttcatatttttaaatctgctttttaaatctaccaagtacttactttttttaaaaaaaaaaataaaaattttaattctcatttacaatattaaaaaagtgaaaataattttatataatatattatttagaaaatatttttaatttttaattaaaaaacaaaaaaaaactattaaaaataatgaacaaacc

SEQ ID NO: 352147 - DNA, 1088 bp, Cannabis indica
taattgatgcttgatttttacctatctcttaggtattaattagtagtgcaatagggatattttgctaccttgcataactaaaaatttgatgctacattggactatttgtgacctgaattagtgtaggaatgcattattgaggttatgaattgtatattgcaggttttgggaaaagcttgctgtttttttttttaaatctgttaactctgacaggattgctaactcattgctaactcattgctgtattaactggaacataccaggggaaaattaagcatccaaatctattgtctaaatctgaaattttcacaactttatttaccttttgcttcttaattttagtttatctagcttaaaatattatttctaaactctagaattaaggttaagaattttgctcttgaattgattagtggttttgctttatttttacttgtaattttttaatgcttttaattgattttgcattatttagtgtaaaagtccttgaggatacgaactttgataattatcattgtattacttttttgtaattgtgtacacttgcacaattataaatcaatataattttcacaacaatcgtcgagcagctgttccacttaggtcggccgacacacctgaatttgaaaacgtggtaagattagtataatgatatgcatacatatttacatgtttagcgtacatgttggttaagcctgttagattacattataattacggtatcaacatatttagtattatattggatattgataaatgtatgttggcttaagtactactcaacagtatcacatcagtatgactagagtacggctagcgtattgagtataggctgatattatggtcgatagtactgtactacttgacagtatcacattggtacaactagagtacgactagcgtactgagtataggctgatattatggtcagtagtactgtcatacgaatgttcttgactcagcaccgtgttggacacagggttagggttatagttgggtgtatgggaacttgattataatctgggttattgctatgttattgattatgcttttcttactgagtttgtcgactcacagatattgtttgc

SEQ ID NO: 352148 - DNA, 578 bp, Cannabis indica
tgagaaaaaatttgactaaaaaattatttcgggtgctaaaaaatataagggtgtatcaatattaatatattaattttaaaggggtgcatggtagaatttcccattagattatttcgttaaaaagcataatacggagatttttttaaaaatatatatataaagagtgtttcccattattttttgtttttgaaattgtgtttatgataataaaaataattttttttttgtagtttttcaaagtacaagacatgttttgctaatatttttagatatttttactaaaaaaaataattttaatattcttacatgaaactagtcttaccccctacccttgacacagactccgaatgttagcttgaacccggagcccaacctcgaatccgaacgttgtttttgaaattgggtctatatttttttaaaaaaaaaataaagagattttatagtaaatgaccacaaattataggattatgttagtatatgtcttcatttacaaaaaaaaaaaaaaaaattatagtaaatggccctaaatcataggtttatgttagtaaatgtcctcatttcaaaacttgtagagaaat

SEQ ID NO: 352149 - DNA, 1105 bp, Cannabis indica
gtcagtgatgaaaagtttgtgatttattatgatgcatccaaataggggttggggtgtgttcttgtgcagtctggaaaagtgattgcttatgcatccaggcaactgaaaagagtatgagcagctgtatcctactcatgatattgaactagcagcagttgttttttcactgaaagtttggcatcattatctttatggcgaaaggtgcgagatctacaccgatcacaaaagcctcaaatactttttcactcagaaggacttaaatatgaggcagcagcgatggttagaactggttaaagattatgactgcgagattctctgccaccctgggacggcaaatgtgatagcagatgctctaagtcgaaaagggacagggcaggtttgggaactaaagaagatttcagcagagttggctgaatataggactagagtgggaattgaatttgtaattggaaaacttgccaatattacactgcaatctcatctgttggaaagaattagagtggctcaacaagttgatcctgagttacaggggcataaggagaggtcagaggcaggatcggcaagacttttcactttcatctgattggttattgcgatacaagaatagaatttgtgtactgactgacaaaaatatcagacaggagattcttgatgagtctcataccacaccgtactccttacacccggggacaaccaaaatctatcatgatgtgaaagatttatattggtggccgggtatgaagggtgatattgttgaatatgtgtcaagatgcttaacctgtcaacaaattaaggcagaacatcagaggccgaaaggtttgcttcagcctctaaagattcctgagtgcaaatgggaagacatcaccatggattttgtggtgggattgctcagaataatagggtattattactctatttgggtgatagtggattgatatacgaagtctgcacatttttaaccagtgcgaacaacatatacagtggattagtatgctaatttgtacgtcaaggagatagttcggctttatggtgccccaaagtcgatagtttcgaattgagatccaaagtttacatccaagttttgggaaagcttacaacgagcaat

SEQ ID NO: 352150 - DNA, 610 bp, Cannabis indica
aactctccaagatcaacagttaatacaaaatttgatgagtttgtgtcgtgtaccaaatcaactttgacattagcgtcaccatccacgatgtcccagatttgtcgatggtttacattctcaactattttccaatttttccctctcaataaattatcgagataaaatacttactttgcttgattagcaagtatgtataggtcatctttataccattcaccattaacattaatactagtgatatgattctcaacgattattttcttccgtcttggatctatattaaaccacttgcacttaaataatgtgacggagtaaacactagtgaaggttaactttagtactacttcaagtgtgtcgtaataattaaaaccttctgttcgagccacgaacactccattattttgtgtgctcctcttctcatctcgtttgatagccataaatcgaactccattcacaatacaaccttcatagtaagtacctaagtgatcagacccgaatgttaaagctagcaactcttcaccatctactagtgctccaaacttgtgcaagtcatatatctataaaaataaatacttcattagagaataacaaacaccacttaagataataa

SEQ ID NO: 352151 - DNA, 615 bp, Cannabis indica
aaaaaacgaagagaaaaaaaaaaagaagaagaacgtatagaaagagccgaagcctggggatagcattgtagttgtaatatcacttaggcatcaaaaagtacatccttaaacctttttttttggcccaacgtctaggttgacatcatatgtcgacttagacgctggaatcagaacaaccttcaataaaacaaccataactcactcaatattgattcgattgatgcgattcagcttgcgtttcaaagttatttcaatattctatcaagttacgcctcacactctaatcgcaattctgaagtgatcaagttcaactttcatcctcaagagagttacaaatttaatttataacttaccttcggagtcttttcaacattagattatcatcaatggtcgaaaatagcctaaatgtattttttttatatatatatttttagaatattttattattattttaataggacctcttctcctataaaaagatagctcctctagctcattttttacattcagagaaacactcataaggtcagagcatctctctctattttatctctctagaaattagaactttcaaacttagctatttttcttataatcaatctcgtgagaataaaa

SEQ ID NO: 352152 - DNA, 819 bp, Cannabis indica
aaaaaattattattcttgttgttgccatgtcgataacatcatcgatatatatcgaaaaatatcgttaaaacatacacaggcacaaaaaactacaacatagatttcataaaccatactaataatgcatgtaattaaaatacgaaaatgatgctcaaaccctggccttgcatgtagctttgttgtcccaaggcgccacagtttgaacaatggcgaggttcctgaattgctctttcttggacgacctacgggtttcttctccactggtaccccgactctcatgttctgcatgtattctggaagcacccattaatcctcctcgccgacaagattaattgttgcatcgtaagtattcttctacgtctcttttgtgtgggaggacaaagcgtacatactgacattctgagtaagcgttgcggcacatgcatggggacaaggaattttcaacaattggaacacgccgcatgtgcatgttctctcaactaagttcacatcaccacctttctcacagtcagaaccgtcaaaacctcttccaacgttaaaaaattgtgcatcgttacgtaggacgcttctatgtctaccatcctcgtatttctttatcaaatattcctcaaaatgagttgccaaagggctagcgcacttacttgccttttcgagatggttagtgaacaaattttgtagtgtgagccttatgaactcaactagagtagtgattagatatttttagaattcttttgtcacgttgttgaggctttcaacaacattgtttgtcattatgttgtacctgtctcctagcaataagaacgagcccacttttccaat

SEQ ID NO: 352153 - DNA, 539 bp, Cannabis indica
aagtttgggggtccaacctcttcttctccctctgcctcggaaggacggcccggacgcgcatcatctagctcctcaacctcctggacctcagcgtccctcttgagattctcctccatcgggatggctgaatcctttttcggcgctggctagagtggcaagccaagccacttgcgggtcagaagcgtcgactagaggcgtggttttctttgtacgagccatcatcctatggctgggtacaaggtcagaagagtgtccttcgctagaaggtggactagaacaaagacgaggatgatcctcatgcagaagttgaagcaatcctggtcgatttgatgcccgagttcccaagactcacttgagttcatctacaaaagacaacacacaagatgagtgttggacggaatatcaaacggtaaacaagcaaatatgccgactaggagtactcaacagattaaagaatggctatgtctgtagaaaagtcagaactcgagaagtcaaaaaagttttcttgagttaggataaaaaagttcatgaagcttaga

SEQ ID NO: 352154 - DNA, 538 bp, Cannabis indica
caccggctgcccctgttgatcaagtgttaccaccagcacctgtgccagtggtgggtaaccaggggtttgttatgccgcatagagactcggtatttgagcggttcgtgaagctgcaaccttcgacttttcgtgggaggtattcatataattaaggtcgagcagtggatgagcactattacctgtatcttggataatatgggagtgacgggaactgaaagagtgaactgtgcagccttcatgttaccagatcatgcccgtgtctagtgggatatcgtgggccaaacacgggatgtcagtgtaatgaccgtgggaagaatttaaagtttgtttgaggaaagttttactacatctctgtgagaacttcacacatggaagactttgtgaagcttactcaggccgaatacaccgtagagtttgatcggctatctaagtttgctggtgatctggtgcccatagatttcaccaggaaatagaaatatgtgagaggattaaatgccacaatcactgacactttgtataagaaagtgttggaaattat

SEQ ID NO: 352155 - DNA, 827 bp, Cannabis indica
ttttttgctcttaacaattttagcttttgacaaatccatagtcattttcttctcgggcactatagggcctagaaacaccatctcttttcagcagggctggactttgtgagttttcctcttagtttctcattagatgacactccaacatacttatactattgcccataatataagtcgtaattggattgtagtatcctttgcttacgttgtgccttgaattcctttatgttgcatgagtgtattttctaatcccaacacttatcaaaaacttgtatagtccttgacatgccatgacattcttcaatatatgttactttggtcctaattgtgtctcacttttctcctgtctctaagtgaggctttcctaacattttctcattgagctatactccacaccattgttgttgtatcagtgagtatttggaatctagggatgtcacccttgaatgctaattcctcctctttctcaagttttgaatttgcgatctactctctatagttgtttgttgtacacccgccacaaagctgcatccacaatctcttagttgtgtagttgtgatcaattccgagtagtcaccctcttagttgtctctcattcatgttgtacccaaattgttagccgtgcctggaccttttttgtctttctcctttgaaaatgtctctgtcgaaaccatacacatttttctctattatctcctccaccaagtagatgaccttgagtttaaagtttacaactttccttcggtaatctaatatttgttgatgctctgcttatctcttagtgtttaagataccttcataagttattacctctagtaattttatca

SEQ ID NO: 352156 - DNA, 674 bp, Cannabis indica
acaaataaacagagtaagagtcgaacaagctcttctctacaaacataaacactctttccttaagatatacaattcaaagtgtatgaaaaagatactaagcctagctgctataaggtgtatttaaaatcaatatacaccttattaatagcatacacacggtctgaaccagaccacagtctactagaaacttccctaaaataaatcttcaatcagcccagaaatttctatttctgtacctacagaatcgtgagcagcagtaagtacaattttttttatagaaaaagaaaatttagctccagttttctcctcaaaaaatctgatctaacaaaatagaaaactcacacaagatcagaatataacagctagttaggtaagaaagaaatgagtaaccaaattttctaaacttttcaattttccatttttaccttattttcataaataggaaagctagacaattttccttccaaaattaaattgattaatataaaagttaaatgcacaaaacataaaaaccaatttaaatactccagccaaaattaataataaatagagcaatttgcggcgaaacccccttatgttttgatttttatacacttaacccccttatctttatttttggtggcaaaacccccttatgttttaatttttatacacttaacccccttatctttttt

SEQ ID NO: 352157 - DNA, 700 bp, Cannabis indica
tcattggagaaactcgtaggaaaacatgttctcctgcctgaaatgcaatgtctttgcacttcggatcagcataacttttctgcctactttacgaagaaagcatccgagacttgatcttgtctatcgcttcattggtcctctgaactaactcaggacccaaatacttcatttcccctatttcgtcccaatgccttggagaacaacactttttaccgtacaacatttcatagggagccatccttattgtactttgatagttgttgttgtaggaaaattctatcaaaggtaattatctactccatgaaccctcaaagtccatgacactagctcgcaataagtcttctggtatatgtattgtcctctctaatttcccattagtttgagggtgaaaagttgtactgaacttcagcttcgtacccatagctctctaaagatttacctagaattttgatgtaaactttggatccttgtctgaaataatggattttagagctccatggagacgaactatctccttcacatataactctgcatactgatctaccgcataagttgtttttactggtacaaaatgtgctaactttgtgaaacattccactacgacccatactgaatcatacattcttgtggttctgggtaaacatgttagaattattttatcaggatctagatttactaacaagtatgtttcattaacatc

SEQ ID NO: 352158 - DNA, 675 bp, Cannabis indica
tttgtaatgagcaatccgaaaggaatttaaagttaatgggcagcgtctcaagcattatttgggtggtgaggtcgatcgaggaaagacctcgatcactttggaagatgcataaagcaaaaggtggttgggttgccttgtgcttggattgttaattcgtttttgaggcaacccaatgttggaagaagaataagtattgtaaatattttgtaaacaaaaagaaaaaaatagaaaaaaattaaattaaaaatttattgtataattagattagattttaatttttatttttattttattttattgtatgttcatttttattttaagtgtttgggtggattgtacacttggtttgatgtttcaggtatttttggagcacaatttggagttttggaggtgatttaagagtctaaaggttttgctagatttttgattgaattttgctgcagcatttttttttagcactaaggaagtttttgttcatttggagaacctttgcctgctacaacatttttagcaaaattttagcataagtggtacatgttaaaagagcactcagcaagatttttgctgaacttttgtggaaaatttactacagcaggcgtaatttggcttactgtacgagatgaagtatccacatattacaatatttttacttatatatatatatatcaaatatta

SEQ ID NO: 352159 - DNA, 591 bp, Cannabis indica
tacgaacccctaaggatttccttagagaaataaaacaaactctgtagacgcctggatgccaaacgtgaaaaaggcaagggagaaaaggtgaggcctcgtggaaataacctacggaactaaatcaatgataagatccatggacgtgagcttccgaacaacgacagaaaacatttggaagaagagatagccgctttgaaaagattagtgcagaagcatagtggagaaatttctaactcggaagatgaagatccgaaaccatgcgtcaggcggataattgaagctccactacctgaaaacttaaagatgccacaaatgaaattgtatgaaggcaagacagaccctaggaccgctttgaaaagattagtgcagacgcataatggagaaatttctaactcaaaagatgaagatccaaaaccatgcgttaggcggatcattgaagctccactacctgaaaacttaaagatgccacaaatggaattgtattaaggcaagtccgaccctaggacccatctgtccaaatacagtcgcttaatgcaagtggctagtgttaagtttatttttatgcacttttatagtcaattttagtgtgtg

SEQ ID NO: 352160 - DNA, 854 bp, Cannabis indica
agaatatgttattttgaaagatggaacattaaaggaaaaagagaaagattagtaaaatattaaaataatcttttggagcatgaataactgtagctaaatgtattctcaataatttttctattctattatttaaaatatattattaaaattttaatttatttattttacttcaaatttatacatctcatattctctattttatttctttatactatttaaatattatatttttaatatattttattcattttataaatataaaacatataatattacacacatataaaaaaactaaaaacataacattaatgtatgtttaactgaatgaataattatttttacatttagctaaacattatttattaagctaaaaatatataaaatagctaaagtttacctcgaagctcaattttataactttttctctataatttgaagattagactattttaactcatttattcatttattggatcaataagttgtttgacatatgacatttttaattagtaaacggatctgttagaaaagaagactagcgaacttacagaaaatgtgtcatcgaggactattactgctaattttcgaagttgaagactaatctgcattaattttaagttttttttgggacttatgtcgtaattattccaaatataaataagcttgattttttcttaaaaaaatattagtttgtttaacgtttagaagtaactgtgtataattactaagtatggtaattactagggtggtaattacataatttagtaattacagtatatattttaaaatgcaaggtgtgttaggatatgaggtggttattacatatgaattcttaatatcttgtttggcaaaat

SEQ ID NO: 352161 - DNA, 734 bp, Cannabis indica
gcataaaatttagtatacatgccttgcacgtagcttttcgctagtatatataagtgttttgaagaggtgatgtgaaagcttatatggttgtttttttctatctctcaatcctcacttaatatacaaccattcaaattcctataataatttcaccataaagtcaagaatacaagtggaagtcataaagccaagactacaagtggaagcccaaaagagtctaagtactaggaaacatgctgcctttgcgagcagctaatttaaaataatttttagtttttttaccgataacattaataaaaattcaataataaacaataaacgaaacacaataatatatcatcaataactattcagtaattatttttattatcaattaattataatctttattaattcttttttcttacttttgaattttgtaaagaattatatgttaggctaatttagatttttgtcccctaaactttgacatgtaccaatcatagtccttaaacttttaggtcgttaaaaattctccttgaactattaagattattaaatttaaggacgtttatctaacttcactaaaaaaaaatctgacgtagataaaaatttaggggtacaatttattacatgttaaagtttcaaggcatgatttagtagatattatgggacatgatttgatacatgtcaaagttcaaaggacaaaatcctaatagtctatatattatttttttttacaatatattaattat

SEQ ID NO: 352162 - DNA, 621 bp, Cannabis indica
gttatttataaaaatatagtatttttataaaaaaaaaatatgtaacagtagaattgtaaactttacctaaaattcaacatttttataaaaaccccttgttaatattatttgtttaaaaatatctaaatttatagttttgcgtatcatatatcgagctacctaaaatgggaaagttgtacatgttaatttaccatgtgagtcaaataattatatttatggaaaattgtaataaatggccttaaatcttacactgatgaaagttaatgtctattttttaaaaaaatcaagtaaatagtctttttataaatgttaatacctaaaatgtccttagttatatagatggagctcaactccattttttttatttattctactgtttgcgcggtgaaaaaacatagacctccaatgaacataaaatcaatatagctcaatcaaatataactatacctcatacttaaactaatattttatgtttttttccctctttcattcattatataccatagcacattaaaacaatataccacaatattaaacaaatatattttcttttaatttttttttcttagtatattattacaatattacatttttttctcacttaatacattttttttttta

SEQ ID NO: 352163 - DNA, 903 bp, Cannabis indica
tgggtctaagtccttggttctgatcctggtcggtgttcgagattgggtccaggtctgggtctagctttgggtctgattctaggtgtgggtgtttgagttcggttccgcgtctgtttccgggtttgtgtccaggtgtggaccccgatatgggtctaggttcgggtctaggcccaagttcgggtcccgagtgcgagaccaagtttgggtctgggtcaggatctcggttcaaatctaggtccaacatttcgatccgagtctgggtcttggtcagagtccaggttcgtatccggatccctatctatgtccaagtctttgtttgggatcgggtcccagatttaggtccaggtccgggactcagttccggtctggctacacgatcatgtctaggcacgagttctagtttcagtttgggtatgcggctaggtctgtgtcagttctatgtctgggttcgggtcctgctcacggtcctagtcttgttctagggtcctagttcggcgattcttgttcacgttctaattttgggtcccaggtctaggtctgggttttttgtttggttcttcgtctaggttctggtcatagtctgagtcctaaatctagacaccgactactggtatgttccaggccccgttaccctaatcccgagtaaagatatggatcactatcacgggtctcgctctagttctagttcaggtcccaggtcccatttgtgagtttgggatcaggatcgagacggggtgcagttctaggtcccgaccctggttctatgtccctagtttggttccatgtttgggtctgaaatcaggttcgggttcgggtctcgagtccaggtttggtttgggatccgcgtctggctcccaatttgtgtctaggtatgatttggagtccgggtcctggtccggttac

SEQ ID NO: 352164 - DNA, 628 bp, Cannabis indica
agcgggggtcgcaatgatatctttaagcggacttcgactccaagaagccctacggtttgacttctcaacttctaacaatgaggccgaatacgaagccttgatagcagggctgagattagcaaaaactgtgggggctaaaagagtagaagtctacagcgattcccaactggtagtaaaccaggtgtcgggagaatatcagacacgcggagaaagaatggccgcatatgtggcgatagtccgggaactgctccacgagttcacggactataagtggaaagaatccccagagaaaagaatgctcacgcggactgtctggctaagttagcttcagacagcgaaatcgagaaactgggggtggtacctgtggaacgcttggcagagccaagcatcaaaataaaagaagccataataacggttgggcaagaacccagctggatggtccccatcatcgaatacataataaaaggtgagttgccccaagaaaaggcactgtccagaaggattcagtatcaagctcaccgttatgtgatgatggacaaaattctctatcgaagaggactcagcatgccttatttaaggtgtatatcggaccctgaagctaagaaaatcatgctagaggtccatgaag

SEQ ID NO: 352165 - DNA, 538 bp, Cannabis indica
acctttccctttagggagctcgcctattaagtcgatcccccatactgcgaagggccatggacttgtgatagaatgtaggttactcggaggttggtgggtatatgtggctattcgctgacacctgtcgcatttcttcgcaaaagcgagagcatcctatcgcaaggttggccagtaatacccttgtcgcatgatttttaatgcaagggagttaccccctgtatgattgccgcaaattcccccatgtacctcacgaagtatgtaaccgcaatcttccccgctgatgcatttgagtagcggttgactaaaacttctgcgatacaacctttgatcgtacattacatatcgggcggctcgttgtcgcagctttcttgcttctaccttgtcatcgggtaaaatgcccttttccaggtatgcgactattggagttatccaggtgacctcctgaacggtatctatttccatgatcacttcttgatttatagttgggtgagccaatacatctaccagaattacatcgagcaattcggcttctctagtt

SEQ ID NO: 352166 - DNA, 546 bp, Cannabis indica
gtgttttaccatttacaaaaaaaaaaaaaaaaaaaaaatctctaagaaaatatgataatttttataacaaaataagttggaaattctaataaagaattaataattaagtgcatatatttggaggcatttgtcaagaaagatgcctatttcaaaacttagaatcttttttaaataattaatatatatagtcaataaatgatatttctaacatttaaattacagttttttaataaaaaaaattaaaacttgtttatccttctcatatatatatacatgatgtaatttgtcatgacttcctagagattttctctcatatttaattaaattaacttggaactctgcacagtgaaattattgtactataaaaaactgctacttttagttacaacataattttttgtaactaaatgtgatttttagtcacaataaaatgttacttgtgactaaaacatagtatttagatacaagttatcactaatttagttttaatcacgaaaaatattgtgactaaaaatacatttagtcacaacaaattataatttttgt

SEQ ID NO: 352167 - DNA, 601 bp, Cannabis indica
aagtatacctatcgctgattatcatgccagtctaaatccagtgaactgaaaaatcagggaattaaactttttgaacatataatcatgattatattccactatgttgacaacactataatcatgaacaaatacatatgttctggactttatagaatttatacattaattataatcatgaaataaatcatgtgaaccatgcaacataaaatgatttctgatctttataaattagtaaatctgattatataaaaatgggttttatttagggcacaaaacccaacatatgcgccctgtgaagtttggagtgatttggataagttttggtagtgtcggtgagtgcaaaaattgggacttttgagatttatagtttttacaaattccaaagagatcagaaatcatatttttatcataacttttgactcgggtgtctgttttggacattctatatactgtttcgaagcttgtgacgagctctacaatatggtttttgttttagagcaaaaatataagttttattttattgtatttataccatggggtttggtagaaaaccctagattgtcttatgtgaatattaagcagtgttttgggataaacactt

SEQ ID NO: 352168 - DNA, 784 bp, Cannabis indica
cccgggttctgtgtagcattcttattcggttactctttcttgtcctgaggacaatctctgataaagtggcccaccatgccacactaaaaacatgtcttggcccgacactcacctgaatggtgtttcttgtatttaggacactcacgataagatcgaaatgaggacccgcatgcctgacgaccatctttgtttccctgaaactttttattacctcttgatgctctgaaagcctcagccttctgtttgtgatcagggttgccactgtcggtccccttactgacattaccactagcaagagggttcgatgccgtgacaacatcctttgcaatctgctcttttactacatgttgctcagcttcctcagcaatcaaggctagctctaccactttctattacaaagtgtcatgtgaagtggtaatcttcaagtcccgactaatcgtggcattcattcctctcacatatttctgtttcctggtgaaatctgtgggcaatcaccagcaaacttggatagctgatcaaactccagagtgtactcggccactaacatcttcccctgaataagcttcacaaagtcctccatgtgtgaagtcctcacaacgatgttgaaaagcttttcttcaaatagatttttaaactcttcccaggtcattatactgacatcccgggtttgaccgacaatatcccaccagacgcgggcatgatcttgtagcataaaggctgcacaattcactctctcagttcctgtcacccccatattatcgaggatacgggtaatagtactcat

SEQ ID NO: 352169 - DNA, 610 bp, Cannabis indica
tattattagtataatttaatatggaatcattaagtaattattgagtgtctaaaaagtattttacaattttaggggtacatttcattaaacgggtgaggaataaaacaaaccaatataattaacatatttttaatgagccttttggcaactatccagtggagaaagttgaccgagtcaataaaccaccgacgattagttctgtttaaagaaaaaggtcagaaaatacgatacacatgcacgttgactggatggctgatgttgactcataccagctaacaaccaatccaacacgtttgttcctcacacacgtgacctgttatcattggtacatgcttgcttagacgatgtggacattgatatatatatagaataattagcttttttagtccctgtacttatgacactatactatgatgccccttaatttataagtgtagttaaaaataccccctaaaatatatcagttggaatagtataatccttctatctaattttgttaaaattgactaaagttgactgttaaattaataatgtggcattatacatagatagtagttgaaaaattatataccattaggaaaataaattacaagtcataaaaattacaatc

SEQ ID NO: 352170 - DNA, 513 bp, Cannabis indica
aaaaaaaaaggattttctatcactgtcactcgctcaaaagatacagatttcttcctttataattattttaattgtttactacttcaaattccattacgaaaggattttcttttaggattattttcattacatacaagttttgtaaacaatggtagtaacctcggccgggaagggtttggaggaggaggagttgttggggcgagtgaggaaacaagagctgcggaccatcaccgccatcgtttcggataaaacttttgtcaaaaactaattttacagatattattattagtattacaaacaaaacaattcccttacaatataatcgcaagcaaaacaaccttacttttccactgaattacctttaataccactttggattttcctgtgggcttttcttcagttttcacctacgttttaataagattattcaataatatcttttaatatatatatataaattattaataaaatctacaaataagaagtcttttttaggataaatgtccccaaatt

SEQ ID NO: 352171 - DNA, 374 bp, Cannabis indica
cttcttgttggatggttttccacagtcttacatactatgattgagataccacttgatgtgtgtgggtactcactcattcactcaaggaattcgaaatttagagaagaaaagaagagggaagaggttcggcctatagagaaaagatagaggcttagttttcatctgacataaatgttcaagtgtgaatgagagccatcactatctatttataggtaaccacctatgtttaggttagaattatttggcattaaaatatgaaaaataaatgatagaacccataaagtgttgccggccatgggcttggttaatgggcttcacttatgcaattttgctgttttatcattcctgcatctaattttctcaaaaatgccaat

SEQ ID NO: 352172 - DNA, 601 bp, Cannabis indica
aaaaaaaaaattattgactatttatatgaaggtattatatatatggttatatatttgacgtccttaaaattacgaagaaaaaattagtgtttttgagtaaattcttttaaagataatgaaaaacttacaccaaatcaagcaaaattatctaaagcgcaattatttgggcctgagtatactcgatattccacagcccatagcaaatgtgccccctttcatttcactgggcctgtcacaagctaattcctctaacatttttttgagatttttacaaaaatattggattttggtcaaagtttacaattttactgccacacagaatttttttttacaaaaatactatctttttataaaacaacctaaaacaaccgtaaaataacaaaacagaacaatttaaaacaacagtagaatgaataactaaaaaacaaccgtaaaataacagtgaaaacttaacacagtatttttgaaaaaaattccgtcccacagtttaaaagtaaaaaagttaaaaatatcagtatgtggtgtaattatcatcatttttttggggttattttaaaaaaatatgggaataattattaaagttatgatatatatggcataa

SEQ ID NO: 352173 - DNA, 906 bp, Cannabis indica
taaatatccaaaaattaatatatttttttctatattgattattttttatttatttacttatatattgtaatctaatttttgtaatctttatatatattgtaattatactgagtgatataatctaaaatataatattttgatgtgtgttattataaacaaagtagtattgaaattataaatataatttactatttttaaaatatatagaaagatagtgattttatgataaatattaaagattgtaaaattaacaaagaattacatgtacttttatattaaaataaataaaaaagttcaccatttctaaatttaataaactgatcttgtatctgatgatgtagttagttttaaaagactatctagactttttctgcttaataaaaataaatggttttactatttttcattaaagtttttatattttgttttgtggtgtcgttagaatattttctccacaaaggtgaatgtaatatgacagctacaaaaaggagctgtcataacattactatttttacctattagtgatagagtttttccatacgaaatgtttagattagaggattgattttaataaattttgtgaatgtgaaatttatacgataaattgtagtgataaagagggagatcatgatacatatgactaattatttccacaataaaatatttatttgtcttattatcctgcgataattaaaatgataagtactttataaaattggttgtgcaatcacgcgatcgttataaatatcgtgtgcctagcgcgatcgttataattcttgaaaaataaattttaatttatgaatattttttattttaaaattcatattttaagtagctaattattagaaaataaataactacttatacaaaaaaatatataaaaaaatttattagataagacattaa

SEQ ID NO: 352174 - DNA, 949 bp, Cannabis indica
taaatctagtgcactgataaatcatgggactaagaactttgaaacatataatcacaattactttccactgtgatgacctcactgtaattgtgaataactatatgttctaaatttaatagaatttgtatattaaaaccataatcataaaaactacatgtaaacttaaataatttctaatcttttattaatagcaaataagattatattgaaataggttttatgtaggacataaaatcccaacaaataccacgtaaagctgaagttcaaagaatggaaagatatcttccattcacataaaacatttgaaatttataaaggtttcacctttagcctccacctgtccacttgtatagattgaagtaagcttccgcaatccacaatattccagaagcttggggtaaatgttattcgtgtttctaacaagggacacgttgattctaaatagaagtcaaggcccatcagttggcccaaaaggacacgaactaggttgagcctaacactaacttggccttctgggaaagcaatcacacttctcgctcaagcgagcttccatcaaggttggtctgaatctggaaggatattagctccgtgtatctagaagaatccttcagcatgtacctagaagccaattggagtttcttatttactgattcgtgtagaataaggaaatcactttcctcaaatctcagacagagaataatatcaagctaaaataggaaacaacataattgaagatcaagtaattaatatataattaattacccataataataggacacgctaacaacagctgtgaccgtgatcaacatgcgaagttagcagacagtcactgcctcatggactgggcttcacttgataagcctaaagtaatttattatctgtaaacaccccattagagggaaaaggtagctaagtatgacttctattactctataaatacacactaaat

SEQ ID NO: 352175 - DNA, 1542 bp, Cannabis indica
gagcaggaagggtcccgggaaggtaactagtataattcagatttcacctcagttagtagaagacatggtcatatcaagcatcgagtttgttataggtaaacttcataactcgacgctgcaatctgatctattagaacgaattaaagctgctcagttaactgatctagagttagtgaagatcagggaaaaggtttcaactggtcaagccagagattttatagtgtcagatagtgggatgctattgtttaagactagagtttgtgttccaagtagtgcggaacttagaaatgaaattcttgaagaggctcataccactccatattccttgcatcctggcaccaccaagatgaccaagatcttaaaccttacttctggtggagcgggatgaagaagaatgtggtagaatttgtatcgcgatgcctaacctgtcagcagatcaaggctgaacatcagaaaccggcaagtttgttacagcctttgacacttcttgagtggaaattggaggatatcaccatggactttgtggttggattacgtagaaccacgggtttatttgattcaatttgggttgtggtagatcaatttacaaagtctacacattttctaccggttaaaacaacctttacagtggattagtatgaggatttgtacgtcaaggagatagtaagattacatggtgtaccaaagtctatattttcggatagagatccgaagtttacttctaaattctggcagagtttacagcgggctatgggtaccaaactgaaattcagtatagctttccatcctcagactgatggacagtctgaaaggacaattcagatactggaagatatgttacgagcctgtgttatggatttcgagggctcctggagtaagtatttactattgatagagttctcgtatgataacagttatcaaagtacaatagcgatgactgcctatgaattgttatatggcaaaaaatgtagatctcccattcactgggatgagacaagggagaagaaatacttaggtccggaatcagtacaacagactaatgaagcaatcgagaagattaaagttagaatgtttgcctctcagagtaggcgaaagagttatgcagatccaaaacgcaagaatgtagagtttcaagtagggatcatgtgttcctacgggtgtctccaatgaaaggggatcaagcgcttcgggaaaagaggcaagttatgccctagatatacaagacctttcgagattctcgagaaggttgggcaagtggcatatcatttagctttgcctccagctctttcagcatttcacaacgtatttcatgtctccatgctacggaagtacgtttcagaccctgcttatgtattgagttatgaaaatcttgagctgcaaccagacttgtcatacgaagaacagccagttcggatcttagacagaaaggataaggtccttcggaacaagaccagaactttggtcaaagtactctggagaaacaacaaggtggaggaagccacctgggagttagagtccgacatgagaactcaatatccagag

SEQ ID NO: 352176 - DNA, 947 bp, Cannabis indica
cagcaagaaaagtaataataacaatcatatagttaattatttgaatattgtcattcatacacaataagaatcaaaccatcacacattgttcataagatgaaatccaaatcacaactgacatctgcctcgaataaacatcaatatacagatatttggtaatacaaaactattataccaataacggaattcatattcatttaatcataaaaataaatatatgttacctgataaagcaactatcttcataagatcacgttgcctaatcaagcaagtcgaagctttaacctgataatcatgtattgcatcgcctaatcaggcaagcccgtgccatagcctgacacccatatgtcgcataacttaatcacctaatcaggtgagcctgtgcgaaaaacttacacccatatatcatataattgcatcacctaatcaggtgagcccgtgccacaatctaccaccaatatatcgcatcgtctaattagacaagctcgtacctactcccggtacttatcatatagaaatgaatagcgacatgaagaccaagaaccgaccgacatctatgaagaacaagaacaacccttggaaaatgaagaccaagaaccgaccgacatctatgaagaacaagaacaacccttggaaaatgaagaccaacaaccgagtggcaactatgaacaccaagaaacaatggactataaggatgtaagtcaatgtgtaaaattatgttcgaataacattgacaatgttgtggctgagggtgtcataattgaggcggttggttacttttcatatcatggtgacataattacaaatgattatgcacgggttcaaatcacacaagttattcaaggggaagctgaaatcccatatccaagaggtgcaatacgctatgtttatgatgcatgtaacaaattggttccttggcctagggaattgattttgactgaagaggt

SEQ ID NO: 352177 - DNA, 1003 bp, Cannabis indica
attgcagttaaactcggtaaatataaatagtttaattccatatttataggggagtaatcatggaattaataaacaagagattatttggtcaatgaaactcaatacataatctagtttattggagcttagaattataggtccatgataccagaattgccaccttgaaaaattgtcaagattagggataaagaagtttggaaaaatctattttgtattggaaaaataataattaataattttttgtaataaataaataatatttcaaattaaatagaaaaaagaaaaaaattgttaagacaaaaattgttaagacaaaatttgtcaagacaagatttgtcaggacaagagacaccaaccttgtcctaatgacaatggtaggcacctatagcattatgcgagtttgtcttttgggttaattaattatttacttaactaaataataatttttgaaatggggaatatttataaatataggaattgagggtatagtttacttttttatggcataaataaataacaccatttgattatttattattttttttttacattatatgggtttttttatgccatatttatgtaagaaaaaagttgaaattccacatttgtaaaacagcaataagttttgccaaaaaagtcaatggcgacggaaaaatcaccgaaaaagtcatcagaaaagtcaccgccgttggtagagtcaccgaaaaagtcactgtcgccgaaaaagtcaccagaagtaaatgtctcaaatataactaaaaatataaccgattctatgaataaaaactaataattcaaaccggttataactgaaatataattggttctgtaacaaaataaataaaaaaaaataactcaaaccagttataagtaaaatgaaaccggttctattacagtgttataatgaataaaaaccaatgacacgaaataactcaaaaccggttataactaaaatagaaccagttatataacataatgaatacaaataagtaacacacaataa

SEQ ID NO: 352178 - DNA, 917 bp, Cannabis indica
agtttttttcttactcttacactcgttagtattctcttaaaatctcaccctacaaatcttgaaaaatgatgaaatttctcagggattaagccaagacccttatgcatcacttttctattggacacgttgagataaaaagtagttttcaagcactaaaaatcattttaatcgaaatagtaaaaaatttcacatttttgagtggtaccccttttgtgaaatgtggcccaaacccatctcagaatatatttttccactagtcaaattgaattcgtacgactacgacatgaatattaagattggtttctcattagatttggttaaaatgaccccttaatttaaaaattgaaaatgttcttctgtgtagggtaaattttaacaagttttttcattactcttagactcgttagtgttctcttaaaatctcaccctactcatcttgaaaaatcatgaaatttcacaagaacaaatccaagatcgttgtgcataacatttttattggacacattgaaaaaagtaatttttaatcaccgacaatcattttaatcaaaatagtaaaaatatcacatttctgacagtggtacccctttgtgaaatgtggcccaggcccatctcaaaatatttttctccactagtcacaatgaattcgtactataaagatgtgaatatgaaaattggtttcacattatatttggttaaaatgaccccataattcaagaattgaaaatgttcttctgttcatggtaaattttaataggttttttttcttactcttacactcggtagtgttcccttaaaatctcaccctacaaatctcaaaaaattgtgaaatttcaaaaggatgaagccaagacccttgcgcatcacttttctattggacacattgagagaaaaaaatatttttcaagcactaacaatca

SEQ ID NO: 352179 - DNA, 854 bp, Cannabis indica
gcgattttcctttgtcatggttcatgcgatttcatcgtccttaatgcttatcttttgaactgcataattcctgtctttcatcctgcttattctaagcttcacgagattttttccctaactcgtgaaaatttcaaacttcctgagttttgactttttgttgaatattcttattctataatctcctgagtactcctagtcgccatatttgcttgttttaacgttcgatattccgaccaaacactcatcttgtgtgttgtcttttatagatgaacctaggcgagttttggggaagtaaacaccaaatcgaccaggatttgcttcaactcttacacgaggatcatcctcgtcttcgttctaatcaaactttttcaagtgacatacatttttccttaaatcttctgtccagccatagaatgatggctcgtaccaaaaagacaatgcggagggttgacgcatccgactctcaagtggcccggcatgccaccttacccagcggcgaacaagatccagctgtctaggagagggacgatcatgaaggggacgctgaggtccaggagattgaagagcaggacgatgtccgtcctagcagtacctacgagacggaggaagaggaggaggtttcacccctaaactatggactggttgagggcgtggctacgccagtgaggaacttactgccgcggttcctcatagaaggtaaggtgccttgggtgccaggtgggtgagccctccgtccaaggttactgaggcgcgcctgcgggatctcgaccaggatggctaccttaggaaattggactgttacattcccgcccacaataatcgaaccacaaaccctgaaaagggaatgtgcgcct

SEQ ID NO: 352180 - DNA, 596 bp, Cannabis indica
aatcgtccaagaatggcctagataatttctaagttataacgctagctaggatttcgcctcaaggattacactaaccaattatagatgcttaaactttctcaaggtgttagttattctagaaactcaaagtatggtgggataacacaagcacacaattgttgaaagcattcctcataggctagcatttagacaagaataacacttaaaattagcatttttaacacacaaaccaagacactccacaaatggaggaaaatggatatttttcatcatcgagcgctaccctaaaccaagttgaaaataaaaagcactatttttctcatttgcaagctaaaacagaacataacacacatgacaaaacaacatgattaatacacatgtcatccacataatgcttattacacacaatactaaagtcaacaacaaaagtagactcacaaagtaacaaacacaaatagtagcaacacttaaactaacacacttatttcatcacacacaagcacaataacattcaaactaggttaactaactaaggaaaaaagagatactccctcaagattcggactcttcccccactagagtccctgcttgaaaat

SEQ ID NO: 352181 - DNA, 962 bp, Cannabis indica
cgcctaaggtagttagggtgttacaagaactcatccaatagagcatctctgacacttttgggctcaatttgagagagataataggaaaatgctaacaggttctgcagtttccgtctggtgactatggtgtcattcggatctcctatgacaacttcctgaggatgagctttctgaacccaggagggtggtccatttttgtacaatttggcttgttggggttctttggtcatagcactactaacttcaggttccctgtttggatcactgacatttgcatccatgtcacctgataatcctggttcggtgtttagagactctgtaagtgtcaggatacatttgggtcagtctggtgataactggtctaggtccagagaggacaggggcatcatcctcgacactcacttcttcatttccttctatgtcatcaaattttacattcattgattcgactacagagtgagtccttttattgaataccctgtaggcacgtctgttgatggagtaacccagaaatatcccctcatcacttcaagggtcaaacgtggctaagtgattacgctcatttagaacatagcacgtacatccgaaaatgtgcatgtgactaacattttgtggtctccctttccatagctcataggcagtctgagatgtaccagtgcgaagatgaactctattgcacacatagcaggaagtattgacaccttctgcccaaaaacgttttgaaatgtccttggcttgcatcaagacacgagccatttcttggagaattctgttttttcgcttaacgactccattctactgaggagtttttggggatgaaaattcatgagaattcccattccattgcagaactcagagaatatggaattttcaaattcttttccataatcactccttaacctaaatacttttccaactttggagtctttctcagtttgtagtctcaatatcaaggcagagaa

SEQ ID NO: 352182 - DNA, 945 bp, Cannabis indica
atagtgatctggatagtatttccctcggtataaatacaactaaaaggggagtgggtcattacctgctattacaagggggccgaacctctataacaaatcttattgtttattacttttcattcttatttgtgcaaacatgtggcaatcattagatctatatgaccatgctgtcggttgatcaatttttgaggtcaacagtttggtgctttcattaagagcgtggatatcataatctgatcaaattccatggtgaacacaagaaggactcttgtcgcaccatctgcatctttgggtctccttgaagacccgaaaatggcagatctaagcactccaattcagtcacaactggaatccccatgactactacatatgtggtgaatcctattaccacaataggcactacaagcctagccaatacagctggccaaattgatatgagcaccctagtggatccaagtggcaagcccgtgcctccacctcccactgaaggaaggacccaggggtgacaaccccctggaatgacaactagatctcaactccgattttacggtagagagacaagtccgggagttagtgagccagcaattggcaagcctcacctggacctaggagaagaccttgagttggccagacacaaggaagctgtaggccacctaactgaagaaccacgcactgttgattgcgttgttttcgctcaggagagatgcaaattcctgagatggatggatgaataggagcacagccttcgatctcaccaggtagagttagatcgtcggaactgggaggccaataatctaataagacggttcaattgatagaagaggcaaggatctccttagagatccactttaaggaagactgccgccaagttcttcaaaaactaggacagatctttgttggaaattattttacttgctgtgtgtgggcactactctatacactaag

SEQ ID NO: 352183 - DNA, 660 bp, Cannabis indica
tgtagggccagtcatcagtccatgaagtagccagagtgacatactcgtgtataagagccattattccgtgggtgtgaggacccaatggaggcttgaagtggggacgttacacttgatgatcctctctttgaacttctccctcttgcaagatatgcttcttctttcctagtctccttctcgagttttaattcaaaatcctttgactttaatgtcgcatgaacaccctcaaacgagatcacatccccgtataatctttcaagaagattaattttgctcgaaattgatggtgccatgtacaactgctctagtttgttccataatccttttgcggtcttttcttggattagctttcttctaactccattgaacaggcacataatgatggtgtagtatgccatctcctccatctctgcagtttcctatggcttcttctcagccaacaacttttcatctctgagtacctttgccaccttttggtgcacaagtatacctttcaaactctttcgccatagtgcaaaatctgttgatccatcgaacttctctagtttgaacccagccatcgacattctccttcaatttgtgttcttatagattccttgatgaattcttgatgagttcttgatgaattcttgatgagttcttggtgtggaagcaagtgat

SEQ ID NO: 352184 - DNA, 610 bp, Cannabis indica
caaattacgtagtacatacaattagattgaagagattattcacaatacacaaaaaattacaaaaatatagttgtacaaaattttaaatatttttataattttatttacaaaaaatacagtatttttatgttgtactattattactttgttgttaatttttttttgttgtcgttttgataacattacagcaagcaacaagtctgtaatcagtaacactttcaagacacttcactttaggaataagtgtaagtaatgtagtatttagctcttttaacaatctgccataatgtataaaggagagcactatactggttacatcctcctcaagaggctcccaattatcctgtaaaaaatagctactaaagccatctggtcctggcgctttacatccagtaggggtgtacgttggtcaatatatcagtttatgttacattttattcaatccaatataaagatcgggttacaaaaatttaagtgcaacccgctcaattaaaaaaaaaaatagtaacctgtccaatgaaattggtcggtttggttgggttacccgtcaaaaccgaccactaatattttttaaattttttttatttttacattcaattgttatatttta

SEQ ID NO: 352185 - DNA, 547 bp, Cannabis indica
ttctaattttataattcattgtctcaacactttcaccattcagaaccacaactggtaggggtgttcattggatcacatccagtggatttggacccatccgatcccatccaattgaatcgagtcatcagatccgatccgaaccaatggatgtattggattggatcggttccatccattagatgttttaactggtttttttttattggattggattggatccatccaatgaatctaatggatgaatccaactcattttagccactatttaggctgatttcattaaaaagaaaaaatatatgaacaaatataatttaataataaacaatagtttaatccaaatccaacctaatttttatgatcacatatacacaaatctaacttaataagcaaaagtcttaataaacaagtccaatacatcaaatgcaaatattatataaaatattaaatcaatgtatgcaggtgcacagtaaaacctattaataattaatatatttttttaaaacaaaataattaaatatataaaattataaatattaaatatgattgg

SEQ ID NO: 352186 - DNA, 1291 bp, Cannabis indica
aaaagaaaattattttgtcaactaacttgccaaaaaaggactttacacagatgatgatgaagaagaaatacgccatgatgatgcaactggtgtggaatttggagttgatgataacataaatgatggtggagatgatgaagaaatagatgagtttgatggtatctcaaatactcaacaaccaactaatatgcgtcgacgtagatctactgagagtactaccaataatcaaaagtctggtaagaataaaaaatctaaggttatcgatagtatttccacaaatattggtgcattggcagaatctgtatctaaaattatcccgaagcttcaaggattgacagatgcattatcagataagaatgtaactgagatgcaagacaatttatacacaaaaataagcaagatcgaaggtcttactataatgcagtgtattcgagcaaccaacatattggttaaagaacctgcattgatgcgagtattttatgcaatatcatatgagataaaaatgcaatatattatgaatttgttgcaaaacgatgcataatcatataatcattagatatttagatttttgttgaacatattaaaacatcattatttttttataaggagcttattttaatatttagttatattttctattccaatgaaatgtttatggtttttttttccttaagtaatgttatgtttgtttatgaaatttattaaatctttaataagtatttttttagttatatttaaggttcgcaattgtaatattattaattaaaaaataaatattaattaatagtatatatttatttatgaatgtatttagttaattttataataaataaattaaaaataaatatttactatgaagggtaatttagtcaagttaaagtattatgattaccttttctagttatgtaaataaaattaaatgatcctgattccctttctagtcaatttattaaacaacataataaaataatgatttcgattgttaaattttttattcctttttatttttcctattcatttattccgattgcaattacaatttagtaaacgtgccataagggtaatggattttaattatttttattttattttttaatattaaatatataatggcaattttgtcctttaaaatttatcttacaagataactaccatataatatagtttaactcaaaaggacaatttcgtctatttaagcatttcgattacgtttcctaataaagtaaataagataaatcacaactattctatttctaaaaaaaattagaaaacaacatattacaaatattga

SEQ ID NO: 352187 - DNA, 687 bp, Cannabis indica
ggtgttgtttacctcttgttcatagattatcctcctatgggatggcagttacagttttgtaggcaatattgcttcatagtcataagctaatgtaaatggtgtttgccaggtggccttcttctcggtggccttgtgtgaccaaatctaagagtaattcaggccaacttccttttgcctcttcaagacacttttgcaaagtttccttcaggttcttgtttacaacttccacctacccattcatttgagtatgaacaactgtggagaaacttttaatgatgtcgtgtctgttgcagaatttagtgaacatgtctgtaaagaccgcttaattttagtatgagaataagtggataagtggataattagggtttaatttggaattagacttttaattatgatttgtgaatttgtggtgagacctttgaatttaggtgtgttatttatgttatgtatgaaatttcatgtttttcatattttatgcccggtaacagtggaacgcaacatttggccagtagagtcaaatttccttacgatttattattttagtaatagtggggaaaattagatagacatttggaatgtcaggaataattgtcgtcttagatttgactgaaattgccctaggtggcaaggctgctcttgggcttaggtaagggaaaattggtcttttgccatatgaattcttcgtcc

SEQ ID NO: 352188 - DNA, 540 bp, Cannabis indica
tccatatagttcaaacctaagccatatttgaaacactataaaagcaacatgatgctctcatctcacccaactaaactattgacattaacaaaatcaaacctagtttttattctgtgataactagtcgatgagagacaccttctgtattgattttgaaacttccttaattattctttatccaattcgccattagtgatagagtgccattcccacacatagcaagtcaagtacttaatcatagtgcggaagacggtggtaaccaacctaaaagagaaaaagagatccaggctcaaatcttgataatactctgtaacacaaaggatcaaggattacagattggagtaaaaggagtcatattatttcactgcaatcaatgtaaggttttctaaactcttatgtgtttaatttcattattttagatatattcatatttaggatgttaatcaacatacttgttagtaaatctaaatcctggtaaaatattcccaacaactggtatcagagccatagcaattatttactttcatgtaatatggattt

SEQ ID NO: 352189 - DNA, 853 bp, Cannabis indica
agacctgctatttagacctcaaagaacaatatgaaagtaataaaacacttttacaagctcagaatcacaatccgccattagagctccaagtttgagttctaaaactcaaaacttggttaaactaatcaacatccatcaaaacatgcttatatcaacatatccaaacataaataagcttttgaaaacaaatccaaacacaaatagcagctacttaactcaatcccttaaaatcatgcaaaaattcctaacttaaaactcaagaaaaccatgaaggagttactagaagcttacctaaagcttgaaaccaccaactccttgctgaattaacctggaatttcaaaaagaagaccaaaccctaaattcttccatggggttcgaacaagagaatggagagataaatttgatttttcttctattttgaattttttagtaaaagtgagataacataagggttttatttaatgaaaaccatttctataatcaaatttaaataactaatttaatatcacaaactgacaaaagactaatggggcaaaatgaccattttgcccctcccacactaataccataaaggatcacttaggtgtaccttgggtaattctaaaatcccgaccattcctgacattttcaatgtctaactatactgccccgctataataaaaatactaagatgtaattttaatagtcaaacaccgcgttccattgttgtcggacactgaatatgcaaaattatgaaatttttatatatgacatataaaatgcattctgaattcaaataaatcaccataaattaataatttaaaattaataaataatttccataattaaatcctaattatctgctaatttccaa

SEQ ID NO: 352190 - DNA, 549 bp, Cannabis indica
gtaaaaatccttctctcactttcttacagctcgataattttataatattttattagtttccgaaaatctcggtcaacactacccctttaaagttttctcattagataacattaatacctccccaaagtcacctaatcaacaatttatacaattatatcccaccaaaacttacaactacctttaacttttttttcattcattaaagctcaataagttggattagtgcactcctctccactaatgtagtctaaacttatccccttgatcaataggactttactaaacttgtaatattgggcttgggttagtgtacggtaaaggatgtattttagctagctcaacacctaacaacttcacttgtcaaaaaccgagcctcttccttatgaatttttttaactcacttccctaactcattatactcacaagtacttggtattggaatagacttatcttcctatgtttattctcttttttttttgaactaaaatggggagaacaccccaaacttagttgcaagcacactttttttttttcattgctgattttttt

SEQ ID NO: 352191 - DNA, 849 bp, Cannabis indica
attttttgttactaaaagtaaaaaaaattactcataagacacgataatacaatatcaaaacacgattatatatcaagacaaaccacaatttttttaaaaaaaataattatgaaacctataacaaataattcatgtattgatgtcaatacaaatatatgagacgacacaattaagataaacatgaacataacacaattattaaacgtactataaacttaaacacgaacatgcatgttgatatattaaatgtgaaacttatgaaaatccatttatttcgtgtcatcgaacatattgtcagtcctaccaatactttttttttgggtattttacatttgacatcgtatttggcatctaatttttaaaaccatctaattttaacttttaataacattttgacatgtttgaatacatttgttttggcattaataacttttaatgactgcatttctctctttcctctttttctttcattttgttaactttaaaaataatttataactgcgtcgttatttggttgaccctaaaaacatattattgtgatttacttttcaatgtgaatattttaagttgtgggaaacatatatttttttactgtgttcagaaaaaaaaaattatttagttactaatatagtgacgttactgttttataatttttttaaaaaaaatatattagttaacattcatttaagaaatttattaattgaattatattatattatacgataactaattagcttttaaataacaaaaaggtatataaaaaatagtagtttgttacattacatgacaactcattagtttcgaaataatttttaaagttacctaaattttaaattataagctactata

SEQ ID NO: 352192 - DNA, 676 bp, Cannabis indica
agatcctggtaaaataaaatccaacagtccggacgtcatgaaagtcgaacactggctatcagcgattacgagaatattgaattttatgagtgtgacggagtacacaactcagtttgatcggttggcgaggttggccttgggaatcgtgccaaccgatttcagtaagaaagaaaaatttgttaatggacttaatatgaagatcaagtatgaccttatgatcgctactgatgacaagaccacctatgctgagatggtggagaaagtactgtgagctgagggcgcagttggatgtatgttggagtcagttaggactccagtgagtggcggggctcctacccctcctgcatcaggtttcagcaggggaggtagtggttcggccatggaccagaagaggaaatcatccactgcatccggtggctcggggcagaacaagaggttccgagggaaccagaatcgaggcggtcgtcagggtagtgttgagacccgttattcctaaccggagtgtcccatttgtaagaagcattatccgggtgagtgaaaaggtcagggatgcttttagtgtggcagccagaatctttagtaaattggatagaccgtgggatagctatgaatcagggtttggaaccctattacctggcagagagttagttatctccaaaaggtggattaggtctat

SEQ ID NO: 352193 - DNA, 610 bp, Cannabis indica
aaaaaatttgagaacacaattaaatacatattataatttggagaataaaaattttaattagtcttattattttcaatttatttcttaattaaactttcaagtaaagtaagtagtttttaaatttattatcattattgtattatatttaagccattgccaataatttatatttttatgattttgttttacattgatcaattatcagtttatactgaatttccattataattattatattcactaccattttctctatctttcttatattgtgtcatcaattattctatattttcttatgagttactcaatccaccttctaatatcttttcttttccgtttataactccaacatttttcctaattatcaaagccaaaatcatgttgattatttatagttttctttcacttttctctaaatcaaataaataaaatttttccaaattatatatctgaaaattaaacattaacaataggcccttttaaccaaaactaattttccctctctcttattctttgcttatacaattataacatgaaaagtgttaattacaatcttttagtcaatttcttcacgtctgaaattacatggcagaatatatatatatatata

SEQ ID NO: 352194 - DNA, 1126 bp, Cannabis indica
cccgattgggatagtggcgattgggtttgtatgtatgaatttccttttaggattggcttttgattccctttccctctatttgtacaagaagtgttggactattatggggtagctcctagccaactcatgccaaatgcttggaggttattgttgggtatagaagtcatagttagagtgaaggggaagagggttgaccttgtagatttcaagtcaagttattatcttaaacaacacgatacagataaaggtcgatatcgattcattcttagagcaaacaaaaaagcttgggtaacagagttggttgctagcaacaagaggggttggaggaagaaatattgttttgtcaaaggtgacctgtttggaatgagtgattatgtggttcctacttcatggagaaccttaagtgagtgaggagtgttgatttctttgtcgttttttatttgatacttgatttgtctatgaatactaactatttctctttgtcattgtaggtaaggggctcactcgatgtcctcgcagggggtgttggtctgaagctcgagttaacgacttgctctctattccttccgatcatagagcccataacaagcttcttattttgaataaatcttgtgttggaaagttgtggagaggtgcgcaacgtcaagaaggtagtattttttcactcaacgttgtcaagcgcgcccccatccttttgttgacccgagctttagagaaggttagtggtcccttctctttgattcgtcatttaacggaagaagaacgttttcttgcagaccgttactataagaggatgactttcaaggtttgtggagcggatgatgctgttgctaggggtaagactaatttacttggaaagaggtctaagaagaccacaagtcatgttgtgaaatctcgagttcctgctaaggaacatgaagccggtagctctcagttgccagctgatggtgtggttgcggcttctccactgaggggtgacaacgagttgtctattgaggagagtatgatcaacttgtctatctcttccaatatttcagcttactttgaccctacttccattaaaagccatgttgaggctcttctccatctgagagatgaagagtgtttgaggggcatcggagttgcg

SEQ ID NO: 352195 - DNA, 871 bp, Cannabis indica
aaataaaaaaatattttttttcggaatacaataaataaataaattaaaaaaattaaaattaaacctgtaaatttgaaaaattaggtttcaactaacctaagaatcattttcaaaaaaattgctaataacaacttttcaaagttcatgttattttttaaaaaaatcaaatattcaataaaataaaatgataatttaatatcatttttctgattttacaatttaatttaaattaaaaataacaaaatttaaaaattagcataatttcctatttctatttaaaatatcatgattaaaataatcttattttaaatttgaaataaggtcaattaattaaaaaaaaaattaaaatattaaatgtttgaccttaaatataaaaataaggtaaaataatcaaatttaaaaaataagataattaattaagccaaaaattagattttttacctattttcaagcttcaaatttcactaatatcttaaattaatttaaaaaatactaattaatttaattctgataattagatttgaaatatgaaaaacaaaaatttaaatacaaaattacacaaaaaatctgaaattaattctatgaaaaagcatgaaaaaatgaagacaattgaaaaaattgtaaatggtacagatggtatgtgttgcataccatccgcgcgcgctacctcggatgcacgactgagaaaaatcagtcagataagctgcaagcagcctcatctgcacgccgtgcctataattcagacaaaaaacgaggcatccgaccgagaaatctcagacagcctcttgtctgaggcgcgcgtgaccgagtgatcactcggatccgcgcgcatatggggtgtcaccacccctatctttttttcaaaaacttc

SEQ ID NO: 352196 - DNA, 878 bp, Cannabis indica
atttaaggtgtccataaaagttaataccacatatagttttacataaaaatattgtataaaatacaattcaatataatacaatacaatacaatacgacctagtacggcgttccaaacgagcccttaagtacctttcaaataaaaattaacacatttaaattacatttgaggaatttctttaatatttctcttatgtagctatctaacacaaattgtttggttaacaattttttttccctaaagttaatagttaaagctagctagcacagttaaatcaacaattaattatctttttttttagaaaaaaattaattttaaatatttaaatttaattttaaagtataaaaaaaattagataattatttttttttatttataagtttaatttaaatttaaattagacaataattcaattaaataatcataacttgtgccgaatttattagttatattatttaaaatatttaaatttattttcttattttattgtttaataaattagttagatatattttttataataaatttaaaattagattaaattttatatatttaaaaattataattaaattaatttattattatcatttaaatgaataattagataatatcatgtttgatacaactctaagcaatgtatatatgttactaatacttaatttatatatatttatatatggaacacatgggtattactatgaatggttactaaacaaatttaattattaatattaattttaagtaatatcaaaccatcgaattttgatctaataacgaataattaatcacaatttgaatttttatgcttaatttaactacttaattaaaaaaataaaaaaaaataatctcttttaacactatatcaaaaatatgttcata

SEQ ID NO: 352197 - DNA, 702 bp, Cannabis indica
tattttataaccataaccaaataatgttacacatgaaaacatttattataggtccatactatatgttcacaccgtacacatatacagagattataacttaaatatcatactcataacatactcatatatactataaaataataatgtcattaccataacattagcatatcatagccattaaatctagagatatatattaatattataaagtattcataatttcaaaataataatcatgattgaaacggtactctataaaagactccctaaataagttagacataacatatttgattataattgaatccgtgaagtggttttatatatgtacctataaatgatacacatattgaaaaaaaaaatatgtaatttaaagagattatgtaatatggaacgaaattatattataataaaatttttgtcgacaataaatattgaatgtttgcatatgcaataaactaacatgagataacaataattatggtattaactttgtcgagaattatcgacatacattttgattttggccaaataaatattatgatgcagtccaagcaaatttactcacgtaaagtgaagtaaaacctgtagggtgtgtaaataaatatttcaaatgggatttgcatatatatatatatatatatatgtatttgtacacaaaatgaattgttatataaaatttgcatagatatgagattgatt

SEQ ID NO: 352198 - DNA, 670 bp, Cannabis indica
agaatgatcttgtcaaaaccactatgaacaagatgcaaaatgccatagatactaaaatgtggttgtggtcttctgatgacttaggtctagttacagcaaagagttatagaatagcccaagtagatccgggtcccagaatacaaaaactcataatccatacataaacacacatttagaatccatggacataaaattgatattaaaacttgtgaaagtcataatgtattgatcaatgaaatttggaaactgaaatttaaaatttatatttggaatctaaaattcaaagtgaaagacttaaatttatactaaatatatctagagtaataattctagcttggaccaccactactaatcaaactttatgtttagattgcctatagtaagcatatacaagtaggatatttctaagatcgaggatttatatcatctcgagatagaatgtcgggaatatagtcatttgcgccattcagtttcataagataaagtagaatgacatcataaggagatgatttattaaccattcatccaatgatatattatttaagtgactttgaaataaaaagataagaggagaaattatagaataatttcgattgaaataagaatccaataatgttccgttttgagcgagagtcaaatttattcttattttataaatctcttcattgtt

SEQ ID NO: 352199 - DNA, 825 bp, Cannabis indica
tataaagaactcccaaatcgaagctcggaatcaaaagttatgaaccttcgaaaataaactcaaaactgcacaaaaacacgagtgcgggccacggcatgcccagaccatgccgcggcacctgggacaaaacccaggttccaccaacaaggggcgggccgcggcatgctccaaagcatgccgcggcatctgggttccaaacccagaaaccagcagcctgaaacacaaaaattcagcaaccattccaatcttttcaccccaaatcacaagcaaacactgaaaacatgttcacaacttatcaagctcgaagctagggtattaaaatccacaattcaagcatcaatatccaacaataatctcataatttcaggttgcataaacacaaaagttcatgcttctaactcaacaaagttcaagctcaaacacatgaacttcaacctaaacatacccaaacttccagctgcaaacacacgaattaaaacatatttccactagaaagataccttatattcttactccaagatcaacaacataaatccccaccaaaccatgcaattccattaacaattcaccaagattaaaacccaacaccaagaacatgcaactccacaaactcaacaatttaaaatatgcttttcaacaaataaaaccagcaagaatttcaacaataaattccaaataagctcagctagaaactacctcaattccaagctcaaaaatccacaattccaaagcttcaatccacacccaacttcaagtaatttctcatcaattaaatttgaaaatcaaaagggttttagggaagagagggttcgggtgagagaaaga

SEQ ID NO: 352200 - DNA, 501 bp, Cannabis indica
ttcgggttgggtttacaaaagtttatgtacaatcctaggttgttgagtttcttagagtggtcatgtgtggtttggtactacacaggttgttgccgaaatcaagctttcttggtaaaattagaattttaaccaaggcacgaagggtgatcttcaagtggtcggttgaattaaaaaacttaacaatcataattacagcacgtggttgatgcacatggaggcatatctctaaggctaagacttgtgagagattgttggtggtaatgaggtcacacaatcgaaggacacaaccactctgaagaaatggaagattagagcggacaaagtcatgtttgtgattcagaccacagttgaagataaaatgttggagcacatcagtccgacggagacactaaaggaagtgtgggatactttcgcatcgttgttcactaagaagaatgatacgagactataaattctagagaacgagcttctctcaatcaggcagcgcgacatgacgatcaa

SEQ ID NO: 352201 - DNA, 1096 bp, Cannabis indica
aaggaatggaatgactccaaggcggaggtcactggcctaaccaaagaagctgaggaggtgaagaggacccacaaggctgatcttgaagctgcaaagaatgaggcaaaggataagactaaggcatgccaaaaactccaggaggaataccagaaactctaagaggaacttaatgcagccaaagtaaggctcgatcagaaagaaggtgaaaccattgagcgatgcaatgctattggactacgttccatctaccgagcctggatgggaaatccaaggttggatttgagtttcctaggaaagtccatgagggaagtccttgcttactacaagaaggctaagaaggtagacgaggaaaccgaggcagcagaagaagaagaagaagaagagttgtccaagtctcctaccatgtagattggtttttatttattcgtttttttatctaagaaaatggccttaaggtcgtgacaatggttttccccttgtggcacttttgtaaatacaaatttgcatggttggacgaccaactttgcttttattttatcttatattgaatacttcgtaccattatatttgaagttaatatatctgcttgtttgtgttttcattcacaacttaaacaatcatatttttatcaaatttaaaatactttaagcagttccattgctcgtattttccttttatttttttttaagtagttagtaatctactatgtgcgtgagcagttattatttactgtgcttttgatttgcgagcaattatcacttctgcttcacataaacaattataatctattttaagcaaaattaaatacacttttaatgattcatctttttctatattttttattgctcatatgaatagttaggccttctattcatatattaggtttaagtattttttttcaaggcatcttggtgtctcgtttaatattttcttacaaaatgcgagtcgttagtattcatcttcatatgtagcttaatgttgtttttatgagttatatcttgtctacaactgctacctttgaatttcctttctcgcaagaaaggttctttaataaaaaaactttaaaatttaaaaaatttaaagtgtagtgggtttg

SEQ ID NO: 352202 - DNA, 763 bp, Cannabis indica
aaataatttccaacattaaagacatgaacatgtgtgtaacgccctaaataattaggcgcgctacccaagatacttagaaaccttaatcccctaaacgggattactaataaaattagcgcataaattaaactttaataacaaatacaatgaaaataaacttgtactaatttaaactttacaaactaaaagatacaaaagtcgggatcccaaaaatatttacaaaacactattacaagtccttttccattggcagacctaagcggttaaacagagtctcaaagtacatcactagtagaccgcaacccgcttggtctagtttggcatgaacatgtacattcttcatccagctcctacactcatggctgatcagaaacaactttatcctttcctgcatagtagagcacccgtgagccaagcccagcaaggcaatataaaatatcaataacatgtttatcatacaataaaaacagtaatgccattctcatatgcctgtatgacacaaacctgcatgttacgcttacatgcatatttatgtctacgtggcgtagacttacgtgttgcgctcacacgtctaaatacaataaggacttagaatagttgatcttggttttggttactgagtccaacctgattatgccttgaacgtataacccttaatctcaatatatataacacatagttaatggggccactgcactattgttacgaaaattataaaacaatacgcaagtgcacgtaatcaagtagtaaactcacacaggtg

SEQ ID NO: 352203 - DNA, 665 bp, Cannabis indica
aaacgcaagagatccaccagggacgacccctggacaagttaatacacaaccaccaacagtaggccatggagggactttccctctggttgggttaactccaggtgtacaagaaacaggaaatacaagtattgtaacaacctactagattagggtgttaatagagattgtttgacactttattttagttttgatgtgatttaatttttctctaattttctacgtgcatctattttatttgtactttattatttttaattcttcgatcactaattaattgtttatgatttcaatgcaaaatctaagaagtgagtgttgattatgctatagttaaatagacatagatttcaatatagaaaaagagtacttatatgatttgtgtagcatttaggatttttatgcttaatgcctcctctatgtttaaatttatcacgagagtagaaaatttacatataggttgagatttatatgttctagcctgaatataagtttctttaataaatctgctatcacatgaaaattgaaatttaggaattaaattattataaatcatataaagtagattcaattgaaattaatcaccctaagctttaatcattgttaaaattgcactttaatttatttttattttctttttaagtatattggatgttggaattattttacca

SEQ ID NO: 352204 - DNA, 647 bp, Cannabis indica
aggcctaaccgccctgacatgtacaaccgccatctgctcgctctcacggctgctcagccttagtcttgccctagcctacacatggaaatagcactgtgaatcaacagactcaaaaaaaaaacataacatataacataataatatcccaagttataatcaggcgaccatacacctaaccataatcctgtccccgtgtcccacgcggtactgagtctagaacattcatacgacaatactatcgaccataatgtcaacatatactcaacatgccagccatactctagccatgttgatgtgacagcgtcgatcagtattttagccaacatacatttatcaataactaatacaactctacgtatattattactgctataaatgtactctaacaggcataaataacatgcatactaaacatgtaataacatacacataacattatactaatcttaccttgtttccgaattcaggtgtgccggccaatctgggtggaacaactgctcggcgaattacaggcccctaaatcacataaatcaaagcataggtaagtgacacgctaaatcactatctggggacttaaccttgaaactagaagtttccctatcgataaatagcatggaaataccctaaatatcgtaaaaatgggaaaa

SEQ ID NO: 352205 - DNA, 683 bp, Cannabis indica
ataaatcttgcttttagaatttttcaatttttgccttaatttgaagttgcacctctggcctgtaattccttcaggtttgctttactggttttgcttcatgtagtgtgcttaatttgtgagtgactagtttaggatctagcccagacatatctttgtatgtccaagcaaacacatttcgatatttgcataatagctccatcaattcatctcgtatagctacaggtaagtcagtagaaatgaacataggttttttctcttcgggattttctgataaattaatttcttccaatttgttagatgtggattttggctcttcttgtagctcaagtgatattgacttgtcttccacatcctttaacagaccatcaacttgtggatggggtagaacgaacgtattctcaacctcttccgccatagcaatagtggggccagacatgatagtcgaccccgcgtaccgtcataaacaatacgctcttttcccataaggcaaagtgactttctgaaccttcttttctcttttgggcttggcaattgaaggattatttgttactgcgtattcttcccatttgggtaagcgcaccgcacgtggccttgtgaccatttccatgttattttctaaaagctcatcaaagaacattgcttccgccatgtgagcttcttctctagcaaacggtgctttggta

SEQ ID NO: 352206 - DNA, 590 bp, Cannabis indica
ataaggaatagtgaaactccctggatctctgagtttcggagggagtttcttttgcagaatggcgctacactcttcagttagagccactgtttcatagtcctccatttttctcttctttgatagaatctccttcatgaacttcacataactcggcatctgttctaaagcttcagcaaaaggaatgttaatgtgtagtcttttaatgacctccagaaattttgtgaattgcttgtctagattagtctttcggagtctctgaggataaggtatcttcacatgatgatcaatactaattggtggagactgttgtggtggtgcaaggctatcagtatccttcttttctgtggatgttggcattggcactggttgatctttaatctcttcatccactggttgtatcatttaaggcccatcatatttcttaccgctcctcagggtaattgccttacagttttccttaggattgacttgagttgtgctaggcaaatttccttgaggacgggttgctacctgagttgctagttgccccatttgagtctgcaagtctttaatagaagatctagtttcagtcataaattgtaacaataaat

SEQ ID NO: 352207 - DNA, 510 bp, Cannabis indica
aacattctagaaaccttttattcgatcaaaaagagaatacgatgtcgtcccgtttaggcgagagtcaaggtcattcttacttcatgagcttctaccattgtctcatactttgtaagtcttacttttagcagccattattgggatggacgttactaaataacaaccttaatacttatctttcgagattctacaacgttaaattgctaatgaatgaacatccattagggaatctaaaaacagaaccatgtagaaccaacaatggagatcgaatatctctttgattaaagctcattatttaaaatgtacttttaattaatcacttatgctaactatataataaaataaatttctgaaaaatatctaattgaaattctaaaataaaaatttccaacataaatattttaaaaatttaattaaataacaaattaagtattttgaactaatccccttaatttgataaaatatccctatttaagttgatctaaaattaacaaattttcaacttaaaaa

SEQ ID NO: 352208 - DNA, 731 bp, Cannabis indica
aaaactactaaatgacataaaatgcatctcagaattcaacaataacagtataaataattatttaaatagctataaataatttcgataattaaacatgattaactgctaatttccaaattaaactaagcgggctttacaatgatagcatatctgagcaaaatacatgacctgcttgtacaattaaaaagctacggtctcagacaaatttcaagggaagaaaacacaactgcagacgtgttagctcgattggcaagcagtaatgcaagtgataaagcaaacttggttcctatctagttccttgaggaacctagcatatctggcacgcacggaagagattgaaattattgatacttccccaaattggatgacaccaataacagcctacctcaacactagggaactcccaaataatctaaatgagctcaaaaaatgagaaggaaggctgcacggtatatcatagtagagggaattatgtacagacaagggttctccatgccactgctcagatgtattactcaagaagaagttgcacgacttttatctgaggtgcatgatggattatgtggaaatcatgccgccgggcagagtttatctaagaaaattctaaggcaaggttatttctggccaacaatgattgaagattcaaaggcctatgttaagaaatgtgacaaatgccaaacattttcaaaaatacctcgagcttcgcccaacgagttaactcaaatgcaaag

SEQ ID NO: 352209 - DNA, 977 bp, Cannabis indica
atatcttgggctaacaagaaatggttccattttgcttttgggagatcttttctgtgagctttgttaactgttcaattttatgttccatctgaggcattttgaagtgttttgacaactatgcatctataattcttttcacacacggttctgtatcctcctcctccaagttagaaatggttctattttgcttttgggagatttttctgtgagctttgttaactgctcaattttatgttccaaatgttgagtcgtagcatctggtgattctctttcatgaaagcaatcgttgatatggttttttaaattatctctgcaaggtttggctttctcagttctggcattttctcttttggtgttcaactttgcctgaagatcattcgtggaaagacttccacttttgtcatctgatagtggatacatatctttgacatcgtcacgtcgactaacttaatcatcacagtgatttgtgtcctttcaggtaacaagctccttggctgtaacataagatttgtctttcagcacagctctgcctctagaattagtcttgtcaccttaccttgaggcatggattcctttttttttcttttgaagttggctgaaagatttagatttcttttgttgttcagtatgggcagctttaattgaagtctcgcccaccttttcgttccctttgtccttatgaggatcataggttctagaatttttgagatcaaatttcccagcagtgttatcttttggggtaatatgattgcttctgtttgcacttgtcagtgtcgcaattacttcctccattctcgccatattttcatgcatcaataaagagaattgctcttgcaactataatttgtcctcaactattttttagctttccgaccatggtgaccatagggtctgactcatcgggatagccttcctttttggcatcatcattgtaacatccccgcttcaagcctccattgggcccttacacccacaga

SEQ ID NO: 352210 - DNA, 645 bp, Cannabis indica
aaaaaaaaattaataagagttttgttcttaattttagtggtttttttttttttgaaatctaattttagtgttgaaagaaaatggactttgtaatggcggggtttttttgttttctagttagtatgaaatttggacaggaatatagtattatagagatctttaaagccgtctgaactattgatcatttcatttataataataaacgtaatatttgattttactttcttgttaaactatgatgatcatttcttttttaactttaatataagaacttcacctttagaagctccgtggatggatatacattatggggaattctacagaggacacactatttttacctcatgctattggaaaagaaactaaaccagtcaaaagttaaaacaattatttgtacattaattttgtttgagcattggacggaattatttcatttgttgaaattatatttttttgtttttctcattaaatgatattatattattagctttattcggaatgcactgatgtttgtggaagtggagaggaatgtgagagtttgttgggctcaggttgtttattgggcttttgggccacttaagaatttttatacagaaagcaccatttttttaaaaaaaattacaatactaaataattttttttttt

SEQ ID NO: 352211 - DNA, 1112 bp, Cannabis indica
ataattctaagtatatactaacttataatctcattaataaagcttggaataatttactaagtcactagaagacaaaagccaacaaatggcaaaagactattttgcccttacaaacatcaaaaagcatacaggccacctaggggtatatggtcatttctaaatcctcgaatattccaaaatttctaactaagttgcactgctattacaaaaatactaaaatgtgattctattggcgacacgctgcgttctaatgttgccgggcacaaaacatgaaaaaaaatgtaaaattcatatacgacataaataatacaccctgaattcaaataaatctccataagaacataattcataattaatattctaatttaataattaagccatatctgctaattccaaataaaagttaagcggtctttacaattattcccctgttaaaaggatttcatcctcgaaatctaacttgaaaaactctggatattgagccctcatgttagtctctagctcccagatggcttcctccaccttactatttctccatagtaccttgaccaaagctatggtattattctgaaagattttatcttttctgtctaagatctgaactggttgttcttcatacagtaaatcttactgaagttcaagattttcaaatggccctataaacctagggcataacttgccccttttttgaaatgtctaatcccctttatcggagacacccgtaggaatacatgatctcctacctgaatctctacatttctgtgtttcagatctgtgtagttcttttgcctactctgagaggcaagcattctggccttgatcttttctatggcttcattagtccattgcactgattctagacataggtatttcttttctcccatttcatcccaatgaataggatatctaaacttcttgccatacaacatctcgtagggagacatccctataatactctggtaactgttgttgtaggaaaactctatcagtggcaagtacttgctccatcagccttcgaaatccatcacataggcttgtaacatgtcttccaatatctgaattgttctttcagactgtccatcagtctgaggatggaaggttgtactgaattt

SEQ ID NO: 352212 - DNA, 793 bp, Cannabis indica
tgtcgggtctatcctttaaaaatgttgacacgacacgatacgatttatatttttttaggggagttctttttacaccccacaaaatgataagtacaccccattattaaaaaaaatataaactaaataatttttaaaaattactcttaatattttttaaaaaaaattctcacattattttatgttaatttcaatacttattttgattttactttcataattttttctaactcatgtatattttttttttaaattttttctaagaaaatttcatataattttttattttaattttttcctcataatatttaaaatataatttatttttgtttgataggtatattttttaagaatatgaattggaaaaaaaagttaaaaaaatttagtacaattaaagatataaattttatataaaataaaaattattaaaatggggtgcctttagaaatttttggggtgtaaataaaatttttctttttttgaagacacaacatgataattcatattttagaaaaaacacacaaaaacaaaaaaaaaaaaatacaaatcaaaccagcacaacacgacttgcacgaatttacatcacttagctaaagattgtcggactcattttgaatatattccttaaatttatagtgtctaccaaatttgacaatatatgcttaaaaataaaatggtacactaaaaataatgctaggatattttgcatcatgtaaaatatacttaaaccatttcccttacaatttaccccttaacaaataaaaaacaaaaattacataacactttctctctctct

SEQ ID NO: 352213 - DNA, 848 bp, Cannabis indica
aaaaaacgtatttaccttgggcgatcgtgatggagatctcaaaagtttggtctggtggaggttcgtgcgcaaaaggagaatgagagaaagagagagagagggcgactgactgtggaggagaaaggtggtcgatggtggtcaaagccccaccggtgctgggaagagagaaggtgcggctgcgactgagaagagaggaggtgcggctggctgagaagagagaagagaggaggtgcgactggctgagaagagagagaagggtgcggttatgtgtttagaaaatttaggattttttataataaggaaagagaaataatgagaaagaacaaaatgagaaatagagagagaataattaattaaagttcagcaatgtatattttttttactgtaatctaacattttttttaaaaaaaataataatttaaggttattatacaatgacgcgctagccatgtcacgacacatttacccaatcacacctggcatgtcactataagttaacaatttttttttttttaaaaaaataatagtaattatggaaattactctatagtgacacttcatatttttagtgacacgtattgtaaaagtgagtgtgttaacacaaatctttgttaaccaaatatgagcctaattgtgataatctcacatagaaaaaataaagctataaaagtaaaaatatgaacacgggattttttttacgtggttttcaattaaaattctgcatagtccacgagtcaatcttattcaaaattctcattatttttctgggcctttttttgtatgagtttttgtaatatccagtttaaaatagtatttttttttttgtttggatattaattttgcgagga

SEQ ID NO: 352214 - DNA, 475 bp, Cannabis indica
tatccttgatactggggggcattgaagtccttggtgaactatggaaggacataaggaaaaatggaccggttgactcaatgagtgatttcctcgaccgggctgaaggtttcatcaagctcgaagaagccattcagcgagcagaaggtgagcaaaagccgaacaaaacgaaggctccttctactggaacgtccgcccagcttccccaatattccaacaactcaagtggaaagcattcaggcaacaaccataagcaagggaacgggaagaagggaaagttcaccgaaaaaatcggacagaatccccgtgatcgcgccaaacacactgcattcactatcctaactgaagatatagaacgtgtatatatagcaactcagtcgctaattccgtacaagaagcccgggcccatgaagaaagataccagcaaaagggacatgacgaaattttgtcggttccatggagattacagccatgacac

SEQ ID NO: 352215 - DNA, 590 bp, Cannabis indica
ctggtgcattctttcctttaattttctgcatttttctctatattgtgtttatgtgtgtatatgacttctgggttgagttttaaattggtttaagggatttatttttctggggtttcatttttattttctgggttgtattttcttcgtgttcttcagagaagaacatcgaagaaggtggctcggtttgggatttattggaactgggcagaggtgatttctgggtttagtaactgggtttgttaagggttgttcatcattattcttcagagaagaataacaaagaagacaactatttgtttggttttggatctgtagccgtgtgagacttttcttctgctagggttttcttagtggaggcggatgagtgtgtttaaatgatataaagatagtatatatatatatacttgatatttgcttttagggtttattgggataaacgatttgtagctcaaagattagtgagctgtcgttttggttttaaaggctgagtcaacaaaggtggtttgactggattttaaaggtcagatttgaccatttctttgactaattccttgctgtgtgtaggatatattaggaataaaattcctaca

SEQ ID NO: 352216 - DNA, 720 bp, Cannabis indica
tattatgtttgtgatttgaactaaacactcattctagagcattgatagaactattttagattatgaatttaagtttttagattatttctatatttgttcttgctatttgtttatgcaattctgtgttaattatcatcttcttaatgcttgatcaccattaattagtgtagagattttagattttacacttgagggaggtaatctaaaattgaacttagaaaggcatgacataggaaaagtgtgagattgagagattctactaattctgtgagtttcatttgaagagaatcatattgctttatgagtgcttaattgattaacattgaatagagacatcttgttagttaatttaagttaaatctatcatcacttgagagaggttaataaattacattaggattcttgaaactacaaattataggataaattgggataatcggcaaattgtgattcatagtttgaaatagggtaatcaatgctctaggttttttatttttagttaaaaatagttgtttgtctgtttatttttccatttattttattatttgattcttaattataatttactttgggttatctaattaaagtataaaattaacaagtataataattagtaaaatttaataatcaatcactgtgggttcaacaacttttttagtattaaaattttactaaaacaacgttgtacgcttacagcaaaaattgtgtatcaagtttttg

SEQ ID NO: 352217 - DNA, 605 bp, Cannabis indica
attgcttacctgtggtgaataaaatctgactggtattgctaatccagtcattgctcctaataattttgaattgaagcctgctttaatcaatatggtacaacagaatcagtttggtgggttggctactaaagatcccaatatccatctagccatatttctagaagtatgtgctactatgaagatgaatggtcttattgatgacgctataagactacgactctttcctttctttttaagggataaagcaaaaagttggttgcaatctttgcaactagattttataactacatgggatgaaattgccagaaagttcatggtaaaattttggccatatatttaaaaatttattgatatagcactaacataatattaatctagcccaattcaagagtccagataaaaaatatatatatatataattagcggtctatataagaatattttatatgtggaaataaagtttctatataaggaaatgattttctatttaaggaaataaaataaataattgattttctgataaatgaatattttatattcattgaatctggacaaaattaattatgtaatattctatatatggtcagatttctatattcattacc

SEQ ID NO: 352218 - DNA, 573 bp, Cannabis indica
gatgccacgtcagagtgccaaatttgggataacatggacaatccaacctggcagttaacagctaaatttggacggaagtgttaaattgctaatagaacacgagtattgggggaaaaaaatatgggagtatcaagatacctataaaatttttgtacaaaaagaaaatttttacaaaaaaaaaaaatcatatttttgtaagttttgcaaaaaaaaaatcataaaaatgaaaattcaccctagaaaaataggtggatctacaaaaacatgaaaaagaattagcataacttacaaaaaatatggtagaaaaaagtaatgtaacaaaatatgataattttagaagaaaaaaaaagagaacccaaaaaaaaagtaactatcaataaacttaataagatttccatgaataattatccctgaaaaattcatcagagcgactattattagaggtgttcataagttggtctaattcaatccgcacaatccaatccaatctaatcctcaaagtacggatatctgtgcttgtgcggtttgggtcttgactgacatgtaaaagtaactgatccaattcaatccaca

SEQ ID NO: 352219 - DNA, 623 bp, Cannabis indica
tagctcacgagtactctgtgcaggtaaaggcaaaactaaacaatgaggatagcgagctcgaggcatggattacatatcaggagattgtcacgatgttttggtttaaaaatattttttaaagattatggctcgattacttttgtaaaaattaatgtttaaaatttataaatgaatcaagtgtttttgttttaaaataatgagatctcatgctttagttattttcaataaattagtttattgtcttgattataaataaattttaaacggactagcgagtgtgatgtctcggggaatcggggcgttacagcctagtttgtacacctttattttttttcctttcatattagactcattctcatatccttgtcctcttatattatcaatatcaagtccaagaatatttaatgcatctaaaagttcattaagcaaaccaagctctgatatgtcatgaacctttatgaattttaaaaaatactcatcaacaaatatttgagtttctgaaatattcacatatcttagaacaagagatatttgttcatcattacttacatttggagtataatatagtatgactgaaaaatattttactttttttatttttactaattatcaagcctttcacc

SEQ ID NO: 352220 - DNA, 835 bp, Cannabis indica
tgtgtgccttgaagaagcaaagtgaagccattgtcattgtcggttttaatcgtcgaaaaagaaaagtatagggttagagagagttaccccttgtgggaactactagtaagtattttgttgatgaactatttatgcatgggaaagaaaacacatgtgtatgtatatgaatatgatggtgactataacgtagcttgaagttgaatcaaatatattaaagaaagtcagaagaagttcctgtttgagcagaggattgaaattgtagttaaatctaacttggaaattggaatggtagatctttcttttttgttgttgttatctcttaaattcttttggaataataaattagatatttttttatcagcctaaaaggctaaaaaacttcatcttatttgatgggaatataatagttatttgctccttgatccatctatggtttaataagaaaaaaaaaaggttttcactcatttcagttcctagaattgagctcttcattataagtttaattgaagctaaataaactcaaagcataaatggtgcctagctatacaatgaagcaatgcattggaaatggttaataataatatatacataatttgtgttttaaaaatatgttctataaatttttaattgacaattaaaattttaagaacaaaaaaaaaatctcttaatttttttaacaatttatttttttcaataaatattttgaacactttgaaacttgaaatttggcctcgaccccagtttcgaactcggaccacaacctcagtttcagacttgtacttaaactcgacttaaataaaatcaaaaaataaaaataaaagttatagaacacatt

SEQ ID NO: 352221 - DNA, 668 bp, Cannabis indica
caaccaaacaaagaaatggaatggagattatttcctttcttttccattctatttcattacctccaaccaaacgccaccttagtgtaaaccattactagatttagggatgtcctgatcatgaacttatgaaaagctagaactgttaactaaggtttgcatgtttgataactattctaagtgattaggggtggaccatcctatggtcattaagataagaaagtgtttgtttcaacaaatagtacttttataagagtatgactcaatttgaaaacaaagtagaaaagtagagatattttttttcttgattccaaaagtgttctatcatcttattctatgtaagatggtcccactgcctctgttgtcttgatacaaccgatgaggacaataaaacttgtgttcgtagatagaaagtcatggcaccttgtcgtagtgggagggttttaaggaactcaccctgttatgacttcggagacagttgtgaataaaaatctattcttagtttaaacaattaataaataagtcagaataaggaactaagaagcaaagccaagagaactatcgttaaaacctttcacatggagtaacataaaggttttctattacaaggacaagaaaagaaattttgataataagtctattcaatataattaacaaacttcttgatttta

SEQ ID NO: 352222 - DNA, 533 bp, Cannabis indica
ccattcgatacggtgcttttgattactagttccgctcctagaaccaactcaattacaaattcaatctcccaggtaggtggctatctcggtaaaaatcttctggaaagacgtcaagaaactcgcataccaatctggtactctcaggtccagatgtcacaggttggctagtatctactgcagtaactatgaatcccagacaacctctgcacatcaggtccttaactttcaaaagtgttactcttggtatccgtgccccctgaactttacccacaaacactgctgggttaggactatcagtctcaaacaccacaatcttccacttgcagtcaatcgttgccccactacttagacaaaaaataccattccaacggattatatccaaaatagagacagttgtaatcctacttaaattaggcagttaattcacaaccgtcaatccagaaggacaaggaccgaatccacctagtggatactataaggtctcccgaaggtagcagggtaccaaaccccgaagcataaatatcacatggttt

SEQ ID NO: 352223 - DNA, 1771 bp, Cannabis indica
atgttctgtatagcctgtggcatcttagattaggaacattactcacttttcgcattccatgtgacatatggggtttttgaaactatgtgtcctatgtggcctagagccttttttaaacactattttaatgtaatatgttgcttgaggcctctttagaacattactttattttaagacccaagatcttcatgtttgtatttttgggcataagccctctttttttgaacactactagtatttgatcttgttgcttttttatcatggatagtgcgaccgaccaagcaatctttaatcttggctatcttcttatggccttgacaagtaagggtccggatttactttgccaagccaaagtatgcctgcacaacttagaggcaggtttattatctaatattaagcattaaaatttctcttcatgaattctttgtgctagtttgatgcgttgtaccgtatgagtgccccccaagtgaccatgcagataagtctcttggtcacttgctatttaccaagtttcatagactttgcctgggtattgtcttgcgagggtaccatagtacacatgtggaactaatagaataactttgaaaagttgatttgtgagcaagtggttcatagacacaataaacataatataaatattgcaattattcattaattagtgtttgttactgtgaaacttacacaaattaaatctacaagcctatattacacaaattcagcttctagatgtcaagtggctacccctgcccgcctagtaaagcagatgccactattgaagaaaagtgggagaacacgccctacaagggtcgtctgtgctagtgctttttgtactctaatgttgagtagatagagctgctactttggagtagagttctgtaagctagttattggtagtatttgcgaaggtgctctccattcgaatatctcggtagaagaacgagctccatgttctcgttgtaccttcccagcttgtaggctccattactagttatttttgtaacttgataagggccttcccaattaggtctaaacactcatgtcgctgagtctttagtgtccaggaacactctttggagcaccatttctcctatgaagaattttctgttgttgacatttttgttgaagtgccttactacctcttgcaagtaggtctgcagctttaggttggcttgttctcttctttcttctacttcatcaagggactctccacgtagggtgccatttgttggttggtcataggttgttcttctgtgagcggtggcactagctctataggaaacattgcctcatagccataagctagagcaaatgcagtttccccaatgtctatcttcttggttgtcttatgcaaccataggacctttgggagtagttcaggccagtttcctttggcttcctcaaggcgcttcttcagggtgtccttgagggttttgttgacagcttctacctgcccattggcttgaggatgggccacgacagagaagctcttgatgatgccatgtctgttctagaaataagtggacatgtcactgtcgaactattagccgttgtctgacacaatcttctagggaaggccaaatcaacatatgaagttcttgacaacaaagttaaggaccttcttggaggtgattgttgccagaggatcaacttctatccatttggtgaagtagtctacttcgacgacaacaaaatgtacccctcattttccctttgggaattgacaaattaggtctatcccccacattacaaagggccaagagactgcatcatc

SEQ ID NO: 352224 - DNA, 683 bp, Cannabis indica
aaaatcaatacacatcacatacacgtccagcagcctctccccaatctccaattcatgaaccagaacctatatcagcacatacaactcatgctgcttcaccttcacctatcataccagcagcagcacctcagccaccaactaatacacatccaataacaacaagggcaaaagttggtgtctataagcctaaggtttacatcaactcaaaaacacctctgacactgtaggaagctttaaaagaccctaagtggaatggagttatgaacattgagattgtggctctcaaagccaatggacctacactgttgttccccttccccttagaagaaaggccatttgtgtacaagtgggtatacaaggtaaaagagaataaagatgggagtgtctctaagatcaaggccagactggtaaccaagggatttcacaaagaatatggttttgacttctctaaaacattcaatcttgtagttaaatcactaaccattagaatcatcatcaccattgctcttcataatcacggggagataaaacaacttgatgtgaacaatgcattttcaaatactaacttggttgaagaagtatatatgtaacagccataagagtttgaggaacaaggtccacatatggtttgcaaattgcacaaggaaatttatggcctaaaacaggctccaagggcttggttt

SEQ ID NO: 352225 - DNA, 630 bp, Cannabis indica
aacccaccaaatgattaagaacgttcttaagggaagtacgactactgtaccaaatgcaccaaagtaccaaccctgtactcgtgttggtagagccattattgtactcccagaagttactaagtgttgtaccacatgcacaacgtaccctttggtactcgtgttggtaacactgtaactactctataaacctacactaaactaacacccttaaaatcacataaacaactagtgttagtagtgtaaatagttaaaacaagcatacattcatatatacattattatgctatcttacctcgttccgtgctcaagtgtgctggtcagcctgagtggaaacgcagcgtgacgctttacagggccctaaaccataatattcataactcgataagagacatgctaaaacacttatcggggatttaaaattgaaattaaggataaccttatcgataaataggatgctaataccctaaacaacacaaaaatggggaaaactagggttcgggcaaaagccccaaccggaagcccgcttcctgggtaccaacggtcgaccagttctaatggtcccccagaaccggtcgaccggttctgtgctgggaacccaaaaatcaagccccttgattcaaatcaatccca

SEQ ID NO: 352226 - DNA, 1009 bp, Cannabis indica
cgtccaggttgacgtcatatgtcaaccgtggggactgggatgtcaacctgggcattggatgtcaaccttagcgctgggtcatgaactgccttcaagtaaaaatagtcataactcactcagttttgatttgattgatgtgattcaacttgcatttcaaagccaatttaattctctatcaagtcatgtctcacacttcaattgtaattctgaatctatcatcatcaaaattcattcccaacggagttacaaaataagctctaggttactacagcgggaccctccgggctccgaaaaatggccatcaccaccaagagttgattcttaccgttagatcatcatcaacgataaaaaatatcttatttgtatttttctcctatttttgtgggtctccttcacctataaaaggagagctctataaactcattttttaaatttaaaaaactatccacaaggtcaaaatttctctctctagaaattaaagcttctgacacttaatctttttttgtaattaccatctcgtgagaaataaaaacttaaaatagacgtagctccattactgtcacgatacagggagtaaactactataaatttgttgtgtctctcttataattacttaactacttatttattctcgccaatcttgcgagatggtgtggcttagaattctagtccaaatttctaagtcaacatatgttattcagtttatttcactttgtacattaagttaaagttttgatctctataaagtgaagtaggaccaattaaaaattgacatgaatagatcaccatgcatgttattttcataccacattatcatgcatgattgatctatgtcatttaattatgtcgatatatgtgaccattgatgggtttagttgtgtttgatacaacaaaaatcgctttgatcctatgttgatatagttaatggatgagattgcacatacctatggttatgatgacaatactatgagctcaataaggttaacacatttatatgtatacatatgtg

SEQ ID NO: 352227 - DNA, 652 bp, Cannabis indica
ttggagcatgctataagcacttttgaccgagaactcgcccgttctttccccctcccaagaccatgtatcaatggagacatttgagcttagtgggatgcccaaaataatatcagaatctcgattattgaacatatctcgtacaagatcatagtcccaagagcggttgtgcacatgaaaaagggagctaacatgttggttcattaacctagagtgtattgttgaaacatatgggttatcctgtacaggtagccacgagtggtttagaatgcttactatgtcccctgatccgattattcttctaacacccgaacggagtaaagattgggtagtccaaatacctctccagacaaagcttgggtaacttcctagctctgctgacaagaaatcagagtggggaaagtatctagctttatagacttttccaacaagagtatctggattgtaaagtagacgccaaccttgtttagcgagcatgtcaatgttgaaatcatgcaagtgccgaaaacccatgccaccatcatatttatgagcagccatacgatcccaagacctccaaataatacctttccctttactagaagatgtcttccaccaaaaccgggccataagtttttcaatttcattacatgtgccaagtggaaggaggaaaaca

SEQ ID NO: 352228 - DNA, 907 bp, Cannabis indica
ggcattcttctaaaaagcaaaaagtaccgtagggacatgtgaaagtagtcttttcctaatcttcaggtgctatggctatttagtggtatccagagtagccatcaagaaaacagtaatattcttgccccgccaatctgtctagcatctgatcaatgaagggcaagggaaagtgatctttccgggttgctttgttgatacagatccttcaaccagtaactgttcttgtgggaatcaacttattcttttcattcttgattactgtcattccccctttctttggaactacttgcactggactaacccatttactatctgagatgggataggccaccccagcatctaaccacttgaccacttcctttctgacaacttccttcataggtggattgagtctacgttgtgcatcaattgttggcttagcattttcttccatcaaaattcggtgcatcacagttggggactgattcccttgacatcacccagtgtccaagcaatggccctgttgtgcacccgaagtactctaagcaatctattagtttccacatcagaaagtgaggttaacacgatgactgggagcttcttatcctctcccaagaactcatatctcagatgactaagaagcacctttaactcaagctctagaggtttttcagtcgatggcacaagctctttgggcacaactcccagctcttcatgatacttcctgtttaatggcccataagaatcgagccatttagcataacccaatacttcttgtccctcttgctccatcaaatcatcttcaattagactcagttcgagaggatcatctatcagctttttctcactcacaattgtatcaatcaaatcaacgaagagacagttatcacttgcctttgggtatgtcattgcctttaacacattaaag

SEQ ID NO: 352229 - DNA, 847 bp, Cannabis indica
ctgattatattgaaatgagttttgtttagggcataaaacccaacagaaatcacatcacaccgcgcagtttgacaaaaatgcaaactgcaaccgtactgcaaataatttcaaactgcatgttttatgcggtgcggtgcagtgcagtgcgggcagtttgtggggtttgatgaacaccctttattttttttaatgtttatcttatatatataacctcaattttttaaaagataataataataataataatgtttataccaagagtagcgttgatgatgtggacatgaatatttgacacatggcaaaaaagatgatatctcagagttaagtgatcccgagtctagcaagtcaacctaggaggggtccctagccttatgcccaggttgacttcgggaactttggaatagaagttcagattttaataacttaaattcagctcactatctttagtattctgtaccatgaagacatggagcaacctaatccaggacccgagagctgaaattacacaaacctgtaacccgaaagccaacttgggcacatagggtttcacccggtgcccaagttgacatcctcaactagggtttcaatttctaggaccgtcttagtgcaaagtggttaaaacttacattgaaaaatcaactagacataccacagacttatttgaggtatcagaatcagaattggagcaagttgatttttgagcactcgaggcttggggcctcgagcacccagccccaggttgacaatctgtcaatctgggtgccttccaagtgtctaatcaatgatcaaacttttgcattgaatttgtcttcataaaaaaaatgaggttatatatataagataaaca

SEQ ID NO: 352230 - DNA, 642 bp, Cannabis indica
attctcggaacggtgggagtacctcagtaacttcagggtcatgcttgaaaacgcatgccccttgagtcactgagtttctcccagccgtttctggaggtatatcgcttggcccaggatgcgtgacttattccatttttagtactatctctactcgcatattgatggggtggtcagcattcgcaaggacgctaaccattctatcaagtgcgactttgtagttttaatgcgggtgagatcacttattttgctttcacacattgaccacgctgaatagatcttctatctttcagatgagagacctgtcggatagccaactgctcggctcaggaggccatgcattcgatggtgacgaagacccggaggaagatagttttctcccagcttcgatttcagaagaggagatcgcacctactgtaggtatagagctaggtccgatgtcttctgcggacatcgagagaatggtgcaggagctcgctaaacctgggaccatcgatattcgagacagcgagtctacggtgtcagcccgggactactttattctttcgaggcatgctcctgacgtctagggttgaggagacggatgacgattggacggccccagctcgcgaagtcaggcgaggatgaagaggaggcagaagggag

SEQ ID NO: 352231 - DNA, 865 bp, Cannabis indica
ttgttgtggttgttgttgtgactaaaactgtgccataattgtctgaacaaactcattgacatcgatagtggcatcttcaaattcagggatggttgcagtagggcacatggtttgcaacaattgacgaatcgcttgcagattgttgttttggcgcttcattacggcattaacagtttgagcaacaccttgaacaaactcttgtggcatttgtggacgtcatgttgttgcatgggttagcggtgattgggaagatgaggcaaaaatagcaggagtgcccttcaacttgcgtcctacccctttaatgcaatcctgccgttttccaagtactttagtaacaatcttgatctcatctattggagcatctccaggtaaagtattttgtgtctgagttgttctttcttcacataatttttcctacattttaatagagaaataattaatatagttacaattgatatattaaagaaaaacctaaaataataacttacgtaatgagccctagcagtatcattaacccatcctccattagtcctatggtgcatgtcatgccaagtgtcgattatgctaggcaattctttagtctcttgattcatctacagaaaacaaaacaagcatttttagtatagttataatactattaataatctcataattgttaaaacatgttaaactcaattacccttttatatcggtgactagcataagatgatgaaccctggagactgggatacaaatgctttgctctatttgcagcatttttctttgatcattctatgtgcttcggatccaaaaaatgagaaattaatttatcccatgttgcagcatctagtccttctggtggattttttttagctttctccacatc

SEQ ID NO: 352232 - DNA, 534 bp, Cannabis indica
caccgcttcttcttttcctccggcttctaggccatggaccgtccggagcttcttacggagtgggttaggatccctccctatctgcggactgcgcctactcaagtattcctccagcggcctaagactttctctacttacgacaggaaggccctcaacgttggggacttagtcacgacagagaattgtcaaaaagccaagctgatatccgagagtcagtcggtggatgattttaacctttctaaggtgatctatccgaatgtaaggactccagccgcaaaaagggcgctccgagtggatataattacttcggctgaggagcggtaccagaagtatctcttcaggagggagcaggagctggcttacattaaggcccaggctgtagctgggaggacccttcgtctggaagcttgcacggattggaggccctctaggcctaagctgtaacaccctaactatcttaggcgtattacgtgatttttaaacgtactgtgcagctcgttgctaatcaacgaggtttataggaaaaacgtgatt

SEQ ID NO: 352233 - DNA, 775 bp, Cannabis indica
ttcaaggcaaacaccactgctgcaagttccagatcatgagttggataacgctgttcataatctttcaattgtcgagaagcataagctatgactttatctgtctgcattaacacacagcccgaaccttgccttgatgcatcacaatacaccacaaacttctcttgatcagagggcagggctaaaacaggagctgtaatcagtatttgcttcagctcttggaaacttttctcacacttatctgaccatataaaccgttgcttcttcctagttaactcggataacggcattgcaatcttggaaaaacctaccacaaaatgccgataataacccgctaaaccgagaaaacttcgaacttcagtgactgttttaggtctaggccaattctttacagcttcaatcttccatggatcaaccataatcccgtcttttccaacaatatgccccagaaaggacacttgtgacagccaaaactcacactttttgaactttgcatagagtttatgatctctcaagcgctgcgaaaccattcgaagatgttgctcgtgttctgcttctgaccgagagttcacaaggatatcgtcgataaatacaattataaaattatcaaggaaatccttgaataccctattcatgagatccataaaggctgccggtgcatttgttaatccaaatgacataaccaggaactcataatgaccatacctggttcggaaggctgtcttcggaatatcctcttctcagattctcaactgatgatatccagacctcaagtcaa

SEQ ID NO: 352234 - DNA, 537 bp, Cannabis indica
catgcccttcaggctgaaaaatgcaggggccacatatcaaaggctggtgaacatgatgttcaaagatctcattgtccgtaacatggaggcgtttgtagacgacatgtttgtcaagtccaaaaaggctaggggccatgtggaggacctagatgaatgcttcaaaatcctttggatctacatcatgaagcttaaccgtctagaaagcagaacgcaacaacagacacacttgcccgtctagaaagtagcaccattgtcgacaaggaaaatttggtgccaatacagttactagaggaacccaataatacaattccaaaagagtttgacatgttggatgacactccaacattcatgacacctattgcagcttaactccaaaccgaagccttgctaaaagataagaatgaagcaaaaaagataagaagaaaagctgctatgtatctaatcctagacggagtaatgtacagacggtgcttctccatgccactcctaaggtgtgtcaccaaggctgaagccaagcgactaatgatagaagtgcat

SEQ ID NO: 352235 - DNA, 970 bp, Cannabis indica
acccaaacaggatgagcttgaaatagggacttaactttcttgttgctagaataaggcagtaagcgagtttctctattaatgggtattggccttcggcctcaatgagtcttttactgatgtaatagatcaggtgttgtatgttttttccttctctgatcagcacgacactcacagcgtgttccgtgaccatcaagtatatcccaagttgttctccgtccagaggtttcgacagtacaggaggctttgcgagttgcatttcagctcctgaaaagatttttcacattcctccatccacttgaattgattatttcctcgcaagatgttaaagaatgggacacacttgtctgttgattttgaaacaaatctgctgagtgcggcaatccgaccagtcaaactgtgcacttccttagttcttgttggcgacttcatatccaggagggcttgaatcttctctggattggcttcaattcctcaggcattgataatgaagcctagaaactttcccgagctgactccaaagcagcactttaagggatttagtttcatgttttacttccggaggactttaaagcattcgtccaggtattctatgtgccccccagccttcgtagatttgtcgaacatgtcatccacatacactctcatgtcgctccaggactttgtagcaatatagacccatacctgttcggaaacttgtatgttcttggtctggtggatgaattttgatatgattgtatcccgagtaagcatccatgaagcttaatatttcatgcccttttgttgaggtccgtgaaattaatacatactcgccattttttgttcggcttgggtaccagtacgggatttacgacccaagctgggtagaaagattcaattatgaacttattgttgcgtagcttctctacctcttcctttaggtctaatgctcactctttgtccaatagccttcgcttttgttgaactggtcaga

SEQ ID NO: 352236 - DNA, 437 bp, Cannabis indica
gcataaaacccaacagttattagatttgagcaagctttgagtttagaactcaagcttggctctttaatggcaagttttgtttcagtgcatgtagttgtgttttgttgccttcgttatgttctctaggttgcatataacatgtctggaaagtttggtttgaattgggattgatttggttgagatatgaaacttttggtctttcctgcactgaaccgaaatttctgttcagagcggcctgtaggaactggaattttggttggctcccaggaattttcccagaagcggaattctggttggggaaccggtctactggttggagcaattttgggatccctagtttttcccatttttgtgttatttagggtattaccatgttatttattgatagggaaacttttagtttcaagtttaagactccagaaagtgatttagcgtgt

SEQ ID NO: 352237 - DNA, 651 bp, Cannabis indica
taaggcccatccccaggcccttatttatttttgagcttttctttgggatccgaacactttatattcacatttgaatacatacttagcttttaactttgttaaatttggtctgtttacatttgttcgtgcggtatgccctactacccccctgagtgatatgaaatttgattttaggtcactcagttttacaaactttggattagaggttgcatatgtttgttcggtacaaatttactttacagaacataaactctttttttcaactattggtaatactttcggaggtgatcagcattctaggccctaggcaccattgttccgtccattcgttttagcttgtaggtcccggagccgatttcctcctcaatttcgtatggtccttcccaaatttggcccaagtacccccactccggattcgtgaggggctggaaagacccttcttaggactagatcaccaatagtgaattttctatttttgacttttgagttcaagtgtttggccaccttcttttgataagctgccattcgtatttgaggctcatcccggagttcatcaatttgatctagcgcttcttataataaagtcttgtttgctgctggatcgtaagttgtcctcctatgggatgggaataatgtttccaccgggaccat

SEQ ID NO: 352238 - DNA, 838 bp, Cannabis indica
agatcctggtaaaataaattccaacaaagggctcgtgtttcgttgggatacgatgggatgatggttgtcgatgtttaggggaggagcggaggaattgcattactatggaaggaagaagatgaagtttcggttctggggttctcaacaaattacattgacgtaaaggtttcagttgaaggcatggttgtatggaggtttactggtctgtatggggagccaaatagaagtcgtaggattgctacctgaaatcttttacgttcgctcgctactaattcaaacttgccttggtgcgtcatgggagatttgaacaatgtttgctctcacaaagataaaaggggaaggaaccgttatcctgaatttttaatacaaggctttcaacaagctttgaatgacagtggtttgcaagatatgaagctttgtggttatcctttcacatgggaaagaggcagaggcccttctcattaggttgaagctcgattagatagatgtttggcaaatctttcttggctgcaagctttttcatttgctaaattatataaccttgagctttcaacgtcggatcattctcccatattgcctgaactagttaatactgctacgcaaaggagagtaactcggtttcattttgagaatgtgtggcttcgagagcctctgtgttaccaaatagtcaaagatagctgggatggaagtggtgtaacgaatgtgcaagaaaaatcaagatttgtgggcagcagatgaattcttggggaaggaggttacgttgaactttaaaaacaagataaagaagtgtaaaagtgaagtgcagctgtaacgccctaatctatagggacgccacgtg

SEQ ID NO: 352239 - DNA, 784 bp, Cannabis indica
tagaggaatttaatggcattactgatgagactgttgccctgttaacgagaaattatgccaagttcttgaaaaagaactacaagaagaattgtcctgctgataaagaaaatgccctcaagaagaataaaggtggaaactttaaacaaggacaaccatttactgatcaaaagaatcgaggaatcaagtgcagagagtgtgacagatatggccatatccaggccgagtgcacaaacaaactcaaaaagaagaaggcctttgcagcaacatggagtgacaatgaagaagaaaagaactcaactgccagtgaaagcacggaagaggataaacaagtattagcattcatggcccaaagctgtcacacagttgagtctgaagatgatgcagtctccattacattaaaagtagacagcgtaggtagacaaaaagcttatgaggaaatgtttgcccaatgggagtacatgactaaacagatcagaggcctaaagagctccttagagcaagtggagacaaaaaaaggcaagttagaggatacggtcaagaacctcaacagacttcttgatgagaaggataatgagatttataagctcattgctgatctgattagaactaagcaagcactgtgattcattaccccaggcctatagtttccatcaatcagaccctacaacttcagaaccgtatcggtgtcgaactccttaggtacttagattttgttaaactaacgcaatgatctgattgtgtgaatccactcacctcaactgtagatctgaccaaaaaggaaacg

SEQ ID NO: 352240 - DNA, 775 bp, Cannabis indica
cttgtgattgtgtcatgcgagttggtgacatctaattggttaattctaactcgacctatttatattttggatcaagaaagctacaaccataactagacctatccatatccacatgtcgacctatcatgttcacgtgtctacatatcatattcgcgtatctgttaattttattcatgtgtcgacttgacttatcctacagtacatgttgatcaacataactagtataacatagttgattaattattttttatattttttgttgtattaatttgtttgatttatttgaataatacactaaataaaaatataaaaaatttcaagtagaaaaaagagatgaatacaaataatttatctcaaaatattaatacaatgaacacaaattttaatatcaaagtaatttatttttattttaattatttaaaaagagaatattttattcccacaaaattaactacaggctaggcgattctacctttaaaatgacattagcacaaggaggaatatctccaagccaagaattacaaataaaatatttaagagcaaaattagctatacgatgggaaacacggttagttagcactactaaaagaatgaaaaaaatgcttatacacgtccatagcttgaattgtctcaacaatggcagtccagctaatgagttgatgattcgaagtattcaaggccttgatgattatagagctatcagaagtcacctagaaccgatgaacacccttgatattagcaacctccaatcccattttaatggccagagcctcgg

SEQ ID NO: 352241 - DNA, 752 bp, Cannabis indica
ttttttatttaatcaatttaatatgtaaatatctacttattatacttgttacttagggtttaagctctcttatataaagagccttaactcaatcctaaagacctaagtctaatcctaaacctctatgtcattaagtctcagtcaagcgatcaagctctaagtgtaatagcattatatcactctctcttttacatgcctactatagcatctctcaacacttgagattttccatcttcaattcatacattataaccttaagagagatatattaaatcccacctatagtgatctgaacagtattatatctcggtatcaatacaattgaaaggagagtaggtcattacccgttaactcaaagggccgaacctatataaaatctttgtgttcttttagtttatagttgtaatcgtgtaacacgtggcaatcatcaattttaattcgactctgctatcggttggccaatttctgtatcaataatagtatttaactatttagttttattagataaaacaatattaattaattaaatataatattattgttaaataatattaaagagagaaatatattattttaaagaaaataatatttattttaattcttgtgaaataagagattaatgagaattaatcgattattgtttattggtagaataaataataaatcttatttatgacagaattgaaaaattaattttagagcttagaatatggcccacacgtgtaggcccattctacacatgtagggtgaca

SEQ ID NO: 352242 - DNA, 696 bp, Cannabis indica
ttttcccattattttattttttaatccatataattagatcctaagccctagttgaaatactataaaaggaacacaatgctctcatttcatccaacaactcaattcaaccaacctaaacctagtttttattctctcacaactagtagatgagagactccttttcatagtgatttttttctcttgctgttcttcatcatattcgagccatagtgatacagtaccattataacgccctaaaaattaggcacgctacaccaaccgatcaagaaaccctaatcccctaaatcaggattactagaaagataagcgcgggaaatttaaactttatttgaaacagaatgaaaattaaacttgtaacaacttgaaactttagaaccaaaagatacatgtttcgggatctcgtaaatgttttcataaaaatattacaagctcattttacgagctgacctaagcgacaaaattagagttacaaaatacatcaccagtagaccccaacccacttggtctagtgtggcccgaacatgtacaagcattgccaaggtttcgcactcatggaatcacagactgatttaccctttcctgcagagtagagcacctgtgagccaagcccagcaagacagtataaataaacatgtacacaataaatatataacacataattaatggtgccaccacactatttgtctatttaatata

SEQ ID NO: 352243 - DNA, 636 bp, Cannabis indica
gacgataacattgtagtgaataccaaaatgatcgcaaagtgagttctctaagattacatgaaaagcaaaaacatgcacggcaaaaaattgctacttttagtgacaactttttagtcataatataattttttatgattaaatgtgacttttagtcacaataaaatattacttgtgactaaaacatagtatttagttacaaattgtcactaatttagttttagtcataataaattgtaatttttgtgactaatacctttattcacggaccttttagtcacaataggaatagtaatttataattagttacaatttttttacttttagtcacaaatttaatcgttcctatattctttttttcttgttgtgtaaaattttttgtagtgatgatctaagtctagattctagatgaatgaaaatcgattacattgatttatttcatagccaaatgagatctttaagatcaagctataaagggtgaaatcaataacaaaaagtgcacaccgatcacatgcaatatggatataagcagctgcaacttgtattttcgcctttgtgagaaagattcaccatggagcttatgatctcagctatggctcagacttgagcctcttctttgaaaactgttgggttttatgc

SEQ ID NO: 352244 - DNA, 934 bp, Cannabis indica
ataaggagctaagtgttttaaggataaaatacatcgaatggtaaatggtaaatttatccatactcgatgtaaaccgtctataaaggatcactaattattttagattaaaacattggataattcataccatatctatatttggtatatagagtgttctatgtaatcaagagtacaatttcgaatctatagtagagttaggagaaattaataagctaagaaatttgcttggtaaattttagatctacttattgggagattagttacatatgcacatggtccccacattgtctgggataatactgtcttgtaaactggattaatttaattaataagtcaattagaattcaaaagtaaattttctcttgcgtgagaattttcaccaagtttgggccattttgagaataaaagagaaatagaggtttatttgttcattaagagactttgtgggtctaattaataaatatatttaaattacatttttatttgataattattaaattaaaattggtattaaaataattagatgtgataaatggtgaaattagaaaatacatatttgtttcgttaaatcgaaatacagtggcaaaaatcaaaatccatgggccatcaatggtgatttcaaccgaagcttggattttaggcccaatactctttattttagcccatctcatctaatcttatcctagtgcgaaagctatataaaaaaaagagatgagagagatttgtcaattaagtcatttatgtgattcaaccctaaatctgataagaaaagttctcttcttcttctctttaattttcaaaattattatatctttttctctttctctattttgtgttccaaaagtgagttgagtaccagcccatactattgaagatggtacgcaggccttttgtggaagatcgtgtagaatttgttacatgtcacatattcaag

SEQ ID NO: 352245 - DNA, 697 bp, Cannabis indica
cacgctatgcgtgtcactaaagcaacatgttcacgtggctttagtgacacacataatgtgttggcaaagggttttgctcacacgcgtggcacgtctctataggtcattggtttttttttttttttttataaaattataaattttgggttttagtatttagtgacactccatagttttagtgacccacattttgggtgataaacactaaatatttagagtcatttagtgtgtgtcactaaaaactactcttaactttttagtgacccacacttttatgtgtgtcactatatagtgtcactaaaagcttaatttgtagtagtgaccaagtgtgagagatcaatccaatgcaaccattaatgcaacagcttctgctagtatgactgaaaaattccctacaataaccaacaagcagaggataagcctaacacaaatactccataaaaataaactacctccaaaactatacttacaagaaaccgtaacctaccatccagagaaaactacaacacttatcaaaaaattataattcctaacaataacgttacaagattaccttccataagagaacatgaatcacaatatctaaaaggtgaggatagtatcaacttcttaagattggacaaaacatacaccataaaggaaacactgttgctcaccctcataacaaaaaaatatcataaacaataaagaaaaaaaa

SEQ ID NO: 352246 - DNA, 744 bp, Cannabis indica
taccaaataaggatctacataggtacccaagaacattcctggtagtatctcgaactattgctctaattcctttagtattagaattaacatccagcgacgcatcaacatttagtttatacactcccaaaggcagcttaatccatcattctggagacatgcatgtcgaccccttagtcataatattgtgtctcgaacattgactatattcaataaataacttaaagatttgtgagaccacaacatcaggagggttggctttgcgacaatggacaatttggtttctttcgccccaaatataccaagccacaataaggaacaattcgtagtcacatcttgatagtacctccgaagccttcaaaactatttgtttgaatgagatatccattgagagattatacaatagagtaacacgtaattccttccaaactttcttaaaaccatgacataggaacatagcatgactgttttaatccacactataaccacataaaggacaattagtatgatcgaccattttccttttttggagccccacatacgtatggagtgcatcatgaaatccacgccaaacaaaggttaaaacttctttggcaaagaagttttccaaaactctttccaccatatagagaaccaactcttaaaaggggaaggattaaaatgagccaactgtgttgccacaaagtatccacttttcacaaaataattaccctcaactgtatagtgccatatgttgggttttgtgcc

SEQ ID NO: 352247 - DNA, 1191 bp, Cannabis indica
taatcatgattattgtgttgtctacacattagaaaataatcgtgatcatcagctttgaacttttagtcccacgatttactaatgcacaggacttacactagtgtgataactagcgatattgcttactcacacttagataagtggaatgccttttctaaggtattagtgaagttagctaagatcagatgcattggttatacattggatttgactgatatttatagtagaagagatatcgtaaacttatcataatatcttttctaggtaaatctctaatatttgatcttagatcaatgatcttaatcctgagataattaggttatggcatagctttgttattcttggtcttttatttgtttgttcgaagcctacctataggtttcactcaataccctacctataggtttcactcaatacttacatcttgggagtagggtagtatatttaagtcgtagcgctaatcatagacatagaatctatagctgctataactggatagacgggaaatgatgtcttcttagagcttggctaatagacataaattgaagagctcttattttggcaattatattagtttcatgaaatatcatttataggaagccaagtgttttaagaataaaatacattgaaggataacacggtaattttagtccctattcaatgtagacaatctataaaggatcgttgattatttagattgaaaaacactggacaattagtagcatgtctattcttgtagaatagagcattctatgtaatcaagagtgcaatttgtaatctatagtggaatcaggaggaattaataagatagagaatctacttggtatattctagaactacttattgggagcttgattatataggcccattgtaacgccataatctatagggacgccacgtgtgtgattttataaactagtttaatactaaaagattaattaattattaaaaaacttgataatattaaaaatttgaccaaaataaaacactaaaaatggacattataacggcaaaaaatgtgttccaagattccctgtgataaaaatttttgctgaagaaatatatacgacaaccatttaaacataaaatcaaagtacatagtagatacagccagcccaaaacaactcctggaaactcggcgcgtaggtcgacgaggtcaatatgtacattgctggagaagactgtcacttc

SEQ ID NO: 352248 - DNA, 2273 bp, Cannabis indica
ttcgaaattatcctttatttttccttagctttttcatttagaattttcttagaaagtctatcattggataaatagtttataaatcgtttgcttatgatgtcattctatttcctcttatgaaattgaatggcgcatgttaatgcagattttcgttaactaaattaaaacctatttcgtgatggatttgcacaaaaataatagtagtaaaaggaaaagaaataacacaagtttttttacgcagtttccagtaaaaattccgcatattccacgagtctatcttacatggtaatatcttccttttcacatatactcggctcatttagcatttccactagaaccaagtttagttcattcaagtcattctgcgaggccagttttgctaagggatcagcgttagagttttgttctcttgggatttgcttgattttgaaataatcgaacatttccaagttcttcagaactttctcttaatacttggccattttcaagcccttagcttggtattcctcgagaacctaatttactatcagttgtgaatcactatgacatatgagatttttcaccttcaatgctttggctatccttaaaccagtgatcaaggtatcatattcagcctctttgcgtttaattgaaatcttaaggcataatgaaacttaaggccttctagcaaaattaatatcacccttacacccaagccctgctcgttggatgcaccatccacgaataatatccaagtatccgcgtctcactgaacaagtgagtttttctctggagttattccttctatcaggcaatctgccaaggcttggcccttaatggatgttcgtgggtgataacttatgtcaaactgccccagttcaattgaccatttcatcaatcttccagaagcatcttgttttgataaaacttgtctcaggggttgatcagctaacaccttaataggatgtgcctggaggtaaggccgtagcttgcgtgatgcatggattaggcataaggcaagttttttaagagggggatacctcgattcttcccccagttacctcttactagcatagtaaataggttgctagtgctttccctcttcttgcactattgctgcactaattgcactttccgagaaagccatgtagaagagtagtgtctctccagttactagttttgccaaaactagaggtgttgaaaaatgccttatatgctcttaacgacctcctcgcactcttctgtccatttgaatttcttgttgcctcgcaatacaattaaaaattgtagacacttgtcagtttacttcgaaatgaatctgttaagtgccgccattcttcctgttaaggcatgaacttcctttggtttggtaggtgatggaatatttatcaaagccttaattttcatagggttttcttcattgcccctcacgttgactataaatcccaaaaattttcccaaggaaactccaaaggaacattttttcaggttaagcttcatattgtactttcttaatatttcaacgcactccgcaaggtctgtagtatgacttccactctttaccgacctcaccaatatatcgtcaacatagacttccatgttctgtataatttgtttcgcaaacatttcattcacaagtcgttgatatggttccccaacatttttcaatcccaatggcatgactttatagcaataaagtcccatgttggttacgaagcttgtatgttccttatctgggacatgcatttttatctggttatatctagagtatgcatccatgaatgacataagctcgtgtccagcagttgcatccaccaactagtcaatccttggtagtggaaagccatcctttggacacgccttattcaaatcaaagaagactatacaagttctccaagttccatttggctttgggacgagaacaggattggatatccacaagggataaaatgcctcacgtataaagtcgttggccaacaagttatccacttcctgcttgagtgccccttgtctctcgaaattcaagggccacctcttctgtcttttggctgggtaatttatatcgatatttaagtggtctcagataatcttagggttgatccctatcatatctccattgctccaggcaaattgatcctagttcaccctcaaaaagttaattagctgctattttaattgttcatccaggctcttcccaatgtatacacactttgtgggatttcttggacctagaacgacctcttccagctcctcaattggtttcaataaatttctttcatcttgaatccgaggat

SEQ ID NO: 352249 - DNA, 481 bp, Cannabis indica
tcattattcaagctttcaaattgtattattagttctttttttaaccttcctttattttttttcaaaagttttttttagtcacaccatttattatttagactcaaaaattacactataacaatctatttttcaaagtaatcattttaacatatgggaagcatataattttttgccgccacaaaaaaaatttacttaaattaaaaataacactaagatatcttaaacaataaaatcattaaatttaattaacataatttaacttaaaaatttaaaaagtaaaattatgattttaaaattaaaaattaactttttattgtctcagaagaacgaccaatattaaaagtaactattttgtttctttattatattttgtaacaaaaagtaataaaatcttagagttaataaaattaaacatatcaagtaacatcataaattgctataatttttttttgttgtgctgtatttaaaagttacgatatag

SEQ ID NO: 352250 - DNA, 869 bp, Cannabis indica
aggattcgtctccctattctctcatcttgattaatattcacttgtttctttaagtttcttgaatttctttcttcctttttcaatcataaatacttttgatttgccaaatagaattataagtatagtttagtagtaattaatccaattccctgtggttcgacctcacctgtgtgagtttactacttgattgcgtatacttgcgtagtgattataaattttagcaacattaaacaacgacaaagacattagtatgacaggtaggagtgttcatcaaaccgttcacgcagtacaaactgcctgtaccgcaccataccgcataaaaaatttggtttgaaatcctttgcagtgcgattatggtttgtatttttgtcaaaccgcacggtgcgatgcgggtgtggttttaaatttaataattacggtttaaaccgcaccacactaaatattataaagttaccaatttgtacaatacagtttttattttattttttcatatgatgataaatatatgtaatatatgtgtatattaacatttattattttagaaacaattgaatataataacataatgctttgtatatatgttatgatattttattagattgattttaaattttaaattattatgtttgataataattatagtgtaaatcgctcaaaatacactataccacattacattttcgtagtgtggtttttgcaaatttaggatcttgcagtgcagttgcgatttgagaaattgtaaaaaccgcatatgcagttttgtttgaaaaaatattacaatacgcatcacccgcaccgcgaatacccctaatgttatgtgagacatcaaaattgttttgcaaggaaagtagtgagaatgattactttat

SEQ ID NO: 352251 - DNA, 865 bp, Cannabis indica
attcaaaggactctctaccccaataatactcctcgcatcgatcgctatcaacgacatctagatcaaacctagaaacttttttatccggagtattgctaagaaggaaacattggatgaaatacaaaacagatagtttcaaacctaggggctcatcctgtccccacctacttcccaagaaagcatcctctatagctttatgatcaatggtttttacgccacaaaaacaaacctcaattaattggtttgattcttgggaaaacaacagtttttttacaatcaccaaagcaatcaagactagtgatcaagtaatactcctctgcactgaaccgtatacaacgaccaacagtcttagcccaaaattcttttggattgggctggtatacttccctcaaaagtaggctatggacaatttatgggtgaaaaacaaagtcaggtatatccaaaaaatgaccaaactgggtgtcacggaacatagataacaaattgatagacaaagtattcttaatgttattaataacagagaaattactcatagatacacacttggatctgtaaaaatcattggaactgtatttgttaacctaaacctgcattttacaaagaaagcaaatataataaaaaacatatgcaagtagcaaaaccataataaaactactaaacaactgtaaacaaactaaaatacagaaaaaactctttgaacatcaacatccatgataaatcaaattgttacccattgatgatataaaaatggacaggaaacaactagacaaaaatatattcccaaaaaaatacatacagaacgtgtttacactattaaaaaactatgaaaaaactaatacaaactgagaatagatcaaataaagaa

SEQ ID NO: 352252 - DNA, 1206 bp, Cannabis indica
atgagtcttagatgtgtgtaagtttatttgataatttttttttcgatggaggctaaaattgattatatggttgagagattagactcatttacaaaaactctagaaaacctccaaatacaaagtattcacaataagcaattattaaaattgttattggaacgaatagaaatgataaaactaaagtagatgcgaatgatgttgaagcaagaaaatctcaaggagataaatagaatatggaatatcaagaagttaaatttatccacattaaataatgtatagttttgaaaatttcaaattcactaaatctttgaagagctgagagaatttctttttagaatttatctttgtaaagatccttggtaagttttattctctttgtttatttttattttaatatttgctgttattgttattaccacaattaaatttgagtttatatatattttatagggaggaaatatttagtagtcatcatatatttttaaagcgtttggatatgtagttcttagctccgggaagaaaatttgaaactagaattttagaaattattttcagtatatagatcaaatggttgtttaaaatattttaagagaatgaatacaaaacaaagattatatagattaaaggcgtccaccataataacattttaatggagtttgcctcaaaaaaagtataatgtttttagtagtcaatatggatatataatagagattttatggatgagtttatgtgagtacataaattaaaattttttgacatgtggaataacacatcataaggtattgtattgtctattagtaaaattttaaaaaatttaggtcattatgaaaattttaaaaaaatttaagcaattattctaataaactaattttgatttctgttctttattctttattctttattttattttaaaaaatacaattacctacaacatgttaattcttacttttatttttttttaataaaataatcattctttccttctatatataaataatttttcaaatatatatatatgaaatacttctaaatgggtattatctattgatgagtactaaacaaatttaactataaatattaattttaaaaatattaaaccattaaattttggtccgatagcgaataataaaagagaaatttgaatttctatgcttaatttagcgacttaattaaagaaaatatcaaaaaatactttttttttacact

SEQ ID NO: 352253 - DNA, 825 bp, Cannabis indica
aacattgggtacttatgccactaaacaaaatcattgggtttatgccgcttacaaatcgaaaatttggggtacctatgccactatttaccctaattaaaacaatatgtcgccaaagtgacctcttttgtgtagattaatttatttaaatattaggatggttgtgtgtttgtaattgatgcttatatgactagcccaaaggtaagtgaatattttgctagatttcaaacatacctgtggcaataaatgtgtgacaattataaggtattttgtgtgagcaatacgttagtccaaagattaatctattgtttgacacagttttattgtcaatatttgattgctacaccaagagtaccgcttacagttaatattactgtccaaagacttgatattaatgtgtgtttggtatcttggatgggattaaccaatttttgaatttattgtttaattatgcatattaatgtgagcttgttttatttgttctatattcagctagttcatcttctgctgcctcaatatctgctaacattaattctattcctatgcttaatgggaccaatttcaaggattggaaaaggaacctacttatagttctgggatgtatggatttagaccatgcactaaggaatgaacaacctgcacctctcactaaggaaagttcccatgatgataaaagggatttgagaggtgggatcgttcaaatcgcatgagtctaatgattatgaaacacagcattccagaagccttttggggcacagaatccgaaggggttactatggctaagaatttccttgaacaaattgaggaacgttttgctaaaaacgataa

SEQ ID NO: 352254 - DNA, 554 bp, Cannabis indica
aaaatgaataaaatatattaaaagatagaatataataaatagggatgttcattcaatccaatctatactattttgctcataatgtattcgattcgcactaagtgcaaatttcatattttggatccaatttaatctgcacaatagctcaaatctattctaattcaatccgtaaaagtgtagattgaatcaattattttagattggttacttttgaatattaaattatttgatattatatataaaaaaaatatttttcttcacttaactaataaaaataaaacaaagtattgttgttttatatctctaacaacaaattaaaataaataaaataacaaaatttgaaagcagaaaaaataattgtattataagaaaatatgtaattttattatattttatgtaaaaaaagattaatataagaatatagaatatatatttgatctattaagttttgaattatatttgtattatatgtgttaggtttttaaattactatatttttttttcataaaatatatgttatattaattttttaaaaaaattatataaatatgtgt

SEQ ID NO: 352255 - DNA, 525 bp, Cannabis indica
tggtaaaataattctaacagaactccccaagcactttaagatgcctgaaatgacaacttacaccggagattcggaccccagtgaccatttgtcccggtttaaccgagtgatgactgtcatgagggtcagcaatgacgcaaattgtttatgctttccactaacgctaagcggttctgctgaggaatggttcaaaaagttggagccaggatcattggactgctggagcaagttacaactcagttttcgaagacaatttgtcgcggcaagaaaaattaaccttgaagtcagcaccctgactaatataaaacaattgcctacagaaactctaaagaacttcataaagagatccaaagaggaggcttcaaagaccaataaggtgaatgacggacaacagctagccctccttcaggctggtatccgcacggggacccctttctggaatgaactacaacaagtgggagcagctaacctccaagactttcagaaaagggtccaaaagtacatcaacttggaagaagcccaaat

SEQ ID NO: 352256 - DNA, 715 bp, Cannabis indica
aatatacacgtggcacaattttattggccgacataaataattatattaaaaaaattaaaaaattaaattaaattaatttaaaattaaaaaaatatataaaaattaaataatttttcttttttttttctttcttttttcctttctttctttttctttttctttctttttttttttcttttctttctttttcttttcgtctgaaacatctctctcgctctctcgatctcctcggcaaccccatacaaccgtacactggatctctcagcctaaggtttgcttcatataccaaactattagtcgcatcagctctctggctttctgccaattcctacatatatatataattaattattacttataagaccacaaaaaaatcattacgaaattaaattaattaccataagcatcttggagatgttgcttgcaccaaaaactttgtggacagcggcaaatttttgaggttctcgaggtgaaaagtagggagaaaaaggacatttctcggcacatcttcttctcaaaagcttacaagcagcacaaggtgttatggtgttaaggtcccagcagctgctgtaaggcaggggaaaaggaccttgtagaggacgagaatggtgagggagaggaaggccaaggcggtgacgcaggggaaaagataggatggtgagcggtgcatgattcgggcggtgggtactagtccctttgcaagcggtgatttttt

SEQ ID NO: 352257 - DNA, 768 bp, Cannabis indica
tgtcacaaacatatttgaggagtcaaaattagatcagagcacttttaattttgagcacccagagcaccaagtgcctcaagcacccaacgtccaggttgacatattgtcaacctggggcacttccaaccaccataataaagaaatatctcaataattttccttgtcttcatccagaacgacgaaaaaagtgcttttgggggagaaatagatcaacctagatgttagaatgggaactcaacgcctaggttgacattttttcaacctgggaaacttccatcagtaattccaacaaagtcttccgggcatattctccgtttttatcaaatattaagataaaaatattttttagaattcaacagagtcatctggtagccaaaaactagactcagcacccaggttaacacttggcactgggcccagcgcccaggttgaattttgtcagcttgggctatttccattcattcttccaaaaaagtgttccaagcactatttccatcattagaaatgtaacatccccacttcaagcttccattgagcccttacacccacggaaaaatagctcttatacatgaggacgtcactttggctgcttcctggaccgatgactaaccctacaaaccaacacgagtgtttctagcgtgctttgtcctcactcgcatgcttcttgggaaaactttccaagtggtcaaccatcctaaaattactccaggtcaagcacgcttaactgtggagttctttcgtgatgggctactgaaaaataagatgcac

SEQ ID NO: 352258 - DNA, 948 bp, Cannabis indica
gcaatggctcactataatagagtgaattttggaatttcatggggggtagttggaaatgattgggtgacctgtgctactttttcagttccaagaagacgccctagtgttgtgggaatcgatgtccctcagccgagatgtcactgttatgacctgggaagaattttgagagttattcaatgccaagtattcactgagttggtgacaaagtgagggtatgtcatttactgagtatacaacaaagtttgactgtctggccaagctcgccttggttattgtgcctatagactttagcaagaaagaaaaatatctagccgaattgaatttgaaaattagacatgatctggtgattactaccaatgaggcaacatcatatgcggagatggttgagaaggctctacgagcagaggggacggttaaatttcttcaagagccccatgttactcctagtgttggtgggaaccccactcttcctactcctgtttatggtagcgatggtggtgattccaccactgatctgaaaagaaagttacctcggcatctggtggctcggggcagaacaagcggttccgtgggaactaaggcagaggtggacgctagggttactcttaccctgagtgcccacattgtaagaaacatcatcttagagagtccaaccggaagacatgctttcagtgcgtcatggtgggccatttcaagaaagattgcccttgggcaaagaaagaagagcatacgccagctgcaaaacccgtacctgctcgagtgtttgtcatcactcaagctgatgctacagccaatcctactgtggtgacaggtttgtttcctgtcaacaactccttttatactgtgttatttgatttgggagctacacactcatatgtggctacacgggtaattgatcttttgggtaggccttatgattttcttgaaagagggtttggaaccctaatg

SEQ ID NO: 352259 - DNA, 959 bp, Cannabis indica
gtaagccctagaagaacccttctatagtttttgagttttgcttgatttgagtttatgattttgagaattagtggttgttagggtttgggatgtttaggattcaaatttaagggtttatttgagttgattttaacttctactagatgatttagtggtgttgtgttggatttatgcaagtttgagctatgaactcaaagcttcgatctttaatggcaagttgagtttcatttgatttttctgtgaaatattggctgtaacatattgtatataccctaattaggtactctggaaggtttggtgacgtttggtggagttttgagcaagaaatgaaatttcttgggtggcctggtgcaaaccgagtaaccggtttttcacgtacgtgtaaaactggctagccggtttttgcaaggttcctcgagcctttcatttcctcaattctcgttctttttcatgtcgtggttgagtgtttccctatttctagagttagattaacccctagaaagtataacagaacctagggttacgagttcgggtttcctgggattaggattttaagcatgaaacttacccggtttcattatgtgattagggcatccatctagcatgagactttccgttcaggtcggccagcacacttgaattcgaaaagaaggtaagaactgaatataatgtgtgatatgaatatctgagtgtatgtatatgttatgtgtatatgcatgcttaaagtgttagttgcactaccaacacttgtacagttaaggtatagagtgtattggtatagtgaatgttatctaagagtaccgtgataccagcataagtttggagaggcactgagtgtgtgtggtacatcactcagaggtactcagggtatgaaacaaaccctaccaacactcgtacagagaggtacgtagtgtatgtggtatagaggctataccgtagtatagaacgttcttactcat

SEQ ID NO: 352260 - DNA, 611 bp, Cannabis indica
aattaatacttctattaaaatacaaaaaaaaacatttatcactaattctattattatcttataattatctaaaacaataaaaaagaatgtaaatagtttaatattaatataacgttatggtctataactatatatattaacaaaatattaaaaaatagtgtatgtatagagatataaattttagattatgctatattgtattttaaatttagtataatttttgtaatgtatcaattttggcacaacttttaaaatagtgttggagtaagttttttgcaagaaaagctatactcataatctatttgatgcatcaccaagatacacttatgcaactctttaatggatgatgtatgatcattatcatgtgagtgccacactaataaccatatgataattatattttgttctgaatatattaagtaaagtttattttactattaagtacattacatgacgcatgctatactgaattaaaactcaaccttggcagaaagtggagttggagtcagattgcttagtagcagtacaagctattcgaaattcattacctatgttttcttcttttgaggttattatagaagcttatcgtaaacttcttccatctttacaca

SEQ ID NO: 352261 - DNA, 636 bp, Cannabis indica
atatcaacaaggtgcatcttgttttccggtagcccattatgaaagaactccacagttaagcttgcttgacttggagcaattttaggatgggtgacctcttgggaagttttcccaagaagcgtgcgagtgaggacaaagcacgctggaaacactcgtgttggtctgtaggatcagtcgtcaatccataaagcagccagagtggcgtactcgtgtataagagccattattctgtgggtgtaaggacccaatggaggcttgaagcggggacgttacaggtgagaatacctcattgtaatctattccttctttctgagcataaccttttgctaccagtctagctttgtatcagatgttgtctttacttggaactctttccttcttagaacagacccatttgcagccaataaccttctttcctttatgaggtcaaaccaacacccatgtctgattctggtgtagagacttcatctctccatccattgccaactttcatttcttaccaccaacactctgcacaacttctttgtaaatgcatggggcgtcatcatcaattatttaaagtgcaaatgctaccatatctatgtatctggtaggccttttaatctcccttctcagtcgagtagctgtaatagattc

SEQ ID NO: 352262 - DNA, 629 bp, Cannabis indica
ttcttcttttttaccattggaataatctcagcccatatatataaaaatgaaagatttttttaattagatagaaaaaattaagcataaaaattcaaaattttctaattttactcattcatgggtaatacttattaaaagtgcacccttatatatacatatctctcttaaattaaatatggatatacaatagaaaatattattcttttaatattaatacaatttaaatttaaattcactgaacatctaaaaaaaaatatatttctattattatttgttttaaaactctttgcacatattcaaaaaatatctttttactattatttttttatatatttttaaaaacaatatatttctattattattttttttaactcactgcatatatatcgaaaataatatttttctattaatgtttttttaaaagaataaaatagataaagtgtttatgatatgtgacttcgttacctattgttgttacaacaaaaaaattaatttttctaaaactaaaaataaaaatacacataatcaaaataaaaaaaacctaagaatatataactaattataaatgctaacattacttagtatatatatatttatagagatttatggctgttgcccctaattttgcc

SEQ ID NO: 352263 - DNA, 888 bp, Cannabis indica
aaggaaactctaaggaagatgggctcgaaaaggccaaatttaggccttgtatggtgaatctttgcgaattcaccggagacaacattgttagtcttggcataatcgagatcgcattaactttgggtaaagcacccctatctgccactgttatgcaagattttctagttgtcgacctgccatcggcttaccacatattgttgggtcgtccatcactcatcaaactaggggcagtcaattcgatcaagcacttatccttgaaattccaaacaccaaaaggcgtgggagtggtgcgtgacgaccagatgatggctcgcgattgctatgcatagagttgcagcataggaaagctagtcatcacttgatggcgatcttggcagaagaaaatgaagaaaaagacgaagatcttgaccccagagttcaagatgagaaaaacctattaaaaccaattgaggaattggaagaggttattctcgacccaggaaatcccacaaagtgtgtatacattgaaaagaacctggacgagcagctcaaatagcagctaataagttttttgaaggcaaaccaggatcaattcacctggagtcatggagatatgatagggatcgaccctaatattatctgccatcatttaaatgttgatccaagctacccagcaaagaggcagaaaaggtgacccttggattctgagagacaaggggcactaaaaaaggaagtgggtaagttgttggtcaactttatacgcaaggtgttttatccctcgtggatagccaatcctgttctcgtcccgaagcctaacggaacttggaaaacttgtattgatttctttgattcgaataaggcatgcccaaaagattgttttccactactcaagatcgaccagttagtgga

SEQ ID NO: 352264 - DNA, 551 bp, Cannabis indica
aaaaagatttgaagtgagtgatgacttgctggttattgctagccacaattatgtcatcaacgtatatgaggacagcaaatatcaatgtagatgtgtttttgataaacaatgagttgtcagaaagagattgatgaaagccagccgatttgagagtggtacttaacttttcataccattgccgagaagcttgtttaaggccatatatactcttgttgagtttacaaacagagtttggaggggccttgtatccgggggggattttcatgtagacttcttcatggagatctccatgaaggaatgcattgttgatgtcaatttggtggacatcccaattatacattgcagctagtgcaaggaagattttgagagtgttgaatttagccacgggggcataggtttgatcatagtctatgccttgttgttgattgaatcctttagctacaagacgtgctttgaaccgaacaatttcgccttgttcattgtattttattttatagacccatttgcatccaatggctttgtggccgggaggcaatttagtgacggtccaa

SEQ ID NO: 352265 - DNA, 890 bp, Cannabis indica
aggggcaactattaagtcattctcctaagtagaggatgaaagagaaagaccgtctacacatagcttagagaaagaccgactacacgtagatgagaaagaccgtctgcacgtagagagccttgatctttgcacagaccctattctcctcatcatcagatcacatttcctgaagccgagatctctttcccaccttaggaaatttctcaacactagagagaggctaacgcaaagatctcttggcacaggttagggtcttggtttggctggattctgtgtagaaaccacgccaaatgccttcccagatgcacctaaaaccatgccaatcttcctttggaattcttcatcagcctgaggaggatctttgagatcgctcacaagatctataccctctgggatcacttgtgaggatcggccatggcaggctacggggttccccgggttttgattggtcggaagctcctcaaccctcgaatccatcatttccggctctggttgaggcttgaagtctgcaggaacaaatggaaaatggttggtgcatttgggtattatgagtctcgaaggataaacttctgaactcagaagagatattttggcaggaagaaagtaatctattctgaatatggatttcactaaagaagccagaggtttatgaaaaatgacaagcttgagcctcccttttatacacgaagttcagtgacaagaaagtcaaagattgagaaatctaatagttgggaatcatgcaaaatatgaataggctattcatattgatcatcgaaaccatacaatcgacagaatcaaaggaggcatcctttccaagaaaggattttggcaaaaatgccctccgtaattattaaaatgctctttttactaaaaaaaaactttttaagggg

SEQ ID NO: 352266 - DNA, 700 bp, Cannabis indica
aagaaatgtcgaaccaggaccctagtacaagactaggaccgtgaccaggactcggacccagacgtagaaccgagcacagacctagcctcagacccaaagtgagactagaactcacgcccggacacggtcgtgtacccagactggaactgagaccaggacatggacctaaatcttggacctgatcccaaacacagacttggacctagataaggatccggatacgaacatcgactcgaaccaagacccagactgggatcgaaatgctggacctagatctgtaccgagatcctgatctagacccaaacttggacccgcactggggaccccaacttggacctggacccatacctagacccagatcgggatctagacctagacacaaacccgaacacagactcggaccagaactcaaacccacacctagaataagaccctaagctagacctcgaccaggagctactgaaatccggaccggaacccaaactcagaccaggactcgaactgtgacccgaactcaaacccaaaatcgaactcataatcggaaacagaactagactcgaactaggactaggacaaggaccagaaacaaggacataaacccgaaccccaactaagatcaaaatccaaaaagagacctaagcccgaaccgagactaggactcgaaaccaaacctagactgggatccaaacccacacaataa

SEQ ID NO: 352267 - DNA, 1273 bp, Cannabis indica
aattaaaaaattattaaaaataaacaaatttattttacaaattaaaaaattcaaaataataacttttttccccaactcctctctttgttacaacaccatcacaaacaaatctaacaaaaaaagatagatggcaagcctaccaatggttcaaagggtcctaatcgaaccttccatagttcaacgatgcaagatgtagtcgtcctcatcgacgaagaccctcaaagacgacagtacaactgcctcgtctctagtttgccaaccccaatcgaagctctaaaggtttagacaaaatcttctttgtcgttcttcaaagaagatgagctgaggtgagagagagatttgaggaaaatgagctgggattcaggtcaccgtcggtggctcaccattaatggtagcaaggaaaggaaaaaggaccatgggggagagacgatgctggttctaggcaaagctacaacgatgcaagtaaatgaagatggatagacagaataaggcgaagctacgacgacggaaatggaagttgggttggtcctttagatcttagtttttttttctgtttgtttttttctcgtcttcttcaaacatggaaaatagaagcagacttttttgtcttttgagtttttatcttttttatttaataaagagttttttttaacttatgatctgcgaacaagtaaaaagaaagaaagaataaaacaaaaaataaattacttaactttttattttttgttatccctcaataatttaaggagaagggtgtggattcttcttttggatatcgaaaaggtcatcgagaatattggttattgtagctagagtcgtaaaaactagaagtggcaaaacgtgtcatcgtatcgtgttcgtgtcatattttatgtgacccacttctatattttgtgtcaagcgtgtcgacctatttttgactcatgtctaatatttttaaccctaacccgacccgtaaaaaactgtgtcgtgttcgtgtcgacctactgtgacctattttgctgttattgaagttagaattatagagaaaaataatagatttagattccataagaaaacttatatatatttatgtatatatatagtttgttaaatatataataaaaattaaaatatttttaatttcatgttaaaaaataaattaaaaatattaacttaactttgaatcattaaatatatatttttatatgattatattattatatataatttttattttattataatttaaaaaaaaaaatagtgtcaaacgtgtcaaattcgtgttaagcgg

SEQ ID NO: 352268 - DNA, 1141 bp, Cannabis indica
gccttcctgtacaagatcgcgactggcgattattgtatacgtctgccaagctgcgagaacacaagctgattctagagaacgcaagtcttcagagagagccggtgtacaaggaatcttctgagaagcaacaagagcgaatagataaacgcctctctaagcaaacttctcgaccatcatcaggtagcatatcgcatgcataactagtgcgttagaatctcattattggcactaatcattattttttgttgttgttgtcgcagaaatgattttcttgaagtccgcacccatccttaaccgcaagccaaaatctggaacagcggcaacttcccctatcgttcctcagaagaggaagagcgatgtggtggttacccctgtcgcggattcttccaagaggccaactaagggcgcacaagaaaaaaggaagaaggtcgtgattgacccagctatccgagcccgcaacatactgactctccaagagaagttcgtgggcgatgaattccagtcaaagatcaacaagactccttctgaggagctattgcctcgctctacggagttagcttcgcagttcattgccatgttctcaaaggcctttattactggatccaaggaggtcgaactcgtgaagagacagaacgttcagcttcaggaggacattaagaagctgaaacaagatgcgacttcgaaggataaagagctcgaggagcttcgcagggccaaggagcaagtcgagctcgaggctaagagtgcccaaacaaaattcgaggagatgttttgcgatttggaggccgagaaggagaatgggaagaagcagtatgactaggcggtctcggactacatatacactactctctccaagattccggactttgatttttcaatcctcggagcagaagccgctgaaatggctgaggcttttcgcaccatgtcgcccacatagactcaaggtggtggagggaatctgtttcccaaggaggctgaggctgcggatgtcgaggaagttgagaacgaagccatcagcaaagtcggggatggatctgcccctactgctccaaatgcctgacttttcctttaatatttacttgtgttaaaatctatctcttttttttatatctatgagatacaagggtactcgcgccttgta

SEQ ID NO: 352269 - DNA, 500 bp, Cannabis indica
aaggtgtttttaagtctatcacattgtttgggcttctacttatgaggtatgttacggttgctaaagcttcccccaaaatggtttttctaacctagaactgaatggtaaacatctaactttgttcaacaaggttcggttcatcctttcaacaaccccattttgctctggggtcttcactatggttctatgcctagtgattccaaattcttgacacatcttttcaaatttggagttaataaactctaacctattatcagttctaagattcttaattttgagttcaatttggttttccatctgagttaccaatttctaaattgttccaagtactcatttttggttgatagtaaataggtccaaatacacctactgtaatcatcaacgattgaaataaaatattgcttaccggagtgagtaggcaccttgtatggccccgaaagattagcaggcacatattcgagtatctttttagttgtgtgccttgctggagtgaacttcag

SEQ ID NO: 352270 - DNA, 1141 bp, Cannabis indica
gttttgtggaggcgaacactaaattgactaggctttgcttcaactcttgtacgaggagaggatcaacctcatcttcgtgccagtccatcctcttcgagtgacggactttctaactcgagctttgaagattgggaagtgagtagtgatcattctcctactccagaacccatacgcaacatcactcttacaccgagcagatcccaggagaagggtacggccgcttcatttgggaatgtaagaagggttggaggcattatcttccgactaactggacatatattgtctggccaggtgttgctgacatccttcctgttggccgtcaaagttttggtaacttcggcatcccagtagttgtccctactgttaatgttgcaagacacacacattagtatccatccaggagaaggaagatggctcgcacaaagcaaactacgcggaaagtcaatgcatctgaccctcacgtggcttagctcgccacgttaccaagggctgagcaagatctgccagctatggaggaggacgatcctgagggggacattgaggtccaggagatagaggaacaggacgacgtccgtcctgatatcccttccgaagctgaggaggaaggagtggtcgaggctttaaattttggacggtataatgaggctggggagtcagtgtccgcgtacggtgatgccttggtcgagggggaggactatctcaccgaggagcttactgaggcagttccccacaggaggcaaagtgccttaggtgccagatgggtgagccctccgtccaaaataagtgaggcacgtatgagggcctaaggctgcgtacttgtgcggattggagtgttacgtcccttctttgaatcaccagggaacaaacccacagaatggtttttgtgcttggtcaagtgctcacactaagcaaggggcgatggtgcctttgcactcgtacttcaagagggtggaatattattttcacctttgtctgacctagttcattccaaagggcattaagtatttgtcggccatgtttgtcctctacgccattgaaggatggggtgtgtcgtgtccacacgaggtcaattggttttttgacttgaagtctacccctaagcagagcaggtcagggtacttctattgggttttatgcccta

SEQ ID NO: 352271 - DNA, 613 bp, Cannabis indica
agtataaatgaaaagtataaacattaaaaaagataaaattgccgtgtggcaatataaatgtaaaaaatatatttcttttgtcattttgtgtaaaaaaaccctttatattacatatgtttcattgtatgttaaaagtcaatactgtataactaacttgggtgtcatggtattgtaatagtaaattatcttaggaaaatatggttacttggaagcaaagggagactattttgcaacaagatgtgtgatttttctttttattattacttgtttattttattaattgtttgtgaattgctgtacttggcggtgtttttgttctatcagtaactggagttcttggtttactacagcctagtcgatttcgggaaattgacattatttttaattgcattttaatcttatttcaattttccttttgggaaattataaataaaacaaaacgaacaagttacataatccattatttaggcatattggtacattgtatttaacagttttcatatagtacatttaacaaatagactatagtacatataatgaaatgatgttatatatgaagagatgcttattagaatatttttatttaaggaaatgattttctatttaaggaaat

SEQ ID NO: 352272 - DNA, 830 bp, Cannabis indica
caaagttcagggaaaaaaaaatcttaattagccttctgtttatcattggggtacttataagctcatgatggtggtaataggccaccatgtattgtcgtgtttgattacaccatacgactttaggcataattgcctacttatgatgagttcgaggctctctataggtgttttgtgggatgtgattcatttattatttatgacttgacgactcatttatgcagctgctgattgatgtttggggactcatagaatttggaaattataggcttaaacccttaaacacgttagtcagagtaaggcgtctgatgttctttcccatgctgcattaaatgcgtatatatacattgtattggttgtcactaaaagtagttttttttgtagtcacaatataattttcttgtaactaaatgtgacttttagtcacaatgaaaagttacttgcaactaaaacatagtacttagatagaagttctcaataatttagttttagtcacaataagtattatgattaaaaaatacatttagctatacaagaaattgtgatttttatgactaacacttttaattagctatagacttttttagtcacaacatatataggaagggaaatttcatttttaatgcttaaaaaaataccctctaacaaaatttagactcctaattaatttatacaattaaatgctattattttcaatttttacccaaactaccctccctttcattttccttctctctctctgtctctttctcttcctcactctctcttcttcttcctcgcaccaccgagaccaaccagacccaggcaccaagaccacccaaccaccactaccg

SEQ ID NO: 352273 - DNA, 790 bp, Cannabis indica
tcattgatatcagggacacacactcgtgctttaaacaacaacattccactgtcagaagctgaaaagtccttagctttgcccgctaagacatcttctcgaatcttaaccaattcaggatcttctaattgagccactctgattctttccaacaagtctgactgaagtgttagattatacaatttctcagtcaccaactcaatgtttgccatagtcatctctgaggctaactgaggagaaatcatgaccatgttggatatctgatcaggtccctttcggcttaaggcatctgccacaacatttgcctttccaggatgatacaggatttcacagtcatagtctttcaccaactccaaccaccttctttgtctcatgttcagatccttctgagtgaagaagtacttgagactcttgtggtcagtataaatctcacacctttctccatataagtagtgtcgccaaattttaagggcaaacaccactgctgcaagttccaggtcgtgagttgggtaacgctgctcgtaatctttcaattgtcgagaagcgtaggctatgactttatctgcttgcattaacacacagcctaaaccctgccttgatgcatcacaatacaccacaaacttttcttgatcagatggcaaggctagaacaggagctgtaatcaaccgttgcttcagctcttggaaacttttctcacatttatctgaccaaataaatcgctggttcttcctagttaactcggataacggcatcgcaattttggaaaatccttccacaaaacgccgataataac

SEQ ID NO: 352274 - DNA, 913 bp, Cannabis indica
gactgctacattcccgccacgacaatcgtgccacaaacccggataaggggatgtgcgcctgtttgggggctcacggccaccaaggggcgctgatgcccttgcataagtactttcgggatgtggcggactttttcgacctctgcccgacccagattactcccaagggcattaagtatttgtcagctctgttcttcctctacgcttcccatggatgggatgctccttctcccaacgaggtcgcttggttcttcgacctgaagtctacccccaagcaaggcaggtcggggtatttttacttctctcagccaggcttcaagtggttgagcgggacgaaccacaaggccatcagcaaaatagggcattttgttaatgagtacttcatggtgaaggatccgagcatcacccagactcagtttcagctgatcccgacatatcactgtcctcccctcactcttgctcttagggatagagctcaaaaacttgcccggttgccggtggaagacagggatatcatccagttgacttccaattagaatctggtgcagtacgggctttacccagaggacttttctcctaagtctgtgacggggaagaaggggaaatttgatgctgcccagcctgaacgagctaataaggaggatgagctcattcaacttaagcgtgaagctaagatgaagggaggtgctcgggaaaagcagtatgctcaggagcctatgaatcctgaagatgaagctgaggctgaggctgaggctgagcaagtgactctttgaagaggaagaagaaactcccgaccacgctcaggcctgttgaacatgccattcgcataagggagcccatttcacatgttcggccctctcatccctatgctggaaaaaggaaggctgttatgtctgagatatcaggtgatgatgga

SEQ ID NO: 352275 - DNA, 466 bp, Cannabis indica
taagtctctccccccaaactaaagatgcacattgtccccaatgcgtgaaaataaaccaggatgagagaaacttacctgagccccctagaaggggtttggcggaggtggctgatcataggagtagaagcggggtggcatggcaaaatagttaggatcgtccacaccaacattcatcctcgtgacaagtgtgttcaattgggccacctgctgctcatcaaaaacactccgttgggccatgtaattctgcatgtgcatgttttgctgaatcagataattcagctgatcgtgagtgtactgcatggctgggtcaagaggcccggcaagacgtggtggttcaatgtcttcatgctcctcttgttctcttgcaggaggatctctctgagctggcggttgaccataagggtgaggaggtttgagtcgaagaacagtggccaaggtaatactgcgttgtggcgctaccttggta

SEQ ID NO: 352276 - DNA, 770 bp, Cannabis indica
ttgttagttagttggatttaaccaagtgtaaagctttgaactcaaaactttggattttatggtaaaatgatgtttttgctgctgtgatcatcgtttatgttcgagtttggtttctggatgttacatatgttgttttaggttgattttagttggttgtagtggctggttgtggtgttagccaagctttaagctttgaagctcaaacttggagctcacatggtggattttgattctgtgtgtgtagggttgttttgtcacttggaatatgttcattatggtctaaatagcatgtctggagagttgggtttgatttggggttgaattgcatgagttgtgaatttttgaaaaattcctgcactaaaccggaattctggttcatggaggcctgtaggaaccggtctatcggttggcttaaaggaatttttcccaaaatcagaattccggttgggggaatcggtctaccggttggggaaaatttgggaaccctagttcttccgatttttgtgttatttaaggtattgccattgtaaagaccgcttagtttaatttggaaattagcagttaattatgtttaattatgaaaataatttatagatatttaaataattatttatgttgctattattgaattctgaaatgcattttatgtcatatagtgaatttcataactttgcatttccggtgcccggtaacatggaactcgctgtttggctcagtaaaatcacaacttagtatgttagtatattgggacggtttattagacattggga

SEQ ID NO: 352277 - DNA, 569 bp, Cannabis indica
gatcattgattatttagattaaagtaatggataattattagtgtatctatatttggaatatatagagcgttctatataattaagagtgcaattctgaatctataatggagttagaaaaaattaataagatagagaatttacttagtaaattctagaactacttattgtaagcttgattattaggttcatggtccccacactagttgagataatattagtttataaactcagttaattagtttcaattaatcaattagaattccaatttagactatgtcttatttataaatttttactaagcaatgacttaattgtgaagaaaaaatgttttagagtttatatgttaattaagagactttgtaaggtctaattaataaataagttaaatgataattttatttgataattaattataattattaaataaatggatttgacatttataggattgaaaattagaaatatggcataagtgaaagaaaagataaattgttaaataaaatgataaaattgtaactagtggggtccactaagtgaggccggccacttaagcttaatttagccattat

SEQ ID NO: 352278 - DNA, 1147 bp, Cannabis indica
tggtgttctctagccgagagggagttagggatggcggtttcttagtggccatagatctctactcgttcggaagtggggaagctactggttaggggcaggctttcatggagacgcctttggtgggagatcgatgggtttggggctctgtggtctacagcggtggggctccgatggggaacatcttccttgctcgaccgatgttgttggttttggggcttcgtggtctacaatggcagatgttcgttggaagctatggaatttgcagcagtgggtcttcgttggggactgtaacccagcttgctcaaccaacgtaactggttttggtcccctgccttttctattggttttggggacgagttgtggtggtttggcggcccgatgtcgatcctccttcgtcatcgaaagtttgttagtggccgcatgtttcttcatttctcgttgttgtggagtctttggttattgttttttatttttctattgattattttctttaaatcttcgactgtttttagtcttgatgttttattttggtttcttgcgttttcctttttggtccagttatggacattctcttgttagagatttaagggtttgtatccttgattttttttctttaccttccatctatagtggtatggtactttacaatgactttgactactatgaatgtaggtcagtctttaggccttgttgccgtttgctcgcctgtatatcgggattgatttgcttttgcttatcgttgagcagtgtaatggactttgtcttttgttcctttattgaatgaaatcattgatccttccctaaaaaaaattattcaaaatacatcattaaaactctactttcttcatttcacatcatacttttatatcctcatacaaaaataattatcaaaatctgaataaataaataaaatatgtttagagcaatgaatagtattctataaatgtagagcatgaatagtgtattttaaaaaatttaaaatgaagaaaaaatttagagtatctgctataacgtatttttagtacgattttttaaattttttaaaaattctatatttaagagaagctattgtaagtgctcttagaggatctctaatggtgacattctttaaaattgtcaaaaacctccatatcacttaaaaatatat

SEQ ID NO: 352279 - DNA, 463 bp, Cannabis indica
aatgagtaggtatcagattaatccaggaaaggaacattggacgaaaatcaagtgaatcttaagatcaagaagaggaactatatgttagtcaataagggtatatttagtactcataggctacaccaaattaaatttctagacttgccttagtgctagaatgtctgctgatgaggcccaactaaaaaggttgcgggaatgcatgaagtcgatgccataactagttgatagcccaggtggaggcattaacaaagctggtgactacacaagtcaaataagctcaagttgcctgcaagctatatggaggatctcatactacttatacctgccctatagatgtcgacagtttgacattgcataggctgattggtctgaaatccttcatgtctgtgccttcttgatctttggaatgagggtaatgatagtttaattaagaggagtagggtccgcaccatcatttaggaca

SEQ ID NO: 352280 - DNA, 663 bp, Cannabis indica
attgttttgtctctttaattttctttgtttttttttttttattttctttttgtattttaattgttgattctctttgttatatatgctgcatattgtatgcttaaatcaactctggtttttgagcaagcaaataaaaaattaaatgccaaaataaataatgaagttaaaagtttgactattaggtattgatataaaatttgtatgtttgagactggtttttaaatttagtattgtttgtaaaagtttagttattagacattgtatatttttcattatgttattgataaaactgttttttgacgtcttttaatgaaataatttgtttcttttaatattgatgaaagtgatttttaaagttagtattatttttagattataattttttttcattgtcttattgatgaaactattttttttattcttttaatgaaattattaatttctttcaatattgatgaaactgatttataaagtttgtattatttagattataattttttatattattttttttttcaagatgatgctgatgaaactggtttttttcttctgcttttaatgaaataattagttaaaccaaaaataatagtagtttaaattaaaaaaaaaaggtttaatttctgtaaaaaaaaatagcatatatagttgagatcattttttatt

SEQ ID NO: 352281 - DNA, 478 bp, Cannabis indica
aaataatttccaacagtaactcacatttctgatgtaatattttgaacttcagttatgaataaagttagtcatttttcaagtaattacaaagtgttactctttaaaattacttgagggacatatgtgtatgattaaccagaatttatctggaaatacatgatatagtgaaaacccaccactttaaaatttttcaaaattttttagagttctggttgatcaaacctttctaacgagaaaggaggatcaaacaataagaatgacttttgattaaagaacctttctgacgagaaaggaaaatcaaaagttataaatgagatataatgtaacaccctaactagcataggcgtgttagcatgattttaaacgtactgtgcagctcgttgctaatcaacgaggttattaaaaatcgtgaataattaaaatttgcttatttaattagaaacttaaagtattgaatatataaaatttcgggatcccg

SEQ ID NO: 352282 - DNA, 895 bp, Cannabis indica
aatgaaaaagtaaatagacatgtagcagttatttgttggagggaaagggttgggataggaaaattgggacgggtgatttttttcctggtaaggagggaagttgtatttataggttggattttgaattcgtgaccaataagtttaatgagaagaaatctacttagcctttccctttttgtttcccgccacttaaattactccacgtcatcatattttgccagcacatatttaacggatacttgccaaaacttccgtttgtttgagcattacactacaagaaattgtattaatatcggcggtattattcccggcggaacagatccgcctctaatagtaggggtattaccggcggatttagtaatccaccggtaatagttatttaataaaatacgtttttaaaaaataaatattaatttattataaatcaattaataccggcggataggacttattaccggcggaatcccgcctcgaaaaatgagggcgggaattttaccgcccatttatttgaaaacattattcccgacggattaacccgccggtataaaattgggattctgaacgtttagattaatatcggcagaacccaattaataccggcgggtcccgccagtattaaaactctataaaaacccctccccatttcagaaaactattttcgccatttctcatttccaccttccccattcacctctccccttccttcaaacacagtccgcccatttccaccttccccgttcgacttttttccggcaccgcccgtgcgttggccgtccaccaccactgcagtggccgtaaactccagtgcaccggtaatgtatttgttttcttttttatcatttttatatattgttttttttttcttaatatctaatttttttttccatcttcaaag

SEQ ID NO: 352283 - DNA, 1071 bp, Cannabis indica
aaataataaatatttttagttttttttttggtatttttgcaaacatatttgctatacttgttattttctgaattagtgtatgaatttattgaaccaaatgatttacttctgtttattgatttttgtagtgtcaaaaatgtccaacccacaccccaatcctcatctagaatatgcctttaggaatgaacttcaaagtgtgaagatgactcctggtcagagtatcacttcacacttgctcatgatgaacatgaaattccagaaagcagctaagctgggaattgttttatctgaagagcagagagttcattgctccgacaatcctactacttcaagctcagttgagaagaatagagaaagtgattccacttcctcagattatccttcacaacagattgaaccagcaataagaacaatccaaaaacggttaagcaatgatgctttagtttttgaatcatgtgttttagagaatgataaatccatctggattcttgattctggatctacaaaccatgtcagttgttcattgcaattgcttgaaaactggaattatttgaaatccggagagttgaaacttaaagttggtaatggcgaaatggtatcggttagagctagaggaaaagccaaactcaagtttcagaacagaattttggaattagacaatgtcttattcattccaaatttcagtagaaacttgatttctgtttcatgtttacaattgcaacaatacaaattagatttttcgagttctggttctaccatttctcgaaatgacattcaaatttgtgttgcatcaatggaacaggggctttatgttctaagaccagaagaaccatttgcgcttaataacgaactgtttaaagtagctaaacctagaaaccagaaaaagcaaaagatcgataatgaagatgaaacatatctcgagcacttacggccttgtcatataggctatgatagacttcacaggttaccaaaggtggtccattgaaaatgtcatcttaagtgctatgtcctttttagggcattggttaaagtaaagcttaggttgcattcatggagtatgcattggaaggg

SEQ ID NO: 352284 - DNA, 530 bp, Cannabis indica
gtcaaaaatggatgttatcatactcatccactgctccgctttgagtggatcaacaccaccctcaaacactagcgagttttgcttcctgaactgctcgtacaacggctccagacgattacctgcatccggtggcactattagaagtgccagaggatcaagattagggtttggaacaggttgagctcgctgctccctcagttcttagatttgctcgccctgctgtcagatggtctcatgcatcacgacgtataactcttcccagtttggtggtggtggatggttctcgccctcattgccaaccccgagcccagcaagctcacggttacctctatcagtctgcctcgggtgcataatctatacacatgcggtcacattccaagaattgacaatactaataagtatttccaaacatctcaaactttacactctttctaacaactagcataactcagacaaacatacaagcaggtaatcaactaataatctaataattaaaacttactgaatcatgagtcgaacgaatctttgca

SEQ ID NO: 352285 - DNA, 896 bp, Cannabis indica
tttttttttttttttaaacatggtaccaattggggatttcaacaataatcacactcattccaaaggttaagaggctacaagttgtcaaagatttccgtcctatcagcctctgcaatgtcatctctaaactcatcactaaggttctagtcagctggtttaagtaagcactcccatacgtcatcccagaaacacaaagtgccttcctacccaaccggttaattgcagataatattattgtggcctttgaactcattaatacaagtatcaagcacaaagtttcgggtcgtaaaggcgctgccgccatcaaactttatatgagtaaggcctttgatcgtgttgaatggcaatttgtgcaattgacaatggagaaaatgggttttgcttcaaaaatggatatctttgattatgagttgccttacaataaaccaattcactttttttgtcaatggggaggttacaggctcactcaaaccaacaaggggtctctgtcaaggctgccctttatcaccatacttgttcctaatctgttctgaaggtctgtctcggttgctacaacacgaaaaaagtgctagaaacctacaaggctattccttgactcgacacactgctcccatatcgcacctattctttgctgatgacagtctccttttctgtaacgcaaccaaaagttcatgactggctattgaaagatgtcttgatatataccatagagcttcgggtcaacttctcaatcctaaaaagtcggttatgtctttctcacccaatacgacactggcaagccaaatcttctttcatcgccacctcgccatgcctatcagcgagtgccatgaaaaatatttggggcagccatcatattcaggtagaaacaagcaacttatgtttcaggatatcaagga

SEQ ID NO: 352286 - DNA, 808 bp, Cannabis indica
gaagtattaaacgaaccgagtatatatgaaaaggaagaagttgggatgattgataactcgccttggatgacacccatagtcaaatatcttctcaacgggcaacttgcaaaagacaaaaatgaggcatgaaaacttatgtattaagtaccttgctacacgatagtagaaggcaaattgtatcaaaggggatattcaatacctctcctatcgtgtgttctccccacataagcaagcgagataatcaaagagatccacgaaggcttttgtggagaccatgcaggttggcaaagcttgtcaaagaaaataatttgacaaggatgttattggccaactataaataaagacactcacaaatttgtcaaaaatgcgataagtgtcaaagattttcacatatatcttgcgtaccaccaacaaaactaagaatggtgaccgcaccagacctatttgcaatatgggggattaattttattgcagcactccctatagggtgaggaggagcaaagtgcgcagtagtgcctgtcgatttctttacaaagtggacagaggctgaacctttaatttccataacctgcaagaaagttctcgactttgtcgtccaaaacataatttgtagatttggaataccaattaagatagtatatgataatggaacaaagttcgatggtgagttattcactgatgtctgcgaaaggaacaaaattattaagggcttctcgttagtctcaaggtctcaagtgaatgggcaagtagaagctattaataaaaccttgaaggatatatcaaaaagaagttggacgctgcaaaaggt

SEQ ID NO: 352287 - DNA, 572 bp, Cannabis indica
acggatttaacttgcatataccaacatatatgcgaatatcctctcgatcctcctacgaaaacgtagagatcgattctctatagcgcgagctggtcttgatgacccaacagcctcgataaaccaatatagactcacacgtcttggctctatcagctcattatacgatgtccgtaaatgcgactatacaagaacgcagacatcttagactcaactaaaatgttaggtgtattctaagtccacgagcttacgcaagaatatgaacagccaactcgtaccttagaagtcgcatacgttgttgtatttagtgaatagaaattgttctttatttattaacgtttacgttattttagcttaactattgtaaatcaatgtacaaaaggattgacaatgaatgcagtccttgtgtaaatgatcagacacttgctttgtatataaaggagtgatctgccgtgaaattggagacctacagaatctttgcaacagtggactaagcagaccgtgatctgactaaaccactatactccttcgtgttctttgtattttccattttttgttaaatatttgtgttccca

SEQ ID NO: 352288 - DNA, 776 bp, Cannabis indica
ctctctctctctctctctctctctctctctctctctctcaactctgatttctctctatctctcttttcggtaccttactcgaatgagtagtagcctacatataaaagtagcctcacaatgaaaagtctcaactatcataataaaatatttggtaattatgttatgacatataagttcatgtcttgaacgagcaaggagtgggaattagttctcataggagtgtctaaaatgtatagcccaacataacaatcatccacctctggctttacatttgaattttagtagccctgttgtagtagtaggttgttctggtcttgataaactcaacagctaaatatatgttcaacaattttagatagagtctatgttaggatttatacactgaaaaagtctgtaatttcttattattaataagagttgaacgttttgatatatgcatgaatattaaattattaatattgaatatttcataatttatatatatataaatatcaaaaaaattcttattcatacatgagactgtgatttgtagttgacggagaattaagatcacttattcatgaataaaacactcaaaaacatattaaagtttaggaatcatttatcaatggttgctagtgcggttcactgattgccagttattcagtgcaagtaatctcaattcagattactgatgtagcatgacatctaagtggaggtgttgtatataatagagattatatatgacaaggaccgatatgaataaaactatccttatcaaacttaccgtttactat

SEQ ID NO: 352289 - DNA, 627 bp, Cannabis indica
aacatggatgaaagttcagaggacataatttagtatatgtcaaagttcaaaggacatgatttgtaagatatcaaagtttgggagcataatttaatacataaataatctttgaaatagtaaaactgaatgaaatttgacaaaagtccttaaatctaacaatttcaatagttcaaggagcatttttaacgatcttaaaagttcagggggcaaaaattctaattagcctttttttaaaaaaaacaaattacaagcacttaatctattttttttttctctttcacattttctcagtactcacaccaactaatttatactatttttctttaattaatcacattttacaagaaaatctaaattatttttcttaccctttactaaatacgattttttcacctacacacattttctcatatttttttaaaaatatttatctcttttacaaaagaattaagagcactcctcttatatctttctttcacttacatgattaataaaaatagtacttttttagatattttgtattttatttagagttaatttatgaataatttacagattgcaacgaggtcgatgtcttgtcattattctgttgttttgtagctgtctttttgttattttatagttatt

SEQ ID NO: 352290 - DNA, 1177 bp, Cannabis indica
tattgctttatcatatatctgttacttcatatcgtttattgcttataaaatagactcattgtcgttggctaaaagtgaagacaacattttggtgccttcattcggagaaggatcacaaatcactctttattcgacatctgactgccaacacgatggtgcaaactcgtagaggtctatctgatccaacaaattcacaaacgttggatcgtacatcacagtacctaaggagttcaagggttctgcctgctgttaatcccggacagacgggaagcgtggggaatggtgaaacagttccttttacaggaattgcgcgtggtgtgcaagagactgggaataacagttccgcacccaaccagggcatccataatatgactgttccgcctggaaccaatgcccagacgaccatcagagacgctgccgaactataaaatctccgtgacatgctcggactcatgcagggtcataacaacactctacatcatgatcaggacaaactgcgtgctgcataaatctcgcgttcgacgaacaacggcgcatgttcgctgaatggagagataaagagatgaaggcattgagggctcaccatgcagagattgaagatcgtagtcagcaagccaccatgctgatacgaagagcctaccaaactgtaggtcagcaatcgccgaatgtcattcccctaggagaaacggaagaggacccaatggtgaatacttcccagactacgaatggtcagccgccacatccccagtcacgagttccgctcatgggcccagcggtaggcgagcagactttgtccggtaatttttcaggaggagtcataccttatggctccaaccagactaatggtgccattccaccagtcaaccaagcaaattaatcgctaaggcaacggcatgcctggacaatgtaataatgatcttgagttggactgagcacacggaactcccttctcaccagagatcaacctcctgccactacctcacaagttcaaaatgccgacgtggaagatgtaaactgggagagaagatcgtctttcccatctcaagtactttgagatgcaaatggatttgcaagcagtacggggatgtatgctgcagagtcttcccagccactctgtcggaagccgctcagcaatggtatttcaagttgggccttggaaagtttagctcatggaaaa

SEQ ID NO: 352291 - DNA, 632 bp, Cannabis indica
ttcctcattaaattctctttcttttgatatattatttgcataaaattattgagtaaattaggagaattttaaattaaatttttagggtttatgtatttttctttatgaaattcaatttgggatttttgattctatagtttatacactgaaattgatagtgcaaatctcataaccgattgatttacaatgtttctacgtaatttaatttttgattcggctgagaaaaaaaaatcaaaaccggctcctttgtttgttcttagcttttggattgaacacaatccgatcgacacccttatcgtgatttatacccgaaattaataccatagattgataagaaacttcgtcccgaacaaaacctatcaaaaatcgcatgttttcgtcgtgttttgggccagaaaaatgaccaaacccgactgacctgcaatcgggtcgcgtgacccgcctccaacccggctggaggttgaagaaggtgaccagctacatagcccactcgcacagtaagcgcgtgggggcgcgtgcggcacctccgggtgtcgtttttcgacttttttttgtcatgatgcttaaaattaaatttctgattttttttttatgatttttaattaattttttttgactccgtttaataatta

SEQ ID NO: 352292 - DNA, 962 bp, Cannabis indica
acatacttgtgagtagatttaagatcctggtaaaataatttccaatagcagcccagcgagacacttaaggcatacttaagtcttttcagcacggttgaggcgagggttaggaatttggatgacagcacacaacttacagcccttcaggcgaggatctctactgatccattaactgtagggggtgagttgtgggatgacttacaacgtcatctagtaagaagcatcactgagttcaacgaaagggcttaggtattcgtttggaaggacgaagtccgaaaggaaatgaatttgttgaaaacaagctcatgacgcaaacccagcaatgtttcaacaagtactgtctccacaaggattgattactcaagggctactggttcaaagagaaaggacggttctaaggaatcgtcgaaggataaaaataaacagaagaagcacgataagtacttgccagtgtacactatttataccaagcttaatgaaatttgggagaatattgacctcgcacatgagcaaaaggatgcctttggcaagcccgagcccatgaggaatttgaggagtaaaagtgatcctaacaggtattgtaaattccataaggatatcggacatacgaccgacgaatgttgccaattgaaaaatgagatagagagtctcatcgcttgaggccattttaaatagtacgtgaaaagacagggccatggatataaccagcctagtctgcccaataaccgaaacaaccaggggttacaatctcttcctattgaaggagaagacatcctggttattttgggaaggaccacatatcgtaggggaaagcaataacgcccagaaatgatatgtgaaagagataaagaacgagcagtcggcatttgcctcacaaccttccaagaaggtgaaaacagaggaacctcccattatattgacggaggaagatgagaaaaatgtgagatatcctcacgtcgatc

SEQ ID NO: 352293 - DNA, 919 bp, Cannabis indica
gtgttcgctccccaaaactcaccaggttcatctacaaaagacaacacacgagatgagtgtttggccgggatatcaaacaataaacaggaaaatatgccgaccagaactactcaacagattaaaagggcaaataactcataaagattaagccagagcccaggagtttgattttttttgggttaaaggctaaaattcacgatgctttgaataagcaaggtgagaatcaagcattgcgagattaaaatcagaatgtcaaaaatcacgaagttgtacgaacagttacagagaaaactacaaagtttcgagcatagattttctatgtatcttctacaacaagacaagaacaaatgtattttctacaatggaaacccaaaaattaaaaatacaaagttaaaagcgaaaaagattgaaaatttactcactgtttgaagcctaaatgtagtctagatgaagctgctcggatgtctctgatagaaatctcacgacagacttgaagaaaattccttgtttgctctgggtttgctttgtggagaaaatggtgaaagtaatttctaaagaagttccaaccttattaataggccaactggtgaaaaggggtaatcatttcgaaaatccccagacgctccgatttccccccaaaaataaatattgggaaatagaaagcaatcaagtgcctcaaataactgtcaaagcgtgcaaaggaaaccgtgtttcgaggcattaattgagttagagaattaattagcgaaaaactgaagagacgcctggtcagactcacatcaaatcacgaacagacgcacccaacacatgtcacccattcaaatgtaaaggcagctcggatgaagtctccacgcaacttcagaaagtcccgtgcagacttggggggcaaatgttatcccaatttttcacactcttatgt

SEQ ID NO: 352294 - DNA, 864 bp, Cannabis indica
gaaagagaattcagggctgggaaggacgaattttatctcgaccaggaaaggaagtgttgctgaaagcggttgcgcaatcaatttccagctatgctatgagtctttttctgttacctttcgagacttgcaaggaattggagcgtcttatggaaaaattttggtggaaaactgattctattttgaaagaaggtgttagttggatgagttgggaccggttgagccgttataaaaatgttggaggccttggctttcgaatcttgcgggatttttcttggctcttcttagaaagtaatgttggcggttgctagtcaatgatcgctccttggtgagtaaagttttcaaagcaagatattatgctcatggttcctttttttcagctgagttgggagataacccaagcttcatatggaggagtatttttgaggctaagggactgttacaagcaggtgtcactcgaaccattggtacgggtgatcaaatctcaatattaagggacccttggcttcctcactgcaccaatagttttgtctcttcaactcatcctgctcttcaaaaccagtatgctggcagtatttttaagacggacgaccgtgcttgggacgaggagttattagagatctctttaacgttgaagatcaggagctgattctatctattcaactaagtgcatctgctacaaatgactgttggagttggaaatatgaaagcctcggacagtactcggtcaagagtgcttataaatatttacaagaaatgaaaggggcctggcctaatgatggtggttcgaatttttggaaggagctgtggaatctgaaggttccaccaaaagtcagtaattttttgtggagggcagcttcgggttcg

SEQ ID NO: 352295 - DNA, 1425 bp, Cannabis indica
tattatcttaactagtgtgggggatcatatgacctatataatcaaaactttccaataagtagttctagaatatacttagtaaatttcccaacttagtaattcctcctaacttcactaaagattcagaattgcactattaattatatagaacactctacatgttccaagatatagatatgctattaattatccattgttataattcaaatagtcaatgatcctctatagatgatctatattgagtagggataaatttaccgttctacctttcaatgtattttatccttaaaacaattagctagttataaatgatatttcagtaaactaatataattactaaaatgaggcctttatcgcgttaagccaagctcaaagaaattatcgtttcacttttagaatttatagaaactattagattccatatctatgattagcactcacactcaattgtactaccatattcctaagatgtaagtattgggccgatctaattggtcaattttaacgaacaactctaagaacataaataacacagttgagatcgaacctaaccgtatcaggactaagatctattgacctaaggtcaactaggtgatattgacttagatagatataatagtaagtttatgacattttatccaatgttaatatcagtccagtccgatgtatactctatacatctgatactagcatactttgccaatgacctagaaaggacataacacttatctaaggtgtaagtaaactttatcattgattatcgtatcagtgtaaatcaagtgtactgacaaatcatgagacataaacttttgaaacatataattatgattatattatactgtgttgacaacactataatcataaataactatatgttatggatttaatagaatttatacattaaatttataactgtgaaagaaattatgtgaaccatacaatataaaatgatttcagatcttttattaattaataaatttaattatattgaaatgaattttatttaggacatcaaatcccaacacaatgatactgcacgtcgttcataaatcaattgacaataacaacaaaatgttatgttgccttgccttcaatttattttccacatactttgttcttttcgattcacatgatgtcgtttttaggtccactcgtttttaaataacatttatagcatgatcattatgtcgttcatatataatacttgtatttttttgctaatctgaaaatttcatacctaagaaaaatggattattttacaaatacacaaaaacaataaaaaacaaaaataaaaatttactataattttaaatatttttaccatattttttattttatttatagaaaatacgaccttttatgttgtactcttattaatttgttgttgattttttgtttattgttttgtatgttatttagtatgtt

SEQ ID NO: 352296 - DNA, 1116 bp, Cannabis indica
cttcgtttgacgaatcttttttttgcagatgaccttgtcctatttagcaaaggcaacttgaattcggtaaaaataattcaagaagcctttactaaattctgtaatgctacaggattatcagcaaacaaagctaaatcgcagatcttctttggtggagtcaaagaagatgtaaagcagaagatcctggagcttgtgcaaatcgaagaggggtcttttcctctgaaatacttaggggtcaatctccgaacaacaaagtggaaggcttcagactgtggtgtaattcttgacaaagttaacaggaatctgaactgttgggcaagcaggaatctctcgtttacaggtagagctcaattaattcactcagttctgcttggaattcgtaattactggatgagcatcttcataatcccccaaaaaattgctgaagccatagacaaaagttgtcgagatttcctttggggcaagaaggagaatagaagcaaatttcatttagcttcttgggagaaagtttgtctccctaagaagttaggtggaattgggtttcgagaagggaagaagtggaacaaggctttgatagcgaagtacctttgggctatatcaagcaaataacaagataacttgtgggtgaaatgggttaactcgatctatctcaaaggtcaatcaatttggagctaccacacaaagcaggatgctagttggtacttcaagaagttgctgaatctcaggggatcaacgagtgaagctgatctgaacctttctgtcaatggaaagaaatttcaggcctcaaagttttacaacatgcagctgaaagagaacaaagtcaagtatgctggtgcagtgtgggataaacttgtgttgcctaaacatagatttatctattggcaagttgtgaactcccagcttataacccgagacctgctgaacagatttgtgccaattcctgatgtaaactgtccagtttgtcatcaagcagaggaaaactatgatcatgtgttttttgaatgtcctttctccttacaggtggctgccaaagtgaaagagtggcttgggcaagtgcactggccgatttctgtcaaagatctcagcgacaaaggttcgacaactcagaataacttc

SEQ ID NO: 352297 - DNA, 784 bp, Cannabis indica
aacacgtgccacttataaatgatattatagtgaattaatatagtcactaaaattaatattctatcatttatctctatttagcaagctcgaagaaaatcatcgtttcacttctaaatacttatagaagttatagattccatatctattattagcgctcccactaaattgcactacctgttggaaatattttaccaggatctagatttactaccatgtatgtttcattagcatcctaatatgaattctaaaacaatgaaataaacacatataaagtttaggaaaccttacattgggtgcagcgaaaaataatgactccttccgttcagatctctagcccttgattcctttctgtaaaagaacataatcaagatctaatcctagttctctttctctctttcctttgatgctgattctcctttttgttggattctacacaatctcccacactatgattgagctaccacttgatgtgtgcgggcactactctatcactagggtatttcgaaattcaagagaagaaaagagaagagagagtggtggctagaaagttttctctgaaacgaatgagatgcttgtgcattgtttcctgaaactttcactttctatttatagattgtcatctaggtttaggttagaattgtatagcattaaaatactgacaaatataaatggtaaatcctatacaaagttgcaggccatataagggaaatgggcctcactttgcaactttcctatttgtcaattttcaatcccatttctaaaaatgccaattttcctatttaac

SEQ ID NO: 352298 - DNA, 434 bp, Cannabis indica
ttttattttgtaaattttttaggtgttttctatgttcttaagattatgttgttttggttgtgcatggtggctaaatttttgtcagcattggtcgtcagattgcggtaataaggtaaaaatttaaaccttaatagtatatatgtatgtattttgtgtgttgttgaatatgtattgtgtgtatatatattttgtagttgtattgtatttataaaaatattgtaattgtatttattatcccaaattttatcaacctgatgtggcatgtcaatgtaagccaagactgaggacacatggaatacaaccttgtcaatagtaggattacaagggcatggttaaaccgccaagcaacaagaaagaagagttaaacaagttgtcaagaagctgcacaaccattttaggccacccaaagggagtacatgttgggttttatgccc

SEQ ID NO: 352299 - DNA, 675 bp, Cannabis indica
tatatagaattattttaaataaatttctgaaaatgacttgtgaagaaactaaatcatattttaaatattatacaatgattatactacaaaggcttatatttcttatactaattaactatttggtaatttttttatattttattgtaactcattaattatatttgaagataatgttaaagttgctataaataaaaaaaagtaacgtaaatgtattttgatcaacaacattatataacttaaaaataaaactatccttaaaaattaatcattaggtaacaaaaacacatatggggataatacaatcttaaaattgagcttattaaaaatttaaaacaaaaccaactagtgtcttagtgtttttttcaatatatataacatttactaaattaaaatattttattttggtttactaaatataaaataaactaaaagattacttttgattccgaatgatttgataatagtaaaatatatatatatatactttctatgtattaaaataattatattataatataggtggagatagtactttttttaaatccaaacaattaatgatgtagctacagttcttttttaaaagtatgataaaaatagattttttttaagaaaaagaagattaagtttttgatgatacaaacaaaaagaaaaaagaatgtactcaaagaaaaaaaa

SEQ ID NO: 352300 - DNA, 1190 bp, Cannabis indica
aaaattctggctgccacataagagtgagtggccttagagtcaaacaatatagagaggtaacacttgttgaccgagagctaacctgttacaactgagggactggcctctggatctgcctgagttaaagcaaacacccttgctagagcgggtttttcagcagtcttctgctcttctttcttaagctatgggcagtctcttttctaatgccctgacactccacactggaagcacccttgccctatacaatcacccagataatgctttttacaactggggtattctgggtaagtgtatcgggtttcggaaccatcccaattgttgcctcgaccctggttccctcagaacttcttgttctgacttgagccactagatgcagttggttcctttcttttatgatcaatggtcgagccactaccacccctactaaaccaaaggtaggaagattaggagccccaccaacgacctgagtccctcgagactcctgagtgcactccactgtaccctcagctggcagtgccttgcccaccatatcaacataggtggtgttatcatcagtagtaatcttaagatcatgtcttatctacgaatttaatccatccaagtacttttctttcttattgaaattggttggcacaatttctgaggccaatcttaccaatcgatcaaactgagttgtgtattcagtgacactcatattctccttttgggtcagctgggtaaattcttttctttttgcacttctaactacttcattgtaggacttcacgttaaacaactcctggaacttttcccaggtcatagcagtaacatcacaagtcaaggacaccatgtcctaccaaactagagcatcttcttgaaactagaatgtggcacaagccactgtgtcattgccggtgacgccatgaaattcaaaattcttgtaataacagtcagccactgcttggctttcattacatcaggacctcctagaaagactggaggtgcctacttgcggaacctttcatacagtggttccattcggttcactacagcaacttgtcctacctgcacagtaggggcaggagctacctgcatttctggagcagggatcggaggagcaccctgttgtctcaagcgtttgatttcttcatcttgctcattgattctggctttcatttttgtaaacctattttcccattcttgggcagcct

SEQ ID NO: 352301 - DNA, 622 bp, Cannabis indica
attttcattttaaaatcacagtatttgaaaatacaattttcaaatcacaaaccaatccactccgctcgtacttctaaaaattaaatattttttgttgacattaatgaaaataagaatgagaacgaaaatatgaataagaatatcatgaaataaaatttattaattatataaattgacaaaaaagtaattaaatatttttgaatatgtaatttttttatataaatttaatcacaccaaataaaatttatttgattaccaaaactctatcatggagttatggcttagtaggttcttggttcaatatggaattttggagtgcactttttttgccattttaaaaagaatagtcattttaacaaaatagtgaaaaaaaataaaataaattctaatgtttcaaaatgcaactacacaaaagactggaatgaaattaaaatcatttccattccattattctaaccaaacatacatgttctcaatgtaactccaaccaaatatttgtgaagtaaaaaattaaatggtgaaagtgtatttccttccaaataattgtttagaatttattaattgtattgtaagagcatgtaattggtaatgtattgttaaaatataactcaattttccaaaa

SEQ ID NO: 352302 - DNA, 1698 bp, Cannabis indica
cggttgattactttactaagtggactgaggccgaaccactcgcaaccatcacatcaaagaaagttcaagactttattgtggaaaacataatatgccggtttacaaaatagtctcagataatggcaagcagtttgacagccaatcctttactgatttctgtgcgaaccatggtatcataaaaagtttctccgcagtggcgcatactcaggcaaacggtcaagttaagccagtcaacaaaaccttgaaggatacactaaagaaaaaacttgaagatgccaaaggaaactggccagaagagcttcctgaagtcctatggtcataccgtacaactgaaaaaatggcagccggacaaacaccattcgcaatggcgtacggttatgaagctatgctgttatgaagctatgctgcctgtcgaactcgaaccaccttcccacagaagattgacgtacgatcaaggtaccaatcacatactccttgcagaatcacttgatgaaatcgaagaaaaacgagccactgcaaacttaaagttgatggcccatcaacaaaaagtagctcggtatttcaacaaacaagtgaaggctcggaaattctttgtgagagatatcgtcctgagaagggtatcctgaacaccaaagacagtacgacaggtgtacttggacctaactgggaaggaccatatcaagtggtcgaagttctcgacttcagagcatacaagttaggtaagtatgacgaaaaaatgcaactcattctagtaccacggtactggagtggagaacatttaagaaaatactaccaataaagtaccaggtcggatgaccactttaagtactaaatgaacatttgcttttaagtaaatggccttctgggcagactacgctcaaaggtttcgataaaagaaacaaagtactcaggtcgggtgaccactttaaagtacaatttcttatgtctgcaatttgttttatttcatgttaagctaaaagatgagattagatcaaatagctctgatgtaacttactacggtaacaaatacacttttcgatcaataaatgaataaagatagttatttcaaaattcaattgagtcgaaattatcagcatgtttctgatttaccatacaatgtgtacaaaaggtttggtcaaacccaaaacaccgaacaaataaacaatatatttgtaaaagacaagtgaccaagagtcatacgtctgctcggtcacttaaagggaacctatccctgtacaaagcatttggtaaaaataaaacaatcacgattgcacgacaattataaacagagaatgaaattcattaaggataacaaaagcacataataccgggattaaaagcttcccggttagcctgttgtccgaaaaatgaaaataattccatgtttaaagaccgcttggccggtcatgatgtcttagaaaaggccctgaggctgaataagatatataaaataaagatataataagagaagtgtttaagcagctggagtcccaagctcttggtttagttcttctgggccaactggagcaggaggatctgttgtttgaataggaggtgcatcagcagcatgaccggaggttgaagcagccgcctcagttttgccataggccacttgggatgcagagaactcaaggcatatgtccttagcatcgaccaagtagtcgaaattggcttgaggattagcctttcaaaaaacaa

SEQ ID NO: 352303 - DNA, 1282 bp, Cannabis indica
aacaccgaatagaccaggacctgcttcaacttctgtacgaggatcatcctcgtcttcgtgccactccgtcctcttcaagtgacggactcttcaagtcaagctctgaagattgggaggtgagtagtgaacactcttctactccaaaacccaaagtacatcaccagtactactccgagcagatcgctggagaaggatacgaccgcttcatataggaattgaagagaggttggaggagctatctgccgtccaactggacatacgttgtctggccgggtgctgctgacactttgcccgctggccgtccaagtttagggaacttaggtattcccattgctgttcctgccgtcacggttgcttggcattcacctcagtatccgtccagccataagatgatggctcaaataaagaaaataatacttaaggtcaacgcatccaatactcatgtggcctagcttgccacattacccaacgccgaacaggattcgcccgtccaggaggagggggatcacgaatgggacgctgaagtcaaggaaattgaggaacatgacgatgtttgtcctggcagtccttctgaggctgaggaagaggaggaggctgaacttccaaattttgggggatacaacgaggtcgaggagccagtatatgtggacggcgaagtcctagtcgaacgagtggactacgtcactgaggagcttgctgctggagttcctcacagaaggcaaggtgccttaggtgccagatgggtgagccctctgtccaagatcactgaggcacgcataagcgatttggaccaatctcgctatctaggcgaactttaatgctatgtccctgcctcaaatcaccaagccacaaacccgaagaaggggatgtgcgcctggtcgggtgctcattccaaacaagggacaatgctgtctttgcacccgtacctcaggaaggtggcagatttcttccacctctgtccgacctagtttactcccaaaggcattaactattggtctgcactgttcgtcctctacgccatccaaaagtggggcctgccttctccgcacgaggtcagtttgttattttacctaaaatctatccccaagcaaggcaggtcggggtacttcgacttcgctcagccagacttcaagtggttgacaagcaccacagacaaggtcgtgagaaaaattgggaatttcgttgacgagtattacatagtggaaggcatgggcaccacttacactcggtttcagtagatccctatatattaccgtccacccttcatgctagctcttaggga

SEQ ID NO: 352304 - DNA, 619 bp, Cannabis indica
taaccgtccaatttccatctctaagagtgaatgagaattttttagtagtctatttcaataggttaaactcctttttatataaaaatatggaataaaaaattaagtgaatgaaataaaaagaaatacaatagtatttatggtaataaatgatttgggtgatttgaatatccatatatatatataatattttataactctctcttgaatattcataataatgtctcattaaaaattttgccagaaaacttaataggataaaaactcggttaaggaaaaaagagtgtagtataaattaactcccctttatttaggcattcgtagagattttctcatcaatgaattccaatcttatgaactatcttctcgaatatgttgacacttgattgaatatgttggatatcaatatgtattctcttgaaatgtattaagaaaaatttagtgaaaatatctttggttctatctcctttattatagttttagttgagcaatgcatttcacgttatcttcatagagaattgctaatgttgatattatgagtgttaatcaaaccgcttaaactgcttaaactgcccgcaccacaccgcactgcaaaaaaaaatgtggtttgaaattctttgag

SEQ ID NO: 352305 - DNA, 472 bp, Cannabis indica
aaaagttgtctcttgattgtgttacaagatggaattcaacatacttaatgataaaaatagcttaattgtacaaaacaatatttgagcgagcaaagctttgtgatccaaagtataaatgtttgccatcagaagatgattggattagagctcaaaagttatgtgaaaggctagaagtttttcatgaggtgacagagttattttctggtaccaagtaccctactgccaatctattcttcccggagatgtgtaaaattaagaggaaaattgaagaaggaatgtcatcaaatgagttatttattaaggatatgtcaactcaaatgatgtttaagtttcaaaagtattgggaacagattcatgggattatgactattgcagtggttttggatcctagatacaagtttttgttgctccaattttattttcctcaactctatggagatgataaatgggaggttgaaattagaaaggtgcg

SEQ ID NO: 352306 - DNA, 1195 bp, Cannabis indica
aaatgttgtagtactgctttggccgaatgggggaaggatataacgggcaattttaagcagcgaataagcaactgtaataaaataatgaagctgttgaaaaatagaagggatgttgattcagttaatagatacaaggaggctcaaaaccgtttatttgaagtcttggctcagaaggaggttttttggaaacagcgatccaagcaattgtggttggaatcgggtgaccaaaacactaagtatttccatgcttgtgcaagtacccggcgttaaaacaatcatattttgtcactgaaaaatagaagtggagtttgggtggattgggaaaatggtttacctggtgtcgttgaagattattttagagagttgttcaccgcttcggaaattgattgggaaaaggtcacgacttgtgtgcatagtcgggtgtcgactgctatgaatgagactcttgttatttcggttgaagctgaggagattcggaaagctcttttccagatgcatccagataaatcaactggtcctgatgggtttaatcctggtttctatcagaaattttgggatattgtcagcaaggacatcattcggttagttttacacttctttacttttggtgagttgcctaatcatttaaaagaacacaaatattgtgcttatcccgaagaagtctaaaattgagagtacgggtgatcttagaccaatttctttatgtaatgtggcctataagattgtatccaaggtgctggctaatcgcttaaaagttgttctcccaagtgttatttctgaaacgcaaagtgcatttttgccaggaagattgataactgataatatttaaatttcctttgaggttatgcatttatttgtaaaggaagcaaacagggaaggagggctttatggcacttaagttggacatgagcaaagcttataatcgggttgagtggggctttttacaggctatgttgaggaggttggggtttgatgagctagtggttaagttgataatgcaatgtgttaggtttgtctcctacactataacatctgggggttatgaaattgggcctatcattcctacacgaggtttaagacagggtgatcctctttcaccttatatgtttcttctatgtgcggaagaattctcagcattgataagagactatgaacggtcggggaagattcgtggttgtaaagttgctagaggggc

SEQ ID NO: 352307 - DNA, 491 bp, Cannabis indica
ttacaatagtatctctgaatatataatccttagataatagtatagtcttagcttaactgcattttgaccgatcccctgcccagtgaatatgcatcactatttacagggctaggaggcttgaggaggaagagtttcctctctcgttacaatgcatataaaaaaaaagatcgtgggatcaatgctgaatcaaggattgtgggattgaggctgaatacactgatagtgggatcgtgtgtatgccgtatccacataaattgatccctgagttatagggattgagctgatgactcatgatccgaaagctgaattcgctaagtgttggttgctctgcacgaattgctgaatatgttgctctgggcatgctagcgaggcatcctgctcggcctgtcttcccgagcaggtgttccaagtggactccacgtgtcaccattctcgtgatgccacgccagagtgcaaatattaggataacacttagtgaaaattcataaact

SEQ ID NO: 352308 - DNA, 641 bp, Cannabis indica
taatgtatactctaattgaaaaagcattacaagaaaaaaattactaaatctccatcttagattataatttacatataagtaatattttaacaattataataaaatacttatcctatgtaatatttttaaatgaacaaacatcttattttataaaatatttaataaaacttataaataatatttttattaataaatcaaatattttaaataaaaaaattgaccaaaaaaaactaaaaaaaaaaacacaacgtgctttgcatgtagatgccgcctagtatatatatatattttttaattttttgtttcataagaatatttgttataacatcacccgagttttaaaaaaaaatatcaccccaatttacaataccataaatagatattatagtgtactataattgtttaaaaaacttcaaacatattacatatattacgaggccgtcttaaatattttagaggccctgttccaatcttaaaaatttggcccttaataaaaataatagtataattaaattttatgttcaatttttttatttattttttttaagtagatcaagtttaaaaatttacttctagaagttttagttaaaaaaaaatgtttcattcatatttgataattttttttaaaaaaaaataaagtc

SEQ ID NO: 352309 - DNA, 1100 bp, Cannabis indica
cgtggtcagggtgatgttaacccgccacaggctgcccaggctgcccaagccaatcaggaagcccagaactgggaaattaggtttgctgaaatgcaagccagaatagaggagcaagataatgagatctagagattgagacagcagggtgctcctgcagtgcctgttccagaagttccagtggcacctgcctttttgcccaggccgaatcagtagtagcggtgaatagaatggaacccctgtatgaaaggttccgcaagcaggcacctccagtttttctaggaggttcggatgtcatgaaagctgagcagtggctaacagtgattacgaggatattgaattttatgggtgtcaacgggaatgaccgagtggtgtgtgccacttttcagtttcaagaggacgcattggtgtggtgggacatggtgtccatgatacacgacgtcaccacgatgacctgggaaaagttccaggagcttttcaattcgaagtactacaatgaggccgttagaagtgccaagaggaaagagtttacccatctgacccagaaagagaacatgagtgtgacagagtatacaacacagtttgatcgattggcgaggttggcctcgggaattgtgccaatcgatttcagtaagaaggaaaaataccttgttactacagacagacaacaagaccacctatgctgagatggtggaaaaagcattgcgagccgagggtgcagttgggtgcatgaccgaatcagttaggactccgatggttggcggggctcctacccgtcctgcatcaggttatagcaggggaggtagtggttcggccatggaccagaaaaggcaaacatccactgcaaccggtggctcgggacagaacaagaggttccgagagaaccagagccgaggcagtcgtcagggtggtttagagacccgttattcctatccagagtgccccatttgtaaaaggcaccatctgggtgagtgtagaggtcacaggtgctttcaatgtggcatgcccgggcattataagagggatttccctcaactcagatcagaagcatcaaaggctccaacgagacccaatccagcgagggtgttcgccattactcaggc

SEQ ID NO: 352310 - DNA, 930 bp, Cannabis indica
agtgacggactttctaactcgagctttgaagattgggaagtgagtagtgatcgttctcctactccagaacccgtagtgcaacatcactcttactccaagcagatcgtaggagaagagtacggccgcttcatttgggaattgaagaagggttggaggcgttatcctccgtccaactagacatacattgtctggctaggtgttgttgatacccttcctgttggccgtccaagttttggtaactttggcatcccaatagttgtccccgtcgttactgttgcacgacacacacatcagtatccgtccaggggaagaatgatggcccacacaaagcagacgatgcggaaagtcaacgcatctgatcctcacgtggctcagctcaccatgctgccaagtgccgagcaggatccgcccgccatggaggagggagatcatgagggggacattgaggtccaaaagatagaggagcaggacgacgtccgtcttggcaacccttccgaggctgaggaggaaagagtggtagaacctccaaattttggagggtataatgaggtcggggagccagtgtccgcagagcatgacgtcttggtcgagggggaagactatgtcaccgaggagcttaccgaggcagttccccacaggaggcaaagtgccttaggggacagatgggtgagccctccgtcaaaaataagtgaggcacgtatgagggccttggataaggctgggtacttgggcggactggagtgttacgtcccttcttcgaatcattgggcaacgaacccgcagaaagggatgtgtgcttggttgggtgctcacactaagcaaggggcgatggtgcctttgcacccgtacttcaagagagttgcagattatttttgcctttgtcgacccaattcactcccaagggaggtaagtatttgtctgccttgttcg

SEQ ID NO: 352311 - DNA, 593 bp, Cannabis indica
tctatatgatttgaaagcagttacttctatatatcacttgtgcgtaaaagttccaacaaggaaggtcattacaattgtggttgtcagagcttttcctactgtgagtggtaggcgggtatgtctaagtggagcaatgatctggtcggagaagccatacaccagttgcgtgcaaggaaccaagtctttgagttgaagccccatcttctcgtatgttgtcttgaaaagaatatttgaagaggctccattgtcaatcacagtctgagccaccattttattcacaatttgtacatcaacaaccagaggatcattgtgcgggtaaataatgtggtcaaaatcttcttcactaaaggatatgattggttcttccttgtgcagttgtttaggctttctttcttccatggccaaaacttcatctttctttttgtgctttagggtctgagcatacctttctctagctttggtcaagtctccaacaatatgagggcctccaataattacttgtagatgtccgtccacaggtggaatcatcaatcaattttgattattatctggttgggaaaacctttgatcctggtcagtcttgacatacttct

SEQ ID NO: 352312 - DNA, 1394 bp, Cannabis indica
aaatcaaagaaaagactctgcagctgtggctaagagtaggtggagatggaagttcagatagagatatttatttcaaaaaataataacagtaaagagtggttccttgattcaggatgcacttatcatatgtgtcgcaacttagaatctttatttgattatcaagaaaccaataatggtggtagaatactaatgggtagtgatggttctcgtagggttgttggaattagtaaggtggctataaggcaattcaatggtgaggtgaagattctgcataatgtgaggcacattccagaattgaggaagaatctaatatcacttggaaccttggaagatgaaggttatggctataagtccttgaatgggagcctaaggatcacaaaaggttcaatgcttgtgatgaaaagaaagagagtacatggattgtatgtactcgagggtgaaattgtacctgtggctaaggcagatacaataaaaggtttagaaagtgatatgcagctatggcctcaaaggcttggacatatgagtgaacaaggcatgagagaattgtacaagaagggagtcattgaaaagtttcagacatgtgcattaccattctgtgagacttgtgtctatcgcaagaaacacaagatcaagtttacaacaacaactcacaacacaaagggagttctaaagtatgtgcaggctgacctttgggggctaagtagaattccaacacattcaggtaaacactacttcctatctattattgatgattttagtagatgtgtttggacctatttacttaagaccaaagatgagtgtctagaacaatttaagatatgtaaagttcaggtacaaaacaaaacaaaacaaatttaaaggttaagacacttagaaccgataatgttctagaattcatcaacactgagtttgatagattgtgtaatgagcataggataactaggcataggacagttgtgaaaactccacaatagaatggagttgctgagcgtatgaatataacccttttgaataaagtgagatgtttacttcttagttcagattgagaaagccttattggggagaggctttagctactgcttgttaccttgttaataggagtcctaatagagtcatagacttgaagacaccttatgagatgtggtatggaaagataccaaacctgaaacacttgagtgtgtttggatgtgcagcatatgtacatcaatccgatgataagctagatgctagatctctcaaaacaattttaggatatcctgcaggcacaaaatgttatagaatttgcataaaccagaatgaattacctaaggtgattatttctagaaatgttgtgtttaattaaaatgatttttttgttgagttttttttttggttccaaaatggaggttttccaa

SEQ ID NO: 352313 - DNA, 634 bp, Cannabis indica
gatgtccaaaaaatgataataattccaagtttaaagaccgcttggtcggtcacgatgtcttaaaggcctcaaggccacatataatatatatataatcaggagacaaaaagagaagtgtttaaacagttggagtcccaggctcttggttcggttcttctgagctaactggagcaggaggatctgttgttcggcatgagaagcatcagcagcctggtcaaaagcttggccgaaagttgaagcaaccacctcttttccaccataagcaacttgggttgcgtagaactcaaggtacatgtccttagtgtcgcccaagtagtcgaaatcggcctgaggattagccttccagaaatcaaagaagagctcgaggtcggcagtctccaaagcattgaccttctccttcaactggtcctcctaggtcaccttggcgtccctctcctccttaagccgaagaagagcttgccgcaaagaactcctctcatcctgaagactgttaacttcagcagataaggtctcgatggtctcctcaaagcgatcagcaacctcgaggtcctttgttagcacggagatcttcttctcggcagcaaacagctgttggaaattattttaccaggaacttagatctactcacaagtat

SEQ ID NO: 352314 - DNA, 867 bp, Cannabis indica
atcactatttatagggctagtaagcttggagaggaagagtttccgctctcatcacaatgcgcataaacagaaagattgtgggatcaatgttgaatacaaagatcgtgggattgatgttggatacactgatagtgggatcgtgtgtatgccatatccctgtaatctgatccctgagttatagggatttcgttgatgactcacaatgcgaaagctgaattcgcttattgttggttgctctgtacagatttctgattgctttgctttgggcatgccaacgaggcatcctgcttggactatgcttcccgagcaaatgctccaagtggattccacgtgtcaccattcatgcgatgccacatcagagtgcgaaaattgggataacatttgcccccaagtctggacgggaatttcaaggttgcgtatagacttcatccgagctgcttctacctttggatggggacaagtgtcaagcgcgaccgtccgcgactcgatgtgagcctgactgggcgtcccttcgatttttggctaataaatgctctaaaaataaatatttcgaaatctgattttctctctccacagttgacggctgcacttgattatttttgatttcccatattcgcttttaaggagggaaactgaggcgtctgaggttcctttgagatgattacctctttttcgtgacttgcctttaaatatcaaacagtattggcacataaactcattttcatcacccttctttgctaagtaagcttcagagcgaaaagagaagttcttggcttcaaagttgttgaagttccttcatcaaagctgcttgttggattgacgttgctcgaaccccgacatctgactctcgagtaagtttctgatttc

SEQ ID NO: 352315 - DNA, 513 bp, Cannabis indica
gtcccaaacccaaaagtggaccagaacccgtaccttgtgacccaaaatttgaaccaaaattggaagttgaccgggacaggaactaggacttgaactagaaatcataactgaaattggacatagatccagaaccgtaaccggaccatgtcccgaactccaaataagacttagacccgaattgggagccgaacccggatcccaacgcaaacccagactcgagacgcaaacatgaacctaaactcagaccaaatcatggaacaaaactagggacacagaactagggttgggacctagaactgcaccccaatctcgatcccaaacccaaactcaaaaatgggacctgagacttgaaccagaacaacaccgagacccaggacagtgatccagatcaggtaacgggtccttgaacaaaacagtaatcggtgtctagatctggtacttagactaggaacagaacccagacgaagaaccaaagccaaacccaaacctagacctgggacccaaaattagaac

SEQ ID NO: 352316 - DNA, 962 bp, Cannabis indica
tttgattacaatgttcattataaaattgaaccaaatatcataatactatatttattacaattcttattccattacattactcattcatattacagtatggaaaagtattttgaggagagaatgcatacctattctacgtaaattttaactccggcctaattttttatttttggcgtaatatatacataattaatcaaatttgccaatacaatattatatcataaaaaacatatatctatttacatattaaaaatatgaaaaagtatatataaactcattttttgatggtggtagacggtgcaccgttctaaggttttttttttttttttttttttttttaatttttagtagttacttttgtaatattttactcatattattgttgttatctatagtaggacccaatactattgaagaatgggacacatcatcacattattctcgtcttggtccaaacattgtgtaaatgggctgaatcgtgtctagaccgttagtagttttttttttttttctttttcataattaagaaaactcatcgagatcggaccttcatcaccttagatgagacccacctttatctcacttctaaaactagtaactaaatcaagactgtaaaagaagttgaactgtgtgagtcactgagtggagtctccaagtccaagctcacaataaccccattccattaatggcggactacgaagccaaccaccaccaccatcaccaacagtcaatgatccccaacggagacagctctccaggccttaaacactatcatccagctccatttcgagaagaccctcgaaaagaaacgagccatagaccttcagaagaaggagcttcacaagctcttcctgcttttcttcatcttcttgggtctcgtcttcttggccgaatctcagtcccttcgcctccaatgtcgccattgctgggttcccattatcctcctttccttggcccacctt

SEQ ID NO: 352317 - DNA, 782 bp, Cannabis indica
tctcaaattttccatactttttttttagtgaaaaaacataaaaattaaaaaataaaaaattagtatggtggttcgatggtcatctgatgctacttttgtatgtacaaaaacataaaaaaaaattggtagcaaatctggtccgatggtagtccgatgggtctgataggtggcccgatgggttgtccgatgggtggcccgatgggtggtccgatggtgtaaatggggtgatgtaaatgggggtattttagggatatcataaaagttgtgtcatatcctacaaatattagctattatttgtttagaatttttttttaagcataaaaactcaaatttcccaaaggtaaataataatactcttaaatatgtgttgtagcgataatttaatcagtttaacaactaagaagtttagagctcaaatctcaacaaccttaccatttcattggactcgcccaaattagcatagagccgatcctaaccctaccacaaataatttcagcatattttgttaaaaaaataaaattaaaatataaaaaaactgtaggtagtttgtaaaaatatttaagttaattagtaatttttttcctcgaactttgacatatactaaatcatgtcccctgaacttttttagccgttaaaaatttcccctcaactatttctaaaatataatatataaatatatatatatatatttagggacacgattttgtcccgtgatgtactttcacggaatgtattccgtggtacattaaatgggtctttggggtacattaaatgagtgtcag

SEQ ID NO: 352318 - DNA, 667 bp, Cannabis indica
agtacccgacccagaccttaacttgaacttaggacccagctcgtgacccgacaccaaaaatggaaccagactgggacttgagattgggatctggatctggacccagggcttggacaaaacccatagtcggtgtctggatttgggacccggctctggacccgaaccctgacagggacccgaaccgacacacggacctaaacccagtcccaaacccaaaagtggaactgaacccgtaccctgtgacctaaaattggatccgaaaccggaagttgaccgggactcgaactagggcttggacttggaatcataattgaaattggacctagatccagaaccgtaaccggactaggacccagactccaaatcagacgtagactaaaattgggagccagaccaggataccaacctaatcctagactcgggacccgaacccgaacttgaactcagacccaaaaatggaagcagactagggacacagaacaagggttgggacctagaaccgcaccccagtctcgatctcgaacccaaactcagaaatgggacctgggacctgaacaagaaccagaccgagacccgtgacagtgatccataccttgactagggattcgggtaacggggcctggagcagaccagtcgtcggtgtctagatctgggactcaaactagga

SEQ ID NO: 352319 - DNA, 717 bp, Cannabis indica
ttaagttgaaaattttaatttctaaacagcttaagttagaataattttcgaaatataatttattttattaattattttcccaccagtttcaaaatttacattttttaatgcacataatttcgatagtaaatagattaaagttgaaaattaattattttaattatttttagctcaacttaaataaagtaatttttttattaatgatttattaaaataaatagattaacatatattatattttaaatagaaaataagaaatttgttagtgaaatatctagatcgttattttctgtatgcttgtggtatttttctagttatatttaattaaacagaaaattaatatttaaattgattttattcaagatacttaaatatttgatatttttcttagatatttaattaaataagtgttgacgcagattttcgttcaccaaatttgagcctcatagtaatgatttcacacacagaaaaataaaagtatgaacagagggtttttttacgtggttttgcagttaaaactctgcatagtccacgagtcaatcttattcagatttttgattgtttttcagggctcctctagtatgagattttcgtctcccttttcatcttacttgccactatttataattacatagtggacagttaattacagagttgactgtaatatgtttacaataatcatccctaaaatcatgggatttgattatatatcacgta

SEQ ID NO: 352320 - DNA, 545 bp, Cannabis indica
atgtaattattcctatttaaaatatggatcataaacgggcccggtccatatttacgaagaaattgtaatttttttttaatatttttcaaattaattattaatttttaaagtgttaatggattgtttcaacaaatattttttttattattttgtaagaaaaaaaaattgccaacaaaaataaaattgggaatttaagttattattttataaataatttaaatcttctagaaaatatacatataattttaatatatatttaaaaacatttatacaaaaaaattataataaaataaagaattgccaaataaaaaattacttttgcagatttagtttgtattttaattttgtacttacgtatgttatgcgttcgtgtttttgtgtttgttgcatcatgcggggcttaaacctattttttttcgtcatattcaggggtctatatttatttttgtcatgccaggttatcatacttgtgccatgtgacagtcagtagtcccgtgatccgtaaggagaaataccgggtaagctgtgcaatcccacatcgcctg

SEQ ID NO: 352321 - DNA, 934 bp, Cannabis indica
aaaaaaatatttatttattgatttgttatttgtcaaatttacattaaattttagcacaccattagaatatattttttctttgaattaattatattttaacttttccactacttatttacatattttttaatgatttttttcataaatgtacaacaaaaataacataattacaaaaaatatacaaaaaaaattattttaaaaacttatatattttgaaaacttattacatgaaaccatacattttaatcattaaataataaaatatgtttattaaaaatcaaaataaataattgcgtaaaattaattaaacagttttataaaaataaacaagttaaatatttatttattaaaaaataaatatttattatctatagtacaaattatggtaattttataagattttttttttaataaaatacaatatcaaaattataaacattaatgtatataaatataaatcaatacttaaaattactaaaaataaacatgacatagagtgatataataaacatatttgaatattattattttgtttattaaattagtataaataaaaaacaaaataaacatatatatataaagtattttatattattagtatgtttattataattataaacataaaaataaacacaactaatttatactatactaaaattagtattgttgaccgaggttttcagcaaccaatacaaaaatataagattagagaactgtaagaaattaagagaagaatttttacgtggttggggcgttaatgagccttagtccacgagtctgtgttatttattggatagtattaaatacagagaatgttcttggtgagtatttactcttcttacacttatgcaacccaaaattctcgaccccatttaatgagctttgagggggtatttatagtgtttttggtggggtgatccccaggattattgta

SEQ ID NO: 352322 - DNA, 591 bp, Cannabis indica
aaacggtaagttgctttcttctttctcaagtttgttacatagtgtggatcagttacttgatttgtttgtatcgttaccatctcatctggtttttctagtttttgtagggttaaaactgttcatactaggattcaagcaatatgtaggttttttaagatctccaactcattaccttctggtttgataaaattctctccaaggattgggactgatttttgctggcagcaatgtcccacactagttcaggaatttattgtccagaagttttagagttgagtttcctacagaatcggccatcccatataaacttaacccctcaaaacccacctccaaattagagctaaatgatgctagggttagggaacacatagtgagaacccaacaagaagatatttctaatcactacaggcgcttcttgtaagaaatatctgaaggaaaatgccgattcttacgagaggtagcctggccggaaccacccagcgtatcctttattcctgtggaaaaacctttgtttttacccaacgtcacaatttcctttgaaccaggtgacttggatttcaaaattatgcctcccaagccacgtacgtctaa

SEQ ID NO: 352323 - DNA, 536 bp, Cannabis indica
aaacaaccacatatatactattaaaccatctctaatcgaaaatataaaaattgatttatgtttgacacaaaaagtaattttgtgatatttttatcaattttattatgctctaatatataattataaatcttgatgtaaaatttaatatgtcatttaataccccatttaataatatattaaaaaatataaaataataccaataatgtaaaaataaatataaaatttaataaaaagaatacaagttatttaatgtaaaagaatttgttaactaaaattaataataaaatattaaaaatgacataataataaatataaaattatagtatttattgtaataaaatttttacatcatatgtggtgatttaaattttgatcacttttgttatcccacatatttacatcacaatttagcacatcattagagtagagttttaacaaagtgagctatatatttgacacaaaaagtgattttgtgatatttttatatcaattttttactattgtgctttattgcataattataaatcttgatgcaa

SEQ ID NO: 352324 - DNA, 520 bp, Cannabis indica
gactttcagttcctaaagcagaaaatcatgaacaaaattgatgggtggaaggctaaatgcctctctcttgcaggcagaactactctagtcagttcagtccttcaaagcatttcaacctacttcgatgtcaacaactatgattcctctctccacctgtgaggaattggaccggatggtggcaaaattctggtggctcggggcaaaccagaaaaagaataaatattgtgctctaaagtcctggggagatctttgccaaccgaaaaactgtggaggtcttggtttagaaagtttcatgccataaattttgctcttattgcaaagcttttttggatggtgctgcagaagaaagataaatcgtggatcaatactctgtgtgctaaatactgcagtacttttgatgcttggacagtggagaagcatgattccgattctcgagtctggaaggatatccttagcaccagaaaactttgcactgaggggtaaggggtcatcatagcagatggggacatagacatttgga

SEQ ID NO: 352325 - DNA, 560 bp, Cannabis indica
actttgactttgactttcgggttgacttttgacttttatcttttgaagtcctcttttgagtagggtcttgaattcttgatctcttgatgaaactttttctcttatgaagtatgaagtagtctatatacttgttgaatctacttctttgattatgtgtgactttacgaagcaaatattgatactttgtgaatttgcttgcaaaatggtcaagaaaatattagtaacaaataataatcaaatatttgtttatcatcaaaataagtgagtggttgacttttggtcaacatcagggagcataaatgttatgccaagtttaagaaatgtgaattttggttacctcaggtgagtttcttgtggcatgtggtaagtaaagatggtattctagtggatccagtaaagattgaagcagtacgtgactggcctcgacctaagtcagcaaccgaagttagaagtttcctggggttagcagggtattatcgaagatttgttgagggctttgcaaagatttctacgcccttaactgaattgacccgaaagaattgtaagtttgtttggactga

SEQ ID NO: 352326 - DNA, 1673 bp, Cannabis indica
tatcaaacatagcaaaccttagttaacagttctagcttttttgaagttcatgatcaggacatccctgaatcaagtaatgatatacactaagtacataaccattccatcattctgaagtttttcctatcactagggtatttccctagaaggacttaggtagttgctagtaactaatcataaacctttcattttcatcaatatgcaatctaaattttcggagaggtaagtttggatacaattcgaagttcaacataatgatctttgaactacataaccaaatatttttccacccctatcagttcgcaagatctttaaccacttaccttaatgattttccaccattgctaaaaattcatgaaatttctcaaacatttcaaatttctttgcataaggtaaatatctagagtgatcgtttatgaatttagagataactcatatccacccctgaatgtacatccatatgttcaaatacagatgatcctacttccaagtggatattagcatattatctctttgcagtgactgatcttgtcaaaaacactatgcagaagattcaaatgccatagacttatattactgtggttgtggtcttttgatgacttaggtgtagttacaagaaagagttcttaaaatggttcaagtggattctggtcacataatacaaaactcataacccatacatcaacatacagtttggatccattgtagaaaatggatattgacagcttgtgaaaattatactgcattgtccaatgtattttaaaagttgaaatttctatttggaatctaaaatctaaagtcaaagacttcaatttataccaaatatttctttagtaatcattctttcttggaccattactaccaatctaactctaaattaagttgcctatagtaagcatatacaagtagcagattttctaagatcgagaatttatatcattttgggatataatatctagaatatattaatttgtgccacttaatttttatagaagaaaatagagtgacatcataagcagatgatttataaacttttttatccaatgatatactttctaagcattttcataatgaaaaagctaagaggaaaaaaagataatttcaattaaaataaaaattcaacaatgtcctgtttaggtgagagtcaaagttattcttattttataaacttcttcattgctttatattgtaaacactaatctaagttgtcatctttggatgagtcaactagatgttacattttcaaatacttatcttttgagatctaacactatttttttgtctaacggatgacaatcttttgggatgtctcattaaaaataaaaaactaagttaggccaaccataaagattcaaaattggtactgcaataattaataacagaaaacaacataggttcaatataaattcatacacaattgagaaattatatatatttagcatgtaataaagacatgtgaaaatacaaaacaatcatatcttaaataatttccaagatttctaacaaactgatgtcccgtttaggcgagagtcaaagatatcattcattgaatagagtagtcaactcatctaaaacggacatcattctagcaaccttttactcgatcaaggcgagtcaaaatcattctatcttatgagcttctaccattatttcatactttgtaagtcctactc

SEQ ID NO: 352327 - DNA, 594 bp, Cannabis indica
tttatcaatacaattaaactgtctaaaattttataaattttaaattcaaatttaattatttaattacatataactaaaattcgtttggttaaattgattaaattttactttggaatactaaatatgtataattcaaaaatataagataacaatttaagattttttaaaaatataagatagcaaatatacttttgacaaggtatactaaataaggatactccatttattaatttattttgtgactgcaattcaatggcaaatttgtccaaggcactaagagcatctccaaaagtagcatctgctaaaaatttacacattatttaaaaatataatattttattttatctctcttccacattattttttgcactcttacttctaaaaatactctaatgtataacactctttaaaaatactataattataatttcactcattattatttactatatatcctaatttataactataataactttttagtttcaatttttatccaaaaaaaaaaaaatgaatagcatgaatactacaacataccatccatgcaaatttttagaaaaacattattttctctccaatggtataacatctcaa

SEQ ID NO: 352328 - DNA, 1564 bp, Cannabis indica
aagactaaagaaatttaacttgcaaaaataaaaagatgaaggttttttacgtggttcgggtgttaataaagttagaacttgttttaccaggatctagatttactaatatgtatgtttgattataatctatagtctaacatcctaaatatgaatttcctaaaacaatgaaataaacacataagagattaagaaatccttacattgatggcagcagaataataatgactctttccattcagatctctagcctttgattcttgtatatagcagagcattatcaagatctgtacctggatcttctctcgttcaatttggttagacacagtcttcctcactatactaggtatttctctgacatgagtgggcatactctcaatcaccaaggctttgaaatattcagtagagaagaagaggatttcgaaatagaggaaaggctttgttttctatttttgtttgacaaaagagtctgaagtcaattaagaaaactagagccatcttattctatttataggatttcttctagggctaggtttagaatttagatggaattaaaaaagaataaaaaaaaaagtttgctttattaagccacctaggccgaacctttaatgggccttatggatttcaattttgtcattttgttgaactcattttttcttttcataaatgctatattttaattctaactctataaatatcaactctatctttttaataattataattaattattaaataaaattatcatttaacttatttattaattagacctcaaagagtctcttaattaataaataaaccttaaattctcttttcttctcaattgtgctctttcttggtgaaaattcacaaacaagacatagtcttatttagaaataattgatcaattaaaaccaattaattgagactacaaaataatattttctcagttagtgtggggatcatagtccaatgtaatcaagtttccaatgagtagatccaaaatttaccaagtaaatttcttaacttataaattcttcctaattccactatagatttagaattgcacttctaattacatagaacgctctattactaaaaataaatgtaatttaaattacccattatttcaatctaaatagtcaaatatcctctatagatgatctacatcgagtatgaacaactttaccgtcctatcatttaatgtattttatccttaaaatactttagctatttctaaatgatattttaataaactaatataattaatgaaatgagcgctcaatcatttattgcattaagccaagcttgaaaaaattatcgtttcactccaaaaagttatagaagctataaatttcatatctacgagtaagaaaagtaaaaagtaatcagtacttaatagattaatcatgtcaattaccctatagcataaaatttattttaacacaaaaccaaatctttgatatctgaatatcaaagtctttaataataaaaattagtatataaaatttctacatgtgctgtgatattataaaagaagctaattagccaaaaaatcacacaaatcatatatatataggaaatgtca

SEQ ID NO: 352329 - DNA, 519 bp, Cannabis indica
tttttttttctttttcattctacagttcaaatagtttattttattattcaaaaaagcaggtgttgactgtggatttagccaatcgacacagagtctgactaagattggatctcgcctatgactgccacgtgtggaacgataataaatgtaaaaagaccaagatttatacagatgcgactccttttgtttaggtaatgacctactcctttttagttgtattcactcttgagataataccaagcagattacaggctatgatcttgtaatttatagctaggctctcttcaatattacaatatattttgcaggtgagaagtatgagaaaagagagaggacttattgctatagtgcttctgagcatgattgaaacttagaactgttagactttttatttgggcttacattaatttttattagttttattaaaacatgggttgattggatagttctttattgtgttagcccatattattagtgatcaatagttaatcggcgagatccaatcttagtcagactctg

SEQ ID NO: 352330 - DNA, 698 bp, Cannabis indica
ccgtaccaataatggcattgttgctgttcagggattaattaataatataaatatatgttattctaaatatacacatatatcatatatatatactgctttaaataaaaataagatacaaatttacgtagttcaacaaattgtatttgcctgcgtctacgatagcaaacagtcagttgtgcatctttattaatgtgaaatttataacgatcaaaagcaaatgatgtctatatttttacaaaaatgatcaatcttgggcatatgtggtgacctagattaacctattttgtagataagggaggtgtattagaccatataactgagtttgtaagaagaaagaaatgactgtgaatagaagaacttatgattcgtaggagaaccttggtaagttgatgtgttggaaggtagtgtgagcagtttggttttcataaaggttatgaaataagcagcgtggtttttataggagcttgctaaataggtagcctggtttatataggagcttgctaaataggcagcgtggtttttataggagcttgttaaataggcaacctagtttttaggagcttgctaaataagcagcctggtttttggtaaaggtgtgattaattagggagagttattaagaacgagatagatgtgtatgaaagagtttttatgagatgggatggttgtgtgtaggaagagaattgatgagacgtgat

SEQ ID NO: 352331 - DNA, 602 bp, Cannabis indica
caacttcttactatcctcctgtagcaccacaagatcaagatcattctcttactgatctgctcaacactttggtggcttctactactcagatggagcagaataatgcacagtttcaaccacctactcatgttgcagcatatagtgaaaagccaactactgctgagctgattgaaatgttagcagctaataccttacagtttcagcaaagctttcatgaaacgatataaagccttcaacaatctttgcagaagttagagaatcttgtggagtcaatagcaacatctatgagtgatatgaaattcaaacttcaaatacttttcttgcacaagaggagagtaacccaatggagaatgtcaatggcatcactatccaaagtggtacacaacttgaattaccaccacaccaagaagttaatgatttgatttcaactaaaggagtcaacattaatccttgaaggatcatctcaccaaaggttgaatctcctactttagttggtccaccatcactgaaaaaaaccatacaaaataattgtaccaacttatgtcactcctccaccttgtccatgtagatttaaaaaaatctaagaaataggggcccatcaa

SEQ ID NO: 352332 - DNA, 897 bp, Cannabis indica
aattcatgacgtttatggacgttttcaaaaactggttaggtgttcgtaaaacaaccataaagcaacataaaaacaaccattaaacaactgtttctagaaaactcaaaattgagtttttgtacctcctctccgaattaaatattcctccgtcttaatactcatttaaatgatataattggttactgtaacaatttctagcagctagaaacttattccattgattccataacttccatatgtaataactcacttaattacacgtgatccttaagttacaatctattttcagatttgtaactcctcatatgttacaatttttatgtgtattattatactatatatgatataatataacctctaacacataatatatattaatatcatattaatatataatttatcatatttaaatattttaatctatattatcactacaacatttattagaaataggagcagacacattaccggcggagcatgtccgcccctattaatgggcttattaccggtggagtagtacaaattatttttttaattaaatgaacaatagcggtggacagtaattattaccggcagaatgtctcgccggtaatgggcaatgtggtttgtgcaggaaaattctcgcttttttttaactttgaaaataattagcggtggacttttaccaccagattccaccgctaatagaacaataattttcctattttgtactattaccggcgaaacccactaatgttggaaattattttaccaggatcatagatctactcacaagtatgttgattaacaccctaaatataaacttctaaaacgactataaaataaacacatataaagtatgagaaaccttacattgggtgcagcggaatattatgtctcattccgttcagatctcta

SEQ ID NO: 352333 - DNA, 696 bp, Cannabis indica
taagagaaatgttaaaggataccggtggtgcctaatacctttttatgtttcaatatcgctattggtccaactaagtatgaggtcccatataatttaatataataatttttaggaagtatcgctagccaatcgcaacgcgatatgtcgaaaaggtatcaggcactactggtgcctaatagcaatgctctatatataataataagagtttttttcacctccaaattcttttacaattttgcccttttattaatgtcttttattttaattttttcacaagaattttattgtaatttaaaaataactttcttatttaataaaaaaaaattaattccctttatttatcggatttcatgtcttttagtttttaccttttacaacttcatccttttaatttcttttattttaactttttcacaactatcttattgtatttcacatttttgcaactttatccttttaatttcttttatttttactttttcacaaaaattttattgtatttcaaaaataactttcctatttaataaaaaaaataattctctttgtttatcttagttttcacaaaaataatgcaagatgattgataactagggttgacaaatcgggtcaaacatgataacacaacttgaaactcgcacgagagttagtggatttgggtttgccttaaatggaatcgggttgacttgtctaacccgt

SEQ ID NO: 352334 - DNA, 920 bp, Cannabis indica
gaatgcacttgtctgtggatcgggagatgaaccggctcagggcaaccacctttccgattaagctctgtacatctttgtgctttttggaggaaggcatgcttaggagagcttgaattttttttgggtttgcctctatccctcgttggctaacaataaagcccagaaactttcctgatttgaccccaaaagtgcatttcttcgggttaaatttcatcccgtatctccgaacaatttcaaagcactcttcgaggttgtctgcatggctcgcatatgcctttgatttgaccaacatgttgtccacgcacacttccattatctgtcccagtaggcctttaaacatccgattcaccattcgttggtacgttgcacaagcattctttaatccgaaaggcatgaccaggtagctgtatacccccttatcggtcctgaaactaatgcattcttgatctgcaatgtgcatcttaatctggttgtagccggcataagcgtccatgaaggacggtagcttgaatccagaggtggcgtcccccatttggtcgattcgtggtagggggaaacagtcttttgggcaggccttgtttagatcggtaaaatctatacatacctaccatctcccgtttggtttgggcaccagtactggattagccagccattctagataatacacatctcagatcatgccactggtaagtagtttgtccacctctttctccagggcttttgcttttactaggtcgagggggcgccgcttctattgaaccggtggcatgttcgggttaacgttaaggacatgggttatgacatggcatgtcggtcatgtccccttggcaccatgcgaaaacatccgtggctgcccttagtgccttaattattttttctttttcctccggctcttggcttttccccagccggaggacctt

SEQ ID NO: 352335 - DNA, 373 bp, Cannabis indica
aaatatggatttaaaacgatgttcgtgttgatttggatggtttcatgatggtttatgtgcatatttgatgattgtatggaaataacaatgtatgctgtacaatattttttgttttgttttataaatatttttattggaaagtagacaaaaaattaattaatttaggcttttacagaactcaatttggatttttgatgaattagtaatgattttttgaatttagatgaaaatatctgaaaccaagcacacacgtgcgcttgcggatggggacgctccctcggacaagaggccttcaaacaaggcgctgtgcagcctctccctcgcccatgtggagcctcatgtgatattttttgattcaaaaatcgtttttcat

SEQ ID NO: 352336 - DNA, 613 bp, Cannabis indica
tatttgaaatgaagttttatttagggcataaaacccaacacttataacatctgggtcgaatatgactcatcctgttacagaagtgacacactgggatgaatctctccatttgagatatattctctagggcaattcttcttccatcgaacttcacctttgtaggtccagatggaatatggaattttccagtggggtttgaggactcagatgtcgagggaagtgatgattgcttgttagctttagaagaagtggaaaccccattatccccatattcaatagaatgatgactttgagccatgaaagccactacttgtttatcctcatcaaaacttttgcttgcaacataatctttttcttcgtcactatcgctccaggtggcaacaaaggcattcttctttttgagagtgttagcacactcagcctgaatgtgtccaaagccatcacattctctacattactatgctcatgctcttattgtcattgagttgctgaccatgcctgaagttccccgcaagatttctattgggacattttcttacccctgaaaaaatctctctactctttttcaatattttgcatagtcttggttaggagatctatagtttcatctgag

SEQ ID NO: 352337 - DNA, 476 bp, Cannabis indica
aaataataattaattaaaaaaaataaataaaattatcaacatttgatctaaatttagatcatcctttatttgtccatttttagtctgtgataacttagctatagtttttaagatattgtctgatattttttttttcgttttttgcaagtgtgttatattttagcaatgtattagagatttgtatatttattgttcttacaaaaagcaaaaaaaaaaaaaaaaaaaaataaaaacttaaagtactcggtagagtttaaccaaagaaatcaactgcttggacatctcatgctgaagttcttccattgcagcaagacgattattacgttctgaacttcagtcttaacttccaggagttctgctgcagcagaacttgaacttgcagcagcagcagcagcaccagccttgggccgttttgaaacaccatcaaagtatttcgagggttggaatgtaggaccaatgataggggctcaagtgtt

SEQ ID NO: 352338 - DNA, 460 bp, Cannabis indica
atctaaaactaattttaaaaaattaataaaaattaattttattctgataattagattttttaattgaaattttagattctacacaaaattctacctaaatatgaattttgtttcaatgaaacacaatttttaaatcaaaagatattaccaaaacaagattgcactaggggagtatgcattgcatactctccgtgcgcacatgagactgcaaatgggtgagggagaggctgcaagcagcctgtatggggggcaaacctcagtcaggaagggaaaattcggatagcgccttctctgaaggcatcttgtccgatcgagaatccccatccgcgcgcacgtgtgttgctcggtttcagatatttacatccaaattgaaaaaatcataactaattcataaaaaaatcaaattgaattctgtaatatcctaaattcattaatttttgtctactttctagtaaaaata

SEQ ID NO: 352339 - DNA, 877 bp, Cannabis indica
atatgggattgataacaaaagcccctagatatgtggctcacatgtgcatatgattaaataatatcaattaaagattagcaaagatattcaagatcaaaatcaattataaaatacatatttaggtgaattatttcatatatattaattgttttcttaacgttttttttttattaaatttacggtttggattgttccagtagttaatttattcggtgctttctatgtgggttgttatacgaatttcaattgcgatttaagttgctttgttagttaatactataaaaatatttctatgtgtggaattccgtaaaaaatgttaaaaaaaaaaaactcttttgaagtataaaaataaaaaacctctatatttatatattatatagatatttcaaatgaaaatgggttgaacttgacgatgaaaaattaataattttgaggacctcatctaattttatcaaagttacttagatagctagcaaactgtaattttgttaagtgattaattagtaattagagactgttattaattagttagtgacaaattgtttgttatttactgtgttatcaaagttggctaatatatacaaactccaccggaagctgactggaaggtagtaattaaagtggattatctttttgtgatttctcttgcactttatcaaatagtttgcatttacatttgttactctctccatacgtgtttctgtgatgttgactaggttggtgaccccaccgatgattctcattaccttgggctattgtgttttcttgactactgcatacttaatttcccaaagttctaacaataccatgtgtcacacatgagcttaacttatgagtcttgcctttcttaattactacagagattacttgccattac

SEQ ID NO: 352340 - DNA, 1351 bp, Cannabis indica
cagtatttttgtaaattttcccttattattggagttcaatattatgaagatgatctaatataaatatatacatatatatactatggtggtgtttggtaatatttttgttttcttattttttagtcacagaaataaaagaaaatttttgttttcaaaaattttgtttttgaaaaataaaaatgtgttctctaaccacttttgtttttcaattttaaaaacagaagtatgttctgtaaagttcatttttatatttatttttatattttatttaagccaggtctaggtctatgatcgaatttgggtttgggtcaagggccgggttcggcgtcagggttaaggccagatttgtgtccagtacgggtctagtcaaagttcaaaatattgattaaaaaaactgtttaaagaaatattgaaagtaattatttttgctttcaaaattttgattctcaattgaaaaattgaaaagtgaaaatattttcatagaacacgattttgaaaaatattttcacttttttaattttaaaaacagaaaactgattaaaaaaatgttatcaaacgtcacctatatttattttttatttttttgaaaaatgcgtagacatattaaaacaccaaataagttagacctcgcggtcattacaaattaagttacttagaatggaggacggatccaccataccagtcacattacagttgaaagcccattttgccacattatgagctgcatagttacaacttctagaaataaacgaaaaattacatctagtcaaaaggttcgagagctttttacattgaattacataattagtaataccccaagtggaggaaattcccttcagagtattgatcaccgtcttagagtcgctctcaccgatcacaaaagaaagcttcccactaatcgctaattccagggccaacaggcaagccacaacttctccaataagcgaatcaaagaaattgaggatattgcttgctacccacaaaattgagtccttatgatccctagccaaagccaccgcacacattgagtcgctaccaaccttaacgtcacagttgattttgacccaatcgtctggcgggggagaccacatcgaagtcgtgcaaatcaccagcgtgggaaataaacaaaggatgtaatttgcataacaagtaaaaatgtaacgccctaatctatagggacgccacgtgtgtgattttataaactagtttaatactaatagaataattaattattaaaaaccgtgataatattaaaaacttgactaaaataaaacactaaaaatggacattataacggcataaaaagtgtgttccgggaatccctgttgtaaaaagttttgctaaagaaata

SEQ ID NO: 352341 - DNA, 738 bp, Cannabis indica
aaaactgtcaaaaccgccaaaaaccgccaaaacccgccagatcgaaaaccaccaaaaacagtacggccggttttatacgattataatttctaaacggtcggttacagctttcgtaaaataaaaaaccgtaaccgaccggtcggttataaaattgtaaaaaccgaccattaccgaccgattttcacccctagatatttatatatgttctgaacttaatagaatttatacattaaaaataatcatgaaataaatcatgtaaaccatgcaacatagaatgatttctgatctttataaattagtaaatctgattatattgaaatgggttttatttagggcacaaaacctaacaattatatcaacggacactgcaataacactcagtaaatataattctagaattactaagagttcaatttcatatttataatggagaaattatgaaatcaatacataaggttatttgattgttgagattcaataaataaatatattttattagaacttagaattatgggtccatggtccctagatcaccaccttgaaatactattaacgcgcgaaataaaagttgtatatgaaagttcagaaaaaatctattttcaattatcaaaatagtaattatttgttttgtaataaataatttatttttatattaattaaatcgggaaataataaaagttgtgaggacaaatggaacaacccttgtcttaactaagacagaggaaggcaccacctaca

SEQ ID NO: 352342 - DNA, 961 bp, Cannabis indica
tagagatgccgagaaagatggcggcagcgtcgtggtggagatgatcggagcagaggaggatggtccgatcgttccactaatggggagatcggcaccgttgccggagccaaaagcaccagaagtgggaggatcagaccgaggaggaggggctgcgatcgtgtccgacgaaggaggagcagtcggaagtaggggcggcggagcttcgacgtcggcgatgatggtttcggcggtggaaagttcgtggccggagacggaggcggcgaccatggagtttctagtccttagagccatgaagaagattaaggaaggaagggaggtgaagaaaatggaggctagggttttttgtttacatctgataccataacagaacaaagaaactctttattattactgatattgctttacacggctatatgccaaaaagaataaaatgatgaaaacaacttaagtatatatagggaaaataaggcagctgccctagaggaatgggccgagtatgaggtccagtgggccaataactttaatactccgttaaatgctgtgtttggtagactgaaaaagtgaaagaaaataaaaattaagagagaaaagtggagagaaagagattatcatcaagaagactgttttaattgcacccctaaaacttattaacagaaaataaacttaaatttattttaaatatcactcttaatatttgttttaagaaaaaattcatattattttgggtaagttttaataattattttaaatttttttcatattcattttaaaatcatttatatatatttttttatttttaaaataaaatttcatatattattttattttgtttattttgtcttaatatttaaatatttgttatttttattctatatgtgtatatcttaagattataattataaattaaagttatatatttataatattaaagataagaaaatcactttatatactatttttt

SEQ ID NO: 352343 - DNA, 525 bp, Cannabis indica
agaactgaattctcacactaaattgaaatctataaaaaaacaataaaataaatttatagaatactttcatatgatttcaaaaccattattgttaccgtaattcacttgtaattaccattacatttaaagctggtggcatcatcgtatctcatttataattatcattactgtagattgaaatttaaattaggtatgtgaaaattattcataagttttagtgaattcaaattataaattgtaaagatttttaattaacatttatcaaatttagttaactccaataattttttattttctatatgttaatacaattttttttttattttttaatctaattttgaaatcgatttaaatcattaatttttatatttaaaattcctaaagtgatttattatcaaagtaattaatattaaaaaggaaagttctatttgcaccccataaaatgataaatacacctcattattaaaaaaatatacaaacttaaataatttttaaaaattactctaaatatttttttaaaatttt

SEQ ID NO: 352344 - DNA, 665 bp, Cannabis indica
acccgtgcaaccttagtcgcctctgtcatgaatctgctgatgtaggctccccaaaagccccccctggtctttgctttacttcgaccagatctcctaggtgcaacgaaagttagcggaggaggaaaattgtgcatgaaattcctaggagaaagccttccatgagttgaattttctgggggccaacttgaaataccactgttggacggcttctgcaagagtggcaggaaaaactctgcaacatacatctcctcgtactccttgcaggtccatttgcatctcaaaatacttaaggtgggataagggatcttccattccagtatacatcttccaggttggcatcttaaacttgtggggcaactccaggatattaatctcgagagagagaaaggggttccacgtgctcggtccaactcgagatcgttgttcctctgaccagccaggccttggaacatattttttagttcatccaactgtgcatgcacggctggactaaccttttcggcctcttggccgaccttagttacatcagcatctttttgagcaggattttgagggcggattccaggttgcacgattggtgcgtcaagctgatcgtccactcctctcctcctgtttagatcgtttttgagatcatgagattgttggaatttattttaccaggatct

SEQ ID NO: 352345 - DNA, 608 bp, Cannabis indica
ttgtcagcttttttggacacttacgtctcttctacagagaaggttctcttttatcaattgaattggaaaagaaaagtcagtttttatttttattatacagcaagagaatgttctcttcttacttgcatgtaagtttctcttgtcaccagtttagtttatagacttttataccaaaaaaaaaaaaaaaagaaagtttagtacttttttttcctctaaattaacaaaaatttccctttaaatgatgggatattctagaacatcgtctcttactctcttaaaaaggatgtacggatacatcatttacttattttggcattcgggacatttttttaatattcatgtaccttatagctatttaagatattctacaaatttttgaaaaattcagaataatttataatatagaaaataatgttcaaacaatctattttatatacgtataaaataaaatagtcacgtgtacaacttactatttgaacgtagtttccggtgtgttaatttttttcaaatttcttaaaattttgcatgatgtcttcaataactctaatttacatgaccatgagaaaaaatttgactaaaaaattattttagatactaaaacggataga

SEQ ID NO: 352346 - DNA, 671 bp, Cannabis indica
tctataaatctataaatatataatttataatctataaatattatataatggagagatataaaatagtgacatgtcactataaaatcactctaagtagttctatctattttatcattaactaaggcaacacagtaaattttttttttagtattataataaatagttatataaaaatataattctaatatatggtaaaattataaatatattatcttatttcatattattattattattaattttatttattaaaaactaaatgcacaaatttattaattatttattaaaaagtttaaaatttattatatgtagtatttttaattgtttgttaaaaaaattatttttataacaataaataaatagggtggtgtaaaaaaatttacggtgttccccataatacattattttcatatctcgatcattcaaaactattattattgtatctcatttgttgtctcattctatcaccgtatctcagccgttgttatcactgtatctcatcccttatcattaccatagttcacttgttgttgtcactattgtatttcccaaatctatatcttaatcttagatttcatctcgaattttaaacattaaaatattggagaaaattcattagtttgttctgttattattaattaatatattttaaaaaagtgattattattttt

SEQ ID NO: 352347 - DNA, 678 bp, Cannabis indica
atatttctgtgaagtctaccccttcaatctgtgtgaacccctttgctaccaatcttgctttgaaccttaccggttcatccttagtcctcccttccttgccatcgggtctaagtacaactctccaagttttattctttatgagagagtacatttcctccttcattacttttgaccaagccttgtaatttctgtctttaagtgcttcttcataagattgtggctcatagatctcagctttaagtttgcacattaggcatatgcaatactctcatcccacacattgtaactgtacttctagttaggcttaggaactcttctagctctatctcttgtaagctgatattctatgagatcttcccgattcccgtcttcttcatcttgaacttcatgttccacctgaactagttccacctgatttggtgcttcttgaggttccatttgaattggttccacctgttctggattaggctctacttcagttgggccgatttgagtaactccaatatatgtacctgcagggttagtttctgtagaaccttcatcaagctcattagtatttttacaaggaaaatcattttcttgaaaaaatcacatctctactaatgagtgttttgaaacctctgttccttttacccacaatctgtagcgctttacaccctcggggtaacccagaaacac

SEQ ID NO: 352348 - DNA, 591 bp, Cannabis indica
tgaataatttacattaaatatcagaaaattcattattcatatatgagattgtggcttgtaattatacatagaactaagaccacttagctatgaataaaacagtcagcaacatatttaagttatagaatctttaatcaatggttgctagtacggttcattgatacccgttctacggtgcaagtaatcttggttcgaattacggatgtagtgagacatcaaagtgaaggtactgtatataatagagattatatatgataatgaccgatatgaataaagttgtctttattaacatgtcgcttatcataaagatctaattcatatcataacgatgatcaatagtagatcggcctaaatcttgagtcatcatgaattcctgttcatgttattagtttatttgattcactcgttaaagtttcttagagaatatgattcttaaaacttctgttttggaaatctaataatatggatgactaggaacatgatgtacaaatatggaatcttgactttcctaacgaatcgaatgttggttccctttaagtattaattctagaactgaaatgttgtgcgtaattcagatggaatcttgaatta

SEQ ID NO: 352349 - DNA, 783 bp, Cannabis indica
atctctataagttatgccaatatgggaggaaattatcatatattgaaatttttgtcgacaatagatgttgaatgtgtacatatgcaataaagtaacatgggatagcaatgatcatggtattagattttttgagaattatccgacatacattttatttttggccaaattattatgacgcagtccagacaagtttactcgcataaagtgaagtaagacctgcagggtgtgtaaattaaatatttataatgagaaatttgcatatatatatatattatttgtacataatgaatttttgtacaaagtttgcatatacatgagattgattgaaataatgcttaaatattgagaaaatataatcaagatttgattatacctggaatattatttatgaggatttacataaatgttgcaacaaaaagttatttatttgaagctcctaatatagtgagaatttgaaataaaccttatctaaaaattctagaagaatttaatacatgtcttaagtgatataaattcaacaacaacaatggaacatacaacaacaacaagttcaatttcaacaagattgacaccaaaacacttaacatgcaacaaagaacattcaaagcttaaaagagcatgctttccaattctaaactcagttacaaattcaaaattaaagagtgagaaaaagaactacctcaaattcaagccacaaccaagcttaattcccaattacaaagcttataatccaacactaacatcaagcaattctcaccaatttagctttgaaaattagagagg

SEQ ID NO: 352350 - DNA, 968 bp, Cannabis indica
attgtactctggtacctattgttgtaggagaattcaattagaggtaagtacttactccatgaaccttcaaagtccatgacacaggctcgcaacaaatcctctaatatccaaattgttctttctgattgacgatcagtctgagggtgaaaagttgtgctaaacttcagcttggtacccatagctttctgaagactcacccaaaactttgatgtacactttggatccctatctgaaacaatagatttaggagctccgtggagacgaactatatcctttacatatagttcagcgtactgatccacttaatatgtaactttcactgccagaaaattagctgattttgtaaatctgtctactatgacccatactgaatcatacattcatgtggttctaggcaaaccagttacaaaatccatcgtaatgtcctcccacttccactgaagaagggcgaaaggttgcaacaaccctaccgacctttgatgtttagctttgatttggtgccaagttaagcacttggacacgtagcctaccacatctcttttcatcccataccaccagaagtagggttttaaatcttgatacattttgatttcccggatgcagtgaataaggtgtggtgtgagcttcatcaagaatttcttttttaagctcatcaacattaggaacacaaactcgagctttatacagtaacattaaattatttaagattgaaaagtctttaggccgaccagccattacctcatctcgaatcttgactagcttagaatcctctaactatgcccttctaattctttctagcaagtcagactgaagtgtcaagttgtgtaattctccaactacaaactcaatctctgcactaaccatttaagaagctagttgaggggctttcataacagtagtgaaaatctgcctgggacctcttctactcagtgcatcagccacaacattggccttcccggggtgataca

SEQ ID NO: 352351 - DNA, 788 bp, Cannabis indica
atatatatatatatactacacatatacacatatacatgcagacgtacacgtaggcgtggtttgagtttgggtttctctttccaattatggtaacgtaataatcataaattattatgagttttcagttatgattaataaaaaaggttaaaataataagtgtttttgtctttttcggaagaccgttttcgtttattccaattgctttttgcacgaacacataacgtccgttacacgtgtgggaacatccgtgcggtccacgtgtacggtcagactttaacctttttctcttaacgatttctgtaaccaaatctcaaaggatctctacacggtcctaccacaccttttctttttagtactttttttgttttctttctgaaaataaacttttattgaaaatactcaaaaatttatacataaacaaaagataaaaaattatctatccaaactaatttatcattcattttgagtgcacgaactgctaatacatgtgtacaataaacatgaatcagagatgcctccggaaaactgaatagtaaactagcaaaaaaatttaggaaggatcctactttaaaacaaagaagaaggatctcctaaaatatacagtaattgaaaataatcaactagactcaaaagatttattaagtagcccaatgcaagagaccaatccagtgcaaccactaaagctacataagtttagcttcggcgaatctatgaacctccctacaaaaccaaagaaaaaaaataataattaaaacatattataccaataataataataatgtaataga

SEQ ID NO: 352352 - DNA, 1040 bp, Cannabis indica
aatgtgtaagaatttatattgaaaaatattgtattttgttattaatgttgtagtataatttcgaatcttcattttttgtctaacttagcttgttgttttaatgggacaaatcccaaaggattgtcgtccattaaacaaacataataatgttagatctcgacaaataagtatttgtaaatgagacatctagttgtacatccaaagacgacaacttagactagtgtttgcaatatgaaacaatgaagagtttcataaaataagaatgactttgactcttgcctaaacgggacattgttggaatcttattttaatcgaaattgtcctttaattattcctcttaacttttccatttataatttgcttaaatagtatatcattgtgttatacccaaaatttggctggcacttcggaggaggacacgtgtcaactttggagaatacaaatcaacgaatataatagaaattatattaaaggatattaaaatagaataactcattaaatgcggagctgatagagtatatttataactcgctgactgtaaagtcttaagcgagataaagatgtacaaactattgactcatgaattagcaagaaatcattccgcgtcagaagacacaatcataaggatggcatcagtaatacaaagcgaggcaccaacctcgctatgtataaaaaggtggtgacgagacatgttgactgttagaacacttagcatataatatacattatacaaactaagcataacagttgaacgaatctgaactatgaatatcgtggcatccatctctctatagaaaggcatactcatggtaccttcactaatcagctccagacatctttcaatgagatccactgctctgttgagtaagctctctcaggtagaagctgacattcaaatgatggtgattgctgaagttcaccttgtcaccaagaactgcgattgtcagatggagcattatgtcttcaatagcaaaaacgacgggattgaaattatcaacctcgaaaagacatgggaaaagcttcagctcgctgtcagggtt

SEQ ID NO: 352353 - DNA, 1094 bp, Cannabis indica
agtccgccggagagttaacggagttaacggtgggaaacggagaaggaaaaagtttgggtactaattttaagagtattgctaaacctccaaagatttttttttgatcccaccaaaagataatagtaatttgctgcataaatatataaatttaacttctaattgtaaataaatatttatatttaatttttagcagtaataataattcagttatatttctgaaattctgtaagtttaaatattaaataattaaatctacgtattattttttattggtatatttaaacgaatttttttttaaataataaaaatttaataatttggaccaattagaaattatcacatagtaatttatttaactaagtacctatagaagtttcaaaattataactcaattattattaccgccaaaaattaaacttaaatatttatttataactgaaagttaaatagatatttataccgcaaattactatttataaaataaataaataaaaatagattagtatcaaatcttttagaatagtatgaaactttccacaagaacaaccatcttctaagataattttatgaagaaaagttaaaatttaattgactctaagagcactcataacagtttctctataatagaaaaactttaaaaatttgaaaaaaactgtactaaaaacacgctacagtaaatgttctcattcttcatttttaaatttttttttttaaatttactataaatatatgctttatatttatagaatactattcattgctttaaatatattttattaattattttgagttttaataattatttttgtatatagatatattatatattaatattatatatttgaaatgaaaaatgtattaaaattttaaaaaagtgaagttttggtgaactattttaaagaaacttgtgtatggtgtaaagtaaaagtgtgctgataaataaaaaaaaagtaaaattttagtaatgtattttaaagatagaataaaaaaaactgttggaagtgcttaagtaactaaaacataatttggccccgataataaaaattaggctaacctataaaagagcattccttgcagtttttctactctattct

SEQ ID NO: 352354 - DNA, 825 bp, Cannabis indica
actttgtagtatattctgtaactaacatcccctcagtttatactagttcagtgaactctttccgcttagcactgcggacagcttcattgtaatatttggaattaaatagctctcagaactcttaccaggtcataacagtgacgtcccgagtgagggttatcaactcccaccacacgagagcgtcctcctggaactaaaatgtgtggcaggtcacctgatcatttccaaccacccccataaaatcaagaattcgctcaatcactgtaagccactgctcagccttcatcacatctggacctcccagaaacactggaggtgctttcttatggaatctttcatataacagctccatacggttgccagcaacaggttgttctactggcaccgctggagctacaacgacctgagcttgatgcggaggcacagcaggaggaacctgctgccttaacctcaaaatttcttcttcttgttggcggattcgatcttgcattttcgcaaacctctgctcccaatccgaaggagcctgtggtggatttacaggatgaccaccctgaactctgccacggccacggccacgaccacggggattctggggaatttgattttcctgaccgcctcttgtctcaaccatattactctgacttcttgtattttgctaggcgtccattttataggacttaacttgcgaacccataaagccaggaaggttagacaacggtaaaaaaaaacttaataccgcttgtatggacttaaaagcaacacacttaaaataaataattataatctaatatgcttcctaacatgctttaataataacatataata

SEQ ID NO: 352355 - DNA, 572 bp, Cannabis indica
tttgacgtactgactgacctgcaaggcatttgagacgattctcgttgtcaaatatttccatccacattatcaaaagtagcacaatagtggtatctcaagctttgtttaagatctatcgattattgggaaacactcaagtaagcattcaatcaaaatttctccccattaaggcaaagaccagtgattagccctccatgggttggttgtaattagtttttgtcaaattaccattttaccttctaattacttctttatcctttagtaccattattatacctaaaattcagctagcactttagaggaggacacgtgtcaaactgagaagaatacgaataaacaaatattgataattatatttgaaaatgcaataactcattaaatgtggaagtgacaaagtatatttacaacttgctgactataaggtcttacgcgagattcagatatacaaactgttgtctcgtgagttaacgagagaccagggccggccctgaaaatttatgggcccaagacgaattaaattttggggccctaaaaaatatatcaaaaaaagagtgtcatgggatttgaaccca

SEQ ID NO: 352356 - DNA, 765 bp, Cannabis indica
tcatattcattcaatcccaattatatatatacatatatattttcatacatatatacttgttttctgttcatatatatattcatatacagtatacatatatatatatatatttcttcatttcattacgtatatatgttgtatatatatatattgtttatatacctaaatgttatatacaaatatatacatacatacatttcatgtttatatatatacatacggtatttttatttttctgtatatatatatatgtatatatgtttatatatgcattaaacattctgaatcaatacattcatatattaatatagattattttaagcatgaaaactcattttgaaaaaacaaagaaatctcacaaattttctggaaaaagtttttcggacccgaaaatttttggtgattttaaagtctttgttttacgtgttttcgatgcatgaaatctatatgaatctcttaatttttgcatttagattcatttggaattgatttggagtcttttggtcgtcagaaaagctatttccgatcgggtttgggtcaggtccgtcggacccgcgtgcagaaaaacgggtcaaaatgacccggattggctgaaggagatgacccaaacgacgtgtcattttccaaaaacgacatgtcgtttttagtgtttttggctgctatcgtttgatcaaacgacatgtcgttttttctttttgaaaaacgacgtcgtttttcaggatcgtgctgctgtcgtttttcatttttgagatcagccctttagtt

SEQ ID NO: 352357 - DNA, 777 bp, Cannabis indica
gacggtttattagacattgggaatgtcggatttggccgggaatttagaatttcccaaaaataccctttagtgcccattatgttattttaagtgaggaggggcaaaatggtcattttgccccatttatgttttgtcctttagtggacttagtaagtggaaaatggatgttatattatgttttattagctgatgtgagtaattaaaattcattattctcatttttcaaagtttcaaaaaagttagaaaaattgtgaaaaagctctctctcttttcctctctattcggctcccttgggcagcaaggaggtggattttcctttgtgattcaagtattttccagcaagtttaaagtaattctagtagaggtaaaccttgttctagcttcttttctttgttttcttggaattttggaagaatttgatggtttgcatgcttagtttaggttgattttgttgctgtgattttgttgttgtttcagaggtttaatcttgttattttgagtagattagagctagtttgatgcatgttatttgccttgattcaagcttggtagtttttagctcaaaactatagttttcaaagaaaagtgatgaagtttgttgttgtagttgttgctgctgtttaaaggtgttttctggagttttattatgttgaaataggttgagttatacttgttttagtggctgtttggagggtttgtcaagttttgagtttttgaactcaatcttgaacctccaatggtgaaatgagtttctgtggttgaagctcgattttaatg

SEQ ID NO: 352358 - DNA, 634 bp, Cannabis indica
gcagtggagttgggccaatacgagattatcttcgacgaacaacaattaagggccaggccttagcagactctatagtagaatgcataggcaaagaagaaagcatataagaaggcaaccccgagccagaaatacctcagccaagtatcaatgaagacaagccgacttggaaactacacgtggacgggtcggctacagatcaactatccggtacaggaattgttcttgtcacacctggggggcaacacctacacgttgtagtaaagtttggatttaaagcatccaataatgaagccgagtatgaagctttgattaccggtctaaaactagcccaggagatgaatgccgaacatgttgaaatctgcagtgattcacaactggtggtaaatcacgtatctggagaatacgaggctcgaggagaaagtatgataggatatctgtgcaaaatacacgacctgctcgcacagtttaaaagctacgctctcagacaaattccaagtgaagaaaaaatgactactgacgcactagctcgacttgcaagtagtaatgtaaatgatagagcaaatttggttcctatccagttcctcgaagagcctagcatcactagcatggaagagattgaaatgattgatacttc

SEQ ID NO: 352359 - DNA, 546 bp, Cannabis indica
ctttcttattacaattcaaaaacaaacaacacacatatataattattcatcaacatgaggtagtgacaatattgatgatggtgtagaagtagaagaagaagaagttctaggggccaaacattttgaaccaggggaagtagtaccactgcaacgatttgggtaacaacaaggggttaaaagagcacattcttcaccaagtttgcgacaacctggcaatttcatacatctgtttccaacactcagaattccttggcagaaaagcccttcacaacaaattttcatttgccatggtaaggcactgcaatactcattttctatataacaacgatcattactacttgggataatagtgacactatgtgctactctagtaccatagcaccaccccatattactaaccacaaatagaaaaattattaaactcttcatcatcatcattttttatatgtatgtatgtttatatgtttttttcttgatgatatatctatatagggaagtgtatatatatatagggaagctagtatcgatagctacatataaaaatat

SEQ ID NO: 352360 - DNA, 546 bp, Cannabis indica
gtaggtcttccggaaaaacttcttggaattcacatactatgtggacattctctggcttgagggtggtttctcttgacttgtctactatgctggccaagtatgcttgacatcccgcacgtatcatcttttgtgccttcagggctgtaactagcggtaagcttgactgactttgattccttcaaatatgaatgcctctccagattcaggggtgaaagtcactgtcctctttcggcagtctattgttgctccatgtcgtgatagccaatccatacccaagataagatcgtaatccctcatctccagctctatcagatctccactaagttccttgtctgcaatccttattggcgcatcccgcactcctctagatgatatcataacctcgcccgagggcaactccgtcatgaacttataactaaagtttacatacggtagttctaacttatctatcatctttaaagcaataaatgagtgcgtagctccagaatcaaataaaacagtacatagttttccagagataaaaatctgacctgcaaccacagtgtt

SEQ ID NO: 352361 - DNA, 784 bp, Cannabis indica
ttttttctttaatttttaaatttgcagtcacatttttgagaaaaatgaaagtgttattttttattctaatttttcagaattgtgcttgcaaatttaacatctattgcatctggtgtgaggttgtataaaagatgattattttttttttattttttttcttttgtttttttttttttgatttattttagtgttgttttacggtcgttttgtcataatctatcactctcttcttcataaaaaaaactctctctttctcttcattaatatatatgttttctttatttgatttctttgtcgagttcttcttcttcttcatcttgttttcattttttctttaatttttaaaaattttaatcacgtttttgagaaaaataagagtgttattttttattctgatttttcaaaactaggcttacaaatttaacatctattgcaatctggtgtgcggttgtgcagaagatgattagttttttttttaattctttttttcttttgtttttttttaatttgttttttttttttaattctttttttcttttgtttttttttatttgttttagtgttgttttacagttgttttgtcataatttatttattgaatgccgattttactgttcttgctctatgtcgtcagaattaatggttattttctagttgttctcgtgttgatgtggtggatctgtccgtaggaagatagaggctacaaatacatttcttcttctttttctatagttatttttgtggtctttttactttgattctcctataaatatatttgacgagc

SEQ ID NO: 352362 - DNA, 696 bp, Cannabis indica
agcatttcatccccaaacagatggacaatctgaacgcaccatccaaatactcgaggatatgcttcgagcgtgtgcactggacttcactggctcgtggagtaaatatttacctctaatggagttctcctacaataatagctatcaagccacaatcaaaatggcgccatatgagatgttgtatggacgaaaatgtagatcaccgcttcattgggatgaagtaggagaaagacgctacttaggtccagaagcagtaaaagaagcttcagaagcagttgaaaagatacggcaaaggatgctcaccgcccaaagtagacagaaaagttatgcagatttgaaaagacgggaggttgagttttccgtaggggacttagtgttcttgaaggtatcacctatgaaggggattatgcgtttcggaaaaaggggaaagttaagcccaagatttataggtccttttgaaatactggacagagttggtcaggtagcttaccgtttggccctaccgccaacattagcagaaacgcataatgttttccatatttccatgttacggaagtatgtacctgatccgacacatgtgcttaaatacgagaacttgaacttgcagcaggacatgagttatatggcacgccctgtgcgcgtgatagaaaaaggaataaaggtcttacgaaataagactatacccttagtcaaaatcct

SEQ ID NO: 352363 - DNA, 923 bp, Cannabis indica
ggtatgtacatagggcaccgacagtagaagagtttagttacttttaagatataaagagtgtaggcctccacaacggtttctattgcttcagcaaatgggccagctctgagattaatggagtggaaggcatggtttccaatatgggagattggaaatcgaagtggttctatatattcaaagtccctacgattaggtttgactttaaccgttgaccgagtatgtcgcatgtttcctgacttagttattttttgaattattttgagattccacgctaactcgctcttttcattttcgcagatagaccagctcgacctgcactcgacgcgactcgcagagagacagctgaagttctcgggagccttcatgtacaagatcgcgacgagcgattattgtgtacgactgccaagctgcgagaacataagctgattccaaagaacgctagtcttcagagcgagccggtgtacaaggaaccttctgagaagcaacaagagcgagtagataaacgcctctctaaacaaacttctagaccatcatcaggtaacatatcgcgtgtattaactaatgccttgaaatttatttatacttatcttttatcgcagagatgactttcttgaagtccgcaccagtcctcaatcgcaagccaaaatctggaacagcggcaatttcccctatcgttcctcagaagaggaagagcgatgtggtggttacccctgtcgcggattcttccaagaggccagctaaggggatactagagaaagggaagaaggttgtaattgacccagctgtccgagcccgcaacatactatctcttcaagagaagtttgtaagtgatgagttccaatcgaagatcgacaagactcctgctgaggagctgctgcctcgctccgtggagctagcttcgcagtttattgccatgttctcga

SEQ ID NO: 352364 - DNA, 737 bp, Cannabis indica
catgattatagttatcttattttaaatttaaatagggtcaaataattaaaaaaaaattaaaaatttaatatctgaccttaaatttaaaattaagataaaaaataatcaaatttaaaaataagatagataattaagcgaaaaaaaattagatatttacctattttcaaattcaaattacactaatatcataaattaatttttaaaaattcaattaatttaattatgataaatataattgaaataggaatagtaaatatctaaatgcaaaactacacaaaaaattggaagttaattccatgaaaaattatgaaaaaacgaagaaaaacgaaaaaaaaggtgggttgtacggatggtatgcagttgcatactcatccgcgcgcgccacagggtgtcacagccgagtaacctcggcgctgggaggtcccattagcatttctgcgccccgaatcgggtttcagacaccccatgcgcatgttgctcggacagatcttatcctaacacgcgtctggccgagggaatgggccatccgcgtacgtgggacaggtgatcaccctatcttttttcaaatcttcaaaaaattataactaatccaaataaaatcgaaattgagttctataaaaaagtaaattgcttaattttttccaaactatccaataaaaataattctagaaacgaaaattcaattattttacacaaaatttcacaaacatcaatcaatcatcaatacaacacacaaa

SEQ ID NO: 352365 - DNA, 1296 bp, Cannabis indica
caaaaactttttttctaatatatatatatatatatatatttttggataaatagtaatttgagttttatattttttaaaagttatcaattgaataaatgtcataataaattttatattttttaaaattgtataaataaaactttgaattaattttttatcaaaataaaatttaataaaaatttgatataaagatgttatgataaaattaattatattttttatatctgcacgtattaaaaattatctcaaaattaattatattaaaaaataaaattattaaaaattaaacttaaaattctattttataattttaaaaaatatataatctattttattaattaacaaaatagataatcttactaatttttttttatagaactcaccttactttttttttccaaaaaatatatacataaaataagagacgtgtgttttacaaacactagtacaaatcgaaaccaatgataacagataaggacaaaaaaaccccacttttgcacaccacagggagtgtgtgggacccatctcaacaataaaaagcctacgatttttttagggaaattttatttacaccccaaaaatttttaagtacaccccattttaataatttttattttatataaaatttatatctttaattttactaagtatttttaacttttttctttcaatttatattcttaaaaaatatacctatcaaacaaaattaaattacattttaaaaattatgacaaaaaaattaaaaataaaaaattatatgaaattttcttagaaaaaaataaaaaaatatatacatgagttagaaaaaattataaaaataaaatcaaaataagtattgaaattaacataaaataatgtgaggaaaaaattttaaaaaaatattaagagtaatttttaaaaattatttaagtttatattttttttaatattgggtgtatttataattttatggggtgcaaatataactcccctttttttatggtcttaactttccattgcatcatcaacaaatagtgcaacgtggatagtttattggtccacgtgtcactcccgtgtatcaccattgaaaccgcactttgccgtttcttcccagttccccagaccacaattaccaacacaatagcaaccggtggcttttgtttcgttctaaattaagaatttgttgtgagagaaacctttgttgtttgttaaaactctggtcttttttttttcctctttcaattttctctcatctttctaggaatagtttattacaatggtttgaagaggttgatgaaagacgatgtgggatttttg

SEQ ID NO: 352366 - DNA, 833 bp, Cannabis indica
atactagtaaactttgccaatgccctggaaaggacataacacttatcgaaggtataagtatacctatggctgattatcatgccagtctaaatctagttaactgacaaatcagggaattcaacttttgaacatatagtcatgattatattctactgtgctgataacactataatcatgaacaaatacacatgttctggacttaatagaatttatacattaaacaatcatgaaataaatcatgtgaaccatgcaacataaaatgcagtttctgatctttattaattagtaaatctgattattttgaaatgggttttatttaggtcacaaaacccaacaaagatctacattgaatagggacaaatttactgttctacccttcatgtttgtctctgacttgatctaaacagatccataagtgggtatactctgtctaggtctgaatatgtacacatgtgttaccctactgagtgtcatgtcacgttgtgcaaaatttgagataacatttaccttccaagtctgcatggaaagctcatgttcatacgtggacttctttggatttcacatttctcagatgggtgacatgcatctgtacccacatgccatcctggacttgatgtaacttctacctaaagtatgcatatcttccattatcacttcagtatctccagcattaaatgctcgtcttggaaatcattgttgatctatattttatcttttttgtgaattagagattttatctaaatattttaatggctacgttaatttaacgttgtttataagttgttttatagttgcttcatcttttaatttttttattgttgttgtttcaccaa

SEQ ID NO: 352367 - DNA, 743 bp, Cannabis indica
tgattatatttaatgtataaattctattaagttcaaaacatatgtaaatacatatatttgttcatgattatagtgtcgtcaacacagtaaaatataatcatgattatatattcaaaaggttttttccatgatttgttagttcactaaatttagactaacatgataatcggtaataaggtatacttacaccttggataagtgttatgtcttttccagggcatagccaatggttctggcaaatatttacatcttgagaaaatggtagttcaattgagtgaaagcgctaatcatagatatggaatctataacttctataaatatttagaagtgaaacaatgattttcttcgagcttggctgaatagaaataaatgattgaggcttcattttatagattatattagtttactgaaatatcgtttatatatagctaagtgttttatagaatagaacggtaaatttgtccctattcagtgtagatcatgtatagaagatctttgactataattaggattgtaacgatagataatcataacgtatctatatcttggtacatataaagcgttctatataattgagagtgatattcaattccaaatctatagtggcgcaaggcgaaattaataagttagagaatttacttggtaaattctagatctaattattagaagctcggttatataggcctatggtcccctcactagttgagataatattgcttctaaactcagttaattgattttaa

SEQ ID NO: 352368 - DNA, 495 bp, Cannabis indica
aaacagatagagatgtatcggtgtatcccttttaaaggggtgcattatagaatttcctaatattttttattttatataaaatttagttctacaatacacccttagaagggatgtactaatgcacccctacttatttcggtatctagaaaaaaatttaatttaattttttttcatattcatgtacgttatagctatttaaaatatcttacaaaattttgagaaattcggaataatttacaatatagaaaataatgttcaaacagtctattttacacgcgtataaaataaaatagtcacgcgtacaatacactgtttgaacgcaatcttcggcatcttaaacttttttgaatttcttaaaattttataggatgtcttaaataactatagtctacatgactatgagaaaaaaattgactaaaaaattatttcggatactaaaacagaaagagatgtatcagtgtatcccttttggagggggtgcattatagaattttc

SEQ ID NO: 352369 - DNA, 1244 bp, Cannabis indica
atcatagcaatttagatcagataaataataggtttgttaaaaaacagtttttgaataaacaattaaataaacaaacacaatatcgatgtaacaaatgtgaaataaggtattaatttaaattaaaattttaattaataacctattttgaaaatttagggttgttaaaaataaccttaaaaatcttttcaaaatgtaaaattctactaattttaaaatatctaggtttatttgaattattttatcaaattgaattaaatatttaataagataaatgatttgaaaataaaccaattaaaataaaatagatattttcaatatcattttctaatcttataattcaataaaattaaaataacaaaataaaccaattataaaatagatatggttaggcaattattattttaagaataaaataataaataaataataattattctaattatatgtttaaatatgtcaaattaaatctttttcaaatttctacaaaaatatctaagttatttacatatttaaaatactatttataaatttttgataagtaaaatgatataaaatatcatttttctaacttataatttataaacaattaaacattcctcaaaataatcaattttgaacttgaaaagggaatatactcatttagtaccttgtcttttcatgaaaaacatatttggtaccttgtgttttcaataatacttaattggtacctcatatttttaaattgtacatatttggtaccctaaagtaaaatttaatcaattcagttttatcaatttaaccaaatagttttcagttatgtgtaatcaaataattaaatttgaattcagaattcataaaattttagactgttaattgtattgataaaattttatcaaaaaaaatttgaatttagggtaccaaataggtataattttaaaatacaagataccaaataagcattattaaaaatacagggtaccaaacttgtatttagacaaaacacagggtactaaatgtgtagacacccacttgaaaatattatggttagaatatttataaacatatctagttaatttcaaaattatttaatttatcctataagattattttaatataacatttcaaattaaaaggataatgctatcttttaatttaaaatatgtccaatattaaaatatctgatcttataattaaataatatataaatattaaagaaattaacaaaattttcaaatctgaccacaaattaaaaaaataaataaata

SEQ ID NO: 352370 - DNA, 766 bp, Cannabis indica
atgatgtgattaaagtctatttaaatttttttttagaaatagcagcaccaacaaaagtgaaaatatagctagaagttgactttaaatcatctacataaccaccaaatctgaatgtgaataactcacagcttgaaaattgtcgacatgcttatacacaagcgtaaaactcttcgttctatgcaaatatctcaaaactttcttggctgcaacccaatgatcatgcctagaaccaaataaatatctcctaagaacatcgactatgaaagcaatgtcaggtctaataaggtttgcataatcaattttattcaataattaatataatcaaaaaacccatatttaatttcataaagaaaatacataaaccctaaaacttttatcttaaaattctcctaatttattgaacgattttagtcatatccgataccaatagaaagagaattttataatgagtaaaacccttaaacttttaagattaaacaacgaaaaatttaacaaaaaataataataaattaatatgtaattgtaaaaaattaacatatacatattaattatataaattataggttctaaattatatacaattggcaatcagatataacatgtttgaaaattaataataaacccaagatcattttgtatataacataaaacacaataataatatataataattaggtatgcgtaactgattgatctatagcaattacctcaattcaatccatagcaattacctcaattcgatagtgcaatactatcaactaagtct

SEQ ID NO: 352371 - DNA, 1275 bp, Cannabis indica
agatcctggtaaaataaattccaacacatagaacaatatcaaagcaataaaacacttctacaagctcaaaaacacaatccaccattaaagctccaagttttagttctaaactcaaaacttggttaaatctactaacagccaacaattcaagcttaattcaacataatctagcataataaaacctctgaaaacaatactaaacaaatacagcaaccacagcaacaaaaacatcaatcatgcaaaaactagttccttaaaactcaaagaatttatgagagagttgctcaaaggttaccttaccttgaattacacctaaagctactagaaaacaccttgatttgctaaaggaaaaacaaaccctagctggttttagggatttcaaaaagagagagagagtttgagagcaaaaaatgagttttccttccttcaattgatttttctttgaaaatgagataataccttttgttttattcaaataaatccacttaatcaactttaaaatcagatttaatacttaactccattctcacaaaaagacaaactaaagattggcaaaatgataattttgcccttccatactaatagccactaaaggtcactaagggtattttggaaaattctaaaatcctagccaatcccgacattcccattgtctaaactatgttgcctcgctatactaaaaatactaggatgtgattctaatggccaaacaccgcgttccaatgttaccgggcactgaatatgcaaaattatgaaatttctatatatgacatataaaaagcattctgaattcaaatacatcataataatttaataattcaaaattaataaacaattccataattaaaccctaattatctgctaatttataaattaaagctaagcggtctttacatgggatctctccaaactatgtccaacttcttctgttggggtcacattttcatcatccaaagtaggcccagtatctttagccacatcacccaactcaaccacagtaggaaaagaggcttgactttcataagctacactttcatttaattatggatgactaaaaaaatactcaataacatgatcattaaccttcaaagaagctgaaattttctcagttaacacaaaatctgtggtcacaccaatgtcacacaatctggccacttaaaataaaaagtaattgaagtagtatctttcacataacctaaatcccttgctattagctctaactcaaacatagtcatgtgtctcaaatctacccaatgaactgttggaaattatttt

SEQ ID NO: 352372 - DNA, 675 bp, Cannabis indica
acaacccgaggaaaatgagacactccttgaaaattagaacgaaaagtcaaattggagacaaccgaaaactgatgaacgagaaacccctcatgagaataaggaagatcttgggactcaattgggagaacggaggtcacctgctagaaatcaccaacgttcttcccaaacccatagagtgaggactcgtacagaccctgatgggggaaataagacaaattgctctcggggagcgtgaagaagcaagtgtgacttcgaggtggtcaagaacccatagtcgatcaactcgaagaggagaaagtacacatcaagctaatgatcgagaaagtatgggaaccagtaaatccacgagccactcaaagactaaatctacgagtaggacgcgatccgtgagaaaggcaaggtctgccagttattactcccaaccgaatttgcgagagcacttaaatcggaagaaacctaaccttcaccaacagcttggtccaaagcaagaggatccaatccaattgccgataaacgagctggaggacaagttaaggagatatcaagtaggggaattagggaaattatctggatacgattctgaagaggagcttgagccgtatcacccagatattatgaataccccttttccttcgggattcaaaaacctgcatgtctcgtcatatgacggaacca

SEQ ID NO: 352373 - DNA, 648 bp, Cannabis indica
ttccttttaaagtttgatatcatatccattgtattttgtctttgatcttgaaagattttcttaaattgactattttcggaaaatatctttgtaattcttgtttccttttattttttgttaaaaaataaattttggaaaaagaagtgggcggtttcccttttgtgttcatgggctggtagttattcaaaattttaaaattggtttcctttttacttcactctttcatgtttattcaaaccaattctctttgtcatttattctcaccacctacccatttctctttctttgttttctttcttctttgttgttcattctttctttcagattaccatggctaaaacaaagaacttagggcaaccaaaacgggtggaagaatccgatgctaccccctcgaatgctcctcctgatgctccaattttgctgcctgctgctgcaactgctccaaacccaagagattcattgcttcctcagcgtgaatctctgcccgtgaagcccaagctgaaaagaattcccaaacaagtggttagaaaatcagtgcgaccctacaaatgttggacttcatcgtcttcttcttcgaaagggtctcctccaaatgctactgcatcgcctcctgctgcaacagggaagggagttgctgcatcaactcca

SEQ ID NO: 352374 - DNA, 772 bp, Cannabis indica
cctcaagttcatggaatttacttatgaaatgctttcttcattacgaattgaagttgacgccataaatcttgaatctttgatactaaatggcgttcccttggacaggataaatttctcttcttgcaagaaaattacgagtcttgcattatttgattgttattgtaagaagaattacccatcatcactagaaattctcatttcaaatcttcctaatcttgagttgaaggatgccttaatgtggatttcaccttctttagaatcgttatctattaatgaaaaagtcattttttagctgctttacattgctgtaagtaattgctcattttgaatagggatatgacttttattactattctttgctaaatggtactttagtttatttataattaagattatgtttagtagctttgtactaatgaggtacgctcattacttatgttacgttattttttttattcatttatttgataagcattgctatgagacacccatagtacttagcaagattgttcggcaccatgggtgccttatttgattctatggtttaattttaagttgttattggtaactcatacacaatatctaatgtttgtatgtttttgtatatgtttataaacatgaaggtactcatttggccaaaaaaagttgaagaacatatattgttattataagaatatttttatttaaggaaatatatttctatttaaagaaataaatttctatttcagaaaataaataaataattaattttctgataaatgaatattttata

SEQ ID NO: 352375 - DNA, 542 bp, Cannabis indica
cgcctcctgctgcaacagggaagggagttgctgcatcaactccaacaagtccatcctctcgcactcatgcccagcaagcatctctggagaaggaacttcacacgaaacaaagtcatgacagaccagctcctccatccaagaagatgaaattgaatcccccctcggtttcttcaatttgaagaagaagaaccaatggaggatccctctgttgattctgagaccaaatctgagtctctccattctgaaaaagagattccataagacataggagtctcctctgacagtgaagacactgaactcaaactcgagcctcctttgcccaaatctgctctaccacctcctcgagcatcttcagcagccaaggcatttgctgctgccaaaggcaagcagtctatgaaggattcctctcctggtaatatctctccttcacaatgtgtaaattccaaattttactttcgtgataatgagcgtgattggaatatttatgctacccgaaacgtttagaaagtagaaaggaattatgatttgcatgctcataaggt

SEQ ID NO: 352376 - DNA, 908 bp, Cannabis indica
taaaacactcacttttgaggacaacattataaataacaattaaatctcatgcataaaccctaattatttaataatccaaagtattaatcataagcggtctttacactatgagtaggacgcaatctgtgagtaagacgaggactgtcagcattactcccaaccggatctgcaagagcacttgaatcgaaagaaacctgaccttcgccaacaacttggtccaaagcaagaggatcccatccaattgcgaatagacgagttggaggacaagtttaggagatatcaagtgggggaactagggagacaatctggatacgactcagatgaggagcttgagccgtatcacccaaatattatgaataccccttttcttcgggattcaaaaaccccgcatgtctcaacgtatgacggaaccactgatccgatctcgcatttgaacaacttcaatacaataatgcgagcgagtaatgtgacgaacaatttacgatgtatcttgttccccacctcgcttgttggagcagcaagtagctggtttaacaagtttactcaccattcaataacttcctaggagtagctgtcccaggattttaagaaacagttccaggctgctagggatagacgacccgaagcgaccttgctaaccaatgtaaagcaacagcccagcgagacacttaaggcgtacttaagtcgttttagcacggctgcagctagggttaggaatttggatgatattacacaacttacagccctacaggcggggatctctacgaatccatcaatcattaggggtgagttgtgggacgacttacagggtcatccattaagaaacatcactgagttcaacgaaagggctcaagtattcgttcgaaaagaagaagcccaaaaagaaatgaatttgttgaaaataggct

SEQ ID NO: 352377 - DNA, 565 bp, Cannabis indica
tgtgacaagattgtagtaggagaattataggactaattattttctttatatgtgacatgtcgcatgctaaaaaatacgaataacagggggaaacacctatagttttcaaaatacatacatcttaatatatatatatacattattttctctcacattctcataatatttgtcatcttctcttaaaaataaatactttaatggttgacaactctaaaagttgtccaccgtggttccacattacattgaactgatgactttttaagaaaaaagaaaaagaagtatatcatgtagctattgcctatattgaacaacactttatataaaattagtcttaaaaattagaacttattgcatatgtggcaagactactccaatgaacaactcctatttgagatgttctaattgctaaaactctatcataagttaaggcttcttagctactaagtgtaatataaatacatgtgtactgaaatttgtgtctgagtaatttgtgatgtttatataaaatttaagtaataaatgttaagttttatgtgttatattataaataaaaattaataataaa

SEQ ID NO: 352378 - DNA, 419 bp, Cannabis indica
ttgggtgactgctggctttcaatatctaatgagctctctatagcaaaacaagactaagaacacgaaaaatgtttccaactgcaccatatttttacaggtcagtttccccttattgtgatggtattaattttattcgtttgtgcactgcagtgcttatagatgtatgtatttttgttttgtagaatcttgtatatttgactcatgttgactggactgctagtcacgtggaccgcactgtggctccaatggacttttggaacataaaacagtgcgaatcagtgtacatgtggattcgagaccacggtggtcacactagtggaaaggtacatttactacttcaattttctgatgcgttagaatttgatttcagagatatgctaactaacttttttggtgtactaagcaggtgaaattgacta

SEQ ID NO: 352379 - DNA, 703 bp, Cannabis indica
tatgtcaaaaggattaatggtggagatgaaatttatttttaatgttgaggaaataaaaaaataattttttgagaaaaaaatatagaaaatcgatggggagagaaatgtatgtgtctttttaggggagacttattattttctttattaaaaacataaatgtctatgaataagacaagataaataagtaaaagcctgaacacatagaatggtaatactttttccgttttggtatgttttgcgccgtgtatatataattaatttgattttggttattagtgccattattattagatttacgtatataagtgaaaagtccccttattttaatgatagtaatttccataatagctcaaatgtgcaatcttcatcacaaaaatatcaattttttgttttattgtgttataacaatgactcgtaaagagatttacaaaaaacatatataaaaataaagtactgacgtttcttttataagatataaagtatagacgtttgtgtgcaaatatatcagagtgcatgagagagagattgtgtggattagtaagaaacactaaaaagaaaaatgttaaaaccgtgaatgtattgaaatattttattaaaatgaaaacataaatataaaaacgtaaaattgaaaaaaatacaagaagttacggtatatataataatttcccaatattttattttgattaattaattaatttatatt

SEQ ID NO: 352380 - DNA, 555 bp, Cannabis indica
ggtgtttgagagcaagaaatagttaaggtaaaaaggatatgcgtttctaattatagtatgtgatatcccgtgataccaatatatatacatatatacatttcatttacatacatctgtttgtatattattgcttgaattttctcatttgtaactgatatatttatgtacacataattgatatgtatataataacattaacattctagcattcaattatttgtaactgatatatttatgtacacatatataactgatatatataataacattaacattcttgcattcaactatttgtattaattacatgatataagttattaaaattgaaaagtctcatgtgtcatttattaagaagctggaagaaaaagattagacttaattgaattattattttttttaaaataaaaacatattagaaaattgagaaaaaattagaaaacaaagaagagtgaaaatagctcatataggctgccacatcatccatactaaatataatttattttactacctattaaaaaatataatttttgttatgtttaggtatttatgaaataa

SEQ ID NO: 352381 - DNA, 509 bp, Cannabis indica
aactcaatgttcaaagttgcatacaatcaatatcaaacactaaaaccagctgctaggagttaaaatcaactcaaagaaaccctaaaattcgaaccctaaacctatcttaacctaacagccctcattaatcaaaaaaataacctcaaatcaagaaaaagcttaaaaaacaaagaagggttccattagggcttaccttagtttgaatctcccaaggtttctttgctgaaaacactaaaaatcagcagctcttccccttgatcttgctggtttcgaaatgagagagaaggaaaggagagagttcttcaattttttggtcttttctcttaatttcatcaaatgagataaatgataagggaaaatcaatttcccttgctgaaaaaatcagcttgctaggtgtcaaaaagctaggcaaccacctattccccatttacccaaatgacaaaaatgcccttaaagttataacttgggtatttctaaagccaggggtaaaatggtcaatttccataacc

SEQ ID NO: 352382 - DNA, 557 bp, Cannabis indica
ttttggcatgcatgattcacatggaataaatagtgagaggttataacaaatcgcttaatctccgtaaaaaattaaagcatgaattttttagggatgggacctaaacttccttagtgtttcactcattgatggttagctatcttaatacttgtaaagatctagtcttaagtttaataggtaacatgtgtaacaaactaatatgtaacatatgacattatatattaggtttcattattttgtaacagagttacttgttactatgagtaacctccaccattatcaccaatattaagagtgtaaaaaaagtgttacacatcttaattagaaattcttaatgctatacgagttatggtgtgtgcatgagttacatttgagtccataacattcatagggtttgagtttgaatttcaaatggtgatatcctaaatacttatataaagtggtctaaggtgctcatattgagatgagaagttttctaaagtaaattgctagaaaaccctaaggtttgataattcccaaagttatttcttagctagagagttcccttagtgcttaga

SEQ ID NO: 352383 - DNA, 809 bp, Cannabis indica
gataaataagtaaaaaaaaattataggtttggagttttgttagttgaacttgtaattaataatattaaagattaattataaataaaaaatatatattaattatggtgtagattaatttgagccatttgattaaatcaaaggctacaaattactatccctattgataagtaaaaatcacaatacctattgtattagctcccatcatatatataacattaatgtcccactaatatttagtgtgacactatagactacaccaaatatatttttattagtttttaatatttaaataatatatttataaataaatttttttgtatacatattctttgtgtttatttataattttataaaatattataataataataaaaaaaatataatttcagtattgcgattggaatagaaaaaaaaaattaatgttaaaattctatcatttttgtgttgatttaacactaaatttaacatttaccattagaattgcccataaatgctataaattttaaaataaatagaatttttactttaaattattacaactttcaatttgtgccttctaaacttttttctttttctttttcttttctttttttttttttgtctggaagccttctaaacttttttagtttgtgaagattctacccaatttttccattgttgagttacaccctttagtttcaatcctatgtggctaatagacaagttatgtgtcatgatttaaattaaaaaattattttaaaataaaaaaatctatttagcaaatttttttaaaagaaaaaaatctatttattaaattttaaatattaaaa

SEQ ID NO: 352384 - DNA, 659 bp, Cannabis indica
ataaatcacttcaaatttcttatattgataactaatcagattgtaacgggttttatttagggcacaaaacccaacagcttttgcatgtcgtggcccgccctcaagtttctgggcaaatacatgtgtgaactttgaaaatgcataactttttattccgaactcagatttgggaattctttataccgttggaaagcacgttttgagctcaatgtgattatctgaattttaaatgccatgtgaatattttataaatgtgaaatcaggggttaatcctatttgtgaaaatcccgaattgtgtaactaggattaccggaaactaattaggagcacccagggatttggaatctcttctattgcaggacaacaggtaagacagtagttagcacgtagagttatgcgcggtggcgcttatatggaaaatgatatatgtgagtaatagtaactaggattagggttattagcctaagatgagcggttaatagtctagggttattaccatagtgatatatgttgtgtaaatgccatgtcatgttaaatatattgagacttaagggttatgcgttcaaggtataatcaggttggacttggtaaccataaccgagatgaactgttctaagtccttactgtaaatagatgtgtgaaagcaacacgtaggtcta

SEQ ID NO: 352385 - DNA, 522 bp, Cannabis indica
ctacaaaatgggtttttagctttccttttttcaatccattttatgaaaaggctaaagggtctaaaaatacccgcccattgaaaatttacctttagaggctgtttttttttttataaaaccgtaggtataaaattggatcataccatttactgtcggtgtagaatcaaacgacatagggtttgtctatgtaaccctatgccgtcggttgttatagaataaccgacgacatagggtacacgtgaaatttgacacgtgtaccctacgccatcagttattctataacaaccgacgacatagggttatataaacaatccctagctatgtcgtcttcatcttcttcctaacgaacaaactagagcccaacagcagccaaagagaacccaaaaccctcgccaaccaccacctccaccaccccctttctcccccatttctcaaccatttgagcccattttttttttaaatcttccattttcgatacttaatcccatacactcaaaaagttgtgggtataactccggccac

SEQ ID NO: 352386 - DNA, 572 bp, Cannabis indica
actcagtaagatatgcaagaaatatataaaagtattgcaatgccggctttatgattaagccgccctgagctcaataaccaagctcaccaaatggttaagaacgttcttaagggtagtacgactactgtaccaaatgcactaaagtaccacttctgtactcgtgttggtagagtcctaactgtactcccgggaattactaagtgttgtaccacgaacacgacgtaccccgggtactcatgttggtaacaccgtaaccacatcaatatgcaacactatactaacacaagcatatacattcatatataaattcttacgctatcttacctcgttccgtgctcaagtgtgccggtcagcctgagtggaaacgcagctcgacgctttacagggccctaaaccataacgttcaaaatccgatgagagacacgctaaacactttacggggatttaaaatataaactaagcttaaccctatcgataaatagggtgccaataccctaaattacacaaaaacgggaaaaactaaggctcgggaaaaaaacccaaccggcaggccggttcccaaccggaacccc

SEQ ID NO: 352387 - DNA, 569 bp, Cannabis indica
aaggaagagttagcactggagcaataatcaagcactgctttaactccaaaaaacttttctcacatcgattagtccaaacaaacttcaagttctttcgggtcagctccgtcaaaggtacatcaatctttgaaaaaccctcaacgaaccgacgataatacctaggtaaacccataaagcttctaacttcagtggctggttttggtgttggccaatcccgaacagcttcaatcttggccggctccaccatgattccatccttatctactatgtgcaccgagaaagagacacgggacaaccagaattcacactttttgaatttagaatacattttgtggtcccgtaaccatttcaaaaccgatctaagatgcaactcatgctcttcttctgtcatcaataaacacgatcacacatctatccaggtaatccttgaacacaagattcataagatccatgaatgttgctggggcattggttagtccaaaagacatcacaaggaattcataatgtccatatcgagtacggaacacagtcttcgggatatctttctctcgaattctcagctgatgata

SEQ ID NO: 352388 - DNA, 553 bp, Cannabis indica
aaaccgtcccactatactaaaatactaatttgtgattctactgagccatacaccgagttccatgttgccggacaccgaaaatgcaaaattatgaaatttcactatatgacataaaaatgcattccgaattcaaaaataacagcataataaatggtttaaatggctataaataatttcataattaatcataattaactgctagtttccaaattaaactaagcgggctttacaagggaactctttccgcttagaactacacataacttcattataatatttggagtttaatagctctcggaactcttcttaggtcataacagtgacaacctgggtgagggacaccaattcccaccacacaagggcgtcttcctggaactgaaatgtagcgcaggtcacccgatcattaccaaccacacccatgaaattcaaaattcgttgaatcacagtgagccaatgctcggccttcatcacatgaggacctcccagaaacactggaggtgcttgcttatggaacctttcgtataacgactgcatacggttgccagcaacaggt

SEQ ID NO: 352389 - DNA, 669 bp, Cannabis indica
tagtgtgtaagactgtgaagaatccaaacaaaggaaggagtttcgggctctgatcttggtgatactttgctacagaaaggatacaagggttagagatgtgagcggaaggagtcatttaattccgctacaactaatgtaaggtttctcataccttttatgtgtttattttatattgttttagaagttcatgtttaggatgttaaacatacttgttagtaaatctagatcctagtaaaatatattccagatttactttcaagaaatttgcacttataatgatatatgtatgacttggatgtgattcatgttgatctatgtatttttgatgtttgtaaattttttacaaaaaataattggaattttattctgcaattatttttgttggatagtatgttaaacattaagcaattcattttttacagaattcaatttcgatttaatttgaattagttatgattttttgaagtttgaaaaaattttagggaaggtgtcacccacgtgcgcgcgcgaaaccgagtgacactcggtgacacgcgcattcggacaaggagctgtccgaagaaacacggtcatgcgtgtctgaagccctgtccgcggacgtacaaggctgcatgtagcatctaattttttcgtttttcttcattttttcatgctttttcacggaattaa

SEQ ID NO: 352390 - DNA, 731 bp, Cannabis indica
ctttgttgccaaacaaagttgttacgggcacgccaaattgaccagctaacaactacggcttcctccatctcttcctccctaccacagctgaacaaaaccagcagccaattgcagaaagtgtcgttcaaagtgctgcccacgtccaccatagttctatgctagcacacacgagcaaaatcacaccccaccaaagcatggtagatcgtttcatctgaagcattacacaaaggacatatataattaacaggaacatgcctgttcttcagctgaaaacaagtaggaagcgaacccgaagctgccctccatagaaaattactgacttttggtggaaccttcagatgccacaactccttccaaaaattcaaaccaccatcattaggccaggcccctttcatttcttgtaaatatttataagcactcttgaccgagtgttcgaggctttcatatttccaactccagcagtcatttgtagcagttgcacttagttgaatagataaaatcagctcctgatctcgaacgtgaaagagatctctaataatctcctcgtcccaagcacggtcgatcgccttaaaagggctgttaacatactggttttgaagagcaagatgagttgaagagacaaaactattagtgtggtgaggaagctaagggtcccttaatattgagatttgatcacccgtaccaatggttcgagtgacacctgcttgtaacagccccttagcttcaaaaat

SEQ ID NO: 352391 - DNA, 690 bp, Cannabis indica
aactcaactttttcttttcttattttcttgactaaaaacttttttaaaaaaaaaaaattactgatggaacaatctcagcccatatgatataaaaatgagatattttttaattagataaaaaattaagcataaaaactcaaattttatattttactcattgatgggtaatacccattaagagtgcacacatatatatatatatatatattacctgcaatgcccttatttgttatatttgtaattttttggataattattatttttttcttgatattattcaataaacattatttttaattaaaaaattaattaaagtgttatttataaaagaaaaatacaataatattttttttaaatatgtgcaatgagtttaaatttgaattgcaatattaaaaaaaaaaaaaattatgttcatattatatataagataaaagagatttgagcatgagtttaaatttaaattgtaattttttaaaaaaaaaaaaaacaacaacaattaatactttgtgtttttatagacacatttatttaagtatatatagatttattatttaaaaagaaacaataataaaaagatatattttaaaaaaaaaaaatttgtggattgagtaaaaaaatgataatagaaagttatcctttttttaaatatgtttaatataagataaaagataaaaaaaaaaaaaattaata

SEQ ID NO: 352392 - DNA, 627 bp, Cannabis indica
tgttgttgatttgttgagtcttctgttgttcctgcattgtattccatcagttcaaatgcgcttgtatgtgcaattaatgcattactattttccaagaacgatggattgatggttgttggtgggttgttgacgacattcacacacaatgggtatgttgtgaagttgggttccttcagttttagttttatgtagaaatgcaggctttgattatcctttatcctcaatggtttgtatccttctttgacttgatatttcagttgcaaaacagtgttttcttggttgcattccaggacctctttcagcttctgttgtaattcttcatatttacaattcactaaaatgtaatgtccactagcttcataatttcataattcatttgatcatgaaattttctattgcagaagactaggaatggaatgtctttttttccctgtgtttttgaaattgttattagtgcaaggcaacgattgtgaaactattttgattctattattgataatattagtattgtagactaacatttttgactatcatttttataaaataataataaaaaatatatttatgaaatagaataaaaacttacttctatttcttttcctttgttcaagtcttgtatttccagtt

SEQ ID NO: 352393 - DNA, 663 bp, Cannabis indica
gaagagagagaataagagagaggattagagagagttgcttagggttctaagctgagagttctgttcttgaagagggtcaagaacaaggggtgtactcgggttgatcgagagaaaactgtgactgttttctctagtgtgtgtcgagtgtcatctgagctgtgattgctctggttattgtaatgtattgctgctctcttattcacatattaatgaagaattggtgatgtttctcagctggagtatggccagggatcatgttgatctctaggaccggaaccaagtaaaatcttgtgttgttctttgtttgatttcgggtttgattcattgtgttgattaattggtttatgttcattactattgttcaagtgttgaaattattacaggtttatgattgaatcctcaaagttatttccgctggaattacaacattataaatgaatagatttagttttataaatgggatttttttttggtatggatggaaattacaaacgtatataatttctctaaatgtatctacaaaattattggcattgaactgtttttgtaattgttaaaattattggtcttttctattttttcacttcaaaagaattttttttgtatttttacggaattctacatcaaaactcaaatagtaaatttaaaaaaaagaattaaaaa

SEQ ID NO: 352394 - DNA, 495 bp, Cannabis indica
atgctatgagtgcttcctttaaatgatttttctcagttttctttactttactgagaaggacccttcattatggctctttggtgcatagtaagcttcaccatatcattatggctctttgtagtttcttcttccatttttcgaaaactagcaaataatttacatagtcaaaaagacgatatatattgttttaaagcctgtttttgagatcgaaatacttaaataactacattgtatattgttatataatttgattataatttctattggaatagaaacactcctaaaggatgttagaagtaagctatttaagatttttctccccaaattatgctcttatcatataaatacaaataagctatttagaatttttgtccctaaactgacaaatgcattattgtgctagtccccaaattattcaaagtaacataatgtgacttgcggtgtttacgggcccggtaacacacagtatgtagtcaagttagtttgggtaccgga

SEQ ID NO: 352395 - DNA, 628 bp, Cannabis indica
tatactatctttcaattttttttaatatactattgcacataaaaacgatgtactattgtacaaaataactataccaaacacttaattattcaaggttataattgtaatgtcatcatcaaacttttaacagaatagacattttgttaattttttataaaaatagacatttattaacttaattgttagatttagggccattttgcatcttggcccgtaaaatatacacaagcatgattcattgctctctatatctacactacattgcatttatatatatacactaagtattagtaaaataaagggtaatttgcggcataacctccttaagtggccaggcttttgcaactaactcccaattctaaaattttagtggtaaaacctcctaaacccaagttctctaagcagttagccttttccatctatttttggctgttaactgccatggtgtaatgtctacgtgtacacagtgtacacgtgacacaattttattggtccacgtaaataaatatttaaagtaataaaaaaaaaaaaattatttttaaaaaataaaaataaaaaaatttactttttatttcaaaaaattaaaaaaaacaaatttaaaaaaaatataaaaaaaaaaccctaaatt

SEQ ID NO: 352396 - DNA, 718 bp, Cannabis indica
accaaccactcaggactagactaggaccgtgactaggaagttgacccaaacctagaactgaactcgggcctagccccaaacccaaaccgtgacttgaagttgggccctgacacgtcgtgtacccagaccaacactgagacccggaccaaaactcggacccatacctagacttgggaccctatccaaaacctaaactcggacctagatagggatctagatatgaacctaaacttgaaccgaggcctgcacccagaccaggatcgaaactcggaacctagattctaaacgagaccctgacccagacccagacctggacccgcacccgagacccgaactcgaacctggacctaaacccagacccagaccgggatccgatcccggtcccagactcagacacagactcggacaaggaatcagacctcaacccagacctagacccaaactcgaacccagacactgaatcgaaatcgaaactgggactaggacccaaaccggaacctaggactcggacctggatggggtatctagacctgggccacggaacccagacccaaatctaaacacggtactcggacctggatggggcacctgaccttggccccgggtcctagactcggaccgggacctaggactggaaccttgatatgggacctagacccaacacacgacaattagaactgggattgagaactaggatccgaccccggacctggaccct

SEQ ID NO: 352397 - DNA, 1210 bp, Cannabis indica
atattaatcttatataaatgaaaaaaataaactgctaatatatattatatatagtacataaataccgagataattatgtaccatttttaataattaatttctaataaaaaatattaattaataatatttttttgaaaaataagataataaaaaataatagaataaaaagataataatttttcaattgtcatattataataataaaatattataagaatgagagatataaaaagaaaagtagtctaattttcttcaataaaatatgactgaattaatattaatggtgtattatttaaataatatcaatgataaaaatattaaaaaatttacatatatttttaaaaaatatatataaaaaaatgaaagagcaaagaaggttttattatagttataaaataatgaattggagattgagcttttgtattaactaatcaatatggttaatatatatatataaatatatatatatattcattaacattcaattcaacattgaataaaggaataattatttcaaaaaatattctaggaatagtaatagtttaaagaatttattaacagatggtagaagattttgagtgtcttcccaccttctaataatgcattaatattatgcaaataaaaataaatcccgcacacatgtatgcataaatcacattttcaattagaatgaatttaaatttttgagtagaaacattcatatatagatgaagatattagaataagtaaaaaatctaattaaccattaattatataattattattgggatttattatttaattaaaaatatatattttttaaaaaaatatatctatataaaagttagagtataatatagactattaagcttctattcttctttaattagtaataaattattgttattatgaaatttttaaaaagaaacaaaatagaaaaaactacaaataagaatatatagaatattaaaataagataagccactattacttttttttttttatagttttgcctttatatatagatatagatatagattttattaaaatttacataatatattataactttataattatatgggtcggaatcccgagtatcaaaatatattttaaagtattttacaaatacagagtttactagtatatacatatatatatatatatatatatttacaatgggcaactaagttaactcaaaatactgatagaccaaaaccctccaggttgc

SEQ ID NO: 352398 - DNA, 606 bp, Cannabis indica
gaaaaactgagttttttgcaaatattaataaatattacagaaatatcataaatataaaaccgtaaacgtctgcagcagcagcatgtatttctgttactgcagaaaccagttttgcagacacaaaccagaactggtataatataaaaataattacagaaaattaaatcacttgacacaagaaatctgtacgtggtatcagtgttctttcaaacactactagtccacggggccacgcccggagaataaaatcaattagtaaagtatcaaagattataaaaacaattgacttaaacaaatttagactccctctagtgatttgtcgcaaccctttgtaatccaccttgctaatttgatctcgaaaatagaccaagtagggaagtcccttcagctattgatgtgtgcttacttcctcccgaagtaaggcttaaacaaatcttctcccgaagatatattctcacttcttctcgaaatgagacttggaaaagtattctcccgatcagactcacacttgttcaaagcttctcttcaacttattctatgaatagtatgagatcataataagaaaaccaaaacttaattgaacactctaggtttttacaaataaaa

SEQ ID NO: 352399 - DNA, 614 bp, Cannabis indica
ttggttgatgagattcaataaataatttattttattgaagcttagaattataggtccatgctccccgaattgacaccttgaaacactgtcaagggtaagaataaagaattgtataaagatgttcaaaaaaatctattttgaattgaaaaatagtaattatttatttttgtaataaataaataatttcaaattaattaaataggaaaaaagacaaaaaatactaagacaaaatttattgagacaagatttgttaggacaaaagctgtcaggaaaaaagacaccaattttgtcctaaagatataggtaggcgcctagcattgtccctatccctatggagtttgtctttttgagttaattaattcaattaagtaaatatctaatttaaaaagtggttatagatatttcaaggttgttgagatattctctcaagtagttgagagattctctcataaatatcagtaaacgaattcaattataaaaatttatttgtttaaacaattaaataatgaataaattaatggtatttaattactataaatagaaacttaatttgagaaattggatatatagtttacatagtaaatttcaaaagttatagagaaaaaggaaattaa

SEQ ID NO: 352400 - DNA, 653 bp, Cannabis indica
tcattttcatttattgattttatttaagtcgagttcgaggccggtgttcggattcaagtccagatctgagaccgggactggggctgggattgggtccgggtctgagtctagggccgggtccaggtctgagaccagagcccgatccaggtccgagatctggaggagaagaacttggatcctccttttctgaagttagtattaaagttcctatcaagcctaatgaactattgattaaaccatatggatctataaagacaattcatgatgctgatccattgcatggccaacaatatatgtggtaagttcaatatgattttagaataatagtttactattcattaaatattattttaaatgtgcaaaagtattacatgtttggtattttttagcagatttcatgtaaattggatatacccaacttgatgactcgatgctgtgatttcattactatagaatttgaaacttttgtaaatatttccgtttcagttggtatttatttcaatgtttgtaatagaagattcacaatactattttttgtgtttatttctttggtgttgtcattgtttatataattagtgtttattaaatattacttgttttattattgtgtaagaaataatttgggatatatgtattatttacaatatttatta

SEQ ID NO: 352401 - DNA, 793 bp, Cannabis indica
ttcatatccaggagggcttaaatttttctggatttgctttgatacctcgggcattaacaataaaactaagaaacttacctgagctgactccaaaggagcactttaagggattgagtttcatgttgtattttttgaggattttgaagcactcgtccaggtcatctatatgccccctagccttcctgaatttgacgagcatgtcatccacgtatactttcatattttatccaatctagtctttaaacatttgattcaccaacctttggtaggtagctccagcattctttagaccaaacgacatgaccttgtaataggacagacccatatctgtttggaaaattttatgttcttggcctggtggatgcaatctaatttgattataccccaaatagacgtccataaagcttaggatctcatgcccggctgttgcatccacgagttgatctattcttagaagtggaaaacagtctttggggcatgccttattgagatcggtaaaatcaatacatactcaccattttatgttgggcttgggtaccagtacggggttagctacccaagccgggtaaaaagcttcgatgatgaacttgttattacacaacttttctacctcttattttaatgcttgtgcccgttctttgtctaataatcttcttttttattgaacatgatagaagttcggatcaatgtttagggcgtgagatattacagaaggattgataccgaccatgtcctcgtgtgacaaggaaaaaatgtctaggtttgctcttagaaattttattaaggctaattt

SEQ ID NO: 352402 - DNA, 682 bp, Cannabis indica
tttttctcaatctcaccggaatttatggttgttttccaattgttctaatgttcctgtggtggttctatccgtgagtgtagaagatggaggcctcatttttttttggcgtttacagtataaaagaaaaaaaattggccaagacagtataaaaataatttctgccgcgtgacagtatttttgtaaaaattaagcctaaaatcagtatttttgtaagtttcccaaaaacttattagtaaatagattttatttaggcctaatagaactaggggtgttcaatgtcacatccaatgtttttaggtctatgcagatccgatccaatcatatattggatgttagattttaccatccgatccgatccaattaatttccatcatccaattgatctaacgtccattggatgttggattggatcggttctatccattggatgtatttcatatatatttatttgtttaattttgatttatctaatattttaggcctagaattttttggatcagatcggatccatcaaatattttaggtcccatatgtattggattggactggatccatccaatccaagaaaaaatagtaaaattttaatgttaattttcatatatacatataaatttgacctataacaatataaaatttaatactcatccaaactaataaaaatactaattagtttaattggatg

SEQ ID NO: 352403 - DNA, 1424 bp, Cannabis indica
atatcccaaaaaatacacactttagaactctaggctctaactttccatctccttggtgtgcatatgctgcacacccaaaactattaagtgggataaatcaggtcggttgccagaccacctctcttcaggggtcttcaactccacagcacttgatggacttcagtttatcaaataagctgctgtgagtactgcctccccccaaaatccagtagctaaccctgcttggaatagcatgcacttggctttatttaaaatagtcttgttcatcctctcagctactccggtttgtggtggggttagttttatagtcctatgcctttggatgccattattcctgcaatacatgttaaacaaatcgttgcagaactctagaccgttatcggtcctaagagtcttaactcttttgttagttaaattttctattgaaatttttcattcttgaaatttcgcaaaggcatcaattttatgttttaaaagaaaaacccatactttcctagagtagtcatccacaatagatagaaaataactactccccccatgagtagctgtattttctggaccccataaatcagcatgtatatattctaaaatttctttagaattatgtgtcccaattttaaatttaagcctatgatgcttacccaatgtgcaatgctcacaaaaatcaactttacttactttatccttgcataaaagattttgttcactcataatttgcaaacctttctcactcatgtgcccaagtcttctatgccataagattgccttagaatcttcaagagtttctgttgtgttgtgacaatgtgaaattggttctccctttaggtagtataaacctccttccttgtagcctttcattatggtcattgaacctttgcttagtttcattgtacctgtctcaatcttactcacaacaccaaggtcatctagcatacttatagaaattaaatttctagctaagttaggcacaaatcttacacctgtaagagttcttacaataccatcatacattttaaagctcacattacctgagccttcaatatggcatgtttggttgttgcctaagatgaccttccctcctttagattccctgaaatcagaaagtaaagatctattattagtcatgtgaaaagtgcatcctgaatctaaaatccattcttctttgaatttagttgcagtaatgtaaacttctccactctcatagccatcacttagattggcttcatgcttctttcccttttcctttgagaaatgattttctccatgatttgagtcaccatcgctaccatctgttttcccctgttacttttcttccaaaaataatagtctcttctgatatgccccggtttaccacagtgatagcagcctttaggatctttttctcctcttgatggagacttcccatttccatgtcttccaccctt

SEQ ID NO: 352404 - DNA, 639 bp, Cannabis indica
acattaacaaactataaaataaattataaactttcgatttcgaatattttatgttaaagttagtatataaaattttgtttacgttaaagtttgattacttttttttttaaaataaataatagaaaagaaactaaaaaaatattttttactgtaatgaagtacttcaattatttagaataccatataaactttttcaaatatgaataacataatataattagtaacctattaaaattgattttgttgattttaaaatttgattaattgaaaaggaaaagaaaaagtaactaatgttattttttatttcagtcattttattagtgataatgaaaaatatatgtctcgcacattaaaataattattttttaaaaatatattataatagtataatttttaagctcagataattattgatgaaaccaaaaaagatttataaagtttgaaaaaaataaaataaaattaaaattataagaaagtgagagagagagagatatgtaaatgtcattttattttcattgtgaaagaaaaaacaaaaagcatataaatgaaaaaacaagtggtgttagcttaggaaagaattgagttataagagattttgaaagaaaaaaaaataaagtagaagaagggtcaagggagtca

SEQ ID NO: 352405 - DNA, 945 bp, Cannabis indica
ttctttacaagaagttttcaaacaaagaaaagtccagctcaaaaatgattctttcctaagatagaaaagagcaataaaatgcacaaaatcaatataataaaaacaatttaaatgctcaacaaaatgcacattaattaaaaaatattttgacaacaaaattgtcaaaaaaagacctaacagagacataaaaaaactctattgcatatatagtactataatataaatcttagagtttgaagcttttttagaaaattatcatatgggattgtgagggaagccaataatgatataattatgattaattttaaagtattcatttgtgattattattattgaataacgtgttgtgtgaagtattttatataggtatatattctaattattatattaaagtaattatcttatatatatgaaggaaatatatttaagtaatcactttattatattgaatatatttgagaaggagacttgcctagagactatattaggcaaatgcaaaatcaattataagccatatacggtgatcagagcatcaataatagcatgaagactgtggatatagtgatatctatgataatggttgatcaacatcattttaattaaccttgaagatttgagaaattagcctaagagatactagaatttacattttagtttggaagaaaggcatacttaatttttaagatagatataactctctttttcaagtttgatatattatcttttgttgtttttgttacattctatcaaattttaatatgcttctttactttatttctactttattatattactagttaacaaagctgcatttcgtgtggtatgtataataatttaaaaatttcatactaaaaatataattttttttgttattaggacaccaaaattttttattatacataaaaataataaaattataacttaataccaaaaatattaaaagta

SEQ ID NO: 352406 - DNA, 521 bp, Cannabis indica
agaaattaataataatctattaaaattaaatattattaatttaaaaaattgatatttgagtttaaatattttaaaaataattttattttgaattttaaggtttaaaattggaaaaatttgaaatttgtggaaaaattcgacagaaatcggatttttgtggctgcccacaagagaggctgcacgtgaagcccagacaggctgctagcagcccatatgcgcgcgcgcacgagaggcttgcagcctccttgaccaagttttctcgatcagctacaacatcttcctcggcgcctgcagccttgtgcttgtctgaagggttgggagagacatgacttcagatagggattttgtccccttgatgtgtgcgcggaagcctctttatccaagtgcctggttcactcgatgcaccaacttgacacccattcaacccgaaacttcaaaaatttataacttttccaatttttatcggaatcgagttcagtaaaaaccaaaattgcttaacttttcacaagaaatccaaataa

SEQ ID NO: 352407 - DNA, 815 bp, Cannabis indica
attagaacgatggttaaatttttatagcgtatctatatcttagaacatatagagtgttctatataattgagagtgtaattccaaatctatagtggtgcaaggagaacttaataagttatggaatttacttgctaaattctaggtctgcttattcgaagctcagttatataggcctatggtccccatactagttgagacaatactgcttgtaagacagttaattgattttaattaatcaattataattataaattagactatgtcctatttatgaattttcactaagctaaagcttaattgtgaagaaaagagatttaatagtttatttgtaaattaagagactttattaagtcaaattaataaatatattaaatgtcaattttatttgataattattttaattattaaataaatagttttcacatttaagtggttgaatcagaaaatatgacatttgtgaaagaataggataaatagttgattaatggaaaaattgcaagtggtgggcccacatactatggtcggccactaatgcttgattttactaattatttatcaatttttaatgccaaattattcaaacctaaacctagaaagattcctataaatagatagtgatagactcaaattgaaagatgataacagttgatgcacttaagcctttcagtcagatttgagcttctctttctctctcaattttcgaatccttctctctctttctctctaaaaaaattgaaccctttatagtgatagagtacatgcccacacatagcaagttagtactcaatcatagtgtgtaagactgtgaagaatcc

SEQ ID NO: 352408 - DNA, 526 bp, Cannabis indica
tcaaagtcagacaattgtaattctattagattggcagttaattcacaactgccaatcaagaaagacaaggatcgactccatctagtggatactataaggtctcctgatggtaacagggtaccaaaccccgaagcatatatatcacatggtttatggaaactttcaattactctactcaacacgtaagaatgagtagctcccgagtcaaacaatacagaatatgaacaaccatttatagataactgacctatcaccactgacggactagcatctgcgtcagccagagtcatggtaaaaagtcatcctgggttctaagtagtactcttcttaggctcctctttgttggcttgtcgacaatctctgattaagtggcccaccatgccacactggaaacaagtcttggcccgatattcaccctgatggtatttcttgcattttggatactcaggataagatcggaatgaagattcgcggccctgacggccacggccgtttcctcgaaactttctgttaccccttgatgttc

SEQ ID NO: 352409 - DNA, 745 bp, Cannabis indica
aagtgttgatcattctgcacggcacgttgaatatattcattctggatgtgtcagcgaggcatcgtgctcgacatatcattccgagcagatgctccaagtggagtccacgtgtcaccattctcgtgatgccatgtcagagtgccaaatttgggataacacattacattacagaactggttatatttcaattataaccggtttgagttattttgtgttatttgttattattcattatgttatagaatcaattctattttcatttatgtatgagatatatacttttaatgatttttccggcgacggtgactttttcaatgacttttcagcgactttttcagcaacactaacttttgcagtgatttttccaacaccaccaacttttctaacaaaacttattatcgttttattaatatgggattttcatctttttttttaacgaaaatatagtattaaaaaatccatataaactaaaaaaaaataataaaaattcgtaaccccataatattatttagaaatttttacatgaaaaatcctttttacacactttattacaaaattaccctcacacgcctattactacatttctacttacaaagttatttttattacacatttaccacttactcatcataccatgcatacacgtgtgctctccccatgcatcatcaatcaaatcatactctcttccctctcttttttcattttgttttcatttcattttcgattcttcatttctgttctctaa

SEQ ID NO: 352410 - DNA, 1102 bp, Cannabis indica
gtcttgttaaatatttaattaattattttaagaaaatagttaattataattaattaattttaaaaaaaaatgtctacctattaaataaaaatgtaaccattgaatagtgacccatatttaatataaatgatataatgaatggttgttgtttatatgtacccatcaaagtaagaccgacatgcacgttatatggaattaatgtctcatacatatatttccacactacataatcatgatcgatgataaataacaccaatgtaccatatatcaattaagagaataattccataataatctaaacagagcttagctaagaaaagatcatatatagctttttatgcatagaaagaaatttcaaaactacgattatgagattctaagtaataaactaattattacatatgtaaatataaataatataatatggatggcttgaagcttcaaatttctatatatcatcattactcaaccagatggtttggttgattcggcatttattaagacgaaattactaattcatttgataatcaacagtatgcatgcatgggtacgctaccatgtacgattttgttgtatagaagtagtagaatatgatgatgtagtgtacaacatagtaaaaggggatgataacgaagacaagagcgagcacagaatgttttcttttaaaagaaagatgaatttttatttcacaacataataagggccaaatcaaactctatgatgtagttactgattctcagaggtaggtcctagaaggctttttaattgtctttctaagaagggtcttcaaggaagctacttttcttgtggaaaggagatctggatggctagttgctccttctaggaaagagttctagatagtcgactctaactagctctatcctattcgggaaattccttagtgagtgcatttggtctgtgtttctggaagccctcatacacgctctcggatgcactcaaacttttgcagatgtggagacctcgctcaaaggaaaattggttaagttggttattgcctaactaacttaaccacgcttcttgcagccaccaacttcaaaatcttgatcctaaacctataaaataccaccaacacttatcattt

SEQ ID NO: 352411 - DNA, 637 bp, Cannabis indica
gactctaatgcactccactgcgccctcagcttgcaatgccttatccaccatatcagcatagatggtgttgtcgtcagtagtgatcattaggtcatgtttgatctttgcattcaacccgtctaggtacttctctttcttactgaaatcggttggcacgattcctgaggccaaccttgccaagcgatcaaattgagtcgtgtatttagtaaaactcatgttttctttctgagtcaactgagtgaattcttttcttttagcacttctgaccgcctcgttgtaatacttggcattgaaaagctccgtgaagttctcccaggtcattatggtaacatcatgaattatggacaccatgtcccactaaaccggagcctcttcttgaaattggaaagtggcacaggccaccctatcattaccggtgacgcccataaaattcaagatcctggtgatcacagttagtcattgcttggctttcatgacatcgggacctcctaggaaaactggaggtgcctgcttacggaaactttcatacaggggttccatctggttcactgcaactacaggttcggtcggcacagcaggggcaggaaatactggtattctggagcagggattgcaggagcaccctgctgtcgcaacc

SEQ ID NO: 352412 - DNA, 590 bp, Cannabis indica
cccagaggcagggctcgtggtcgaggtgatgctaacccgccacaggctgctcaagctactcaggaagcccagaattgggaaaataggtttgcagaaatgcaagccaaaattgaggaacaagataatgagatccagcgattgagacagcagggtgctcctgcagtgcctgttccagaagttccagtggcacatgcccctgttgtccaggccgaaccagcgttagcagcgaatagaatggaacctctgtatgaaaggttccgcaggcaggcacctccgatttttttgggatgtccggacgtcatgaaggccgaacagtggctaactgtgatcaccaagatattgaacttcatgggcatcaccgggaatgacagggtggcgtgtgccacattttagtttcaagaggacgcattggtatggtgggacatggtatctatgatacacgatgtcatgatgatgacctgggaaaagttccaggaacatttcaatgcgaagtactataatgaggccgtcagaagtgccaacagaaaagagtttaatcacctcacccagaaagagaacatgagcgtcattgagtacacaacgcagtttga

SEQ ID NO: 352413 - DNA, 300 bp, Cannabis indica
actactctatcaataagaggttcgaaattatgcaaggaagaagaagagagagaaggtggcggctaggtatagagagagaaggctcaggtttttctctgaaggaaacaagatgtgaaagtctatatttcctgaagccttcactatctatttatagcataccacatagggttaggtttgaattatttggcattaaaataatgaaaatatcagatgataatccctataaaagtggccggccatggcagaatggatttgggcctcactttttgcaattttgcttttttatcatttctgcatctc

SEQ ID NO: 352414 - DNA, 653 bp, Cannabis indica
gctaactccgctggatcggaccgtacaggtggtccgtatgtaaaataattacacatcacatattggtctcatagtattgtgtttggattgatattcacatactagcctaatcaattaataaggttattctctttaaaataaaaaacaaataaaagaaaaataaatcaatatttccttaacattataaactcaaatgttcctaaaatctatattgtagccatatgattttcataaaattttaccaatttctcaaccaagataaaattgaacttaatttaatagcagagtatatataagaaaacaaaagcaaaaaacttttaggaagaaaaagaagaggaagacttacggaagaagaaggatgaatcagttgtgttggagtaaacctccacttacactgatattaagactcaatacaacttaatacaaggacagaaaagtaattacaagcaaatccctaatttggccttcggcctctagaataccaaacagaaatcagttagaatggatttggttaatccacacctaactaatttctgtaactaatctaactatcaaatacagaaacaaaaaccagaaccctagatctatatatacctcaagcaacaaccagatctaaggagttgagagagtgttcttcaagatccagagttgga

SEQ ID NO: 352415 - DNA, 872 bp, Cannabis indica
aaacccaacagctcactcatagttcgcttccttaatgggaatctcagttcctgctgcttgctgagtagtggcatggctactaggggtggtagtgatacttttcatgttcatggttgattgcttgcttgaacttatgaattccctttgaaacaaagtttctggtagagaaagtaaaactatagatggggaacttgaattgtgactcccaatgaaagcacaaaatagtgacgctgaaaagtggccaatatcagctcgatagattggccagatgattaatgtgtttaagtaaataatttagagagacacacaaaatttatagtagtttacccccatatcgtgatagtaatggggctacgcctattttgagtttttatttctcacgagttgatgattacatggactaagtattcgaaactccaaactctagagagagcaactctaactttgggggtagttttttaaatgtgaaaaatgagctaaaggatctctccttttataggtgaaggaggctcacaaaaataggagaaaaatacaaataagtttttttccactgttgatgatctaacgatgaaaattaacttctggtggtgatcgccaatttttggtgctcggtgggtcccgatgtgagtaacctggaacttatttttgtaactctcttggggtgaattttgatgataatagcttcagaattacgactggattgtgagacaagacttgatagagagtttgaatagcttcaaaacacaagtttaattgcatcaatcggataaaaattgagtgagttatgtttgttttactgaaggttattcaagtccctgttaggttttatgccctaaataaaactccatttcaatgtaatctattttattcaa

SEQ ID NO: 352416 - DNA, 1340 bp, Cannabis indica
agatcctggtaaaataaattccaacagaaccaatatccaatatttttgcttttaaatattcacatatataagagcatagtcagtaagcacccatggagttttgccaaacatatactcaccaataatgtatctaggaatgacattatcaaaattaatcttagaaggattagaacccaatttcaagaaataattgtatgaatttcatatgacttgtatcatcttgctttatcttcttccttaagtaatagaataccacatctaaatgctacaaaacataaagcaaacaaaaaaaaacatgtacatgaaaccggttttgacacaaattgagaacaaagatataaactaaataaatttcaaacttataaaaaaaatgaacataaaaaagtataaaaaaaactggttttttacacagtcgttcaaaaattcaccacaacaagaagctggtagaaccacatcttttctgatattttgatgaaagaaaaatctgtaggtggcgataataagttgtcaacatccgagtacttcttcacacaactcaaaacaataacaaaaaaacacaaataaagttaaaaatagaaaacaaaaaacataaaaagacatttaaaaaaaaatatactgaccccttattcatgaggatgttctcatcaataaatttggaaaacttaacatattgctcagaaccaatactcaaaccaatttcatctttaaatggattaactccatgcacaatcttcattaagtcttcctttgaagataaagacgaaccaaagtccataacatagggcgacaaaacaatagagcttggttttggccgcctcttttgaatctctggtgacaaatattgtaatatcctggaaaataaataatatttaaatagacatattttattaaatatgtaattattttggtaacgaagtatgattatgatcttacttagggtaactattgagaatttatttagtgatatatatagcgtaatttattaattacggagattatattgagatatgtggctaccgaggataccatttttgaaataaaatattttattgggctcgacgactgtggaaatttagcgatgtggtctgaaatgtcacgatattaatgggagaattattttgaggatgttctgggctagtttagaatttttagaatgttggtttactggattagtaaaattaccaataatgcccctaggttattttaaagtttaatttttcattgggggtaaattagacatcagattgacttgtatcaaaaccctatttaagggagttagcttgcaaagcaaggaaacaaaaaaataacacaacaagcttcttctcctcttcttctccttc

SEQ ID NO: 352417 - DNA, 600 bp, Cannabis indica
aatcagtgtgtctgtgtgagcctatatgtttgctttaggcttagatgcatataggtagcccatttaatgtttgtaattaaaatagactaggttgctaaataaaataatcacttttgatatattttatttagttccaattagtatctgggcctattcaattaataatagttgttcatttaaggttaagttcctctcctttgggtacgacatactgaacccagccctccctcacatgaacaaccccaattgcgaactcccatgtgcctcatttgaatgactgtactaggttaattaaactagtttaacctaataaaattgattagcaacataattaatttcaaaatatatgaaattgatttttcatttgaataatttgaatattttgaaattaatttaagaaaaacacacttagtttaatgaaacttattcaagataaactatatgtatttttcttgtatttaattaaatatagaattataactaattagattcttctgaagcttaattatttaattttcattaaatattcatatttaagttgtaaattggttatttataactaattttttttatcaacttgaatttgaatatttttgaaat

SEQ ID NO: 352418 - DNA, 1047 bp, Cannabis indica
agttggttggaaagaactttatatcgaacaaaataaagatctatgtcaatatgcttggttcttgcatgaaatattggattggaagccaaagaatcagctcccaaattatcacaccacaagattggacactgaagaattggtatgctgagctcaatgaacagagattgaatccaaaccagttcaaaggtggccagagcaagggccctatattcagattcagtgcttgatcgggcaaccaatgtttgtttctaggagcaccaactgaccaagttacctacaaggaaaatacagtatccagatgtggacttcttatcatcatgacaccctgcccaataagcatcagtctgcaactccattttggaagctggtgtgaagactaaaccagtgtcaataagtttgaggagaaccttctcaaattcctcaccatcagtccattcatgaattggtgttccttgttcatctacatacattttgaattggtgttgatctctgaaaagtattctctcaccccaaattaaatgtttcaatattctttcggtggagattaaatttgtataatattacagaaatattatgtataataaggaacaaaaggtattcatggaaaataaaagaaacaaaagtaatgttttatttatatatatatacgtacccaagagcatgggcagccttaatagcaggaacaactctaggatgtatggagattcgattaagaacttgatcagtaatctcatcaatcactacaagaaatgtcacttttaccagcacagtttgttactgcgctggtaaaagtaacttttaccagcgcatttcgcaaactgcgctggcaaaaagatcaaagttttaccagcgtacatttgcagtggctaaaatctaacttttaccagcacattgacgtgctgggaaaagtcttttttgccagcgcttttcattttatgctggcaaaagttctaataccaacattaatttgccaactcccttttgccaacacatcatgggtaaattctattttgctagcgcaataccaatttttgccagcacaaaaat

SEQ ID NO: 352419 - DNA, 625 bp, Cannabis indica
gtagataaaaagtaccttgcacgcttatcatttctaataacttcagggcgatactcatagcctttcatgtacttgtaatttacttccaatttcaagtcatgctccactttgtcaacatccagttattcatacaaaagatcaaccaaaactgagtagcttaggttcggatcaatgtcaaatgtcaaattttcgccttgtttataaacccaatctctaccatcaagctcccaagcaccattatacataacacacgcatcaacagttaaacctgtcacatacatttaaaaaaatacaattataatttagaacaaaaatctcaccaaaaaaaaatctttcaatgcaataaatatgaaaacgaaatcagacccgatcccaaaaattaaaaaaaaaaaacaattttttggggccccatcagacatttatccaatcgggccttaaaaattacccaaaatacatttcggactataatcggacaccccaaccagaccccaatcggacccatcagaaacatatcggacttcaatacaatcgggcctaaaaaatccaaaaaaattgtattttggataacgcaatcggacccatcgtacccgtcggacacccatcggactcgacccaaaaaaccaaa

SEQ ID NO: 352420 - DNA, 797 bp, Cannabis indica
cattgagaagatagttgattatgagtgtcaaccatgtgggtgagctatctatcatctcgacatcttccttttcacatataattggttcgtttaacatctccactggaaccaagttcaattcatccaattcattctgtgaggccagttttgctaaggcatcgacattagagttttgttctcttggtatttgctcgattttgaaataatcaaactttttcaagttcttctgaactttctctaggtactttgacattttaagcccttagtctggtatttcccgagaacttgatttataatcagttgtgaatcactatggcatatgaggtttttaaccttcaacacttcagctatcttcaaaacagtgatcaaggcttcatactcagcctcgttgtttgacgtgttgaattgaaatcttaaggcatagtgatacttgaagccttctagcgaaattaatatcacctctgtacatgagccatgctcattggatgcaccatccacatataattttcaagtatctacgtcttgttgaacaagcgaattttcctatggagttactccttctatcaagaaatctgccaaggcttggcccttgatggacgtttgtgggtgatcgttatgtcaaactgccccagttcaattgtctattttatcaatcttccaaaagcatctggtttttgacaaaaacttgtctcaggggttgattagttaacaccttaatcagatgtgcctgaaagtaaggtcgtaacttgcaagatgcatggattaggcataaggcaagttttttcaagagggggata

SEQ ID NO: 352421 - DNA, 972 bp, Cannabis indica
gatggcttcaggaaaaagtgactttcacatcttgtttccttcagagaaaaacctgagcctttcactctaacctagccgccaccttcctctcttcttcttcattgaatatttttaacacccacttagtgatagagtagtagtgcccacacacagaaagaagtacctcaatcatagtgaggaagttcgtgaagaaagacattcaacaaaaataatttccaacagatacaagcttcctggaggagaaggaagaggagacttgggccttttgcgagttatccaaggcagaggaggaagaggctgatgccgaggaagaaaaagaaaatccaacaaagtcacccaccatgtagacttggtttttatttgtctccctcttttttttaaatggcctttcggtcgacacaatgatttgccccttgtggaattttttattaagacaaatttgcgaagttggatggccaactttactttatgttttatctttaaatgcctcgtacttttatgtttgaactttgacatatgcttgtttgcttgcattttattcacaatttaaacaatcatattttgatcatacacaaagtatttttaagggtttccattgctcatatttctctctgacgctaagtagttaataacctactttatgcacgagcatcttatctgcccttccctcgatttacgagaagtcattgattttgccttgcaatgatcttattttaagaaaactcaaatatatttttaatgaccttgtcattttgtatatatctttattgcttacatgggtagttaaatcttctacccgcatattagatttaagtattttttaagacactttgatgtctcgtttaatactttcctttagcgtgagccgttagtattcagctttatgcgctagttataacattttatttttctttcccgcaagataggttttaaataaaaaattacagttgtttgatctctttctcgtcagaa

SEQ ID NO: 352422 - DNA, 551 bp, Cannabis indica
ttttaaattaagttttttttttcattttaccttaatggatacccgatgggttccccataaccgatgggtattcccctaccccgaatccgttggttattagacggggatggggcggggatgggggtataaataggtagcggggatgggggcgggaattgcattctccgtacattaaccgcccaatttccatatctaattatagtgtattttgaaatggcattttcttgaaggttgctggagagagaagctggcgtgggggacaaaatgaagcaggagggccacgtgtcgccgtgtgaggggctggtggagaggagctgcaggtggtgggacccgcgtgtggaaagtagctggctgggcagagaggacaggtgctcacgcgcctctgtctggctgtggactaaacgcgcgcgctgagcccctttgatcttcgatccgacgactggtgatgggtctttgggctgcgcgcgagtgggcttctccgaggcctgaaaatctaattttctttaaaataattactcatttttcttcaattcttcatttcttttcaaaac

SEQ ID NO: 352423 - DNA, 1207 bp, Cannabis indica
ctcaaatatgcccttttagtgaaattcataaataagacaatcattctttagaatttgtattgataaaacaaatcaattaattaagactataaaataatatttatcttagttagtttgcagaccatgtgttaatgtaatcaagcttctaatcatcagattttgaaatttaccaagtaaattttctaggttattaattccttctaactctactatagatttgaaattgcactcttaattacatagaacacactatatacaaaatatagataccctatgatttatctattgttacaatcgaaacaatcaatgatcctctatagatattttacattcagtaggaataaatttaccgttttactcttcaatgtattttatcattaaaacacttattaactacttgtaaataacaattcaataaattaatataattactgaaatgagccttctattatttatcacgtttagcaaaactcaaaggacattatcatttcacttctaaatagttattgaagttataaattctatatccttgattaacgctcccactcaattgcactaccaaattcagaagatgtcagtatgggctagtcctacgggtatgcggtaacgaataagtcaaagaaccagtatagtacaattaagctagaacttaaccatcttaggattaagatcaattgtcctaagatcaattaagtgacattgacttagaaaagatataatggtaagtttatgatatcttttccactatcaatatcgatccagtccaatgtatagttaatacatccaatactagtatagtttgttaatgcacaggaaagaacattccacttacataagtataagtaaaccacattgttgattataacattaatgtaaatctagtgcactaataaatcttgagactaactagtttgaagcatataatcacgattattttctactatgtaggcaacactataatcatgaataactatatgtttgagatttaatagaatttatatattaaacaaatgaccatgaaagtaattatgtgaaccatggaacataaaatataatttctgatcttttattaattagtaaataaaattatattgaaataaattttatttagggcataaaatcccaacaaactctcacttttactagtataaaactaaaaatgcattttaattaagggctatttacaaaaatatgggaaaataaagat

SEQ ID NO: 352424 - DNA, 567 bp, Cannabis indica
ttcttctctgctaaataataatttttgtaactcacaaatgaggtgagggcgcattggggtgtttcacagaggacaggtttagtataatttgtatttcaatgaaactttcataaggtaatgtaaaatcactacaacatataagtaatcattaccagttttatttttatatacacgaataaaataattatattattctctaaaaaatatatactctttaggagttactattatgtatatcaaactttatatttcttcatcatcaattcaatgatgcgtacatttgaaaggtacaagttgtacttcatcatgttgttgtcatggtcaaataaatataaccataatataacattcatttttccttgtatctttctaacaagtcgtctaatttcttaataatagactattcaacagtctaattatcatgacttgttactttcatgacttgataaatttttttacatctagatacatacaaatatagttaactactttaagtagcaattgtatgtaagacttcttcaaaaagtttttttcatataattattttgtgattctttatcactttga

SEQ ID NO: 352425 - DNA, 610 bp, Cannabis indica
ggctcagcatgttctatttgatatgagtaagagaagagttgactcggtattcttaaaaaaatagaaaaattcaaaaccaagtcaagatgatacgaaatattttttgtccatctttcattttttgttaatcaacgtttttttgtactctttataataataacttttctgtcttggtttgacactcattttttaccatcacaatattttttagaaatttctctcaattattcctatacagtggccaccgacaatattttttttcgatattttttaatatttcgagaaaataaaatataactaagaatttttttcatcttgaaattcaaatctatttattatttaataaatataatttgcaaaaaaggctcacactccatgttttgagaaaaatttaccttccgaaaagagaaaaaaatgagatctttgtctaaagaaataccttgagaaaggacagatatatagaatctttcaacaagatagtactttttcaactctctcaaaatagaatatattccaaacatatattgtaacaccccgatttcctgagacgtcacacttactactcagtttaaaactatttaagataaagacaataaaagacttctttaat

SEQ ID NO: 352426 - DNA, 637 bp, Cannabis indica
gtgtttttgatactggtgcatccattcctttatatcattgatgtttgttagtatgttaggtttgagttgggaaagttttagtcctgtgttacatttgagtgtacctatgggaggacacggtgaggtatccactatatgtaggtcagtttgtattgtgtttgagggacacaagttgtctagaaacttattagtgttgcctatgggcaatttgatgtaattcttagtatggattggttgtctaaataccaagctattgtggattgttcacgcaaaagaatgactcttttaacccctgtggtgatttcattgtttatcgagccaacatgagtgtagtgagacaaaatcctctcttgagggcatgcttaggtagaaagagaaacttagagtgttatgggaatctgtttacgatcgaggatgattctagggatttagaccagttcccttggatatctgtggttactggttttccaaatgtgtttctagaggatttaccaggttaccacctgatagggagatcgagttttgcattgatttgattcccagagctcaaccagtttcttttgtgccttaccacatggcacatgcagagttagctgaattgaaaaaacaattaggggagttaatggataagggttac

SEQ ID NO: 352427 - DNA, 738 bp, Cannabis indica
aaactagaaactaaaagtttccctatcgataaaaagtattgcaataccctaaacaacataaaaacgagcaaaactagggttccagaaaatcccccaaccggcataccggttctgcaaccggaattccggttctatgaattcctacaccccatccggaattccagttacacatctaaaattctggttcctcgcaagaatctttcaaaaattcataactccctcaaatcaaatccaatccaaaccaaaccttccagaactgttctatataccccaaagaacatttccaaagcaataacacagtccagaaaacacagaatcaaaaatcaccattaaagctccaagctttgagttcaaaactcaaacatggttaaacatcattaacatgcattcaaaccagctcaaatcttcctaaatatgcatataataacctctgaaaacaatagcaagcatctacaacaaatgcagcaacagattcttcattttttctttgaaaaacatagttttgagtaaaaattctatatattgataaaaccaactaatcaccaacacaatcaagcttgaatcaacattttaaattaaacttcaaaaatcaaaaacaaccacaaacataaccacatccacaaattttcaagcatgcaacactcaacttcttaaaaaccaaaaaactaaaagagaagctacaaggatcttaccaagcacttgaactacacatagattggatgaataatgcttgaaaaa

SEQ ID NO: 352428 - DNA, 740 bp, Cannabis indica
gactcttggtcacttgtctttacaaatatattgtttatttgttcggtgttttggggtttgaccaaaccttttgtacgcacagtaggtaaattataatcatgctgattttttcgactcaattgaattttgaaatactatctttattcattttttgatcaaaaagtgtatttgttaccatagtaacttacatcagagctatttgatggaatctgatttttagcttaacatgaaataaaataaattgcagacataagaaactgtactttaaagtggtcagcccgacctgagtactttgtttctcgaacctttgggcgtagtccgcccataaggccattcacttaaaagcaaatgttcatttagtacttaaaatggtcaacccgacctggtactttattggtactatttccttaaatgttctccattccagtaacatggtactagaatgagttgcattttttcatcatacttacctaatctgtatgctccggagtcgagaacttcgaccacctgatatggtccttcccagttaggtcctagtacacctgtcgtgctatctttggtgttcaggaatacccttctcaggaccatatctcccacgaaggatttatgagctttcacttgtttgttgaaataccgagccactttttgttgatgagctatcaactttaagtttgcagttgctcgttactcttccatttcatcaagtgattctggaaggagtatgtgattggtaccttgat

SEQ ID NO: 352429 - DNA, 947 bp, Cannabis indica
ttgaagatgataaactttctgcataccatagcaaagtcctgcatgctatatttaatggtgtaggtaagggttatattaaacttatatcatcttgtgtatctgccaaggaagcttgggagatccttcaaactcagtttgaaggaacatctaatgttaagcgctctagatttattatgcttcaaactaaatttgatgagttgaggatttaagatgatgaaaccgtaactgaattctatgagcaactatctgatattgctaatgaatattttgctcttggtgaaaaacttgatgattctgttcttgtgagaaaaattattagagttattccagagaggttcgatactaaacttttggcaatggaggaagtcaaagacattagcacaatgaaggtggaagaattgatgggttccttgcgtacttttgaattgaatcaacaaattaagcaaaaggacaaacccaaatccgttgctgataaaggtaaaagtatcgctttaaaagttgctgataatgaaattttgacagtgaatgtgaagatgaaattgctttagtaacaaaaaattttcaaaaaatatgaaaaagattggtaataaaaagaataattcgaaatcttcaaaagggaatgcttcttttaaaccttctgtttctaacaaaaagggaattcagtgtagggaatgtgacagttttgggcatattcaattcgagtgtgcaaacactttcaaaaagaataagaaaagtttcaatgtcacatgaagtgatgatgaaacagaaagtgatgaagaaaatttttagaatattgccttaacttctgtttataactaatgtattgtatgattcacaggtgaaaactagactggtatgtttgaataataccactaaacaagaagaatcagattctgatgattctgaaatctgtgaagagtctcttgctgaatcatacaaagtcatgt

SEQ ID NO: 352430 - DNA, 642 bp, Cannabis indica
atactgagtctgtcgactaataatgctatctttatgtgtaggtaagggcaagcctaaagttgaggacccgtgagtacgagcagatgaagattgtacatgtcaggacggttaggcttggagcgtacgatcttcgggacatcgaggcttttcctgtatggttgctaggcaacaaactttttattatatgtatagcaaacttttgtaatgtattatataaatgggatcccgaaatgttatatatgtaatactttaagtttttaattaaataaataaattttaattcttcacgattttcaataacctcgttgattagcaacgagctacacagtacgtttaataccacgataacatgcctatgctagttagggtgttacactagtaatggtttacattaagtatacaactatttcatcattctgaaattttcttatcagtagggtatttcctagaaggacttaggcaactgcttgtaaataatcacaaaccttagactgtcatcaatgtgcaaattgaatttctaggaagctaagtttggatgtaattcaaaattcaaattaatgatctttgaactgtatatccaaatatttcttcaccgttatcagttcgcaagatctttaaccacttaccttaatggtttttcac

SEQ ID NO: 352431 - DNA, 927 bp, Cannabis indica
ttatttatttttctgcaaatattttatattctgcctgttctattttgttactgcaaaactggtttctacaataacagaattacattctgcttttgcagacgcatacaattttatattttcgtatatataattgacatttgcaaaaacacggtttttcaattatctttatcacatcaactaaattcgtttttttgcatccatctaagaaaatattaaattataagtggttcaaagtaataatttataataaacacattaaaaaattagaattatcttacagatgaacaatattatgaaaatactattatttagaaactaattaaaagaagtgggaacaaaaaaaaagacaaatgacacaaataaacatcaaaatggtttcacaataacaaatgaaacaaagagaaaagctagataattaattgacaataaaatgttaagacttacaaatataatataagaatcaaggagagagagggagagtgacaaatgatgtaaattaaaattacaaaattttgaaagacaatgaattctatagtaacaattcttcaatatatagcaaagtatgaattaatatatagcaaactattaccattgttaacttggtatgaaacattagttcattattataaattataattattattatgtcattatttttttaatgaattagttaactgttactatttttaatttattattataaaaaactgaagataataaataaaaagtaaaaattaaaaattaaaacttgaagataatagaaaacgaaagacaatactataaaaattaaaaataaataaatagttgtagaaaaatttaagatgccattgccatattatactcatattcatatacaaatataaattatttatatttttatacaaattaatatatctaaaatcaaaatgtgtaattactcattattaa

SEQ ID NO: 352432 - DNA, 585 bp, Cannabis indica
ccaggtcccggttattgtgtgggtttagttcccagtctaagttcgggttcgagtcctagtcttggttcgggtgtaggtttctttttggtttttgatctgggtttgggtttgggtttaggtcctggtcctggtcctggttctagtcctagttcagttctagttccatttgcgattctgagttcgagtttgggtttgagttagggtcggagttcgagtcctggtctgagtttgggttcgggtccggattgcagtctaggtccagatcaggctccgggtgtgtgttcgagtcctgggtcttcgtctaggttgggtccgagtcccaagttccactcccgatcttagtcttgaatcaattctgggtctaagtccttgcatctgatcctggtctgggttcgagtttaggtctgggtccgggtcttgctttgggtctgattctagttgtgggtttgagttcgggtccgagtttgtgtccagctttggacgctgatttgggtctaggttcggctcctggtccaagttcaagtcccgagtgcgggtccaagtttgggtttgggtcaagatcctggtccagatctaggtccagca

SEQ ID NO: 352433 - DNA, 594 bp, Cannabis indica
ttttagtttttttttttctgttttgtacaaaatagaagagtgtaatgtctgtcttaaaatcaaaacattaggccttctttttatagttttttcttttaggtttagggtaagtatataattggctatttagaaaaggataatgaccctaaaaaccttaccaatatggattcaaggggtttgattttttgctatttttatttcatacaatgaaactttctatatttgtcttaaaatacaattttttatcatgattatttaaatactaattttatctatttaataattatcaaataaaattaccatttaaatatatttattaattacacccataaaatatcttaattaattaataataaatatttctcttttattttcttctcacatttgccattccttagtatattcataaataaaacataatcttctatagaattctaattaattaattaagtcaattaattgagtctagaaggtaatattatcccaaataatgtggagatcatgggtctatctaatcaagctcctaataagtagatttaaaatttaccaagtaaattttctcacttattacttcctcctaactccattatagat

SEQ ID NO: 352434 - DNA, 833 bp, Cannabis indica
ttctcaatttctagatgttgttttatctgtgataacaaatgcttctttatcgttaatttcttgtcgatcatttgtttgtcttgttagttgagccatcttttctacaataattatttgtgcatagtcaacaaagtcaaatgcatcattatcttctattttgttttctttttgttgagtgttggtgttccccctaactgggtacatattcaagcatgtggacttcaagccttgcatcaaccttcgtaaaaaaatatatttgtgatgttgtatttgtgttagggaccatatttacaaatgatgttttttcatgtccttttctcttaattttaactgcaagtaaaactccagactttcatcatccgtgatctttaaagctaaatatctagactgtatctaaaactgcatttgtagggtacttgactttctattgtagttatgttctttcaacagtctgtccactaatttagtatattttcaaattttttggatgcatatcccagtagcttcaaaatcaatatactaattgctctcatcccaatgtccattgctttgaaatagaacaagtattgattccatttctcggcaaatcaactaaacattttccaagatcttaaattaaattgtatttttcatgtataaaaacatttaaattacaataattaaccaataaatcaacaataatttttttttttttaagaaaaactaattctttatcaaaccaaaatttaaaatttctcataggcaattaagaatatcaattttgttctaacttattaacaataaatcaacaatttctatttgtttcaagatatatgaaactcaatttttttttt

SEQ ID NO: 352435 - DNA, 814 bp, Cannabis indica
aactgggttcgggcccgaaatgtaaattggattgagatatttggcattttatttgataatgagaaatctgaattttatttggaaattaatgagcatgaaatgaataaattgcccatgtgagtgtatatgcatgttttaaagccctaggggcaaaatggtcttttgtcctttattttctacaattaataaaagatgaatttttagagaaaaaagggaaaattctggttgtttcaccccctaacccgtacccctctctctcaaaccctctcttgaaatgcaattggaattggtgaggaatttgcttgggttttagcttggattgaagctttgtgattgagaaactttgtgcttgcatttggattgaacttgaggtaatccttacagctgtgattgtggttgtgtctactgaattttgattgttagaaatgcatgattatggtgttgatgaagatgataattacatgttgcatgagatgatgttcttttgttaatttaagtgagttttgcttgaattctttgtgtgttggttgtttgagctctagatggagttctagggtttcttccttatcttgaattcaaagtatttgatgatgattgttgctggaaaaatagttgggatgcatggttttgaagctctagttcaagagcttagattttatgagttaaagtcatgatttgtgtttaattgtgggattttggatgcatgagatatttgtttttaatcctataatgtttgctagctgctgtaagtagtaaattgagagtttggttgtgaaaagcaagcttgagttcatggaactcaagcttggtgctt

SEQ ID NO: 352436 - DNA, 903 bp, Cannabis indica
tatttttatttttaattattattgtatttattttggaaaattttcttttcagtttttgttgcttagttttaacaagtatatcatggtattctttctatatatgattatttttttgattctatattagaagttctttcttttatttcattgtgaataggtatgttttatttttccaaggtatctttttaataagtccaataatggtattctaaatttataacatttatgtgtttttcaagtgttttaatttttggttattagagttataaagatattgagttattgaaattatagagttattggaatggaaatttttgagtttcgcgacttcaaatgatatgcttgcttcgctagagaacaacatttttagcagattagttttcttttggtacattcagtctcatttgaaatagttttttgtgatttatattagttgctaattttctttgtattttatgcagttggattatcttattttcatttagaacatttggagggagtagaacaagcatcgactgaaaatttaggtgtggaagatggagatttctagcatttcaagcatattttcttgcaattttaatgacgttggataggaattttccttcaaattttattgttcttgttgattttttccccttagcaattgtctctacttttgcttggagacatttttttcagtcatctaggatcactgttagaaaatgtaacaagtttgttatccagttttcctggagtgtccatgatctatgtacattagttggccattgtggctgcacatgctcttcggatggattaacaacttgtttggctagatgactttttgttattttattctttgggttgtatatagtctgttagcctgtttgacattattcaattatcaatgatattggtcattgtttt

SEQ ID NO: 352437 - DNA, 564 bp, Cannabis indica
gatctagaacgccggtggtgcctgttttattttaagcagttgataaatctaaacacaatagaaatgtaatatttaaaatcatttacttgtcatattttgttttacaaatgaaggatccttctccattgcattttgatttctaaaacccattgttgtattttaagaattttttttatctttttccaattatgcatttaaaatggtatttttgtaaagacaaaatatcggggcgttacaaaatccagaggcagtggatgagtccacgagtgacagttatcactcggatcatttttctaatgatcctatttatgatgtagcaatatatgaagaaaatgattatcataattttgaatttgctcttaaggatttttcattcccagttggtgatctagacaaccaagatggtgatctagataaccaagatcgaagaaaatcattttggtattgaacatgtaattaaaattttattataatataaattatttttcagctgttctttaaaattttcttaatagttttagtttttttttatgtaattttgttcaaattagtaatttattgata

SEQ ID NO: 352438 - DNA, 578 bp, Cannabis indica
ttttttgtaggtggatggagctctttcatggcagtggcaaaaagaaggtttagattgtgttctgtataattttttttacgtttaattcttttgtattatgttcataaatattatttttattttaattttcttcttaaatttgttggcttgagattgtttcctgaatatggttttggtattgtaattttttttttcaaatctgtggtggtctgatgcggttggtggtggttctgatttttttatttttctttttacccttttgctttggttcataacttagacatagtatttagatacaagttgttattaatttagtgttgtgactaaaacacttttagtcacaacaattgtaacttttgtgactaatacttttagccacagactttttagtcacaatatataactaacgatttatagttagttacaactatttcactttcaatcacaagtttgactaaaatcaaattttttggtatattattgttacaaaacaaagtgatatacattaagaaagggaaatttgattttttatgcttacatttggttaaaaaaaaatttctaaacaaataataactaat

SEQ ID NO: 352439 - DNA, 590 bp, Cannabis indica
taaaataatttccaacaagaggtatgagcatcgacacccacactagacacagagatatgagcatcaacatccatctcattctcttgctcaagagccaaatattcttcatgaagtgcaatagcaccatcgacatcccatccacgatggagccctttcttatattgtatcatcaactcaccccttgtcttgatagtagtctcgagcaaaatatcatcaatctcctggtacaatgtgacatgcttagcctcctcctccttaagtttgtcacgcacacgctccaactcaatgttcaacgaggaataactctgtttgagcttgtcatatgatgatttggtagtctatccttccattttcaagttctccacttccttgctaagtctggaatgctccttgttcaaagccctgctcttttgataaagcaaaattgtgtcacacctcaagtagaggactgcttgaatagcctacataagacaagtcgaattatcatgagtaatacacaaaaaataactacatatgtgtacacacaaaattctttccaaaacttacttggtaaaatcgtagaaacactgaatttgctcgccccgcaactc

SEQ ID NO: 352440 - DNA, 1320 bp, Cannabis indica
agcaacccctagagttgaattttaagttcattaagttctgttggagccattctgttagggggctttagaaaccggttcttctccaggtgccaagtcaatgataaaatcaatttctctttgcggtggtaaacctggaagttcaacaggaaaaacatctagaaatgcctgaaccaccttaatatcctctggccgaatagagtcaggccgagtggtatccaataccacggccaaaaaccctagacatccatcacataataattccctggctgttaatactaaaattactgggaagcaagatccctaaaccgatccaacgaaaacaagcggttctttgccttctggttggaagattaccatcttcctcttacaatcaatactggatgagtacttggaaaaagaaatccattcccaatataatatcaaaatctgctaaactcatttctattaagtgagcactcaactccctatcgtcaattctgatcgccatagacctaatccaccatttggagatgactaattctccgctagggagtagggttccaaaccctgattcataactatcgtcaagtgtatccaattcactaaaaattatgctgccacataagaatgagtggcccgaagagaaataagagttgttgattgagacctgacctgttaccattgaagggctagcttcggcatcagcctgagttattacaaacaccattgctggagtgggtttcgtcccagtcttttgtacttccggcttgagttcgggatagtccctcttataatgccccgacataccacaatgaaagcatccttgccctctacactcccccatataaggctttttacaactagggcactctgggtaagtgtatcgggtttcaaagctaccctaacgattgcctcgaccctggttccctcggaacctcttgttctgagcagagccactaagtgaagtaggtgcctttcttttctgatcagtggccgagccactatttcccctactaaagcctgatgtaagaggagtaggagccccacgaacaaccggagtccctcgagactctaaggtgcactccactgcgccctcagcttgtagggccttacccaccatatcagcataggtggtgttgtcatcagtagtgatcattaagtcttgtctgatcttcacttttacttctctttcttgctgaaatcagttgtcacgattcctgcagccaatcttgccaagcgatcaaattgagtcgtgtattcaataacactcatgttttccttatgactcagctaggtgaattcttttctttttgcgcttctgactgcctcattgtaatactt

SEQ ID NO: 352441 - DNA, 1160 bp, Cannabis indica
catcacaccttaccgcaatatatattcatcccaaaaaaaaaaagaaaagcttcgatcaaccaaatccaaactctatcgtcgaagcttcgaaatcataactcgatcgatcgtcaaagctctccaatcatgtctctggaacctggcaactaaatccaccattaaagctactcaaaagcttcaattctctgaaatcaaacaaatttaaacaatctcaaactagaattttgcactattcgaatctccaccattgaagctcttcgaacaactcagtcgaagctactggaccgccattaaaattcgtcgaagctctccaccattaaagctacacaaaaacttcaattctctgaaattaaacaaacataaaacatttaaaaagaaactaacaagtaaactgtattctgaaataatgaacttaaaaataaaaagtaatacatcggtattactttcataatattaaaaacaataaaacagtttctttattttaatataaagctatataaaaaagaatgatgaaatcaaaatagaaaaaataattaattgcaacaaataggaaaccatcattatgttgatgaatattctatgaaaatagaatctcttttgtttatttctttattaaattaaatccaacatagtttctatggtggtcaagaaaaagggcattaaggcacaaaactcagaaaataacatatataagtgcttaatcaaatcaaaaaaacacttaatcatagatatatccccaagcaaatattcacccataacatcattaaaaagaaactaacaagtaaactttattctgaaatagttaacataaaaataaaaagtaatacaacagtattacattgatcaagcacaaacctagaaaaaatctacttaataaaaaactaatacaacaaaaactaattagtataccaaccaaaactatagccaaaaaatactactaaattataaactgttaataacatacaacattaaaaataaaaaacacactagaaaacctaaaataacaaatatacatatacattctattagaaaactatacagtaaactttaatctttaaataacaaataaacatacataaaaaataaactactcagtacaataaataactcggttacaaaacaactactaaaaaaataaagtgttaaacaacctacactaa

SEQ ID NO: 352442 - DNA, 573 bp, Cannabis indica
atcttctatctttcagatgagcgtctgtcagacagccaaatgcttggctcttgaggtgacgcattcgatggcgactaggaccttcaggaggatagcttcatcccaacttccatcttagaagaggagatccctactaccggagacacggagttgggcccgtgacctctgcagacatcgagaggatggtgcaggagctcgctgaaccaggaactatagagattagagacagcgagtctacggtgtcagctgtgaacaccttgttcactccaggcacgctcctgatgtcgaggtcgaggagatggacgaagactggatggctccagaccgcaagtcagatgaggaagaggacgctgagggaagtgggaccaatttagtgcataatactcaatttgatgagcctttctcatgcgaggacttggtctcgcgagtcaccaaatcggatctcaccacctttacgagattaaatttgttgcgacttgcctccttgcgtcctcgtcctacccagagagcgcacctttcttttactaacccaacgatcatacccacagaggatgtggtagtctcgatacccat

SEQ ID NO: 352443 - DNA, 967 bp, Cannabis indica
aacgttatgccaaagcatggaagatttcaattctaatcttgcacgtttggaaccaacaacaacattaagagaagaagagtaaaggcaagagggagaagtaacagaaacaacatcatataaatcaagcttatataaatttccacataaacttccattaccaaccaacatagagtcacgatacaaaatcagatttacagttccaaaagcagactataacctagtctatccaaaatagatacaaaaatcaagttcctcctaatagagggcaagtaagcaacaacttgcaaaattccaagaaaatatcctgtatttaactgtagtcaaacaatcccaaaactctattctgactttagtatcgtcttccatatatacgtacccttccgaactattcggccttcttcgatttatcactgcctttcttctctaagtggacttttggtcactagagttgttggaagtggactctctcttctgagaatttcttgggttcgttaccatggagatgcttcttgcttttcccttatcaagtcctcatcttccttagcaagaatggcagtcatctcctcaacggtccattgctccttttgagcattatagcttgatctgatcgaatcaaattgagagggaatggtttccatcacaaaccacaccatgtaatcctcaccaagatccaatcccatgcccttgagcttttggtaacaacccatcagtttgtcaatgtgagatctaatgtcaactgaatcagcataattagtctgatggaacaaagtcaggcattcatttttctcactctttgagaatttcttgtacttctccttgatcgcattgagaaaatcttttgcaatctcagtttggggaatactatcacgaatggactcatccatgtgatatctcataagcatcagacaacaacgattggaatgctcccaatcctcataggactttctatccttttcagtggtatcat

SEQ ID NO: 352444 - DNA, 655 bp, Cannabis indica
actcaatgagctaatgatcgagaaagcatgggaaccaataaatctgcgactcactcaaagacgaagtcgatgagtaggacgcgatctatgagtaagacgaggtttgtcagcaattactcccgaccggatttgcgagagcacttgaatcgaaagaaacatgaccttcgccaacagcttagtcccaagcaagagggtcctatccaattgcgaataaacgagctagaggacaagttcaggagatatcaagtggaggaactagggagacaatctggatacgactcaaatgaggagcttgagtcgtatcatccagatatcatgaaaactccttttgcttcgagattcaaaaacctgcatgtctcgtcatatgaccgaaaccactaatctgatctcgcatgtgaacaactttaatacaataatgcaagagagcaatgtgacgaacaatttacgatgtatcttgttgcccacctcgcttgttggagccgcgagcagaaggtttaacaagtttactcaccattcaataacttctttggagcagttgtctagggatttctagaaatagttccaggctactagggatagaggacccgaagtggcctcgctaaccaatataaaatagcagcccggtgagacacttaaggcatacttaagttgtttt

SEQ ID NO: 352445 - DNA, 761 bp, Cannabis indica
ttggttgtcccatcgagggtttcgaaaaatgacggctgtaattattaccttttattgcatttatggtgccacgtcacaaaaactcctcgattttcgtgtaggcgtggccatcgttggccgttggattgggcgaccttaggcattccagttgccacgtgtcgtgatcccaattagtgagggatatgggtatttaaaccctttgatacgaatcaaatcccccatttttccctcttgtttcttaacttccttcttccctcccttacagagactccaaaaccgttttcaccttttgcccagatttctaccgttcttctaaagcatcctcaatctcagaagtaatcgagagcaaccgcaggaacaacttgccaaaactaaaggttagtttcgagttccattgtattttttgctttctgtgttcgagaaagagtgttttttctgggttttggtattttgaggctttttaggaatgtatgtttgtaagggatatgtatgaggttacgttttttgggtaaaaaactgggtaatcctatgaaaaatgacctgtaaattggaataaccgcatactgtataagaaatattcaaataggcgctgtttcatactttgaatactcgcgggtattcggatgaacagttcgaatactcgcacactgacagaacttatttacttctgattattggctagatcttttaggattttatatgctgtgagttgaattgcgagagtattaatcgctattccaaatggtgggtgtgtcacagta

SEQ ID NO: 352446 - DNA, 635 bp, Cannabis indica
aaagagcgtttttgtgcaccaggaacctggaggaagaggaagaaggagtcaaagacaccctcctgtcgatctgagacatcatattaaaggaaaacacggtgaccttcaggatcacctagactagaagaaacatgcgccagcggtctcgacgagaacgctaaatgaagggatcatggctgagcttgccatactgcgtaaagacattgctcgggtctcccatagacaaaaaggtgatgactccgactctgactgtgaagaccgtgagccatgttccagacatatcctggaggcagagctccccgaaaattctaaaatgcccgaaatggcaggttatatcgggaactcagaccttagcgatcacttgtcacggttcaaccgagtaatgagggtcatgagagttagcaatgacgccaaatgtttatgcttcccactcacatttagcgggtccgcggaggaatggttcaagaaactggagccaggatccgtcgactattggaacaagctgcaagtcagcttccggagatagtttgtcgccgcgagaaaggttaatctggaggtcagcgccctgactaacatcaagcagctgccctcggagacgctgaaaaatttcataaagaggtttaaagaagaagcct

SEQ ID NO: 352447 - DNA, 800 bp, Cannabis indica
gtacatgtattataatttgaaataaaattattaattttacataaataaatttataaaaactaatttttattgagatataattatatagaggtattcttatttgattcgagacttaaaaaatgtataactaattttaatttagatgttattcttatttatgatttgttcaaattgagacttaatttatttataataaatattagagattttttaataaagtattattaaataaagattcggttgtatatcattaattaatttcatgagtttggcttctatgcttgttttatacacaaattaatatggatatattttgtattgttattgcatgcatgtccatgaaaggtgttcaaatatattattattggtaatttattatatatggcaaatttacatgcacgtactctcacgtacgtaaataattaggtaaaatattatccatgattaggtttttgtcgattaaaatcaattaaatagatcaaacatttcttcttcttattattttttatttagtggtccaaccaaccatttcattatataaatatatatttttttgaaattctttaatatgcatcattttgatttctatttaattaggattgttaatttttatttgcgatataatccattcttactcaaaattatctcaaagatatatatcatatttattgttagagaattgtaacgtccccgcttcaagcctccattgggtccttacacccacggaatgaatgactcttatacacgagtacgccactctagctacttcctggattgatgactggccctacagaccaaca

SEQ ID NO: 352448 - DNA, 625 bp, Cannabis indica
taaaattaattttaaaataatcctatgaaaaattaattccatatatttcaaaattaattatattgttatttcaattttaattaggttaaactagtataattagcctaatccaattatttaaataaggcaaatggaccttcacaaatgtggttgttcatgtgagggagggctgggttcagtatgtcgtaactaattgggcccaaaggagaggaatttaacctttcattaaataattgttattctttgaataagcccaatactaattgggcctaaataaaactatcattaggtgatattttgattttagcaacctagttcatttaaatatttagaaataaatggacttgctatatgcatctaagcccaaatgcaaacatataggctcacacaggtcaaattgatttggatgggtcctgtcatgtttctaggtttacacagataaaagaagtacaaaatttacctgttacaaattatttataagatctaataacaatcggactatgattaaaatcagatcattggatctgtcaaggagttaatcatagcaatttaaaacaaataaataataggtttgttaattatttttgttgaataaataattaaataaaacaaacacaatatccat

SEQ ID NO: 352449 - DNA, 1049 bp, Cannabis indica
gtggatataatatgagttatttgtgaaataaaaatattttcaggttcggcgaccttagagactcgattggaggccaaaaatgtcacaacagttttagttagaaatattgatgggattattgcgataagttgattttataaatattggagtattttagaatactcaaagttggctaaatacactaaaaatagagatttcttagtggttaagaaataataagataaatattaataacaaagttttaacaaagtttttattaatattatattattattatgtatataaaacgaaatttaagtttcgtttgtttaatatatatatatattatgttttaagttataacagtatagaagaacgaacgaactctcgttctcctttcttagataaaactttctccccatatatctatttttcttgattttcaatccaaaacttagcaatctaagctccggtagtagcaggatagaaaatccttaaagagggaaagctcaaagtatggtttaatttcgttttaagtttaaaaacaattggtttcgtataggggttttgtgaatttaaatagttatgaaggttctgatattataggattgttctcgggtaatcatgggactagttcgaatgttttcttgttgaatttgaggtgattttgagttagaaattgagtttggatttttttaaagcttagtccgaacgctaatggcatttttcattcaaggggtcaatttttatttcggttacataaggatggtgatatttatggtatatatgcgccctgtaaagtttgtagtgatttgtataagtttttttagtgttttggtgagtgcgaaaattgggattttctagttttatagtttttagaaatttcttagagatcagaaaacatatatttgtcataacttttgatgagggtgtcaattttggacattctatataccgttttgaagcttgcgataagctataaaatatggtgtatgttttagagcaaaatataagttttattttagtgtatttataccgcggggtttggtagaaaaccctagattgtctta

SEQ ID NO: 352450 - DNA, 536 bp, Cannabis indica
ttgttacattagaatgatcattcttttctttctaaaatggaatagccattccaccaaaattgtggaaagagcattctattggaaagctattctaatactttaaaatgcaaccaaacaaaggaatgaaataaaaattatttcctttccattccattccattttattacctccaaccaaacgccaccttagtgtgttaattgtttgatgtagagaacactcgtgcaacctatgcaatcgaatacattcccaacacaaagaaaccttgttttggtcctcaccctaacaatgtcattcctttagctcgtgatgcatttggttctcccaccagtgagcaagctcaacaaagctcagaccatgtaccatttcataagtggctacacaattttggtgagtaatcactgaaaaaaaaaatgatatatagatcatgtacttgtgacacatttcattcatagcgtatgcttgacttactactgctattattgcaggaaaatgttactaaggttttacaaagttaccaagattgcttcatgattgta

SEQ ID NO: 352451 - DNA, 832 bp, Cannabis indica
gagctaagaaaaaaagagtgcaatatatattttatattcataactatttgcaagttgccgcgttaaaaccttgccaggaaaactcagtgggacaaaacctgagctaagggaaaaagagtgcaacatgaaaatgcctccccctcatgcaatatggttcataattattttagtgatattatatttcataagattaattattgttatcacttttaaaaatcaccgtatattatctattattatatattttttataactcttccagaatatatgttgacttctaaattatgaatgagagattcgtggatcgaatatcaatatttatccaacgaattgtatcattcatgtgtgtatacaactttgtttatactagaatttaacatttcaagtagatatgaacataacacatcaatgataatataaattttcaattatttgtgacaatgatggtactccaagaccatatatttgttccatcttgttgtatgatcttaattttcatatcaaatgatcatatatctataattcttgatacatatgaagtacttcaggacttcaatactaatgaacaaactttatacatttaatatttcttaatatacataaggaaataaaagtttgttcttcaatcatttataaaaaaaaaactcttcaagagtctatcacaacgtataatttatgaatttatattgcatagacaaccatacgtgtttctcaaataataatttatttacatgtctttattttatacaaagatctttgttatatagtgtgcgcgactttgaatttatatcacttagacatgtatgaaattcttctagaatttttagataag

SEQ ID NO: 352452 - DNA, 613 bp, Cannabis indica
tttttttttctgtttctgaaaatattttatatggattccttgtgaaaaattaagcaattttggtttgtacggaactcaattccgataaaaattgataaaagatatggatttttcaaattagggtgccatggctgtcgagtgggtgcatcgagtgcacaggcactcggacaacacataacacgcgcgcggataaggaaggctttgcctgtctaaaggcgtgtcacgcccgtgtctttagacacgggatgctgcaagcacgccgaggcacaccctgcagaccccgagattcctcggttggctcctcccatgcgcgcatgtcttgggataggctgcagcgtgcagcctagctgctagcttcacccatatttttgaattttgtgggattttttttcccaatttcgaatttttccaattttcaaaccccaaaattaaaataaaatattatttttaatatattttaacttaaatattatttttttaaattaataatatttattttttaatagaatattattattttatgataatttaaggtttaaatttaaaaaattgattattttatttttttaaattatggtcagaagttaaaaatttgttaatttctttaatattt

SEQ ID NO: 352453 - DNA, 1350 bp, Cannabis indica
tccataccttataaaagtattttcgtaaataaaaatgttaatttatatttttctatataataatttcaaatatatatatatataaggatataaaagttgtattaggccaatcacagtgattttgggcttctgaactaaattcataacaaacatccaaatgtaataatatcaataaatatagcttcttcttatcattataaatattttctttatgaatatgatcatttaagagagcaaagacataattttttagtggaaaaactatactaactttttttctgacctttttctttatttttggtataaacaatgtcttttttagattatttctttagggaagatttaagtgtactacatattatttttatttttcaaatatattaaatatttatcttcttcatttctatatttgtcacattaatttcccttcttctaatttttactttattttaatggtactttttatatatgttcttttatatttttttttgaaattacactattaattatttaggatatttattatattatatgttttttactacattctgctggtggtgttttatcgatttaatgtatataatataatagttttttagaagtagtattaatttatttaaaataataattttcaaagtgagatttataaaatatattttcttactataattaatggtatagaattatagttgggtattaaaagctaattttatcagaaaaatacttttacatgaagtttgagtatgggaccaactaaggtaacaggttagatctgtgcgaaaagatgggcaaagactccatccggactactaacctcctgatccggaacgctccatatccaagaagatgtcacggaccagacatgaatgaatgatgaagagcctcttagatgggccattgggatgctcccaaaggactttctaagagacgtcccgaaagctaggctaaagctgacttagcaatcctttgataccaaattctagggggttgtcccctatgtcaaaccctaagagtgtgcataccaccaaaaagaacattctttttgacctatgaccactactttgatactacaatatgcaaatgcagggcatgcacgacatgtgtcgacctcaactagtgccctcttgtacagaaaataatagccccacgagttgggcctcagtccgtgggtccaacgtcagtgtattttatgtatttatcctattagtagaccaggtttatattcagaccctaacgggtcacaggtatgtccatactcgaatcttagcctataaatactacatcataccctcatgcaagaggtggaaaacagtattaaacaatcacacaacatttagcaatcaaaaattt

SEQ ID NO: 352454 - DNA, 932 bp, Cannabis indica
acatataaatctgcatactgatctagtaaaaaggttatttttacctgtagaaaatgtacagacttcgtgaatcgatctacaacaacccaaatcgaatcctacattcccgtggttctaggtaacccaaccacaaagtccatgatgatagcctccaacttccactcaggtagtgttagtggttgcaataaacttgccggtctctgatgctcagacttgatttaatggcaagttaagcatcgggatacaaattctaccacatccttcttcatcctgcaccactagaagtagggtttaagatcttgatacatcttggtagtgttaggatgcaatgattatggagtggtatgagcttcctcgaggatctcatttctaagttccgcactacttggaacacaaacactggtcttaaacaacaacatcccactatttgacaccatgaaatctttggtttgactagatgagcactcgtctcaaatcttcattaattcaggatcagttaactgagcagctttaattcgttctaacagattagattgcagtgtcaaattatgaagtttgcctataacaaatttaatgcttgatttgaccatgtcttctgttaaccaaggtaaaatcttaatcatattagttatctgtctgggaccctttctgctcagggcatcagccataacattggccttcccaagatggtacaggatttcacagtcataatccttaaccaactctaaccaatgcctttgtctcatatcaaatccttttgagtaaagaagtacttgacgctcttatggtcagtaaatctcacatttctcttcatagagataatgccgccaaatcttcaaagaaaaccccaccgtagtaagttctaaatcttgagtcgagtatcattgttcatattctttcaactgacgagaggcataggagatgacctgatc

SEQ ID NO: 352455 - DNA, 715 bp, Cannabis indica
gttgtggtagattctgaaggtaattcaaagttaaaacttgaacttgaatagtctactgaagatgataagttatatgcttacaatagtaaagctttacatgctatatttaatggaataggtgaaggttttattaagcttattcttgtgaatctgctaagaatacttggtaaatccttcaaactcaatttgaagaaaattctgatgctaagcatactaagtttattatgcttcaaattaagtttgatgatcttcgaatgtctgataatgaatctttgtttgaatttaatgaaagattatgtgatattgctaacgaatattttgtcttgggagaaaaacttgatgaatcagtgacagtcaaaataattgtgagagttcttcctaacagattcgacactaagctattgactatggaaaaaagcaaaaaaaattcagtaagatgaaggtgaggagttgatagtgtccttgcgtacctttgaactaaatcaacaaattaagtaaaatgacaataccaagtccaaagatgatagaggtaatggcattgcttttaatgttgctgaaaaagaaagttcaaataatagagaagatgatcaaaataaatgttttaattagtaaacttttcaaaaatcaaacgaaaaagatagtgacaaaaagtaaattttcaaaaaagtaataacttttttgaaaaccttcaatgactaacaatcaaaagagaatt

SEQ ID NO: 352456 - DNA, 627 bp, Cannabis indica
gaatcaaaaccttgcacaaacaaaagaatgaacaaaacaacacttaactaataactgccacacacaataacacaacacttgaaatacaccaatctggttaccttgtacctcttcatttaaattgcacaaaatgcacttcaagttgctaaagggtttaataaaataattaacaaaacaacacttaactactaactgccataaccaaaaagtggtacaaaccagttggtacaatccgtgagaaccaagaacataaagcacatacatgaatagacaaaatgcccccaaagcttaaccaagttgggtatcttgtacctcttaatttataatgaacaaagtacaaaacaagttgcaaaacatttaatatcaaaattaacaaaacaatacttaactactaactgtcgtaaccaatttcaataactactcggataattgattcacacaaacaatcaaaactgccatagtttttatcaatagtgtatctcattaactcatgaatcttatgtctaaaccatcaaatttttcaaaacaaatttataataataggaaaatccaaactaaaacttgtaattaaagtacaacaatcactcactacccaacagataacaaacatataacacatcacattta

SEQ ID NO: 352457 - DNA, 1371 bp, Cannabis indica
tctaatcttagtttttttgtttttttttatttttttttaattatctctattctaatcacactacttattttttcccttttttcagtgacaaatttacttttaattatcgttttacttacacttaatcttttaaaagttcaaatagtttcaaatttttagcagtaaaaatcttttaaaattattgttacagtctaagtaaatttaagtatcatatccgattaactgctatcatgaattacttatgtatacactcagggacgatatatagctcataactaacaaaatattatactttttaaaaaattaaatattaatttttttaatttaataattatatatacaaaatagtaaaaaagtctactacaaaattaaataaatctagtaagagtgattataatattagtataattttttttaataataaataagcctccacaaattaaaagtattgggtccatcactgtgtacactcatatacacatgatacgtttatattggtacacctaatattatcattttaaaattaataaaatattaaaaaatttgaaatattttttataatttttaaataataatattggtgtaaacgtatttcgtatataaaaatgtacatataagcagcttatattgacagttaattgtgaaaaataaatgatactttaaatttactaatagttcagtaatttaaaaaattttgataatcaaaattttaggggataattgagagagtttagtaaaaaaaactaaagaaaatacagggtctattttgtcatttaacaaaacacagagtccaatttgtaacttttgcaaaacagaggtagtgggttggacgcgccaaaaatagagagtatgattatgagatttaaatggagtacatgttattggctgatttttactcctatacataaaattattcaacgctatcacaatggacggtccagatcacatctacgctgctctttattttaaattgggtcccactctttaattaaccgattggtggaggagattcactacttgcttttgtattcaaagtcaaaatcactttctccttatagcaagttaattataaatatctttttaaaaaaaaatatattattttaattttaaaaaaattaatataagaaattgcacatggaaaaatataatttctcaattgttatttaattttgagtgttaaatggctaaattctccaaattatggttttacttgtacataattctctaaggttatatttcggcaataaaattttctaaattgctaaattggtagtaaatttaaggcgttatctagctaactgttaccataaattgcttatgtgtacattcatgtacacatgatacgtttatactggtatacctaatattatt

SEQ ID NO: 352458 - DNA, 674 bp, Cannabis indica
aataaattaatattttaaaaaaagtgtgagagtaaagagtttttgtggctaaactctcttaattatcactgtacttccacttaataaccctctaagctcaaattttgatggtaaaacactctaaactactaaactgtttgtaaatttaaggtgacatctactttccacatttaactactgacatagactgtttctctgtacactcttatacacgtgatacgtttatattggtacaaatattgttattatttaaaaaatataaacaatatttcaaattttataatatttttttttataatttttttttaattttaaaatgacttttgaaagaaatttttaaataataatatccggtgtaccaatataaatgtgctacgtgtataagactacacacataagcagttcatggtagcagttaaccggatgacacattaaatttgctactggttcagtaattttgagaattttatcgtcaaaatttaattagaagattaaatataagtgaaacgataattaaaaaaatttagctactaaaaattcgaaggtaaaaatataaaagtgacaaaaaaaattagtattttttgtaacataccctattattattttgggggtaaataccattttggaccctgtgttttgcaaaagttacagattggaccctgtattttgttaaa

SEQ ID NO: 352459 - DNA, 625 bp, Cannabis indica
ataacgtccgttctcttgttttttttttttggaaatgccgacataacatcacttatagatttggtacgccgtattgtaatgtattgtattgtattgagtaaattttatagtattagtattatttaatacaatacaatgtttggtattgacttgtattaattgattgtgtaaagttataatatattttaatacactcgatcccaacaccaactacggttccgggtcttgggtccgggtccgtgtccgtgtccaggtcatggttcgggcccgagtccaggtccgggaccgagttcggttccgggtccgggtccggatctgggtctgggtccggggttgggtttggggtccggtccgggtccagttccaggtccgtgtccatgtccgtgtccgtgtccgggttatggttcaggtccgggtccgtgatcacgtccgggactgggtccggattcggggtccgaggtcccgggaccgggtctagggtacaggtccgggtccgagtccaggttcgggtctaggttggagattgatgttgaccccaactcctttgtaaatattataatataagctactacggaccatttagtatgtgttaaataatacaacatacattgtattaaaaaaaatt

SEQ ID NO: 352460 - DNA, 944 bp, Cannabis indica
caacaattagatgttaataatgcctttttgaatggcgatttgaaggaagaggtttatatgactcaacccccgggctttgaacttattgatgctcctcacttggtatgcaaacttcacaaagcattatacggacttaagcaagcacctcgtgcttggtttgaaaagctccatacttttctttccaacctcgggtttcaatcctccaagtctgatcaaagtttgtttatcaagcatacatcctcctccattactctaatccttgtgtatgttgatgatataatcatcactggcagtgacacttctctcatctctactcttatcaaggatctgaattcccagttctctctgaaaaatcttggtcagctgaactattttctgggaatcgaagttcagcatacttcgaatgggctacatctatcacaggccaaatatataagagatctcttggttaaagcccaaatggagggggctaaacctgctcctacacccatgattagtactctcaagctatctgcatatgagggcgaaccagttactaatcctcagctctatcggtccatagttggtgcccttcaatacctgacgattaccaggcctgaaatatctttcagtgtgaataaagtttgccagtttagggcaaatcctttatccacacattggaatgcagtaaaacgtatactaaggtacttaagtggcacggtatctcatggactacatctcaaaccactcacagagtttgacatcactgcttttaacgatgctgactgggccagtgaccctgatgatcaccgttcaacctctggattctctatcttttttggaccaaaccttgtcgcctggcaatgcaagaaacagaaaaccgtctcacggtctagcaccgaagcagagtatcggagtgttgctcaagctgtttctgaactaacatggctgcattcgttactttc

SEQ ID NO: 352461 - DNA, 900 bp, Cannabis indica
ccaaaggcaacaaatcccaaccctccagccaccaataactctaggcacaataataagagaaagggcgacaatggaggagatcagaacaataccaaaaagagcaaaggttaccagtccatgttcacaatatacttcaaacttgtggagacacaagaaaccatatatgtggcaaacaaacatcaggtggcctttcagatacctgaacctttcaaaggaagtcgtgcaaagagggacacatccaagtattgccaataccataaagacatcggccataccaccaatgagtgtcgaaacttgagggatgagatagagactcttatacgtaatgggcctcttgctcactatgtaaggaataggcaatacaaccaacaaggagaaaatacacaaaaacttgtagccccatgtgccaatgtgcaacgacagggggcacccagaaacaatgctcctaacccgctggcacaaccacaagggggacaactgggacataacccggacattcctccacatatggaaggagaggacgtgttggtcatatcaggaggaccacactttgtacggaccaccaatggggctcaaaagagatatattagtgagcttaagaactcaaataagactgttgggttttgtgccctaaataaaacccatttcagtataatcagatttactaattaataaagatcagaaatcatttttatgttgcatggttcacatgatttatttcatgattataaattctattaggtatagaacatatatatttgttcgtgattatagtgttttcagcacagtggaatataatcatgattatatgttcgaaagtttaattccctgatttgtcagttcactggatttagactagcatgataatcagcgatacctatgcttacaccttggataagt

SEQ ID NO: 352462 - DNA, 1138 bp, Cannabis indica
aagaaatcagttaagattattgtttggaattgttttgattattgtgtttggaattgtttgtgtttaagattattgtttggaattgtttgtgtttggaattgggatttgggtgtttcggatctgtgaaaggagaagggattggggtgttcgggtgtggagaagaagaaggtccgatggtcatttgtttgggtccgatggtccgatgtggggaataggggtcggactgtgttcgagtccgatggtccgatgtgggtagcaggggtcagactgccttgagttcgatggtccgattgtttggggatttcatggggtccgattgtccgattattgggtgggtccgatggtgccacaaattggttgtgtttgggtccgattgctaccaatcggaccttcacaattggtccgattggtagccatcggaccagtgtatttttttttgaattaattattaattatttagtaaggtttaggaattattttatttttaatgatttattaagtattttttaattaattattattttattaccaattaataattatttatttattattaattattaattattgttttagtattaattattaattattgtttcaatttttattagttatgtttttttagtaattattaatttttattgttttattaattattagttatgttttttagtaattattaattattgttttagtattaattattaagtatcgttttattaattattagttatgtttttttagaaaatactttttattgttttagtattaattattaattattgtttgaattttttattaattattaattattgttctatttttttattaataattgttttatattaattattagttattgttttattaagtattgttttttttgtttcttttagttataattactaattattgttctatttttttttattaataatcgttttatattaattattattaattgttttactaatactttttattaataaatgttttatattaattattaatcaatttttttattattaatgattaattattgttttattattaattattaattattgttctatttttttattcatatttattttatattatttattagttattgttttattaatttatttttttattt

SEQ ID NO: 352463 - DNA, 820 bp, Cannabis indica
ttaaagactgcttggtcggtcacgatatcttaaaggccttgaggccacatataatatatatatatataaacaggagataaaaagagaagtgtttaaacagctggagtcccaggctcttggttcggttcttctgagccaactggagcaggaggatatgttgttcgagcaggagaagcatcaacagcctggtcagaagcttggccggaagttgaagcagccgcctctttcccaccataagcaacttgggccgcgcagtactcaaggtacatgtccttagcatcacccaagtagtcaaaattggcctgaggattagccttccagaaatcaaagaagagctcgaggccggtagtctccaaagcattgaccttctccttcaattggtccgcctcggtcaccttggcgtccctctcctcctttaggcgaagaagaatttgtcgtagagaactcctctcatcctgaagactgttaacttcagcagataagatctcaatggtctcctcaaagcgatcagcagccttgaggtcctttgttaacacggagatcgtcttctcggcaacaaacaacttcttattggcttcgccaaactcatgccgaacagctccagtttttgccctggcctcctcagcttccttcttggccgagtccgcctccaccctcaaggtgtcggacagagccgcactcttggaagtagcagatttagcccgggagtaagtgtaagccaacttcaaaccggcctgcacaaaggaaaaagtcagcatatggagctaagtgtgaaaagttaaaagggaagtatcaaaaaagactaaccctagtgagctcc

SEQ ID NO: 352464 - DNA, 674 bp, Cannabis indica
tatattatattaataaaattatatactacgatgagtaataatatatcatgacaacaaaatatatagatcattaaaaaagaaatatactatagaataaaatatatataccaataactcataaaagattagacttaactttaaaataaaaataaattttaaataaaaagttctatagttataccatgatatttaagtgatatttatctaataaatcttaaataaattaaaaaactataaattaaacattcaaattaaaattgtgagaaccatgaaaactttatatgagaaaaaataatttaagtaataaatatcaaatgtaataacattaacagtaaacaatttttagtactattttattataaaattatttttgagtaattataatatttatatatgtcgtataaattggactaaaattattaattgtatataaataaatttataaactatatgtctatagtttttaagatataattattcttgtactttcttaaatgtgtaacaaattataatttagaggttattcttagttataactcactcaaattggaatttaagtttttttttatatatatataaaattagaagttattattgaataaagtatttttagaggttattcttatatttataactcacttaaattagaattttagtttttttttttataatat

SEQ ID NO: 352465 - DNA, 283 bp, Cannabis indica
agtatgaccagtgtactgagtataggctaatactatgtgtaggtaagggcaaggctaaggctgaaggaccgtgagagcgagccagtgaagattgtacatgtcggggcggttaggcctggagcgtatgatcctcgggacaacagtgctttttgcaattagtcgctaggcgacaagtattttgattaatcagtaaacttttgtaaagtgttttgtaatcgggatcccgagtatttttgtataaatattttataagtttaattaaaaagcaaaaattttaattaat

SEQ ID NO: 352466 - DNA, 1028 bp, Cannabis indica
agtatttggactcttcgtcaactcatatgttgtgcatggtgactcggtctcttattgacaagttgtactccacgtggcatcaatcttgtctttgtggacatgccacgtcacatgaataaaaattgggataacataatataaagagtaaaataagagattgattacataaatattacaacacatatatacaatatatatatactatatatattacattagaatggtggaagagatgaattacaacacataatatgtacaacctacataatataatatgaagaagaagatatgtatacactcactcacaactataagtgtaaattagtggggatcaccatgacttgaaccaggtatactgtccaagcttatttctcctatctctaagaattaatggaactctataggaaatttctttgagaattatcaagccttagggttgtctagcacttcttttttgatagaaaacttcttctcaatatgagcaccttagacatctttatatagtgtttaggatatcaccatttaaaattctaactcataacctccatggatgttatggactcaattaagagatgcaactcatgcacacaccataactcttatagcattaaaaatttcaaattaagatgtgtaacatatttttacacactttatattgatgataattgtgaaggttactcatgttaacaagtaactcccccatatgttcaaaaataatgacaactaatataaattattatacaaacttattagtttgttaaacatatttattctatatattatatcatttaaaaataatatagcaattatgaaagatataatctataatacattagacataattaagagataaaatagaatagtatatgttaggatttataaaacacttaagaaatatatatatcacaaatctaatcatattcctagaaatgctttaaaataaaaaaccctaaatcataaatctacatagcctttgctaaattaaagaagtagaagatgataaaagatgagcggaagcactaacctga

SEQ ID NO: 352467 - DNA, 720 bp, Cannabis indica
aaatagggagaaggtgttttagcatttcaaaaaaattaataaattatctaatccgaataaaccgcttaaaccaaactaaataaactcataaaaaaatacaaccggaataactttacgaaaaattcaaatggtctaataaatatattagacatgttgaatatcattctaacccgtccagataatccgaataaaccgatttacatattctgtactaaaattatttataacataatatataaattacaattaatagttaaactattttacatttaaagtttgtattttgtggtgtttaatttgaaatttaaaatttatagttgataattttgattgtatttgaatattgaagttaaaatttaaaatttacgtacgagtatatttttttattatattttttaaaaaatgctatttaatacttcaatgtttattcaattcatatttatttaatcaattatttgaacactaaaaactaacaacaatgtaaaaaaaaataaaaaataaagaatcgatttaaacgggttaacctgaccaaaccgacgaaaaatcattagacgtgttatacttttttatttttttttccatttgacgggttacacttagatatatacaacctgaaatttatattggatagaataccttgcccatttgaatcatactcttcctctaactctctctctcttctaacctcctctctctcgctctctctctctctatctctct

SEQ ID NO: 352468 - DNA, 590 bp, Cannabis indica
aaagacaacacaggcatactatataataatatagttctattaagcacataattaaattaatttcatcattttacccttctcaggtcatatttactaaaatgctcttggctcaccaacggggtcttaccatgttataaatcatattaattcacatatattgaactatataataatataattcatcaattattcataattatctaattaggattttgctgatgcatttcttaattctagggtattacacatttaatcacataatcttgaattactttccagtgtgctgacgacacaataaacaagaacatcaatgtgataaggattttgatgaatttataaatcaaataaacatataaatgatcacatgaaccaaatcacatactaaataagtgatgaaaatatttttatttctttattgataattgaatgacaaagattacactgaaatagagttttatttagggcacaaagcccaacaccactttcacagtgcatcggaccaccatcaggtgggcatcgaaccccatcggaccaagcgtaaaaaaagcagaaaccagaaaaaatacagtattcacagacaacaagcattt

SEQ ID NO: 352469 - DNA, 922 bp, Cannabis indica
aattacatcaatactatagtaaaatatttatcttggtgtattttcgttgtttttcaaatttctaatggtgaatttgttcatattaaatcatgaagagtgtagatagagttacgtacgtggaaatattgttttaatttttaatgtttcataacagttgcattatatttgcataacattttgctaacagttatttcggttgattgaaaccttcgtctgatgcaaccttcagctaaccacccagcaaccttcgtttgattgaaaccttcgtctgatgcaaccttcaaccaaccacccaacaaccttcgtttgatgcaactatatcgcaatcacgcaacaaccaccctacaactatcgtctgattgtgtaagtaataatgtaagaggtattttggtaattaaaatcacataaaaggtataattattgtccacactttatggaagtatttttgtaaataaagtttcaatctgtatttttcatgtaataattctatattgttaactatttgtagtgctaatactacaccaccaattagggctaaccataaaatccaaaaactaaaaaaaccgttcaaacgacctaccgaacatcgttggaatcgaaactgacggaaccgaaaactgaaaaaattcctaacggttgaaaccgccattgaacagtcagtttttttagtaaaaaactaaaaaaatcgaccgaaaaaactgaaaccgaccgttatacatatatatattaatttattaagttttttttttgctttatgtattgtagttactaatactatataataataatatattattattttattaatattaaagttaaaagaataagaaaattagtttttgaacaattaatttgtatgtttgtaattataaaatgtagaataatatctttatagaataaattagattatattttttttttt

SEQ ID NO: 352470 - DNA, 687 bp, Cannabis indica
gcacgctaaacatgtaaatacatatgcatactgttatactaatctaacctcgattatgaattcaggtgtgctggtcaacctaatggaacgatctgctcggcgaattacaggctcctaaatcataaaaatcacaacactgataagtgacatgctaaatcacttcccggggacttaaactagaaactaaaagttttcctatcgataaaaagcatggcgataccctaaataacataaaaatgggaagaactagggttcccaaattttctccaaccggtaaaccggttctacaaacggaatttcggttctgagaggaaacccaggaaaccaaccggaattccagttactacaggccattctgaaccagaattccggttcagtgcaggaaactttaaaaaattcataactcatggaattcaacccccaaataataccaaatcctccagacctgctatttagaccccaaagaacacttccaaagcaacaaaaccaagattcatgcataattacaaaaactaccattaaagctccaagctttgagttcaaaactcaagcttggttaaatcccactaacatgcatcaaaacttgtttcaatctactcaatcaagcataattaagcccctgaaaacaacagcaatcaactacaacaagcacaacaactgatttatcattttaccataaaaaccaaa

SEQ ID NO: 352471 - DNA, 572 bp, Cannabis indica
ccaaaacgaaaaggtggaacaatcttatccttgcccttcaagtaaacattgtccttgtcatggctgaaagattaaaaaacaaaaataaaaatgaaaaaaaagactaaataaaacacatactggtctttatttgttcgccgaccttcaccaagacaaagttaaaattattctcgtctttatgctctacaccttctccaattttataatcaagaggacacaaaccatcaacgtacttaacaactccataatcagaactatctttagaacttgaaatcgaagagtcaaactccataaagggagacgtcaaagctattggtttcttagatttcctcttttcaacaagaggagtttggtcaatgagaattgaatgatcttccacaacttgaatattagaatcaacaaaaacacctgttgtacccatctaagtatatatataaaaacaaatagggaaaaaagtataaagtcagtcattataaaacaactgttgagcaactaaacaaaaatggtaaaacaaccatgcctcaacaccaagaccatgaccctcctaactctcaaaatttttcagaagctag

SEQ ID NO: 352472 - DNA, 712 bp, Cannabis indica
ttcaacctaacatccagatccaaaggtttcacagtggtaaatgctcgccattgactctgagagtgagattgatgatcgttttccaccattgctacccaggattgctcttcacgaatctctgtatcaccttcgaaagcagcctcttctgtctccaaaccagcaggatttccttcctcgttctcctctggcacctgctctatctcagataaaacacattctatctcagatcgaaaatcctcatcactctttgcccctggttccacactcgtagcacgaattgctggctttcggatcactcgacgcttcttcgccatggaagaaagctagagagaacacgcacgcctttcataattttttgcttagtttttctagttataagaaaataatttaatataatttaaaaataatcaattatttaaaaatttattatacaagaagagaattctaatttgtgtaaaaagaagtctaatttttttgtaaaaaataaaataaagtttcattgtaaatattataattaaatggcttaattgtaaaataattatagtagggatttatataaaaaaattatttataattattaattgcttaaagagttctcgttaaatattcaattaattattttaagaaagtaattaattataattaattgattctaaaaaaaaatttaacttgctattataggtaaaagaaaaatgtaacaatagtcacccat

SEQ ID NO: 352473 - DNA, 558 bp, Cannabis indica
agtagatctcttaaaatgttgttgtgttaaatttttatttgtttcggtattcataatagttttttagtctatttttctttttttataactatacatgttgtagctatttaagatcgcttgtaaattattttaaaattttgaataatttatagtaccgaaaataattttatatagatatgtaccacgcttaaaaaaaaagtctatcaaaacaatctgtaagagcatctctactggagatataaataagtgatgtaagtacaaaatattacttactttgtaaaaaatctactctaatagtatgctaaattataatgtaaaaatttcacataattaaaagtgatctaaatttacatcacaatataacatgatataaaatttgcattacaataaatgttatgcttttatatttacttttatgctatttttaatattttattattaaattttatctaacatactctcttacattaaatgatttatattataattatattattattaaattttacatttaattgtgtattattattattttatattattttaataaattattaa

SEQ ID NO: 352474 - DNA, 600 bp, Cannabis indica
aattagttactttttattaaaaaaaattgtttcaaataatattttctcatacacatttaattacttattttgatataactttaaaactatgattttattttttaatttttagcctatattatatgttattttactatttaagataccttaaggttaccttttctttttaacaattataaaccatattttgagttgtgggaaacatatatattttttctaatataaaaaaaaaatgaagaagataaaagtaacatttctctttcttttataaattattaacacataagtaactaaatattatatttgaacataacaagtatataccatctaccttttatgtgttactgcaataaatgttataatatttcatatttaaaaaatttctagtatctaaataaatatattttaaatatgtaacactaacacatcctatacatacaacagagaagaggtcatgtttaaaaatttaatttcttacaacttattttagaaactagttcatatttgaaatttgattttctagtaaagaaactaaaatgttatttttgattttaattatttttccgacaagggtaaaaaatatatgctttccatatgtta

SEQ ID NO: 352475 - DNA, 577 bp, Cannabis indica
ggggggaagaacacgacatgaagaagtaagtgtgacctcaggacgctcaaggacccacagtcgaacaactcgaggaagagagagtactcgtcgtgctaatgatcaagcaaaggaactagtaaatctgcaagtcactcaaggacgaggtccatgagcaagacaaggtccgtaagtcggacacaatctgtgagtagaatgaggtatgtgagtaattactcccaaccgcatctgcgcgagcacttgaatcagaaaaaacctaatctttgccaacaactcagtccaaagtaaaaggatcctatccaattgcgaatagacgcgttggaggataagttcaggagatatcaagtaggggatttaggaagacaatctggatatgactcagacgaggagctcgaaccgtaccatccggatattatgaatactccttttccccaaggatttaaaaatcctaacgtctcatcgtatgatgggaccacagatccgatctcacatttgaataacttcaacacaataatgtgagctagtaatgtgacaaacaatttacgttgtatttttttcccacctcgttagttggagc

SEQ ID NO: 352476 - DNA, 704 bp, Cannabis indica
aataatctattaaaaaaataaatattattaatttaaaatatgatatttaagttcaaatatattaatattaatattttattttaaatttggggtttgaaaattgaaaaaatctgaatttgggaaaaaatcccataaaaattgggttggggaaagtggctgcccaggaggctgcaaatccccattacgcgcgcggattggtggtcgagcagggtctggcgtgtggcaaacctcggcgtttgcaggatgttcgtggggcgaggggacatgtctgaagggaggtttcccgtgtttgaagacacgggttgtgtctgagtgcacgcgcgcggatccctggttgtccgagtgcctggtgcggttgatgaacccctctcgacagccatgacacccaatcttccaaaattcatatctttttcaatttttctcagaatcgagttttgtaaaaaaaaaaaattgcttactttttcacaaggaatccaaataaaatattttaaaaaacagaaaaaatatttttcatgaaaaatttcgtacaacacatacattcatcacataagcacataaaccaacatgaaaccatccaaatcaacacataacatcgttttaattcatatttcatgaaagtaaatcattaccatggctctaaggccagttgttggaaatattttaccaggatctaaatttactaacaagtatgtttcattaacatc

SEQ ID NO: 352477 - DNA, 889 bp, Cannabis indica
atgcttttatatttaccattatgctatttttaatattttattattaattttagttaacaagttcctttactttaaatgacttgcattattattattattattaaattttatatttatctttgtattattagtattattttatatttttttaataaattattaagtggacaatatattaaattttacatcaagatttgtaattatatattggagcacaataataaaagttgatgtaaaaatgttacagaattactttttgtatcaaatatagttcatcttttacatctcccattagatatgattttaccattactattaccactattattctatcacaccaaaccaaacattacttaacttcacaaaaaaaatcataaaaattaaaaaatatgtattttttttaatttatccaaatatgcactttaaaaaaactttttttctttctaaaagctaaaaacaatttaagaaaacttatccaagaaagagacctcttacttctattattttgtatgctattataatctttaaaatggatattacttactcatcaattgcgcaccgaccaaatatagaaaaaaattttgctgcctcaattaattgtcccattcctgtcccaaaactagaaaatgcacagctatcttggtttttttttttttttttcacaatggtgtgtaacttccatcttagtctgttattttttttaagattaattgtggcaaaagttctaaaaaacttagggttgatacaaattaatttcgaaccttgaaaattagtagtaatagtctcccaggtcactattttcgtaagtctgtaggaacccaattaacagttctgtttgttatttttaaatttttcatgtgttaaaagttgagtggtccacatcataaat

SEQ ID NO: 352478 - DNA, 525 bp, Cannabis indica
aatgagggccttcatcaaatctcaagatgagagagcttggaggatggttctatcaggttggtctcttccagttgagacagattcttcaggtaatactactataaaatctgaactggaatggtctattgaagatgataaactttctgcctacaatagcaaagctttgcatgctatatttaatggtgtaggtgaaggttatattaaacttatatcatcttgtgtttctgccaaggaagcttgggagatccttcaaactcagtttgagggaacttctgatgttaagcgctctagatttattatgcttcaaactaaatttgatgagcttaggatgtcagataatgaaaccttaactgaattctatgaaaaattatctgatattgctaatgaatattttgctcttggtgaaaaacttgatgattctgttattgtgagaaaaattgttagagttcttccagagaggttcgatactaagcttttggcaatggaggaagctaaagattttagcacaatgaaggtagaagaatt

SEQ ID NO: 352479 - DNA, 502 bp, Cannabis indica
gggatcatgaaggggacgttgaggtctagaaaattgaggagcagggcgacgtccgtcctagcagcccctctgaggcagaggaagaggaggaggttgcacccctaaactatggggcatacaatgaggctggggagccaattgatgctgatggggacgtcctggttgagggcgtggactacgtcaatgaggaacttacagatgcgattcctcacagaaggcaaggtacgttgggggctagatgggtgagccctccgtccaaggtaatagaggcacgcctgcgggctctcgaccaggatggctacctgggcaagttggactgttacattcctgcccacaataaccgagccacaaatcctgaaagggggatgtgcgcttggtcgggtgcccatgcctagcaaggggcattgttgcctttgcaccgtacttcaagaatgtggcgaacttctttcacctctgcccgactcagcttatgttgggttttatgccctaaataaaactcatt

SEQ ID NO: 352480 - DNA, 643 bp, Cannabis indica
ttttatttttattaaaaatctaattttatttatatatatacattatactattatttttttgatgaatatattatattattattaatataattaaattaagtacaaattatatataaaaaacataaatgaaaattaaattgaaaagtcaagtaaatacacatttacattaatttaagtgttatcccaatttttgtactctgacgtggaatcacacgatggtgacacgtggaatcaacttcacatatctactcgcaagggatatgccaaatagagtaccacatatactcgctcggatgaagccttcttaaccgggcagtaagcagtccgaacagcatgccaacagttagcagtttcagcactcgcatcgtgaatcacagaagaaatccctataattttgggatcatatcacagagatatgacaagctgtccaaatcccttgatcagtgtattttgtatttaatatgcaatcttgccaattatatctattgtaaacagaagggaaactttttccctaaagtttctagccctataaatagtgatccattctcactaggcaagagggtcgaaacggatctaagaattcatattcagagatattattgtaagagctttaagaaaaagaatcattatattctttgttctt

SEQ ID NO: 352481 - DNA, 865 bp, Cannabis indica
caaaataacaaatttttgaatttgaaaatattatgattagaatatctataaaaatatcaaggttagtttctaatttattaattatttagtttatcatataaggtcattttaatataatgtttcaaattaaaaaataatgctatctttaatttaaaatgtgtccaatattaaaatatctgatcttataattaaataatatataaatattaaagaaattaaaaaaaaattaaaatctaaacagatataatttaaaattaaaataattaatttttaaatttaaacctcaaaatatcaaaaattaataataatctattaaaaatatatattattaatttaaaaattgatatttaagtttaaatattttaaaaataatattttattttaattttagggtttgaaaattgaaaaattcgaaatttggaaaaaaaaatacccatgaaaattggatttttggttgttggctgcccagcaagaggctgcatacagcctccttacgcgcgcggagagaagatgcttgggcgagaaaactcggcatttgtagggtgggatgcgtgcggacagcaggggaagcagcatgcgacatcgtgtctgaaggaggggctgacccaggatttcaaacaatttttgtctgaatctacgcgcgtgcacccttccttgtctgaggctgctggtgcgattgggcaccacctcgacaccattaacacccgaatttcaaaactccataactttttcaatttttatcggaatcgagttccgtaaaaaataaaattgcttaattttttacaaggaatccaaatacaatattttcagaaagaaaataaaattattttcaaggaaaattttcgtaaaacatatacattcatca

SEQ ID NO: 352482 - DNA, 606 bp, Cannabis indica
aaatattgagatatagtgacacgctatgtgcgattggataagtatttgcccactcacttagcgcgtcaatatatcataatcataattttctttttagaaaaaaaaaacaagaaaaatacaactgtaatgttaatattttttttcttgaaacatgtattttttttcttaaaagctgtaatatatttaataatttaacaaaataataataaaaaacgtaaataagggtttacacgaaaccctatcagatgctaaaacaaggcatgccgtttcttcttctcccccagaaacgctaggcgagtacgagtaggcgtgaaagcttcctcttctctttcttcgctgctggtgaccagccatcctccggcgaatgacatcgaagctccgccacgtcaatttgttgtcgtctccacctcgtctctccagtgcagggatctcagcgtcgtctctagtcatgggctgaacggtgtcatctcttcttgcctagactgtttcttctggggtggagaactgtatcgatttgagtatgaaggagggacctgcacactagctgttggaatttattttaccagggcttagatctactcataagtatgttgtttaacaccctaa

SEQ ID NO: 352483 - DNA, 811 bp, Cannabis indica
aacaaaatatacacaaaaattcttagaaattttagaaatctgaagaaggatagagacaagaagaaactcaaccgccatttacaatttgacaaaatcagcaccttatgtgttgaaattacacaaaaaaaatcagcacatggaaggctatttttattcctttttttatatatatatattttaaaaaataagttataatagctcaaatttaaccgagtactttgatatatgtcgccatatttgggtgatgttgtcatttttactgttagtgttctatgctatgaatatttggatctatatgttgtgtaatgggcgtctttagttttctttttgtaaaggtaaaagaaccattttatgtggcccaaaaccacaaccccaaacccaatacgactaaaactggcctgaacatcactctcaaacttggtaatcaaacctgcaataggtctgaacaactttgaacgagtttcaatacccatttccacaactcaatcaccaaaatatacaatctaaaaattcaaaattctcaaatcaaacacgtgtgcaccactagttttagtcatgcatttaaaccattattgtgatgcaagagtgagtctcaatataaacctcattttctttttcttttttttttttttttttgtttttttgctatcgactatactaacctgttattattagaatagtaaactaataactcactgttagtactaaaattcttctacgtaacgtttaataaaattgttactttttaactaaaaagttaagtttaacttttttactttagtttaaaacgtttttaacgttaaaaaccttc

SEQ ID NO: 352484 - DNA, 617 bp, Cannabis indica
gagcctctctctctctccctatctttggccgaccactccctctctctcttcttcctaaagatttcaaaaaaaataatttccaacaaaatatatgtctagttggacggtagatagcgcctccaccccttcctaagctcctagatgaaacatccatatccttgaccatcgatctagccagggttaaaaaggtgttgcacttcaagttttggggaaggtgtatgttcactacctatctcccaatctttgaagcttgaattggagagactgtcactagatgtaggcggattagcacgaaggcgaggatgatcctcctatagaagttgaagcaaatcttggtcgatacgatgtttgcttccccaaaaatcaccagggttcatctataaaaggtaggacacaagatgagcatttggctgggataacaaacaaaacatgttcgttgtaccgaccaggtttgatcaagagatcaaaaatagaaattttgcatgataacgaggtttgcaatccaattgttcaaaattttgaatttaggttttattttcactaagccctgaatggctaagtgaaagtgaatatcgtggaatagaaattaaaatgcagttatgatcaagcaatgtgat

SEQ ID NO: 352485 - DNA, 681 bp, Cannabis indica
tttctttaaattttgatgaaaaggatgatgttgcatgcatagtttaggttgtcgttcttgctgtgatttttgttgttgtttgcagtggattaagcatgtttaaatgagtcgaattgagctgctagtaatgcatgatagttaggttgattgagttatggtttttctatgaaaaagcttgagttttcaaagtgaaattgtgagttttgttgctgtgttagttgaggtcgatttcttgtgtttttagaggctattatatgcatgtttaagtaggtttgaattgatttggatgcatgttagtcagattaacaaagtctgagttctgaactcaaagcttggagctttaatggcatttttgttatatgtgtgttatgggctgtgtagttgctttagaaatgttctaggggatatttagaacaggtcttgaaggtttgagattaattggatttaatttggataagttatgaatttttgaattctgcctacgaggaaccggaattccggttgtgcatccgaaattccggatgggttttgaaaatttctagaaccggaattccggttggacaaccggtctgccagttgggtgattttcagaaaccctagatttcctcgtttttatgttatttggggtattgccatgctttttatcgatagagaaacatttagttcctagtttaagtcccc

SEQ ID NO: 352486 - DNA, 669 bp, Cannabis indica
agtctccatggaaccgacaaaatttcatcatgtcccttttgttggtatctttcttcatgggcccaggcttcttgtacagaattaacgactgagttgctatgtacacactctctatatcttcagttaggatagtgaatgcagtgtgtttggcatgatctcggggagtctgtccagacttttcggtgaactttcccttcttcccatttccttgcttgtggttgttgcctgaacgcttgccacttgaattgctggaataatggggaagttgggcggatgttccaatggaaggagccttcattttgcccggcttttgctcaccttctgctcgccgaatggcttcctcgagctcgatgaaaccttcagcccggtcaaggaaatcactcattgagtcgaccggttcgtttttccttatatccttccacagttcgccaaggacttcaatgccccccagtatcgcggacatcttccatcctcggttacctgcgacaccttggtcgcttccgtcatgaatctactgatgtatgcccagagtcgctcgcctggtcgctgttttacttcgaccgaatctcccatatgtaatgggagctgacgtaaagaagagaattgtgcatggaattccgaagagaaggttttccatgaactaaactttccaggagccaacttgaaata

SEQ ID NO: 352487 - DNA, 765 bp, Cannabis indica
aaagagttttatttagggcataaaaacctaacataaacaggagtaggaacagtgggggttccaccaacactcggagtcacccggggctcctgaaggaatttcactgcaccctcggctctcaaagccttttcaaccatctctgcatatgtggttgcctcagtggtagtaatcaccaaatcgtgccgaatctttgcactcaaaccagccagatatttttctttcttgctaaaatcagttggcacaattcccgctgccaacttggccaaacggtcaaactttgtcgtatactcagtaaccgacattccctcagtttgaaccaattcggtgaactctttccgctttgcactgcggactgcttcattataatacttggagttaaacaactccttgaattcttcccaggtcatcattgtgacgtcccgagtgagggttatcaactcccaccacacgagagcgtcttcttgaaactggaaagtggcgcatgtcacccggtcattaccaaccactcccataaaattaaggatacgatcaatcactgaaagccactgctcggccttcatcacatcaggacctcccagaaacaatagaggtgcctgcttccggaacctttcgtacaatggctccatacggttgccaacaacaggttgttctgctggcaccgcaggaatttccacagcctgaaccccttgaggaggcacggcaggaggaccctaccgaaaccggctagccgtttttgtggcactgcacaccggctagccggtttgc

SEQ ID NO: 352488 - DNA, 646 bp, Cannabis indica
gaggtatgagtcctggtctaagtctatgtccgagtctgggtctaggtcaaaatcccagtctgggtctaagttcgggtcaggtccgagttcgggtcctaggtgcgagtcaaggtctgggtcagggttagggtcttagtctgaatttaggtccagagttttgatcccggtttgggtccaggtttgggttcgagccaggtttgtatcgagatccctatctacgtccgagtctgggtctgggattgggtcccaagtctgggtccttgtctaggtttgagtttgggtacacgatagtgactgggcccgagtttcggtcttaatttgggtctggggctaggtctgagttcagttctaggtcagggtccgagtcctagtcatggtcctagtcttgttcgagggtcctagtttggaagttgttgtacaatttctaatttcgggtctcgggtctgggttttggtcctggtctgggtttgagtccttgcctgagtcctaaatctggatacctgtcacttgtcctgatttggttctagttctggtcctgggtcccaagtctgagtactggttcgggactgagactgtggtgcgattctactccccgaccccagttctgtgtcccgagtcttgttccatgtttgggtctgagttcggg

SEQ ID NO: 352489 - DNA, 624 bp, Cannabis indica
attattaatgttatcatagaaaaaaggaattaataatagttattaaatttaaagtttagagttgaattgaaatagaaagggggccactagtggcatgagtgtgggtatgtggagcaagagggagggattggagcatcttttggtgatgttgttagaattaagcagagcacgtggctaactattccatgaccctttcctttgatatctctgagaatccatttcctcttcttaattattccacacgtgtttaatcattctcaatttctatatatcttattttaagacataatttctaccaatcactgtgaaacacatataatttcaatcaactttaattacttgtttaataagaatatttttcgagtaaataccattttggaccttctgttttacaaaagttaccaattggaccttgtgttttattaaataacaaaatggaccctgtattttctaaaatagtacatataggaccctgaattgattttttgtcaaaataaagtttaattataatccgatctaaaagtgctatgacaaaactgtttatatttattgtatctattcctattaagcattgtcttcaaattggttgtattaaaaaaaaagttgtcaaaaattaagcttagg

SEQ ID NO: 352490 - DNA, 861 bp, Cannabis indica
tctaggttcgggtctcggtctgggtctaggtcccagtcttggttgaggtccgaagtcacaagtcccggtctgggtccaagtcctggtatgggttcttgtctgagtatgggttttggtttgggtcttgttactgtctcatgtctgggttctagtccagaccttgtctgattccaattctgggtccgagatcgggtttggatcccggtctaggtctgagtctcggtctggatcccggtttgcgtctgggtccaggtataggtacggatccaagtccgagtcctagattcaaacactgacaacgggttacgtcaaagccttaggtccaaattcggatctcagtcttggatctcggtcttgttccagtcccaatcctgggtcttcggctgggtccttaatttgggtttgggtttgggttcggggttgtgtccctgtagttaggtcctcagttttgggtccaaggtcaggtcccgtgtctcgagtctagggtcaaattttgggtctccgtcccagttttagggcctagtttcaggtacaagtgcctcatctaggtcttgatccttggtccagatctgggtccaggttcgggatgttggatattattttaccatgatgttagatctactcacaagtatgttgattaacaccctaaatatgaacttctaaaacgattacgaaataaacacatataaagtattagaaatcttacattgggtgcagcagaataatatgactcctttcgttcagatatctagcccttgattcctttatgtagcagagcattatcaatatctgaacctggatctctttctctgattctttagtgttgaaactccttcttgttgaaagtctttcttcacgatc

SEQ ID NO: 352491 - DNA, 1100 bp, Cannabis indica
atggacgagaattgagagaaatggcttgttcggggatcctgccaaaatcggctagccgattttacaggcctaccaaatcggctagccggtttgcaccaattttccccaaacaagctccaacttgctcaaaattcatccaaatgcatccatactttccagagcacctaaacaatgcataaacaacataatccaaccagtattccgcagaaaaactcaataaaatcaaacatgccattaaagacctaaacttgagttttaaagctcaagcttgatcaaatctatttccatagctcaaaattaataaccagaactcaatactaacctaaaatgaacctacaaacttaacttcaaatactatcaaccctaacaaccctcattcgaataaatcacaacatgaaacaaattaaaaccttgagaaaacttagctaaagagtgtctagggttaccttagcttcaagagttcttgattccttagttgaatctcagaaaaacactaagataaaggatggttccttctagtttggttcagccgaaagagagaaagagaaagagaattctctattttttggtttttcttctaatttctttatttttctaaaatgagacttaaggataaaataatttatccttgctgaataaataataggccacgtgtcacttcctagggcagccaccaagtatttccgttaaatgactaaaataccctttaagcctataaattaagcatttcaaaactaggggtaaaatggtcaaattccataaccccgattaacctcggtattttattttctctaaaatatttcccactaagaaataagattccaaacttacccatgtgatcaaactagccatccatcatatttttcgttgtcgccgagcaaaaattacaaaaataacatatttcacatataagtcaaataatacccctagagttaaataaaattttcggaattgagaaattataactctaatgcccatttccaacaatggggcccacaaataattaatatcataaataattataaaaatatctaaaattagtgctaattgcctttattaaatccaaattactaaagcagtcattacaattatccccccgt

SEQ ID NO: 352492 - DNA, 695 bp, Cannabis indica
cactcctacagagtctctaaatacagaaccaggtgtatcaggtggcaatcaagcatttgccagtgacccaggaagaggaaatgaagtcgatagtgccctgaccaaagaaccccaacaagccaaattgtataaaaatggaccctcatcctgggttgagaaagctcatcctcaggccactgtcataggaaattcgaatgacaccgtggtcactagacgaaaactgcagaacttgttagtctttgaatactatctatcacaaattgagcccaaaagtgtccgagatgctctgttggatgagttctggttggctgcaatgaaatgggaaattttaaaagacttggtgtatggataatggtccctcggccagatggtgcaaatgttatagggacaaaatggctttttaaaaacaagtctgatgaatttgggacagtgactcgaaataaagctcggcttgtggctcaaggatatagtcaggtagaaggaagcgactttgatgaaacctttgcaccagtggcacgattagaatctatacgactggtactcatcattgcatgcttcctgaagatcaaactcttccaaatggacgtcaagagtgcttctctcaatggggtaattcaagaggaagtctatgtcaaacaaccacaaggatttgaagatccacatcatccacaccatgtgtacaagctcaataaagc

SEQ ID NO: 352493 - DNA, 1092 bp, Cannabis indica
tgtgcttatgaggagttatggcctaggggcattattgtcattttgcttgattgagttaattttcaacaaaaggggaacatgactgaaattagaagcttattttttgtgttgttcagccctagctgaccctctctcattctttctcatttcaattcttcaaccattctaaattcttgaaattagccttggtttaatcttgtgtggtggtgaatttaaagcttgtgtttaagagaagttcaaggtagctttctatctagtttatttagagttttgctactgattttatgtggaaattgttatttgataggttgcatgtttgagtaaatgatgatttgcaggtgattttccttattgtataaacttggaaattacatgtgtgttgtgttgttgatttgagtgtttatatgatgggagttgtggtttttaagtgttgaaattgtatttgatttctgattactgattttatgtagaaattgtgttatttgataggttgaatgtttgagtaaatgatgatttgtaggtgattttccttattgtataaacttggaaattacatgtgttttgtgttgttgatttgggtgtttatatgatgggagtggtggtttttaagtgttgaaattgtatttgatttctgattactaatctaaagtggtggcttgaaagttggaactttgtgttcaaggttttggcttgagattttgttgatttatgctcaagctttggagctttggttggatatgattaagtttgtaattgtttgttgttaatctaggttttaatgcatgagattggtattttaactctctgttttgctgagttataattatggaatgtgattttgaggttgtgcatgcttttgactgaatttgggtgtgtttgagcataattttcgaggctgaaaagtgggttttctgggtttttaaacccagtggtcgcgactatcataggtctggtcgcgaccatgataagacagtttgttatttttttgggttttgtttttgccataacttttgactcgggactccgtttgggacgttctttatccagttggaaagctcttttcgagctctatgtgattatctgtgatttgaa

SEQ ID NO: 352494 - DNA, 505 bp, Cannabis indica
gtaacaccataactattttaggtatgttaatttaatttttaacatactgtgcagctcgttgctaaccaacgaggttatcgaaaattgtgattatttaaaactttgcttatttaattaaaaacataaagtaacatacatataaaattcttggatcccatttacaaaaacatttacaaaagtttaaccatgcatatataatagcttgtcacctaacgactatacaacaaaagccctgatgtctcaaagatcctacgctccaagcctaactgccccgacatgtacaatctccatctgctcactctcgcgacttttaagccttagccttgcccttacctacacatggaaatagcatctgtgagttaacagactcagtaagaaaagcataacataaaacataacaatatcctgggttataatcaagagcccatacacccaaccataaccctatccccatgtcccacatggtactgagtctagaatgatcatacgacaataatatcgacca

SEQ ID NO: 352495 - DNA, 776 bp, Cannabis indica
aacaacaacaataataataatactaatccggtcgaacatgaatgaggttgtgttagccaaattggaaaagcttcaaaaggcccaaaacggcatgatgcaactactgagttcgcttctaccactgtcacaccaagaagcatttgttgaaaggagcagcttacctgaagaacgtgcaataaatgaatctttgataaggcaagtacatattgttgaacaacaaagtcaagcaatacacgataatgttcgagaaattggaacttctaagattgctaaaaggattggtgaataggctcggtcttcctctgagttcgtcacaaaagatgagttgattggtctctttaaagtcaaaaaaggtaagtcatcatcattggtaacttccatcgactttcatccaccctaccctgtggaagttgcaatcaaaccttaccctcgaggttacatgagtccggtgtatttcaaaaatacaatgagaaatttggccatgccaaagaacatatcattcaatttatagatgattggggtatttatgtgcatgattttgaattaagaatccgagaatttttaaagtctctccttgatcgagcatactcttggtatgcgagtttgccatcagggagtataaggaattgggatgacatggtctctcaattttgtgcaaagttctttatgattgaagataggggtattcatccaatccaatcggtactattttgctcatagtgcattcgatcggcactaaatgcggatttcatattttttgatccaatccaatctgc

SEQ ID NO: 352496 - DNA, 575 bp, Cannabis indica
tttatagttaaatttatttagtaactcatgtggtccatataaataaatatatatatttttacaatatatcaaaaacattaaagccctgtgcagaaggtcttgttgaatctggaaggtactttcagatacgcttgtaccgtgtttgatatgtctctcctggatggcttgtcactaatccggaggtgtactcccagacagctctgttagtcttgaaggttcatccaggaatgaagtcatgtacgtatccaaaaggcttgtgtgttacaaggcttttggattttttgtactaaaagctcgtgtttcaagatgacatggattattgttgctggtgatgagctggatcacttatggtagtgtaaatatgccacaatgatttatgagatatatttggcaacaatgcaaatctatatgtagctgtaaatctttgtaacttgtgtaggaatcgaaaaagcttttgcttcagtgaaaatcgtgatagtgtaatgtagagtctaaactagagagagaaacctcttttcgtagtctctaaaaaatttgtaaagattcttgtaaccttgtaaacactgatatcaata

SEQ ID NO: 352497 - DNA, 1437 bp, Cannabis indica
tgatctaattggggcactccccatattgcgaggaggagccatgtacgcagtggtagtagtcgatttcttcactaaattccataacttgcaagaaagtcctcgactttgttgtcaagaacattgtttggaggtttggaattcccataaagatagtatccgataacagaacccagtttgatggcgacttgttcactgagttctgcgaaaggaacaaaataattaaaagcttcttgtcagtgtctaggcctcaggcgaatggacaagaggaagatgttaataaaaccttgaaggatactatcaagaagaaattagatgctgccaaaggcaggtgggtggacgagctacctcaggtactttgggctcatagaactactgagaagacagtacgggagcccttctcgctagcatttggctcagaagcaatgttacctatcgaagtgaacatatcgactaatagacaagagtttaatgatcaagaagaaaaccaagaactttaaaaaattgtccttggatctgcttgatgagaaacgaactgagtcacaagtcactaatgcagcgtaatcgaagcagtagtaggaatcagagtttacaaattggctcggctaaatggctcgctaataaagaactattagaacgtggaacatttgcgaccctactatcagtaaattaatgatgtaactcacattgctaatgtaatattttaacttcagttatggataaagagaatcatttcttttatttaagtaattacaaagccttactctttaaaattacttaaggggtatttgtgtatgattaaccggaatcaatctggaaatacatgataatgatataatgcaaacccacaaatttaattttttaatttaaagtttttggttgaacctttctgacgagaaggggatcaaacaatcataactttttgatttaaacccgtctgacgagaaaggaaaatcaaaagttataaatgagatataactcataacttgcgtacaaagttgaatattaacggttcgcacaagataggaaagtattaaacgagacatcaaaatgtcatgataaaagtacttaaacctagtaggtggatagataatataactattcatataagcaatcaaaaatttacaaagtgataaaatcattaaaagtatattcaagtttgcttaagacagattataactatcattgtgagatagaatcgataactgctcgtaaatcaaaagtctggtagataataaactgctcgcacacatagtagattactaattacttaaataggaaagttacgagcaatggaaagaccaaaagtactctgcatttaatcaaaatatagttgattacattgtgaatgaaaacgcaagtaaacacaaatatattaagttcgaatgaaaaagtacaaggcaatttaagataaaaaaaaaccaagttggtttacaaact

SEQ ID NO: 352498 - DNA, 828 bp, Cannabis indica
aaaagtattagctagtcacaaaaattataatttgttgtgattaaatgtggttttagtcacaagacttgttgtgactaaaagtaaattagtgacaacctgtgtctaaatactatgttttagtcacaagtagttttttgttgtgaccaaaagtcacatttagtcatataatttaaatttaaactcattagacatagggctagtttggcacagctgtagctctgctcttgaggaaaaacatcatgtagcagaactgtgaaaaaagctgagctgattgtttggtaaattatgatttttaaagtgttgcgacttttttaagattctattattataacaataatatttagtctagttcattataatcacaaatacatataaaaaaatatgttacataaaatttaattttttatatatttttaattatttttttctatagtataaatttatatgcatttgataaaaaataatttttcaaatttttaaattatatttttatcacttgtaaaagatgaaattgtagtttaaaagaaacataaattgatattgtttgttaataataaaaatataaatttaaaatattttttaaaataaaataaaaattagaaatttaaatattatttatttttaaatattttttcattttaaaaaatatttttgtttttataatatacaataaataattaaataaatttttagtaaaaataatttattatagagttttttaatcaaaacaattttttctaaaagttgggttgtaccagcgttagcttttagggccagtttggcacagctgtgctgtgggaaaaagcaactgtagctgtgctgtgagaa

SEQ ID NO: 352499 - DNA, 945 bp, Cannabis indica
ggaaagaacataacacttatccacggtgcaagtaactatgttgtagattctcatatcagttaaaccctgtgttatgataaatctaggaataaacattcaattacataatcttgattactttccactgtactgacgacacaataaacaagaatataaatgtgaaaagcgtttggatgaatttataaatgaattagattagtaaatgataatatgaaccaaatgacacacaaatgagcgataaatacttctgtttctttattgatatttaaaagaatagagattacattgaaatggagttttatttagggcataaaacccaacattttccatcttacaatcttttagtattatgtactatgaagacatgaatcatccaagtccagtgcccaggagctaaaaacacacgaaacaacacttcagaaatcaacatgggcgcctagggtttcacccagcaccaaagttgataacccaactagggttttagtttttgggaccaccttaatgtaaatgggtcaaaatttacattgggacatgagctagaattaacacagacatatttcaggcatcaaaattagatctggagaacttttattttttagtcaccttgggcccaggcacctagtgcctaggttgataatttgtcaacctgagccatttccaagcattagatcacaaaactttgatctcacgcatgcattttcttcatcttcatcaaaaaatggggaaacaagtgcactcaaggaagaaataaaccaacctaggggtcgaaataagggactagcacccaggttgacattttgagatttttttttaaatgtatatcgggcatattctaggttcaaagattaagattcaattatttccaaggagtaaatggaacttccaagaggccttaaactgaactagcacccaggttgacacttggcactgggcccaacgcctagg

SEQ ID NO: 352500 - DNA, 491 bp, Cannabis indica
gtgtttaatttttttttaaaaaaaagttcttttttattaattaagaggaattaacaaaatatatgtaacaataaaaaacttatatatatgtattgtgattatttattatatatttttattatgacttactttctttaaaatatttaattttaataagttagaaattatttaagtaaattagtaggaatggcatagttgaaataaaaatataatattatgactagttattaagtaaaactaagcttttttgaaaaaatgacatttgtcattaaattaactagagagtacaaaagagagtgtaatagagagtgtccttagcactcctcatattttagatcctaagctgacgccaactccagctcaaggtcgaatctcaaactcaaccccgaacacggacccgatcctaattccggactggaccttgacccaaactttggacccaggctctccaacctttactctttatttttaaaaaagagaaaagctaaagg

SEQ ID NO: 352501 - DNA, 537 bp, Cannabis indica
cgactcatgacctagaacttgccccagtagtgtttgctttaaagatttggcggcattatctctacggggagagatgtgaaatttatactgaccataaaagcctcaaatatttctttacttagaaaggtttgaatatgaggcagagacgttggctagagttggttaaggattacgactgtgagatcctttaccatccaaggaaagccaatgtagtggttgatgccttgagcaggaagggtcccgaacaagtaactagtatggttcagatttcacctcaattagcaaaggacatggtcagatctagcatcgaatttgttgtgagcaagcttcataacttgacgctgcaatctaatctattagaacgaattaaaactgctcatttaactgatccagagttagtgaaaatcagagaagaggtttcaactagccaagccagagattatatagtgtcagataatggaatgttgttgtttgttagatattagatgtatattagctgtaagagagttagatatttagtagatatttagtctccta

SEQ ID NO: 352502 - DNA, 509 bp, Cannabis indica
ttgctggcattggatcaaatggttttgaaagttctagaatcacgaaatttgtaaaatctagtgttccaacgaacttttctgatgctgcaaatttgatgtttgctgcaacagactcaaagcttgtcgttgtagcagctgtttctactgaagcaaagtctccaggaatttcaaaaagagtaagatctcaagtaaaaagatttgtgcctatttgtcatttctgtggtaggaagggacatatcatatctaaatgtttcaccatgaaaaatatgtataaaataaattattttggtaatttggaaaaatctcaaaaggaacttaaaggtatgaaacaaaaatggattaagaaaaaatgtctggtttttttgataaaagagttgcctctcaaatgtgatattttgatagtggttgctctagacatatgataggtgacatggattttttgattaacatccggcctatgcagtgtggggaagtaacttttggcaatggcttagctggaaaagtcgttg

SEQ ID NO: 352503 - DNA, 916 bp, Cannabis indica
ctattggggtgcatgtggctacgcccttgattgtatgtatacatattttgtaattatatatatatatattgtattgtactattgtatatgtatgtataaaaatattataattatattatatattttttatgtattgtatatgtatatattaaatattttaaacaaatagatttattaaatattgtgaatgtgaatgacattggagagtattaaaacaaaaagtttagaaattaatttctaaaaattagtttagaaataaataattctatttgttattattttttattttattttcaattttattcatgtgtttttagttttttagtagctagtaaatagttagttacaactacttaataatttactaatttcattcctattaatatatttttattacaaactagttgtaaagaccgctttgtttaatttggaaattagcagttaattaagatttattatgaaaattatttatagatatttaaataattatttatgttgttatatttgaattcagaatgcatttttatgtcatatagtgaaatttcataattttgcattttcggtgcccggcaacatggaactcggtgtatggctcaatagaatcacaattttagtattttagtatattggggcagtttattagacattgggaatgtcgggattagtcgggaatttagagttttcccaaaataccccttttagtgcttttaacccttttagtgtgggaggggcaaaatggtctttttgccccataaaccttttgtcctttagtggacttagtattatgtggctatgtgaattatgttgtgttattgtggctgaataaaagaatagatattgtattttcttcatttattcaaaaaaattagaatttggaaaattaagaacttcattctctaaaagctctctttctctc

SEQ ID NO: 352504 - DNA, 282 bp, Cannabis indica
actcaaagcttgctcattcaacaaattagccaacaaaacatgcgtaattcaatatttctaatcataatttaactacaaaaacacatatcaaacacccacagcaacaaaagtagcaataatccacaaaacatgcataatccaattttcttaaagttcaagaaacgagaagaaaagtgatggaagcttacctacagcttgaaatcataaaaacttgctgagaattacttgaattacaggaaaaactgcaaccctaggaatttcgagagagagagagagagagag

SEQ ID NO: 352505 - DNA, 731 bp, Cannabis indica
aaaatttaaaattcaaaataaaaactaatttaaaatatctaggtttatttgaattatttttatcaaattaaattaaatatcaaataatattaatgatttgaaaaaataaatatcttcaatattaatttcaaatcttataatttaataaaattaaaataataaaataagccaattttaaaatagatgtggttagataattattattttaataataaaataataaataaataataattatcctaattatatgtcaaaatatcttaaattaagcataattcaaatttgtacaaaaatatctaagttatttaaatatttaaaataaaatgagtaatttgcggcaaaaatacttaagttttacatattgtagcatttaaatacctaagttatttttttagcggtaaaaataccttctgttacacttttgttgcagccgtaagtaccttggtgttaactgccacatagattgccaattgtcaacatcttattagcccaactcattaaaactaatctacgtcattaaaattaaaccaccccactcttttatcaatttttaaataatattaaaattatgtaaattaattaagtattagatttaattaaaaaaaatcgaaaatattaattttttttaaaaaagatagaaccctaaaatcattccgtgtctctcctctctaccgcctctgtccatgccggcagagctcactccggtcaccaattgtaaagaccgcttagtt

SEQ ID NO: 352506 - DNA, 774 bp, Cannabis indica
cgaaattatcctttattagtttcgttagtttttcatttagaaattgcttagaaagtatcattggataggtgatttataaatcatatgattatgatgtcattctattttctcttttaaattgaatgatgcagatgactatattcctgatattctatcccaaaattatataaatcctcgatcttagaatctcctacttgtatatgcttacttaaggcatcttaaacttagaattagattagtagtcgtggtccaagctagaatattactcatgtatatttggtataaatttaagtctttgattttaaattctagatttcaaatagaaatttttaatttctatttccaagatgacattgaacattacattacaactttcacaagatttaatatctattttttgtcaatggatttgaactgtatggtaatgtacggaatatgagtttagtattttgtgaccaggatccacttggactattctaagaactctttattgtaactagacctaagtcttcaaaaaccacaaccacattttaatatatctgtggcatttgtatcctgtatatagttgttttaacaagatcattctctgcaaagagtaaatatgtcaatatccacttgaaagtaagatcatctatattcgaaaatatggatgttcatttaggggtggatatgagttatctttgaattcttaatacgatcactatagattttaccttatgaaaaaaaatttgaattgtttgagaaatttcatgaatttctagcaatattgaaaaa

SEQ ID NO: 352507 - DNA, 770 bp, Cannabis indica
gcatagtcgtcggagttgctgtcagcaccggaaaattactggagttgctatcggcgccgaaaaagttatcagaattggcattattgctggaaaaatcacaaaaaaaaaaaatcacaagctagtttcttcaccaagaagctagtttattcatcaagaattggtaatttttccagtaatttttccggccacaatgccaattttaatgaatttcccagagtttgctgtcggtaccgaaaaagtcactggagtagctgccgttgtcgaaaaagtcgtcagagttgctgccaatgccagaaaaatcattagaattggcattatcgttagaaaaatcaccgggaaaatcaccaagaaagtggttttgtcatcaagaaattggtttcgtcatcaagaaactagtttcttggtaattttttcggcgactataccaattccaatgacttttccgaagtttgctgtcggtgccaaaaaagtcgccgaagtagctgccagtgtctaaaaagtcgtcaaaattggcattgtcaccggaaaaaatcaccaagaaagtagtttctcattttcttagtgattttttcagtgattttttcaacgacaatgccaattccgacgtcgacagcaactcctacgactttttcggtaccaaccgctacttcagtgatttttccagcaccaccagcgaaatctgacaacttttccagcatcagtgacaaataaaactacctaaacaaaaaaaaaacattaaatatgggatttaaaaatctaatttacatata

SEQ ID NO: 352508 - DNA, 665 bp, Cannabis indica
gcgagtattcaacctgggaatgagaaaaaattaacggaaagcaaataataatgagacaaagaattatagtggttcagtcagatcacggtatgcttagtccactgtagcaagagtttcgtaggtggcatttcatggtggatcacccttttatatacaaagcaggtgtccattctcgattctacgagaatttttatgaaagcctttcatttgcttctcttcaatggaagttttattttaccagaatttatccatcagttatacaaggattgcattcattgtcaatccgtttttacacattgaattacaataattaactaaacaacgttaatattaataaatgaacggcagttactaagttcatcaatatatgcgtcttccaaatctgtgagttgacttgttcacgttttgatgttaaactcgcaggtttaacattatgtttaggatgtctgcgtccttaaatagtcgccttttgtggacatcgcatgaggagctgatagaacccagacatgcaagtctatgtcggtttatcaagcctgcagggttcttaggacaaactcgcatttacagagagtcgggctcctggtttatacgcggacacggggaggatactcgcatatagttcgatgtatgccagctactctcttgtctcgaatgcgattagactt

SEQ ID NO: 352509 - DNA, 1198 bp, Cannabis indica
aaccggtttgagttattgcgtgttacttgtttttattcattatattatagaacctagtttaagttatttcgtgtcatttatttttattcattattaacattgttatagaactaagttttttttttttaattataactagtttgagttattttttattatttgtttttattcattatgttatagaacaagttccatttcaattataaccggtttgaattattctatattattcgtttttattcattatgttatagattcagttttattttaatttatatttgaaacatcagtgagaatatacttgatgaacttatataagaggagacatattggcaacaaagagtaaaagtggaatagctacaatgtggtgattgaaatataaaattctttcatgctcatgcttcatcttgcaaatccaataatgcaatcaaatctttgacaaacattgttagtgtctgttgatgcagaaatctgaccaacacacgctcgttagatttgcgagttgataaatatatggttatgtatgtaaatagagagacacaaaaaatttatagcatttcacttctaaagtcgcaatggtaatagagctacgtctattttgagtttatatttctcacgagaattacatgaaaactggctaagcaagaactccaaatactagaaagagaaagtaaagagatataatgactgcatacttagaatatgaattagtaatgtagttagcattgataactttaattttatgattatacatgattatgtatgttgtgggtcttatttttaagaaacatgcattagagttataatttctgaagttcgaaaattttattaaactctaagggtattttatatatcatatgtgaaatttactatgtttataatttttactcggtaacaatggaaaatgcgacggatgaccgttaaagtcacatgggttagtttagaacattttatctagcgggacaatcatttatgatgtttagaatattacgattaggcaagattatgattttggactattttacccctaaatctttaaatttcttacacttgaagtaagggtaaaatagaaaatttgcctagccttgtctttagtgagttgctggcattttctattcatttagctgaatcttttttaattaaaaactcttatttttattaagtaattaatcaagaaagaaaaagcaaaaaaaaaaaa

SEQ ID NO: 352510 - DNA, 631 bp, Cannabis indica
atattatcagtaatgagacgaccaggaatgaacgcactttgattcgcagctacaatttggtccatgagaggcttcatcctattcgccataacctttgtgatcactttgaaaagtacattacaaagtgctatcggtctcaagtcacccatttgttctggttgtttcttcttcggaatgagcaccacatttgcaaggctacaattattttcaaaaacacccgttcgaaaaaatctctgaaccatattggttacatccgtccccactatatcccagcatttttggtaaaaagccggagtcatcccatccggcccagggcttttatcaggatgcatatcaaacacagctgtcttcacttcatctgcactcactgaagcttgtaaattttcgttcatctccactgtaactttattctgaacacaagcaataacctcctcaacatttacttgacccgctgtgaacaaattgttgaaataaccagtgaccacatcactcaaacccgactcccagtccacccacatcccttggtcattctgtaatttctgaatagtattcgtccttcttctcgtactagctgccgcatgaaaatatttactattttgatccccattttttagccaatgttgcttcgaac

SEQ ID NO: 352511 - DNA, 717 bp, Cannabis indica
caatagttgagttggatgagatgagagcatcatgttccttatatagtgtttcaactagggcttaggttatgaattatatggattaaaaaagtttaaaatattgggaaaaaatcactagagtgtgcgaccactaaaaggactaatctctagttacaattttgccactttatttcaaccagttattcttctttcaataattccatattttccaattcaatcctataaatgccaaaactatttatttgataattataattaattatcaaataaaattaccatttatatttttttattaattagtgctggaattattttacaaggatcttagatttactaacaagtatgttgttaaacatcctaaatatgaacttctaaaacgattataaataaacacatataaagtatgagaaaccttacattaggtgcagcggaataatatgtctcattccactcagatctctaacccttgtatcctttctgtcgcagagtatcaccaagatctgagtccgaatgtccttctgttgaatctagattcttcacgatcttccacactatgattgaggtaccacttgatgtgtgtggacactactctatcactcaagggattcagttcaatgatgaagaagaaagaaagtgaggtggcggttaggtaggtagaaggcactcaagttttctctgaaggaataagatgcatcatctttcctgaagccatcacta

SEQ ID NO: 352512 - DNA, 596 bp, Cannabis indica
tggatttgggtttgtccttttgtttgatttgttgattcaattcaaaagtacgcaaggaacccattaattcttccaccttcattgtgattaagtctttagcttcctccattgccaaaagtttagtattgaacctctctagaagaactctaacaatttttctcacaagaacaaaatcatcaagattttcacaagagcaaaatattcattagctatattagatagcctttcatagaattcagttagggtttcattatcagacatcctaagatcatcaaatttaatttgaagcataataaatctagagcacttaacatcagttgttccttcaaactgagtttgaaggatttgcgaagcttccttgtcagattcataagatgatataagtttaatataaccttcacctaaaccattaaatatagcatgcaatgctttgctattgtaggcagaaagtttatcatcttcaatagaccattccaattcagattttattttagaattaccttcggaatctttctcaactagagaagaccaacttgatagaaccatcctccaagctctctcatcttgagatttgatgaaggccctcattctaactt

SEQ ID NO: 352513 - DNA, 659 bp, Cannabis indica
aaaaaaaaacaaaaacaaaaccgaacaaacattattaacgatcttaaaagttcaagaagtataatttaatatatgtcaaaattcgagagacaaaaattttaaataacctatttgttttgtatacaaattatcacgataaataattttaaatttttctatttttctcaatctaaatagaatgaatccattattattttatctaaagattatctttatttatggttactacggcacatgcttttcaaccaaacttttactccaaacttcaatatttcgaaagcttaaactcccttctattaaaaacatattttcaattaattttttttcatacttgttttggattatgtataaaattttaaaattttttaaataatttatgattttaaaaataaagtttaaataattatttactatgtttataaaaaaaactgttaatgtatacaataaggtgccgtttgataacacttttgttttttaattttttaatcaaaaaatgaaagtaaaatttttgtttttaaaaaatttatttttgaaaaataaaaatgcgttctgtaactacttttgtttttcaattttaaaaacagaaaacaaaagtgtgttctataaagttaatttttatttttattttttgattttatttaagtcgggtctaggtccgg

SEQ ID NO: 352514 - DNA, 660 bp, Cannabis indica
actttcctgctgtaatcatcaattatactcataaagtagtgtgttccacctttcgttagaattctagatggcccccaaaggtcagatggacataagctaacctctctatggtggtgtgttttgccttgttgaacttcaacctacaagcctttcctaaaacacattcataacagaattcaagtctttctattagcttctctttgaacagtccttgcctgttcatttcctcaagtcctctctgacttacatgccccaatctaaggtgtcacagccttacttgactgtgttcagttgagtccataacaggtgttgcactacctgttactgtctttctatccaagacatacaatccattactcaatctttctctcaacacagtttttgtgccttgtgcaattttcattacacattcctcaactttgacaacgtacatcactttatcaaacataccagtagagcgaagatttcttttgagatctggagcatacctgacccgctacaaggtcttcatgacttcattatgattctttaacaagattgttcccacacctttgatctcacacactttgttgctcccaagaagaattgtgaccccatgaatctttaaaagagtcttaaacagtcctttgtttggtgtcatatgaaatgaacaccctgaat

SEQ ID NO: 352515 - DNA, 459 bp, Cannabis indica
aatttatttatcaaacacttaatatatattattcacataataacatatattcccatattttaatgtacatatattattatattaaataatataacaatatgtacaaaatcctactaaattttagtcaatatatttatatatttatatatcatatccaatatcaaatcatacaatactaattagaatggaacaattgtttcgtcatgattccatggtggggaacgtctataaagtgagatattatccacaaggggattatctttctgcggagcttgggtcaaatccaagttttgtttggagtagtatctttgctgctcgggatgttgttagagcgggtttgaggaagaggattggtgggggtttgtctgtgcaaatcacgtcagatccatggcttcccattgttgatcgagccaccccaattcctgttgtgccgggtcttgagcatttcacagttaatag

SEQ ID NO: 352516 - DNA, 185 bp, Cannabis indica
tcctttctgtcgcagagtactatcaagatctgaacctggatttctttctctgaatccttgatgctgagcccagtgattcatatagaaatgctgtctgcgcgcgtgctgtccgaggcacaagcctcatgcgcgcgcgtgtccctgttgctcaaccccgatatatttcgaaacttcaaaaaatcata

SEQ ID NO: 352517 - DNA, 555 bp, Cannabis indica
ttaaacagctggagtaccaggatcttggtttgggtcttccgggcggtagagctggaggatctattgtctgagcggggggcacgtcaacattctggccagaagtagaagtggtcaccttgggttcaccataggccacttgggaagcacagtactcgagatacatgtctttagccttgcctaggtaatcaaaattagcttgagggttagccttccaaaagtcataaaaaatctccagaccggttgtctctaaggcattcactttctcccccagcctcgtcacctccgccctctactgttcagcttcccatttatacttctcaacctcagttgtgagctcctcctccttagaattcttctctgcttccagccgacagaagatagcccgaagaactcccctttcctcatgaaggctattcacttctggtgacaaagtggtgatggtatcttacggttggtcggaagcctcgaggtccttagggttactttcctctcagcagtaaagagcctcttgttgacctcacctagctccgtgcggacagcttcgagttccaccct

SEQ ID NO: 352518 - DNA, 534 bp, Cannabis indica
ttttttttttcttcataagaatatataattaatctcgcacactatttttttcttctcacaacatatatagttattttaatatatttcaatcattttactacataagttacataccaattctagtaattgtctctttcaaataaaatagtgtagtgtacatacatgatcagcttttacatattatttttgggaggttttatttacactcaaaaaatataaaaaagattctattttaataatttttattttatatataatttatatatatatatatatcttttatttatactaatttttatttcttccatcttatattgttgaaaaaaacaatataaaataaaacaaaataaaatatatttacatattaaagcagaaaataaaaacaaaaaattatataacattttttggaaaaaataaaatgaaaaattatatacctagtgtcaaaaatatatggaaataaaattaaaataattattcatattaatagaaaataatgtgatttttttaaaaaatatatatttttaaaattaattt

SEQ ID NO: 352519 - DNA, 578 bp, Cannabis indica
tttcatgttttgtattttctgctggtttttgctaaccgcgctgtttttgttctgtgcagacatgtctcggcagatgattgacgctctgaggaagaggatgggcggaagttctagcgcctcccctccgaccaagaagtctaagggcggagagggttcttcagagaagagaccttctagagaggttattgaccttttcgaggagctgattgctgcgaatccttccactcccaaatcttccaactctaaggagtctgtaccaccaacatctgggtccgagctggtcaggaggatccctgagcgggtgcaggcatcaactccaccggtgcccgtgctgcctgaggcccagaagggcaaggaggtgatggctcactacatgaaccggctggttcctgaggtcggtgagcaactggctggtactgacgactcatctctggatgtgttggtgggcggagtcttgaaggagctcaccagggttagtcttttctttacgatacttcccttttagctcttcatacttagctccatattctgacttttgcctttatgcaggccggtttgaagttggcttatacctactc

SEQ ID NO: 352520 - DNA, 1579 bp, Cannabis indica
atcacttgtgaggatcagccatggcaggctatagatttcccttggtttgggttggtcggaagctcctgaaccctggaatcaatcattttcggcttcggttgaggcttgaagtttgtaggaacaaagggaaaatggttggtgcatctgggtattatgagtctggaaggataaacttctgaactcagaagagacattttggcaggaaggaagtaatccattctgaaaatggatttcactaaagagccagaaggattgtgcaaaatgacaagcttgaaccgcccatttatacgcgaagttccgtaacaagaaagccaaagattgagaaatctaacgattgggaatcgtgcagaatatgcataggcgattcataatgatcttcaaaaccatacaactgccagaatcaaaggaggcgtcctttacaagaaaggttttttgcaaaaatgccctacataattataaaagctctttttaccaaaaaagaacatttttaggggcaattgttatacccgaaattcggctggaggacacgtgtcaaggaaaatggaatgtgaatcggtgcaatatcatttatggaataactcattaattgcgtgagtatcagattatatatgtaaaccgctgactgtaaggtcttaggcgaggaatcaatgtacgaactggtacttagtgtattaacaggacaccatatgttgctaaaggagaatagcgaggcaccggagaagagtaatacataccttagcttacagtaagtaaactaagtataaaagtcggatcagctcgaagaacaagaatgtgagatgaccatctcgctacgaggaaacttcctataatttcatccaactaacgcaagcgagactcataaccttggaaagtcagaagatttatgtatacccgcaatcgatgtaagacatatcttgttgaactctgaaagaagaatagttccagctcgccattgagatcactacaatcaagtttctgtcgagacatctccagatttaacaattaaagacgtgtttaatacgcgatattgttgacccagtaaaagcaggaaaatcacagctatatgactttcaaaatcatacactgcatttacatttcgtaatatgtaatcagatcccacgattttagggataatgactgtaatcatattttggtcagctttgtaattaactaccactatgcaactataaataatggctaacaatctcaaaaaagggacaaaaaatttcttatgcaagaggccctaaaaaatactcagaagtctgaatacgattgactcgtggacaatgcagaattttaactacaaaaccacgtaaaaaaactcggtgttcatattttatttttctatagcttttattctttttgtgttgaattatcattgtgaggctcaaattttgttaacgaaaatctgcattaacaattccattttcaaatataattgtcattgcatttgttgattcgtattcttcccagtttgacacgtgttatcctttgaagtgctagccaaattttgggtataacaagtgccccttaaaaagttcttttaataaaagtgccttttaatgattacagagggtat

SEQ ID NO: 352521 - DNA, 652 bp, Cannabis indica
aattactattttttttatattaaatgttattatatatataatttttaattttgttataaatatgtgtggattggattgaatcggttacttttacatgtcaatcaacatccaatccgcacaagtgcgaattttgaaaattccaatccaatccaatccgcacaagtgcggatatccgcactttgcggattagattggattggattggatcggctatttttatgaacacccctagtacccgagtagtacttcctggaagccccttgcaacctaacccgaagatacagtcgacggttacacctcgtctaacaccaagtaggggtgcacacgggtcgggttatcgggtttttggggtttcgggttcgggttttcggacttcgggtcttggaaatgcacaaccgaacccgattttcgggtgtgcgggtatagtcgggttcgggtcggttatttttgggttgggtgtagttggatttgggtcctattgggctgagcccgaatgtttaatctatgggatgcgactgagcccactggtatgggatgcgactgagccgactggcgatgcgaatgctctgggatgggagtctgccgacgaagataaccagtcgctgactcgccgtcgccagtcttggagaagaagaagctttggtctgatgcg

SEQ ID NO: 352522 - DNA, 605 bp, Cannabis indica
gtgagagagcaagtagttaaaaaaggagatataaaaatactacatttattatatattttatatatacatacaaagaataaaaaaaaaagttgagaaaaaaaatgaaaaggagagaaaattagaaaaagaaataaaaaggaaaacttaaagaaagagaaagaaaggaaaaaaagtcaactataaagaagttgaaaaaaaaaacttctttaaactttaataattaaaaataaaaaaaaaattatataaaaaaatataaatataaaaatttcgttaaattataaatgtaaaattggaaaaaagttaatatttagtgtaaaatttgtatgaaaaaactattcatagtcatgttgtgtgcataatccagtgatcactgactgtcaaacagtaaatatcaaattgtcatcggattggatttgatgttatttttgaatattcaattggatcggattggatgttggatgggtgtctaaaaatccaatgcatccaacatccaatcgaactaattagtatttttgtttagttaggatgagtaattacattttatattgttatacataaaatatatatgtatatataaaaattaacattaaaattttactattttt

SEQ ID NO: 352523 - DNA, 510 bp, Cannabis indica
atatagcggaaaataaataatatgtatatatttaacataaatataaatattagtattaattataaataattatatatatttataataataagcttttcttaatagttaagtaatgtatataataatagtatattaatattatatgtattaataataaatatatataatctttcaaaacttacagtaaaccgttaatgtaagttttaataataataataataataataataataactttatatatatacgaagaaacataatattatatgtataatataataactagtagaaaaattataccaatttggattaaaatagtttttctttttgcaattccccggtaacagtgttaaaaacttgttgtgaccgaaagccgtacgttttacatttatcaactcgcaagcgcacgaatctttattgtagcatggagattgtgaagaacgaggtcaaacccatgagaattgtgtgagataaaaaaaatacttatttaatctaagctattacaactct

SEQ ID NO: 352524 - DNA, 622 bp, Cannabis indica
agaaactatagcttgtgaaatggaaacaatttaaactaaaaaatagaaacaatttaatctcgaaatggaaacaagtagcactaaaccttatgtgtgaaatggaaacaaatatcgtaaaaaaatagaaattgaaaatgaaaacaacaaaatagaaacaatttaaactcaaaaaattgaaactatagtttgtgaaatggaaacaactagcatttaacctcaaaaaatagaaacaataaattgaaactaatttaaccttaaaaaatagaaacaatttaacctaaaaaaatggaaacaagtaacacgaaccttgaaacaaatatcataaaaataaaaaaaactcacattgaaaatgaaaacaataaaatagaaataatttaaactcgaaaaattgaactatagtttgtgaaatggaaacaactagcatttcacctcgaaaagtaaaaacgatttagcatcgaaatagaaactatagcttgtgaaataggaacaatttaacctaaaaaagagaaacaatttaatctcgaaatagaaacaagtaccacttaaccttatgtgtgaaatggaaacaaatatcataaaaaatagaaacaactcatattaaaaatgaaaacaatttaacctc

SEQ ID NO: 352525 - DNA, 853 bp, Cannabis indica
tttagtctaatttttttttatattcatgtacgttatagctatttaagatatcctacaaaattttaaaaaattcggaataatttacaatatagaaaatattgttcaatcagtctattttttcaagcgtataaaataaaatagtcacgcgtccaacacactgcttgaacacaattttcggcgtgctaaacttttttgaatttattaaaattttgcaagatatctgaaataagtataatttacatgaccatgagaaaaaaaaattgactaaaaaattatttcagatactaaaacagataaaaatgtatcagtgtaccccttttaagggggtacattatagaattcctcacatttttttatcacagcttttataaaaaataacttttaatttttccaaaaactttatcaaatgggccttattcttttagaattctttaagttaatgttttattgttatttttttttttcatttttggggtgtaataaataataaatctcatatttcaataaatacttttttttcaaaaaataaaaaatgtgaaataattacatcattaaatgcttgttttattttttttgaaaggaattaaatacatgttttaatatatatatatatatatatatttatatttagattattatttttggaaaatttagtttaaaatttaaaagcatagcagattaaatttaatacttagtatgatttagttatgtttttaataattagtgcaatgcagaataaaatacattctgttataaatagtattaattatgtggatgtccaaatcttttatttattaccattaatgtaatcagcattccctttttcttagtttccctttctcttagtttctta

SEQ ID NO: 352526 - DNA, 624 bp, Cannabis indica
aacacactactttgcatatcatgaggtccttcgtgtgatgtactcaagtacccatcgtactatataaatagtactcaattttgtacccaagcccgtgataaatctagaaaaatacaaaatagtagtgttatgattgttgctaagactttctaaatatctagttcaaaagataaaaatcctattgaatgtgacatgtctttttacggtgtaattcaagaaatttaggaattagttacagtagttttcgaatccctatttttctttgtgattgggttaggagtgataatggagttaaagacaatgaatttggattcaagttggtggacttgaatcgaatcagacacaagttcgataggtttataatagcatcccaagccaatcaagtattttacatgagagatccattagatgcacgctggtcagttgtcttgacgacacaaccaaaagattatgataatcaagagtataatggtgatgatctcatgcttagtgaccaaattaatcaaattaccccaccacctgttgatgtcactgttggggacgatatcataccatctcgtgatgatggtgaaggattatggttgaacgaatctatcaatacatgagtcatatatcaaacacgta

SEQ ID NO: 352527 - DNA, 770 bp, Cannabis indica
atcgttacaaggaaaatcgcagagtttctaaacttagggtttcctacatatcttctacagcaaagttaaagttgcattcagaaaataaatgtgcaaaataaacgtaaaagaaatcggaaacttcctcaaggagcaaacatctggattcaggttacaccaagctgaacaagcagttcttgtgaaaacacttcagcaaactcgaagctaaaaacctctcttttcactctgaacttacttagcaaagaaggttggtaaaatgagtttgtgaacaaattctcaacaataattataggcaaacaacgaaaaaagggtaatcatttcgaaaaacctcagacgcctcagttccccccaaaagtgaatatgggaaatcaaaacaatcaagtgcaaccgtcaaacgtggtgagagaaaatcggatttggaagcattaattgcgttagagcatttattagtcgaaaaccaaagggacgccaagtcagtgtcacatcgagttgcgaacagatgcgcctgacacatggcacccatccaaacgcaaagacagctcgaataaagtctacacgcaacttcggaagtcccatacaatcttggggggcaaatgttatcccaatttctgcactctaacgtggcatcactcgatggtgacacatggaattgactccaggtatctgctcgcaaggcacgagctgaacaggatacttcgtgcattcaatcagacgaagtcctttaaaccgagcagtgggcaatccgcacaggacgccaacacttagcaaat

SEQ ID NO: 352528 - DNA, 595 bp, Cannabis indica
ttgttcttcgaacgcaagatttatggtagcgcggagttcttcctgatcatgatgtagggtaatgttatgaccctacatgagcccaagagtgtcacagagattttgtaactcagtagcatctccaatggttgtttgaacattggtaccgggcggaacgactgtgttatgaatgccctggttgggtgttgaactgttattccaagtctcttgcacaccaggcgcgatttcatctataacagtcgttacaccgtgacccacgtttgccggctgtccaggattaacagctggcggaacccttgtgtttcctgggttctgcaatgcaggatccaccgtctgtggatttgctggatccccctgacccctatgagtctgcaccaccatcgtatttgtggttagattttgaatgaggagcgatacttgattcttctctcaatgaaagcaccaaaatgttgacctcgcttttagccaacgacaatgagtcttatttagtaagcgataagtgatttatagcaatcgatatacagtaaaacaaatataaagacacaagaattttatagaggttcagccccaaacagttcggtaatagcctaatcct

SEQ ID NO: 352529 - DNA, 529 bp, Cannabis indica
cttgttctggtacctaagccgaaaggtaagttgggaacctgcgttgacttcactgacctaaacaaagcatgccctaaagattatttccctctaccacaaatatatcaactggtggacgcaatagccagccatgaactcatcacattcatggatgcctattccggctacaaccaaatcagcatgcacgcaccaggcgaagagcatactggtttttgaaccgacatcaggctttattgcaacaaagtaatgcccttcagactcaagaatgtaggtgctacatattagagactagtcaaccgtatgtttcatgacttaataggaaacaatatggaagtctatgtcgacgacatggtggttaagtcaaagaaatttgaagaccacatcaaagacttagaggtagggttgtatgtcggtcggtttgggcagtttatcctatatattttctaacccaatctaaagtttgggttgctaaaatttaagtgcaacccacccaatttaaaaaaaattctgtaaaccgactaacggtttg

SEQ ID NO: 352530 - DNA, 524 bp, Cannabis indica
agagtgtaatgccgaaatgaagctttaaagaagaaaagagatgacatctctgtggctcgatatagtgaggttcgaaaacagctgtttgctataattgatcaacgggaaattttctggaagcaacgtgctaaacaattctggttaaaggagggtgaccaaaatagcaaatatttccacaaggctgcaagtaataggcgacggagtaatcttatttcgaagcttaagaatgaccagggggtttttgtggattgggagaatgggttatctgatgttgtggtacagtattttatgtccttattctcagcttctaatactgattatagggaagtaatagactgtattgatcatgttgttcctgagatggctaatctggagctttcaagacctgtcttggaggaagaagtgaagacggcggtgtttcaaatgcatcctgataagagtccaggaccagatggtatgaccccggcgttctatcaacgatgttggcatatagtgaaacaagatgttgtgggggttgttcagag

SEQ ID NO: 352531 - DNA, 561 bp, Cannabis indica
tttttcaattaatatttaattatttaataccaagtaattactaacctaaacctagttgttacctataaatagatagtgatggctcacacttaacaattgattcaagagattgaaaatcaaaaaaaaaattgagccactcactatccttctatagccgaccctctctctctctcttttcttcttctaattttcgaaaaccttgagtgatagagtagtgcccacacacatcaagtggtatctcaattagagatctgagtggaaggagacatattattctgttgcaaccaatgtaaggtttcctaaactttatatgtgtttattatcgtttcagaagttcatatttaggatgttaggtaaaatatttccaacagaattaacactatagggaactaatattcgatcctttccaaaatcttatattctattattgtatgtcatgttcctagccactcatattattaagctcccaatacaaaatttgtaaggttcatcttttgtgagaaactttaatgaatgaatgaaaaaactcaatgaacacaaataggagttcgtgtatactca

SEQ ID NO: 352532 - DNA, 805 bp, Cannabis indica
cattcctattcaaattcccattctattcccattcacatttgcattccctagcccattcccatttatattcccattcccattcccattgctattcacattcccattccctggcccattcccattcccatttccatccccattctaaatcccattcccattagcattgccattcccattcctcaaccaattcccattcccattcacattccttttcctatttgcattcgcattcccattcgcattctaataccctagcccattcccattttcattccccgacccattcccattcccattccccggcccattcccatttccattctcattcccattccctagcccattcccatacccaatcccccattcccttacccatgcccattcccattccaatttccattcctattcccatttccattccaaaacacattcccataacgattcccaaaccccaaaaccccaaacgacaatactgcaaaaccccaaaccccaaaccctaaaacctaaatcccgaaccccaaacccccaaaccctaaaccgtaaaaccttaaaatcccaaacatcaaaccttaaaccccaaaccctaatccagaaaacaacaaacctaaaaaccccaaacacaaaaacaccataccccaaatcccaaaccccaaacccaaaccctaaaacctcataccctaaaacccaaacaccaaaccccagacataaagcttcataccccaaatactaggtccaagatcctaaactctagaccctagtcataaaaccccaaaccctaaacctcaaacccaaaaaacccaaaagc

SEQ ID NO: 352533 - DNA, 607 bp, Cannabis indica
gaatggtgtccattttagatgacttgactactctattcaatgaatgattactttgactctcgcctaccaggacactatatctgtttgttggaaaccttagaaattattaaagatatgatagttttgtattttcacatgtctttgttacttgctaaatgcttaataatttctgaattgtgtgtgaatttatattgaacctatatatgttgttttctgttattaattgttgtagtataatttccgatcatcattgttggtctaacttaacttgttgttttaatgggacaaatcccaaaggattgtcatccattatacaaacataatagtgttagatctcgacagataagtatttgtaaatgcaacatctagttgtacatccaaagacgacaacttagattagtgttaacaatataaaacaatgaagagattcataaaataagaatgactttgactctcacctaccgggacatcgttggattcttattttaatcgaaattatcctttaatttttcctcttagctttttcattaagaatttgcttaaataaagtatcatttgatgaatggtttataaaccatctgcttatgatgtcactctaatttctctt

SEQ ID NO: 352534 - DNA, 1037 bp, Cannabis indica
tagcttcgaaattcaagttgaatcgcaccagcgagatcaatattgagtgagttatgattgttttattgaaggcagtacattacccaacacccaggttaacatcctagcgcctaggttgaaatatgacgtcaacctagacactgggtaagtgtaaaaacatccaagggatgtactttaagatgctcaactgatattttcacatcacatggcatgtttctatgttctggcaaagctagtcaccagttctcggagatgttgttgttttgcagaaatgagagactcaagactctttattttcgagtgaattttctatgttggaaatgaaaaatgcaaagttgtgaatttgacttctctgacatcaagcatctcagttattctgaaaaataggcaaacggttgaaacaaaatcatattcgaataagtagaacctagcgtgccatgccatttgtcaacctgggcactgggcaccctattcttgagcttccgagatctcgttttcttatttccaaggttcgtgaaactgaggacgagatctcctaacccacttttaccattctggattcatttgtcgaattagatttggcattttagcaatcgaaagtagtgcactaggttcattatcaacttgggcgctgggcccaacactaggttaacttgggccttgggtcctatttttaggggctcaggtttgtggttttctttccaagtttgcttgaatcttctttattttttataacaaaaaaaatgcctgaaacactttttcgtgaactttattagaaatagcccaagttgacaatatcaacctgggtgttagtcccagtgtcacggggcagaacgtgcggtagttgctagcacaccaagctagcaagtcagcctaaacgcgtcaacaggtaagaaagctcaatggttaggcacaatacatgtcacacacttatttagtgcaaacaagaagcatgaacaagcaaacataaattgtcaccaaggaccaatctcacacaatccacaagtaaacacgtaggcaaacgacacataatggcc

SEQ ID NO: 352535 - DNA, 982 bp, Cannabis indica
tgaacctctggtttccataacctacaaaaaagttcttgactttgtcgtcaagaacataatttgtagatttagaatacccattaagatagtattcgataatggaactcagttagatggtgaattatttactgagttctgtgaaaggaacaagattattaagagcttctcgtcggtctaaaggcctcaagaaaattggcaagtaaaaactattaataaaaacttggaggatactatcaaaaagaagttggacgctggaaagggtagatgggtagatgaactactacaagtactttgggcttacagaaggattgagaaaacaacaacgggacatactccattctcactggcatttggctgggaggcaatgatgccagtagaagtcgatattgcgacccatagacgagatttctataatcaagaagaaaaccaagaacttttgaaactatccttggatctacttgaagaaaatcatacttagtcgcaaattactaacgcagcataccaacaccgagttacaagataattcaataagaaggtgaagaaaaggctctttaacatcggttacttcgtactaaggcaagtatttgcaaacacgagagatgcatctgcaggagtatttaacccaaactaggaaggttcttatgtgatcgaggcaatagttagaatcggggtttataaattagctcagcttaacgactcgctaataaagaaccactggaacatggagcatttacgaccctactactagtaaactaatgttgtaatctctctttttgatgtaatattttaaatttcaattattaataaagttgaattattttccaagtaattacaaagtcttattctttaaaattacttgaggggtatatatctgtgtatgatcaactggaatttatctagaaacacataatatattacaaacccattccattttaaagcttttaaagtttttcaagtaattgattgaagtcatctatggacg

SEQ ID NO: 352536 - DNA, 766 bp, Cannabis indica
cagattggagcatgtaagtcagaagagacttgaggaaatgaagctaacataaagacttgaattctgtgataaatgtgttttggggaaggcttgcagattgaagttcaataaggcagaacacaccaccacaaaaaagttagcttatgtccattctgacctttgggggccatctaagtttccaaccaaaggtggagcacactatttcatgagtataattgataattaccgcaggaaagtctatgtttatttgttgaaaaacaaagatgaggctttagaaacctttgatacatggaagaggctactgaaaaaccagactagaaacaaactcaaggtcctaagaactgacaatggccttgagtactgctcaaatgcaatcaagggatggtgtgccaaaatgggaatcccgagacatagaactgtgatctgaacccatcagcaaaatggtgttgctgagaggatgaatagaacactaattgagagggttgagttaggtgcatgttattgggaactggtttagacagaaccttttgggagaagctcttaaaacagtctgctacctaatcaacatatcaccatttgtgccaaacaactgcaagaccctacaatagttatggataggtaaacccccaaacatagatcacttgaaagtgtttggatgtactgcattggtgcatgttagacaagataagttgcagcctagagttttgagatgcatatttcttggctatcctgaaggggttaagggatatagagtgtggtgtttaga

SEQ ID NO: 352537 - DNA, 520 bp, Cannabis indica
aggttgagtttgtttcttgttttgaggctacatcacatggtgtatggttaaagagtttaattttagcccttagagttgttgattcgatatcaaggccattaagaatgttctgtgacaattcaactattgttttcatggctatgtacaacaaaagatgaagtcaaagtaagcacatcgacattaagtacttagctattagagaatgtgtggaagaaaataaagtggtcattcaagatattagcactgactttatgattgccgatcctatgacaaaaggcttttcaccacataaattcaaggatcatgtagagaacatgggacttgattctctcactacaagaaatgttacttttaccggcgcaatttgctattgtgctagtaaaaaggttaaagttttaccggcgcacatttgtaatggcaaaagtctaacttttaccaacgtatttacgtgctaaaaaaagtaatttttgctagcacttttcattttgccccgataaaaattctaataccaacgttgatt

SEQ ID NO: 352538 - DNA, 1112 bp, Cannabis indica
gtcgcccatttgctaaagcagtagaagccattatgaagacctacgctttttatgtcgtagaaatagctgaactcttctactgagggagccctatggacatactccatgtacatcgcatagaaggctagggcagtgcggtagctgtttggagttagctgaaaaggcgatacatcatatcgcctgagaatagctgcgatgaaggggtgaaaggggaccgataccccacaccgaaggatgggtattgagactaccacatcctctgtgggaatgatcgcagggttagtaaacggaagatgcgctctctgagatggcttaggtcgctgaaacgcgagtcgcagcaaatttaacctcacaaaggtggtgaagtctgatttggaaactctcgaaattaaatcctcacacgcgaagggctcattcagctgggaatcgtcaaccgaatctgtcccactcccttccgcctcctcctcttcctcacctgactcgcgaactggagtcgtccattcatcgtccatctcctcgacctcgatgtcaggagcatgcctcgagtggataaggtagtcgcgtgccgacaccgtggactcgctgtctcgaatatcgatggtcccaggttctgcgagttcttgcaccatcttttcgatgtccacagaagacatcgggcctagctctattggagcggcctcctcttcggaaagcgaagtggggagaaagctgtcctcctcctggtcagcttcaccgtcgaatgcacggcctccggagccgagctgttggctatccgacaagtcgctcatctgaaagatagaagatcttttcagcgtgatggatgtgtgaaaagcaaagtaagtgatctcacccgcattaaactataaagtcgcactcgatagaatggtcagcctccttgcgaatactgaccatcccctcaatatgcgagaagagataatactttcttgggcgagtaattcacgcatcctgggccaagcgatatacctccagaaacggctgggagtatcccagtgactcaaggggtatgcgttttcgagcataaccctgaagttactgggagacccccaccgttccgagactacctatcagccaaagagtacgatcatttgagt

SEQ ID NO: 352539 - DNA, 740 bp, Cannabis indica
atgctttgttgaggtctgtgaaatcaatacagactcgccatttcttgtttggcttgggcactaatactggatttgcgacccaagctgggtagaaagcttcaattataaaattgttgttgcgtagcttttctacttcttcctttagggctaatgctccttctttatccagtagccttcgcttttgttggactggccgaaagttgggatcgatatttagaacgtgtgaaatgataggaggatcaattccaaccagatccgcatgtgaccaggcaaaaacgtctaggtttgctctcaaaaattttatcaattctgattttacttcgagcaaaaaaccctttcctatctttagatttctggtcgggatatctggatcgatctcgatctcttctaactcttccacaggtcaaacattactgcttgggtccccaagtcgaggatcaacatcttcatctccgccttaggaagttccctacttggaaatgtttttttcccttgtttgtgctctggctagaggatacttcattcttagccttggccactccaaggttataacattcccgagcagactgctagtttcctcttagacaccctaccccattctttgttggaaacttcaggcatgagtggaatattgatgtgatagcctttaagtcatacaaggccggccgacctagcattacgttaaaagctgaaggaacatctaatatcaggaattgcgacatgatagtcatgctcatcgg

SEQ ID NO: 352540 - DNA, 623 bp, Cannabis indica
aagaaaattatgaagtttgggattgaattgaggtgtgggggacggatttttggttcctagttcaaagccggaattccggttcctaggagcctgtggaccccggtcgaccggttggtgccaggaaccgaacttccggttggggctttttccctcgccctagttttttccgtttttacgtaatttagaatattagcatcctatttatcgatagggttattcttagtttcgattttcaatccccgataactgttttagcgtgtctctcatcgaattctgaatattatggtttagggccctataaagtgtcgagctgtgtttccactcaggctgaccggcacacttgaacacggaacgaggtaagaatagcattgaacatattatataagcatgttgtatttatggttgtatacattttgggtgatatcatagcggcacaaccattgtgtctgttcggcagtacaggcatcgtactggttaagagtgatattcagcccagagggtattaattggcgctatcataggggcacaaccattgtgccagttcggcagtacgagcatagtactggttaagagtgatatcatggccaactatacacttgggtgctattgatgctatcatagcg

SEQ ID NO: 352541 - DNA, 1086 bp, Cannabis indica
gaatttatacattaaacataatcatgaaataaatcatgtgaaccgtgcaacataaaatgatttctgatcttatattaattagtaaatctgattatattgaaatgggttttatttagggcacaaaacccaacatgggccccgtttctaagggctcgagtttgctcaaatcttcattatttctaatgacaaaaaaaaatcttgaaatactatttggtgaacttgattggaaacaatccaggttaacaaaatgtcaacttgggcgctgggcccagcacaaggtgtcaacctgggcgttgggtcctagttatggccctctagaaattccgtttggtccccataaatagttgaatctcaatattttctgtctttggagaagatgcttgaaagaaatcttggaaaacaccataaaaaatggcttaggttgacaaaatgtcaacatgggcgcagagccagccccaagtgtcaacttgggcactgggccatgcttttggcactcaagaagtgtagtttcttctccaaaaggacctattttcccctgttttcgatgaagaaaaagaagatgcaaaagtcggatatttgatgtgatacttagaaggtgcccatattaacatagtataaacttaggtgttaggtgctcggggtcccgggtgctcaaaaattaacttgctctaattctaattctgatgcctcaaatatgtctagttgatgtctcaatgcatgttttgacccttttcaacaagatggtcccgaaaactgaaaccttagttggatatgtcaatggggcgtcgattgaaatcttagatgcccaagtcggcttctaggttgcatgttcgtgtgctccaacctgggcgcagggctagggtccccacccaggtcaactactatgaattgctcaactccgtgccatcattcctcttgtcacgtgtcaaatattaatgtccacgccaccaggaaaagttttcgagttaacaacaaaaaattaattctaatgaaaacaattaataaaaattattaaaaaacctgataaaaatattaaattaattaaaaatattaattttacttaaaaacttaaactattcctaaaaa

SEQ ID NO: 352542 - DNA, 1458 bp, Cannabis indica
attacttgtttgtgattgtgtacacttgcgcaattataaagcaatataattttcacaacaatgatcattctttccataaagcatattatacagtgccacatcaacagtactctaacaactgttattatatgaaaactcaatcagcggaagatgcttattctaggaatcctcaaaatctatctcaaatgcttgttacagactctctcagcatttagatgtaaactttcaatctcaatctgagataattactttcagagcatcacaaggttgaactattcctttgacaaatagattagtacaccaatccaccataaacatattccactctaattaagaaactgtactgatcttacatgtcttagttactcccaagtataaagagtatatatagtgtaatacaaaactcatttagaaccttctattcaatatccttatctgactgatacaccaaccttatttttatatcataaaattccttcaaacaaaatcaaaagtcttttgtcaatccagttccaagctcttccatgtacttctaaagtttgaagtccctccactaggcaacattttttttctttccaacagattaaactacaatgtaatattaacaagttttcccatcatgaactcaatccctgttctgcttacatttctagcaacctttggtaagatcttttcgttatacaaacttgtcttagaccgctttagtttaaagtaccgattactaattctcctcccaaaaagttgggaatcacacgattctaatcttcaatcagctctaacaatcatcactgcctcctaattaaatatttcaaaatgataagatatttgaggctcttatgatttgtataaacttcgtacttttgccaaataggtaaaagagctaaggtcccatggcagaagccactactatcgattcaaaaccataactaaaatactattactcacacttcttcaatcatttagaagcacacgcaataactcttttagactgtatcaaaatacaaaatccttgtttagaagtgtcacatcaaataacaattttcccttcactgtctgacaatattaacacttggggaagggttaacctctgtttcaattctttcgatttgattccactaagggcgtagacaaccctcaacaaatattctatagcatcctattagttccagaaaacctctcaccttcactacaaatttggggtcaacaaaactcgcgtttcttatatttagcacaaaacttatgcttccagagatgttacaacaccatccaaagatgtctctcatatgtttcctatgaatgggaagaaatcataatatcgttaatgaagaaaactacgaagtcatcgatacaaaaactatttagggaatatcctcctttcgagtcttcaactggcaattaccagatcaaagatcaatcctaccctaaacttgttcaacataacatctgttgacttcgctt

SEQ ID NO: 352543 - DNA, 819 bp, Cannabis indica
atacgactaatatttatgtacaattataaacaaccaacccaagtagtcttatttttatttctttgatgattgtttttgttttctccttcactgatcattcaatccagattttcttcagcaaacaagcattattgctccggcactgtcatggaaccagaaatcagatgttcatggtgggaaaaaggtcaacttacttaaaaggaaagaccattgctgtgagttttaaaattgtggctttttaaggtaaaatttgcactttctttatcttggctctaattaatagacccatccattagggtaatatatatttggtatatctgatattaatttggttgatgttgacatgttgttgatcttaccatttaaaaaaattagaaagttaattatttttttttattactaattaatgctatatatatttcaatgaagtttgtaaggtcattatgattgcggttcttgataatccaagacctttcaaacaagtctttggttctatattcataaaatcataatatggaaagatgttggtgttacatatatctttacaattaagatttaagttatttatgaaaatttcttgttggttagattaatacaagttacctatcgtttttgaacaggagcactagttgttttggtgggactaatatatatgggcatgtgatgttgagacttatttatctatacgtgagaccttcaattttgaacaaataaaaagataagtgcatgtttggcatcataactaaaaaattgtttttaaaaacaatttggcttgtttagccttattttttaaaaacagttttcagaaaacaaagttac

SEQ ID NO: 352544 - DNA, 464 bp, Cannabis indica
ggctttttcaagaagctttggaaggatattggggaagatatttctacagctgttctgggtttctttcatgatggaaggttgccaaaaagtctaaatgaaacggtgattttgattatccccaaggttgtgaatcctttgtctgcaagtgattacaggcccattgcctgctgcaatacaatctataagtgtatctcgaaaataatctgctcgagactctcggaggtgctccctgccctagtccaaagcaaccaaggggcttttgtgaagaacaggcttcttgctcacaacatcatgattttccaagatctcctaaagggttactcgaggaaaaatatttcagcaagatgcattatgaagattgatttaagcaagacttatgacactgttgactggcagtttgttgaagatctcctaaactctctatgctttccttctagatgttcgaaattattttaccaggatct

SEQ ID NO: 352545 - DNA, 725 bp, Cannabis indica
tatggcagagatgttattgctttaaaagatgttcttgccgcacttaagtcgaaagatttcaaattacagttggagaaggaatccaagaaagaataaatgtatttggaaagaggaagatcacccaagaaagtgagttcaaaaagtaaacaccatcactctcaatcaagatctaagtccagttgaaagaaggatacaagaaagtgttacttctatggaaagttcgaacacttgtaaagattttgcaagaagtacaaggtgcaacaaagctttaacaaatctcaccatagagatagaaagaacttctggcaccatcatcatgggaaagactctgctacaatcgcaaagataatgatgactgcttcacgaacggagagttgttctctatctcagagtcttcaatgaatagggagtggattctcaatttaggatgcacttattacatgtgtccaaatcaagagtctttcttaattacaagttagtgatggaggtaaattttaatgggtaatgatcattcatgcaaggtcattggaaccgggaaggttaccatcaactattatgatagtggaattaaggtgctgaaaaacgtaaggcacatcctagagcttagacaaaaccttatttccctaggtgcacttgaggatgaaggatacagatacaagtccatatgtaataccctagaattaagaaatggattagcaaaaccctaattagataattaagaataa

SEQ ID NO: 352546 - DNA, 1130 bp, Cannabis indica
tttaccttttttaattccatttaaattctaaaccttaccctactatctccctataaatagaataagatggctcttattttcacaaccaacatcaatctcttttgttagacaatcagaaaatagaaaagagcctctcttcttcttcttcttcttcaatatttcgaatcccatagtgaattgagagtatgcccactcatctcatagcaatcccttgcatagtgaggaagatccaagttcagatcttgataatgctctgctcatgaaaggaatcaagggctatatatatgaatggaatgagtcattatattctgctgtcaacaatttatagatttcctaatctcttatgtgtttatttcattattttaggaaatttatatttaggatgtagattatagaattataatcaacatacatgttagtaaatctagatcctggtaaaataagttccaacaattgaccccagagccattgtaatgatttattttcataaaatatggatttaaaatgatgtttggttgatttggatgtgttcatgttggtttatgtgcttaattgatgattggatgttaattccatttttttttatgaaaaatatttttattttaattctagaagtattttttttggaaagttggtgaaaaattaatcaattaggcttttatggatctcaatttggatttaaattgaattagttataatttttttgaagtttgaaaaaatttctaggctagcattttaacatgcgtgcgcggatggagggacacgacttgatgctcactcagacaaaaggccttcagacatggccttgtttgaagtttcatcccgcctgaccgagttttcacgcaaatggaagctctgtgcaacttcaattcttagccaaaaccccgagtttgcccccatttttcgttttttttttttttttttttcctatttttttcaacatttataaatattttttcaatgaaatgaaattcaaattttgaaagaatttttttgtagaatcttatttttcaattaaaaaaataattatcatattaaaattaatttttattaattttatcattaatttaaattgattttagatattagtaggctttaaatttaaaaaattgatttctcaacaaacttgc

SEQ ID NO: 352547 - DNA, 548 bp, Cannabis indica
agcccttgaatcagatctggaaaaaaaaaacaatctgaggccaatcaatcttcttgcacggcggtctccaactacgagatctagctccgcctcctacaaaaccccaaaatcgaaaacccttagctctgtgaaaccacaacttctgcctctaagaaacgcccaaatccgattaaccccagctctgtgaaaccacgacctctcgcctctacaaaacccttaaatctgagaaatatccacctctgaaaaaacccatctccgcctcctacaaaacccccaactccgagaatgcaaactctgaagccccaccaacgtcagcgtcatccggaagaaagaaagaaatcaccgttcacgagccgtcgaagaccctgcgtgtcgttcacgagccgttgaagaccctgcgtgtcgttcatgagccgtcgaagcccagccgtcgtgcacaagccactgaacccagctgtcgtccaaatgagaagagaaaataaggctgaaagattaggaggctagggttttttattgtttaaagagagcagatgagagaagtattattt

SEQ ID NO: 352548 - DNA, 659 bp, Cannabis indica
taattatttccataataaaatgtgtatttgtcttactattttgtggtaattaaaatgataagtactatatgaagttggttgagcgctcacgcgatcgttataatcattgaaaaataaaattccatttatgattatttggttatttcagaaattcatatctttagtagttgttaatattgttactaaataagtgaaatattacaaatcatgtgtttgctattttctttttatttcaaaataaaaaatggaataattttttattattttatatataatgatattatatatattcaactaaaattaataatttaaaataaaaaaaaaaatctaatttttttttatttgttaaaaacttaaaaggatttttttttgaattttcaatatttgagaaattttgaaaaatgcaaagatatgtattgctttcatttaaaaaaaataataagggtaactaagaaattatctttaattattttaaatataattaaatgaaaattacaataaaaaactcttaaaagaaatacttttacatgaaatacttgacaaagattaaaaaatgtaaaacatgtgttttgcattcaaataaaaaaaacattacaactaaatgtgcataattaagttcttcaattacttacataaaaataagtaaataataataactt

SEQ ID NO: 352549 - DNA, 1145 bp, Cannabis indica
tacgatgggtgtgtgtcgtgatcacgttaacggtactcaagggtacaaaacaaaccctacaaacacttgtataatgttagtacaaatagtatgtggtacagtggttcgtaccctagtatggaacgtttcttactcctttgttaagccttgtaaataggtgtatgggcgcctagatacaagtcgataatatgtgatatgttatatgcttttcttactgagtttgtcgactcacagtgctacttttatgtgtaggtaaaggaaaggcgaaggctgaacaggagtgagcttgagctaggatgaggttgtacatatcatggcagcgcgatctaaaatgttcgatcttaagacatttggggtttccattttgtagtcgctttgcgatctgacttttgtatttggaatattttgtaaaaattttaaataacgggatcccaaaacttccaaatattttggtaaagcttataaagtttcatagttaatactaaaaggtttaatttgacacgatttttgaaaaaaaattctttgattagcgaagacaacaatttaattgaaaaataactgtagcgtgccttagcattacggtgttacaattttggtatcagagccccctggtttgtctatggaagctcgccaagaaatgtacaatcatcatcagagaaatcttagctcacggttcagtaagcctgtatttgtttattaatgtgttgccttaaaatacataagagcgatattaagtttttgtgattgttgtttgacttgcctgacttatgggttcgcaggctaagtcctattaaatggacgcccagcgaaatacaaggagttagggtaacagggtcgagaccggaggcggtcagggaaatcaaatctcccagaatctgtatggtcacggcagaggctgtggcaggtttcagggtggtcaacatgtgaacccaccttaagctcctctgaggttaaggtagtagggtcctcctgtagtgcctccgccgcaagctcaggtcattgtaattcctgtggtgccagcagaacaacctgctgctggcaaccatattgagtcgttatacgcgaggtttcgcaagtaaccacgtttagtgttcttgggaggtcctgatgtgatgaaggctgagcagtggctcacagtgatagaa

SEQ ID NO: 352550 - DNA, 760 bp, Cannabis indica
atcgggtgacctgcgctacttttaagttctaggaagacggcctcgtgtggtgggaattggtgtctctcgcccgagacgtcactgttatgacttgcgaagagtttcaagatttattcagctctaaatattataacgaggcagtccacagtgctaagcggaaagaatttactaaattggtgcaaagcgagcgtatgtcaataactgagtacacaacaaaatttgatcgcctggccaagttggctttgggtattgtgcctacagatttcagtaaaaaagagaaatacttggtaggtctgaatttgaaaattagacacgacctattgattaatacaaatgaggcaatctcttatgcagagatggtagagaaggctctacgagccgagggtacgattatgtttcttcaggagccccgagtgactccaagtgttggtgggacccccactcttcctactcttgtctatggtagggatgttggtgattccaccactgaacaaaaaagaaaggttaccccgacatctggtggtttgggacagagcaagcggttccgtaggaaccaaggcagaggtggatgccaaggttactcttaccctgagtgcccacgttgtttcgggagagtacaaccggaagacatgctggggcatttaaagaaatattgccttcaaataaagaaagaagaacagaagcgagaggtgaaaccaaaacctactcgagtgtttgccatcactcaagctgatgctgcagccagtccttccgtggtgac

SEQ ID NO: 352551 - DNA, 737 bp, Cannabis indica
aaaaaaaatctaaaaattgttttaaaataacatttgccaaacacctttatatttttttaatgacaataaactattttctattctcacttttaaaaattaaaaactaaaaacacaaccaaacatcatcttaagctctaaaagggaggcctaagtagatcctagaattttggagaaaaaattatgtatttagtcttttatactattttttatccgtattttataaaagttactaattaaattatttattttgttaaataatttgttggaacttgtatttttttaaataatatttaatagtatcctaatttcattttttaacaatttttttaatataagtaacttatagataatttgtaacataaacagttgcaaaaaatataatcaatcttgttagttaagttttattttaacaataaatcagtttagagtaggggtgggcatccgatccaatccaaccttttttttctcatccaatcaaatccaattggtaattggatttggaaaatcatcatccgatccaatccaattagacctcaaaatccaatccaatctaattactaattagattggatcagttttttaattggatatccaattacatacctaaatttcaatattaacttaaaaatataaaaaaaaaaatacgtaaaaaaactaagtaatcactttttaattaagttttaatacgtcataaatatactattcttacaagtgtattgtagctaaaagttttaaat

SEQ ID NO: 352552 - DNA, 785 bp, Cannabis indica
aatacatagtgcttagagcatctggaatgatactctattttttttagctaaagtagctaaaaaactaaaatagagagccaatttttgttgatgcttcaattatgctccctactttaattagtatttgattattttaatatttaataatttgaatttttcaaatatgaattaatataaataatgaaaaagtaataataattttaattaaaatactattaaaaaagttcagcaaaaaagtaaagactccttacatttaaagagctctgggtgaaaccttagttgcccaggttggcttccaggttacacattcatgtaatttcagctctcatgccttggattaggttgctccatgtcttcatggtacagaatactgaaagatagtgagttggattcaagttattgaagtctgaacttccatcccggagatcctatagtcaacctgggcgcagattagggtctcctcccatgtcgactactatgactcatgtctactcaattccctgacgtcatcctgatggaacttattttactaggatctagattgactaacaagtatgtttaattatattctataatctaacaccctaaacatgaatttcttaaaataattaaacacatataaagttctagaaaatcttacattggtggtagtagaatattatggctctttttgtttagatctctaatcctttctgtcgtagagtaataacaagatctgaatctggatctccttcaagagttggaatttttcacaatcttccacactataattgagtactaacttg

SEQ ID NO: 352553 - DNA, 449 bp, Cannabis indica
aaaaaaaaaaaaaaaactcattgtatatgaaaaataaatgtaaaagttcactactacaaaaatgggttttcccgacgtttttaaacagtcgtttaaaatattcccgtcggtttttataaccgtcgcctatacgaccatcgtaaaacgagcagaataggcgacaattcaaaaccatcaataatgtgggtttcccgaccgtttaaaactattgcctataccctgttataggcgacagttttaaaccgtcggagatgtaaaaaataaagagaaaaatatatatggcaaaaaaatctgtattttctgcattaattttataattttacctagattaaaataaaataactaattaattttgttacaataacaactaactttaaaacacattaaatttattcaataacaaaataaatatatataataaataaaaaagtatataaataaataaatgt

SEQ ID NO: 352554 - DNA, 621 bp, Cannabis indica
tcgggtcataattaccaaaatgcccctggctcaccaacggggtctttaacatgttaaatttcatataatttcacatatattgaactatataataataaaattccttaattaactcataattgtctaattaggggttttgctaatccttttctaaattccgggtattacaatgtgctactttcttaaaatggcaaaacactccttgaagtcttccaggtgattccttgctagtttagtcttcattagcatgtcgtctacgtagacttccataacttgcccaattggagtggcaaacatttcgttaacaagtcgctggtaagtggcgctagcattttttagtccgaatggcatcgtattaacaatataattccatgtcagtggtaaaacttgtatgttcttggtcagcgacattcatgggaatctgattgtagccggaataaacatccatgaatgacatgagctcgtgtccagtagtggcgtcgactaactgatcaatatgtggaaatggaacgcagtgcttgggagggttttaaggagcccaccctgttatgacttggaagacacttgtgataaaaatccattgttagtttaaacaagtaatgaatagtcagaataaggaac

SEQ ID NO: 352555 - DNA, 660 bp, Cannabis indica
ttgaagaaaatacctggtcgatctaatgtccgagttcccaagactcacctgagttcatctccaaaagacaacacacgagatgagtgttggacggaataatcaaaacgataaacaagcaaatatgccgaccaggagtactcaacagattaaaggacgactatgtctaaagaaaagtcagaactcaagaagtcagaaaaatttcttgagttagggcaaaaaagttcatgaagcttagaataagcaagatgaaaggcggacgcaatgcagttcacagacaagctctatggctgtaaacccacatgaagacatgataaagaagaatcgcagaagtttctagccctagggtttccaaagaatttttctacagcacagtaaaagttgcattcgaaatgtaaacatgtaaagataagcataaaggaaatcagaaacttactcaagattcaagtgtttgggttcaagtaacgtcaatccaactagcaatcatatgaaggcacttcggcgactttgaagctataaaattttcttttcgctctggagcttgcttagcaaagaagggtgatgaaatgactttatgtgccaatgatgcgggtatttataggcaaagaggtaactgtctcaaagaaacctcagacgcctgagcttcctgcctcaaaaacgaat

SEQ ID NO: 352556 - DNA, 622 bp, Cannabis indica
tttctccacaacttctcttataaaatgaagccttatatctatgtacttagtacgttcatagtgcacacaatttagggttaattgaattgcactttgattattacgatgcacaatgataaccttctggttgagttttaactcttccataaacctagttaaccaaaatgcctccttgataacttttgttgttgacagtagatactcgttccaaacatgttaaacacatagccaattaatgaatttcatgtatcaatacaccctgcataatcagagtccacataaccattgataacgtccaagtcttcactctgtttattcatgcaaaataccaattattttattaacattaaaagaaaccaattatttcattaaaagagatagaaaaaaaaaataattttatcaaaaacataataaaaaaacacaatgctaaaaaaatctaaaaataatattaactttaaaaaccaatttcataacattaaaagaaaataattatctcattaaaagaagtagaaaaaccaagtttcatcaacaacataataaaaaaacacaatacaaaatattataatctaaaaacaatttacgataccaactttaaaaactaatttcatcaacattaaaagaa

SEQ ID NO: 352557 - DNA, 557 bp, Cannabis indica
taccgcctacttaggcttgtttattttttactctggccggggctggggctctcccagtccgacagaaatattgtatttttatgaacttgtttctgtccccaagaagggggagaaacttaagggcgaattttatggtttccgggcccaccctttgaatgagggcccggtcccctttaaccagcaaaaacacgtcaaggagtatcgtcaccgcttcttcttctcctccgggttctaggctgtggaacacctggagcttctcacggagtgggttaggatccctccttatgagcggactgcacctactcagttcttcctctaatgggccaagaccttcgccacatatgacaagaaggaccttgacgtcggagggttggtcacgacggagaattgtcggaaggccaagctgagcctggggcaccagtcggtggaggactccaatctttccaaggtcatctgcccgaacgtaaaggttccggctgcggagaaggcattccgggatggcatcattgttaggttttatgccctaaataaaactctttacaatctgattagttatc

SEQ ID NO: 352558 - DNA, 684 bp, Cannabis indica
aataacaaaatttaaaagttagcataatagcctatttctattcaaaatatcatgattaaataatcttattttaaatttaaataaggtcaatttatttaaaaaataaaataatttaaaaaatgttaatatctcaccttaaatttaaaaataagataaaataatcaaattttaaaaataagataattaattaagcaaaaaagatagatttttacttatttcaaattcaaataacactaatatcttaaattaattttaaaaaatactaattaatataattctgataatcagatttgaaatatgaaaggtaaaaattaaaatacaaaactacaccaaaaattggaaattaattccatgaaaaagcatgaaaaaatgaagaaattcgaaaaatttgtgagctgtacggatggtatgcgttgcatacccatccgcgcgcgcttactgggtgcacatccgagtttcctcggcgcaggaggctgcacgcatgatttccgcatgcacaggaagggatttcagacatccttgagcgtgtttcttcagacagaggctgtccgaacacgctgctgaccgagtgaagctcgggtccgcgcgcgtgagggtgtgtcattaccctatcttttttcaaaacttcaaaaaatcataagtaattcaaattaaattgaaattaatttctgtaaaaaaaatgaa

SEQ ID NO: 352559 - DNA, 928 bp, Cannabis indica
gatgttaatgaaacatacttggtagtaaatctagatcctggtaaaatatttccaacatgtctatcatagtcggggccactgttttgtttgctatctgtacttccacgactaatggatggttatgcgggaagcaaagatggatagcctcttcttcagtgaaggttatagtgggttcccctacctgaggcatttttggcttcctttcttctacggccagaactacttccttttgttagtattgtaaagttcgggcatacctgtccggagctttgcccaaatctccagcaatatgtgggccctcgatgatgacttgtaaatgctcgtccactgatggaggcattagtaggtcttggttgttatttgcttgggcagcccgttaattctggtcggtcttgacatatatctgtacatgcgggttatttttccttatcagaaattcaatttcttgcttcaagttgttgcactcattaatgtcgtggccatagtctccatgaaaacggtaaaatttagacatgtcccgcttgcttatgtccattttcatgggagcaagttttttgtacgacactatagattgagttgccatctggattgtctccaggtcgttaattaagacagaaaaagcagtaaacttggaaggattttctctagggatttgttcggctttgcctgcgaacttccccttctttccattgtcttgtctgccgttgttattagatcgtttgctgctcatatttgaactgctagggtactgggggttttgagcaggcgctcctaccgagggggcctgtgattggcctgacttaggctcgacgtctgcccgttgaatgaccttttcaagcttaataaacccatctggtctgtctagaaaatctgccacagagtctacggggccacttttcttgatgtctttccacaattctccaagtac

SEQ ID NO: 352560 - DNA, 799 bp, Cannabis indica
gtgatatctagtctttgacagtgttagaattaatttttttttaagaattagcaattgatcttttttttcttacaattgggccggtttagaaatcgggttgggtctgagtcgccccgactcaagaaccctgatgggttgggacaggtcaaaacactaatggagcggggctgacccgccccatttgctatccctacagctaatggggttgaaactttgtctaattgtttgagttttctcaagtgattctctctctgtttttttttttgtataaagggatatgatttacctattatacaatgctcttttcttttttccttctttttaataatagttaggttttatagtgtttagttcgaagattattattaccatttgaaacgttacaatatgaatatgtgtgttaatactgaatcataccagattttgttctaataatctgaatagaaagatttggtttgaagggccagggctaaagaaagtttaatagttttctgattttggttcaataaaaaagatttctgtttcttactttctttcatgtaaatcccatttgtatgtatttgttcctacatatattttgtttaagtactgtactgtttttaagtttgggataattctatatcttgctgttgatgaagtgtttggtaacattgtgaaacttctctccaaataaaatctaatttatggtttttctaggcaattttaattgtaattattttcagtttgtaagatttggaacaaagaaaattgtatctatttcttttttttaattttgttattgtcaatcagtttgtagtct

SEQ ID NO: 352561 - DNA, 1180 bp, Cannabis indica
cagaagagagttttataatcaaggagaaaaccagggacttttaaaattgtccttagatctacttgaggaaaaatgaactgagtcgcaaatcaccaacgctgcataccaacaccgagtcagaagatacttcaagaaaagagtgaagaaaagactgtttaatgttggagtcttggtgttaatatgagtctttacaaatacaagatatgcatcagcaggagtgttcaacccgggagggtccatatgtcattgaagcagtagttagagtcgaagtctataaattgtctcggcctgatggctcgctaataaaaaactactggaacgtagaacatttgcgaccctactatcaataaataaatgatgtaactcccgttactgatgtaagccttaaacttaagttatgaatatagagaattatttatattaagtaattacaaagtttaattctttaaaattacttaagtggcatttatgtatgactaacaagaattcgtctagaaatacattgtataatgcaaacctgccatttcaaaaaaaaaaaattaaaattcaaaggttctcgacgaaacctctttgacgaaagtggagtcgaaccgttataacaacctaaccaaacctttttgacgacaaaagggttgaatcgttataacaccttgatcaaacctttttgacgaagaacggatcaaacaactataatttttgatttatcacctatccgacaggagtggaaaatcaaaagttataactcgcgtacaaaactaatactaacggttcttgagaactaggaaagtactaaatgaggcatcacaacaccttgatacagtacataaacctagaaaacggatagataatataactattcatgcgagcaaattaaaaatatacaatgagataaaatccttaaagtatatttaagtttgcttaaggcggattataactgcaactgcgaggcagaatggacaaccgcttgaaaatcataaagtttggtagaatattaactacttaaacaagaagattacgagcaatggaaaaacccaaaagtgttgtatattcgatcaaaatataattgtttacattatgaataataacgcaagcaaataaaatttaattaagtttgaataaaaatagtacaagacattttaagataagaaaaacctaagactggttacaaacttgtctttac

SEQ ID NO: 352562 - DNA, 1549 bp, Cannabis indica
ttcctattaaataaaaaaaatatttagagcaaatgtccctaataattttctttctaagttttgtaattttttttaaccaaaattattaatttttttctcactagagtctttttctcttcatttttaaataatttaacagaaatctgcaattcaaaaaatctataaggcggtgtttgcttagattaatgacacagaatagaatagaaataaaataatttttatttcattcctttggttgaattttaaagtatggaatgtcactctatttccaccatttcggtggaatgactcttctactttgaattagaaggaaagaccgttccaattgaagataaggaaaaatttaataatttttttattatttttaatgtattataaattttattctattttattctattccattcttattcttatttctattcatattcacattcttattcatattttatatttttatttctcctaacactactacaatgtgggcctttagaggctattttttaaccaaatttataaaaaggagagctagggtgtgaaaatacccgcctaatttgaaattgatattaagagatggttttttgataaaaaccgtaagtatagaaattaatatacttatgtcgtcgattgggagttgaaaattttcaactttttttattatagttatggcatcggttataagggaaataatcgacgccataggtacacacgtgtcaaataaccgtgcacctatggagttggttatttcctaataaccgacgcaatagattctatatattaccacttcgtctttctcacttcaaccatctttctcaaacacacgataatagcacaaccatagcagaacccatacccacaaaaaaccctcgctaatcaccgtgaaaatcccatcattctccctcatttcttcaccattttaccctatttttgttttaaaatcttctattttcaatacctaaacctatacagtaaaaaagtttagttttttccctctatcactataaccgaacctattaaaaaaaggtggtggtataactccggcaacagattttggtggaagaaacattgaatctcaacataccttaaggtgtaaatatgatttctattcattttattaatgttcattgctttatttttgtttttgtaaatttttttgggattttttcattttattaacattatgttgttgtgtgtgcatggtggccggatttttgtcgcaattggtcaccagattgcgtttataaggtatatttattaacttgatatataatatatatgtatatattttgtattttattgaatatgtgtttatatatattgtttatatattattaattgtgtaaattgtttaattatattgtatatactccaagtaatatatttatatgtatatatatttattgtgaatgagaatgaggtaggagggatttaattagtttagaaataatatttttaagattgtgctagtgtgatatatataattgattatatatgtatctatatgttatttttttcaaaaattaatctatataatttactaactagtaac

SEQ ID NO: 352563 - DNA, 683 bp, Cannabis indica
gtcacaatcgggtatttcgggccaaaccaggtttgagcccgaaatgcaatttgaattgaattgctggcattttaattattggtgtttaatctgaatttatggggtttattgctggaaattgatgcatgaaatatgtatttttgactccctaatatttgttagcaactttatttagtgatttgagagtttggatgtgaattaggatgaattgggtgtgttgtgttgctaaaatttgaaggtttgcatgctgatttctgggtttggaacctaggtgccgcagcatggcttttagcatgccgcggcccacccctttgagtggcacctgggaatcggtccccggtgccacggcatggcaattgcatgccgcggcccaccctcgagtttttgggcagatttgagttcaactttgaaaatgcataactttttgatccgaactccgttttgggagttctatatactgttggaaagctcattcctagctctatgtgattatgtgaattttgaataccatgtatatatattatgaatgtggaatcaggggttaaccctatttgtgtaaatctcggatttgtgactaggattaccggcacctggttaggagcacccaaggatttggaatctcttttatcgcgggacatcaggtaagacagtagttagtatgtagagttatgtgcagtggcact

SEQ ID NO: 352564 - DNA, 528 bp, Cannabis indica
ggaagggaagcccttcgtcgtatactatgcaagtagaactcttaatagtgctcaaatgaactattctactactgagaaagagttgcttgccgtagtattcgcacttgacaagtttcgttcctacctgatcggttcccctatcacggtcttcaccgaccactctgctcttaagtacctcctttccaaaaaggatgctaaggcacgcttaattaggtggatccttctgttacaggaatttgacttgaccatcaaggataagaaaggagttgaaaatgtggtagcggaccacctatctcgtttagagttttctgattccgctgatggccctgctatccgagatgacttccctgatgaacatctctacaccatcactaagttaccatggtacgctcatattgttaattactcaaaaattgatgtcgcccaattagttacactgcggtcgcgatagtaaacgggctatatgtcgtatccacagggaggaaaaatacactcaaaaggacaattagtaattttacaagaataaaa

SEQ ID NO: 352565 - DNA, 660 bp, Cannabis indica
tactcttaacataaccctttactacaaaaaatgagttgggttggtcgggttgaatagtttggcccatattttgtgcacccctacacgtgacaatttatttaatacttaacaacatgtacctataaaaattccagaattataatttatgtattattactgataaaaatgaaacttatatttttatttacaattaaaagttaaatataaatatttataccgcaaattattcaaaatattattactatcattttttttccttctctcaaaattttaattaaaacgaatttgaaaataattatcataaagcatcttttattttccccattcaaaattagattccttttcaatctaaccaactgttctagtaataaatgcagcactggtccaagcccagcccaagaaaaagcccagcccatcaaaatctaagcccaagatcatcaggattaaatctgaaccgtccaatcgagtattataagggcaaacctctttttccagcttctccctctttcgactctacttgctcccattgcctcagtcactttcagctcctggctctctggaaaactgcttttcttctccggttttccgattcgaccagatcgcgtcactccgtctcgatctgtcggttcgtattatcattctacgcactgttttcttttt

SEQ ID NO: 352566 - DNA, 575 bp, Cannabis indica
agggccttcacgctatactagcttccaggagtaacttgtactccgggtgtctcctccgggacccatgctaatagcgcttcctggtggcataaaaagacttagcaaatctttccaagttatctgatccacgtgtcccctcttgactggtccacgtattttgggcgaattttggagcaacatttagcaatttaacggtgtagaatcttgaaagataagtattattataagtcttttattcttagtaacgatcaccccaatagtgattgttaagagcatggcttacaaagtatgaaataatagtggaagctcataagataaaatggcattgactctcgcataaacgagacaacaccgaattcttatcttgattgaataaaaggttgttagaatggtagctattttagatgagctgactactctattcaatgaatgatatctttgactcgtctaaacgagatattgtatcaatttgttggaaatagaaaccttagaattatttaagatatgtttattttgtatttttacatatctttattacgtgttaaacgtataataatttatgaagtgtgtatgaa

SEQ ID NO: 352567 - DNA, 665 bp, Cannabis indica
tgaaactttaagtttgaaacctcagttggagttacttgcttctcaacttgggtatgaaggtatgttctcggtggatgcgcaaggtaggagtggtggtttagctatgttgtggaaagagcaatctgaagctgaggttagaggtttttctcagaaccatattgatttgattgttcatcataatgatttgtttgattggcggcttacgggtatctatggggaaccaaacgagctcttagaaggaacacttggaatcttatgcgaactttgaaagcagaatcgactcttccttggtgtattattggtgatctgaataatgttctgagtcaagttgataagcgtggtggaaatccgtatcctaattcgcttcttgaaggttttcaacaagcagttgccgattgtgatttagtggacttggagttatttggtcatccgttcacttgggagaagggtagggattctgataattttattgaggtccggttggatagagctcttgccagtttgggatggattgatttatttccaaattctcggttgattaatcttctgttcaccacgtctgatcactgccctttgcttcttgatccttcctttcgagttccttctcgttctagtaaagctttccgttttgagaatgcttggcttcgtgaagagaattgtttttc

SEQ ID NO: 352568 - DNA, 758 bp, Cannabis indica
tgatttgaatatgagctaaactttttgaggcttgaatggctatgaactcctatgtttggtatgattaattttaagcatattttagcatctttgccattgttcattcaagtaagcttgctgttattaattgttattttttttgccatgagtaacaatttactaagctagatctggttttggaaagcttagatttagtagttcaacttgaatgaaacaagtgaattcttagatttaggttttgcaatctggtttgatataggaatatattgatctaaatgatagaacttaatttgtgagttttgaaaaattctcataaacacaagaaaattctgttatctttgcgaaaatgctgaagtaatgttgtagtaactgggaatatcctgactaggggggattagttattcaagctactttttaatatattacatttcttgcaagcaattttctagcaacatcagcgttattttaggcaggtttaattacagtcattttaaatttgaatcattactcaaccattctcatatttttcccttttactttaagtttacatcatattctgtttgcaatccctgcggagacgatcttacttatcactttattacttgtatgactgcgtatacctgcgtataataattttcacaacaagtttttggtgtcgttgtagtgcctaacactcttatgaaagcctcacttaaggtgaaggaaaaccatggtaaacaaacaggaagcaaaaataaaaacgaaaaaaactgtaaaaa

SEQ ID NO: 352569 - DNA, 595 bp, Cannabis indica
tgtgagcattgtctgtcacaatttctttcggaattccatatctacagataatatttctccgaatgaaccccttaacttctttgtctttgtgattattatcctattgattattgttttattcacttttcttgttgggtctttgtgactcacgggtgctaaatggtgcagttaaagggaaggctaaggttgagcagccatgagtttgaagtcggagtagcaatgtacatatcagctgcgatgctacggcccagtggacaggatgtttcttttgattgtattttgaaatataaggtttatgttgtaaaagtattatggaaccaaatgtaagtattttgttataagggggaccctatagagattagtacctatggttgcgcattggtcagtttggtcggtgttttttctatataaaaatccaaaattcagtttttggtttggattggtgcaatccgaaaaccaaccgaccaatccagaatatatcttaaaactgaccgttttgaacctcggtttggtcagtttaaactgcccaaaccaaactttttttttcaaaaaaaaaaaatactaatttattctataaatacattattttacattt

SEQ ID NO: 352570 - DNA, 528 bp, Cannabis indica
atttttccccataagcctttgtccttttgtggacttaatatttggtcatattatgttttctgttatgttatgttggctgatattaatttaataaaattaaataagaggatgcatttacttctttttacaaaatcaaagaaaagcaaaaattcttttttctcaaactctctctctctttcggccctctttgagcagcaagaatcttggtcttttctttggtaattcaaactattttctcaagatttagtgatctctaattgttggtaagattcttatagccttcttttaagtttcttgatatcttttcaagaaaaatggatagttgcatgcttggtaatttgatgttgttgctgctgggtttatgggatgttatctgtagtttttatatgttcaaattgaatgaattaaagcaggtttgatgcatgttagttagatttaaccaagtttgagtttttgaactcaaagcttggtgctttaatggtgaattgagcttttgttgctgtagttgttgttattgtttaattatgt

SEQ ID NO: 352571 - DNA, 395 bp, Cannabis indica
gagaggaaatggtgagatgattttctatgatttttttttctattttctcaaaatgaattaaaggttaggaaaatcctttttccttgctgaatatagcttgctaggtgtcaactaaccaaaaagccacctatccataacttaaataaaatatccaaattgccctttgactcaaacttagggtatttctaaaacttagggtatttcatcattttccttaagccatcactacctatttataggaaaccacctagagttaggttagattatttggcattaaaataataaaaaataaatggtaaatttgctatagagtggccgaccatgaatggatatttggccccacgttgcaattttaccatttttctcatttccttcttattttctcaaaaatgcca

SEQ ID NO: 352572 - DNA, 580 bp, Cannabis indica
gaggagcccaagcggcctcggagggctgatactccggcccacggtcttgatggtggggtctctcccatggaagaacatactgcccctcccaacattgtgctgactccggttcctggagacgaggcgagacaggagctccggatagctaaacacaactacgccatggatgaatactcccgggggtatgctgaggtggaagcccttaggagggttctgcgggttgaggtgcaaaacaccatcaataacccggagtaccagaatccgtgggacctaaatttggaccccctatcggactggttcagtcgcctccttgggcccaccttagctccctttgctgcggagatgaccggcgagtttgcgtctcagcttacccggtgcgcgcctaagcggttcgctgcttgtgcatccttgaactccatcttccaagtccaggatctcagccactccctcactgtggtaagtgttttgtaattttgtttttccccttattcttttttggagattctttcttatacttgtattgtttttttttttcttttctttttagtctgtctgccgaagctggccgcctctccaagaa

SEQ ID NO: 352573 - DNA, 617 bp, Cannabis indica
gaaaaatatcattttttttctaaataagggcccaaaaataatttttaccctatagcccactacatttgagggccggccctgagcttacattagagattttaattcaaaatactattccaaacaaagaccattctcactgaaaagtaccacaattctttgacaatctatctcaacttcaatctcacggtagccaaatcgattgagtacacaattagagaccatggagaatggaaagagcttcaaccactggcggtgagatagtctcgaatgctagagtagcattcgaggccaaacatacaaccaaatggtcatggatcaccgcaccatagcccaaattggagcctgaacattagcaagaggacgagggacataagtaattcgagaagatcgtcttgttcgcctcttggaaattgtgggcaaaagaaagagcccaaccaagaactcctttcatgtcaagcattttgtagttctaaacccataaattacgacgaaaccaaatacaccacaagacccagcccaggggccctaattttttttttccctttttaaaaatataaattttttttaccaattttgaaaataccacatttttctaacataagggcccaaaatttttt

SEQ ID NO: 352574 - DNA, 1030 bp, Cannabis indica
atctaagaaaaataatagaaacaaaataacacaaggcttttacgtggttttgcagttaactctgcatagtccacgagtcaatcttattcagacattactgattcagaactagggttttgtgtaatcagtattctcatttttctctctaagagttttcgtcccttttttcgtataatctgcccctatttacagtgatataggttggtagttatttacatttaagttcaaactcataacaatattccccgaaattgtgggccttaattatgctccacgtaaataaatgtagttaacatttgaaaatcacatagctgtgatttaaaccgtttttaaggaagtcaacgctgacgctgattaggacacgctaccgaatgcatctcgttgaggtgtctcgcctagtacatgaacatcaaggtttattcacaagccttctaggaatggcatgagcaccagtgtactgagcaaacttaagaaccgctctttgaccataaggccttgcaggctggacaatcagccgttcaagttattacacttagttactatacatgtatattatacgttaagtgttttaataactgactcgcctcgccaatgcctttttatacataacaagatggatgtctctctatgcgttatatacgtcctccttgggattatgccttctgacgagaaatggtttctcgtcaatacttgaatcaattgttcatacattttgatctcgcttaagactgtgtagtcagcgagttataaatatactctattaattctacatttaatgagtaattccattttctatttaatgatataattgccattatatttgttgatccatattctctgagattgacatgtgtcaccttctgaagtaccagccgaattttgggtataactgtattaaccttaaacaagttcaatcattgcttgaacttgatcaatctcagaagttagtttactgagattcttggaacaccaaccaatgatggctgcattcttcttcatcatcatcatgttggagatattttaccaggat

SEQ ID NO: 352575 - DNA, 1380 bp, Cannabis indica
tatgtttataagttattcagaaatttgtttttaaaaaaatgaaactgtaaccaaatgtgacattatgtataaagactatgtttatattttatattgataatatttataaattattaatctaatatatttaatatatagttctataagaaaatatgtatttttattgtttatttatataagacttaagaaaaatttattatcttataaaaattgtatagaaaattaaaattatgtttatgtatttaatatagaatgtataattaaatgtaaataaattattttatattacataaaaaaataaaattatataatgtatacaaaattataaattttcttaaaaaaatatacactaaaaataaaatttgtttttaaaaatagaaaataacatattgatgttttatgatttttcagttttttttttttttttttaacttagttttaataaaattgattttaaaaaatttggccaaactctctaatttctaattatggcttgctgaatagctttgtttttagaagaaaaaaaaaacactaatcacacttgtttctctaagcaataaatgtttttttggccaaataccaaaataaataaataaaacttatttcagatttctttattttaaccactttatagtaatctcttcttctccaattcatctattgataattgtaagaccaagttaatctctgtactagtgttgattgctgtttaactatttctaagccttctcattgctgtttattcattctttgtttattttttagaaaactataaatataaggctttgtctctggcttagattacaatttactgagaccaagtttccctcccaccaaactatgttctcaactttctaattataatggttaattagaatttttgcatgaacacatgtaccaaatgatgcccctgaatttttaaagtcgttaaaaatgcctcatgaactattgagattgttagatttaaagatttttttttttaattttaataaaaaatctaacatatactaaaattccggaactataatttagtacattttaaaattcaatggacataatttggtaaatatcaaaatttgaagagtatagtttaatacataaacaatcgaaataataaaattgaatgacaatagacagaagtcttcaaatccaacaatctcaataattcatggaacatttttaacgaccttaaaagttcagggggcataatttaatacatgtcaaagttcagaggacaaaaatcttaattagccaattataatctcacactttcattcccatatacacaaaactttataatactaaaaaacaaaagcctctgtatttacatataataatcagtgactcaaggactaaatgatagaaaataatccaatattt

SEQ ID NO: 352576 - DNA, 519 bp, Cannabis indica
tacataaaatacggtctttttatgttaaaatttgttcatttgttgttaattttttgttatatgtatgttattttttgttgttattttgatgttattatcatgttacttttatgttgttttcttgttgattttatgttgttttcgtgttttttttggaaaaccgtaaaaatgtaaaaaaacattctttgaacgtaaaaatgtaaatattttacaaaaaataatacattatgtaattattccaataatatactgttaataacattacggatcaggtgactaagaaatttgggccatacaccctgcagcttcctctccaacgcgagtgttcgtgactgcgcgcagtctttttgggctgaacgtgcatcctcctagtagccacacccacaaatacgatttttgttaatttttccctagatttcgaattttttaaattttcaaactctactttcaaaataaaatattatttttaatatatttaaacttaaatatcaattttcaattaataatatttaattttta

SEQ ID NO: 352577 - DNA, 710 bp, Cannabis indica
ataagtacgaggtaaataagagacctacgcagctatcacctcccctattcaacaccttacactacctacatggaagaaataaggggaggtgagcaacttgacaaagctacaaacatattcaagtcaatggtactcaagggtaccttccaagtaaaatagagtgtgcaaggtcgatcaacgaccaagtactatcttaagtacacttactaagacatatagtaggtcctaagttgtatgattgacaataatggactcgctacctagctttatatagagtttccaagagaaaccacgcataaggtagagttgtatattcctccaatgtctttataagaccatagcagaagtcaaaagagggagaaaaactagctacccacgtggagccttagccttagccggctaaggttttaggtcctagtggccggctagaccccaagacccactctagtgataggccaggaaccctagttccaggcataggcgggccagtctagggacacaacccctatggctggccagaccccatgaaagccatctatggctggctaggcttcaaacaaagcctcattggctggccatgatctgtgtggattaaaacacgtttttttttcaagaactcaaacatcctctttgtgttcttggtgactcaaagagccaagaatcacaacaaaggttagattgagttctttttgtcaagaaatcacacatta

SEQ ID NO: 352578 - DNA, 755 bp, Cannabis indica
tttccaaaaataccccttagtaccccttttatgttattgtagtgtagaggggcaaaatggttattttgccccaattttattttgtccttttgtggacttattatttgttgtgaatatgatttatgttgtacctttttggctgaaataaagattagttttctacatttttatcatttattcaaaagttagaaaaaatcaagaaaaagctaagccatttcctctctccctctctttcggccacacttgaaccagctgagatttttgattcttcctcatcaattatgtattttgcttcaattcctagttcatatcaagctaaggtatctcttgtataacccctttctttagtttttcggaatttcgtgaaatagaacttttgcatgcttgatgagtttggtattgtggctgctgtgtatgtttgttattgttttcttgggcttgattatgtttagatgaatggtttagagcaggttgtggtgatccttagttgtgtttattcaaagtttagaattttggcacaaaactatgattttcaaagtgaaatgatgaaatctgttgctgtacttgttgtagatgtttgctgttgttttcagaggctataatatgcatgtttgggtagattcaagcaggtttggatgcatgttagtggggtttaaccaactttgagttttgaactcaaagcttggagctttaatggtggtttgtatatttttgcatgaagctcggttttattgctttggaaatgtttagtgggg

SEQ ID NO: 352579 - DNA, 794 bp, Cannabis indica
cttcccatccggtcgcccgggacttatacccctcctgggcaacgggtcccagagagacctcctcaagggtagccatgcgcttaccacttttctttgatgacttcgagccagaagcagacatttctctattctgtaaaaagagtaaatattccagcagttaggccccataccaaaccctaaaataagaaaaagggaatgggggtcccctaaccgctggaaagaggccccctccggacacgtgtcacacaggaaaccctagaaggattccctggacaagtgtcgggtgcagtaaattcacagaagacggctttacgcgataaagaaaacagaaagaaaagagtctgttctatgccctaagcaaccattatacgaagaacgtatggccttctacaaagaaaatacacaataacaacagaggcgtgacaatggcaatcctaccactagagcggtaaatttaaacagactacatgaaggatttaaacacttgcatgcccagaaatttcgaatgcaaacccagaaaagaacgaatagaacaagtaatacagtaatagagcaaaggatgcaaaaaacatacgatgaagtgttgaactgggggtcctgatgcaagtcgagtgaagacgagaaggactggtagcaacgagcaaagaagaactgggaaaatcgcaaagtgtttgaaggttttgttctaggtctgagaattttctctctaagaaattctagcaaagttggcaagaaatgggaagtaaccgaaatgaagaaaagatggtggcttttataggcaaaaatgcatgagg

SEQ ID NO: 352580 - DNA, 892 bp, Cannabis indica
gaaggtttgaatcgttaactttttctacttttttggttaaatgtattaatctaaggtattatctaacatatattttaataaatatcctttacagatttataaaaacataatataaactccactaaaggacaaagaatttatatggcaaaagctattttgcctcttacttaaccaaaaagcatccatgccacctaagggattttggtcaaatctaatacttcgaatattcccgatattcttcttactttgaatattcttgacactcccaatgtatatctaatttgtcccgctattactaaaatactaaaccataagaaaatgtgactatatcgcccaaacatcacgttccactattaccggacataaaatatgaaaagcatgaaattttatatataatataaataacacatctagaattcaaatatatcaccataaatttataaatcataattcaaagtaattccaaattaaaccctaattatcagctaattctcatattaaaattaagtgatctttacatatctaattttatgagaagaaaaaaaaactatgagagttacacttataagaattgtctggtcatagcaagaataaatgaatcaaaaggggatccaaacttgtaaaatgagtcataaattggaagagtaattttcgactcaaaaaaagtgaatcaatgtggattcaaaaattgtaagaagattacaagattggagaaacaattttgactcttaataaaatcaaagtggtgaacaaaattgatgagaatttgttaattttagtgtaatatttgggttaatctcattgaggagacaactatatataaaataataggtaaaaaaataatcatattattttataagtggtgatgtcagtttgatattttagttttgtt

SEQ ID NO: 352581 - DNA, 911 bp, Cannabis indica
tttagtcctgtggttaaacctgtcactattcgggtggttttgactctagccttgtctaatggttggcaaatcagacaactagatgtcaacaatgcgtttcttaatggtgaattacaagaggaggtttacatgactcagccacctggttttgaaatccctggccaagaacatcttgtatgcaaactcaataaggcaatatatggtcttaagcaagctcctagagcttggtttgacaagttacaacagagtttgacatcatttggatttatttcctcaaagtctgatcactccttgtttattaatcactcctctacatcaacaacacttgttcttgtgtatgttgatgatattttaataacaggaagtgaccaaactgttgttgatactcttgttgctgatctcaacaaacaattctctctcaaggatcttggctgccttcgatattttcttggtcttgaagttgagtacactgattcgggtattcatctttgtcaaaagaaatatgctcaggatttacttgttcgagctcaaatgtttggttccaagtcttcaccaactccaatgacaagtggccttcgtttgtctgctcatgaaggggaacctcttgctgatgttcaacaatatagatccattgttggtgcgttgcaatatctcaccattacacgaccggagttatcctttagtgtcaacaaagtgtgccaatttatgcaacgtcctttgtcgactcattggcaagctgtcaagcgcatattgaggtacatcagtggcacaatgcactttggtctcaccttttccaagcctgaatctcatgatctagttgcgttttgtgatgccgattgggcttcggatcctgatgacaggaaatccacttcgggttatgctatcttttttggttcgaatctcattgcttg

SEQ ID NO: 352582 - DNA, 576 bp, Cannabis indica
aacaatttgtttgtgtatttgttaaaaaatcaaagaagatataaaatagaattttaaccctccttaaattttaattaataattataagcatcaaatttattattgaggaaaattttggcggtagaccctttaacggaggcattctattcttcatgggtatccaatctagtactagtatccaaatccaataaaaagtggagagtatgcattgatttcaccaatctgaacaaagcatgtccaaaggactgctttcttctttctagaatcgatcagcttgtagatgccacagctggccatgaaatcttgaacttcatggacgcgtattcaggttacaattaaataaagatgcatccgccagaccaggagcacactagcttcataacaaacttaggcctatattgctacaaagtcatgcccttcggcctgaaaaatgtaggggccacgtattagaggctggtgaacatgatattcaaagatctcattggccgaaacatggaggtgtctatggatgacatgcttgtcaagtccaaaaaggctgggggcatgtggaggacctagacgaatgcttcaaaatcc

SEQ ID NO: 352583 - DNA, 547 bp, Cannabis indica
taatattaaatatgaatatataataaaacaatgacacactaaaaaaaaaaaactctacatatcatcctttttaatacatctacttgagtattattttaaatttttaactctttaattttatgaacaatttattaagagatattatatgataataatacctaatcattgttaatgtttatttatatacaaccatttttataagagatattgaaatatttatatccatactggacccactaccaactagaaattgaaaggattgttttgtgattatatattaaataattaacaacttttctctctaaatttttaacactatttgatcttgcctcttaaaatatacaacttattaaaatatttctctaagatataacagttatataatcacgcctattttgttaaattctgttactttaatcgttaaaaattaatatatttacctcttaatttttaaccgatttcaaaattttaattttctattaattttagaaaaaagtaaaaaaaaaaaaaatctaataaaagtgttaaattatttctaaaaaagtat

SEQ ID NO: 352584 - DNA, 503 bp, Cannabis indica
gtagttaaatgcacaaatatatgtcaaaatatattcttcttcttctttaattatggtgggtcattttaataaagtgattacaaaaccatacacatcacatatttcctttttttttttttttgaaatttacacatcacatattcttgtatatgaatatttaatgtaattttagtaatcatctcataatgaagatgtttgtgcagaagctgtagccgagggagaccattcttgtttaattaattggcactgtttgagaattattccaaatttaatatgcacaataaaaaagagataataataaaaacaaaaaaattacaaaaatatgtttcgtactgaattttcaatatttttatggttttctaaattttatttacataaaatacgattttatgttgtgctattgttattttgttgttgatgttttgttatttgtacattgtctttttatgttgttttgttgttgttttgtgttacattcatgtgttttttttttattattttta

SEQ ID NO: 352585 - DNA, 1521 bp, Cannabis indica
actagtcttgccttaaacttcttaggatctgcctctgtaagtccttccttgtgtttgaaaagccacttgcatgaaactatgctctttcccttaggtttcttcactagtatccaggttctgttctttctcagagattccatctctgtgtccattgccttggaccatttcttggcatctttatcagtcatagcttcctcataggtcttaggttctgtcatttccactcccatagcacaaaagaatgcataggctagcacttcttcccaagctgtgaagctgaatctctgtgtaggtctaggaacccttctagttctgtctctggtcagttggtaatcttgtattgcctcattttcttgtccatcttcagtaataggttccacctgaatgttgtcatcctgaacttggtcatttccttccaagttttcatctccctgagtattttccacctgttctggttccacctgaacagtattaggttgagtgttccttgtttgcatgtccacagatgtgcctgcagggttagtgtctaaagtaggactagatatagcattattattagtaatacaaggaaataagtcttccttaaaaacaacatccctactgtttatagctttaaaaccttgtttctctcttacccataatctgtagcctttagtaccttcaggatagcctaggaacacacattttagagctctaggctctaacttaccaacactctgatgtgcataggctgcacatccaaatactcttaagtttgagagatcaggaggcttacctgaccagatctcctctggtgtcttgaattcaatggcactggatggacttctgttcaccaggtaggctgctgttaacacagcttctccccaaaatcctttagtaagtccagattgcaataataggcatctgaccttgttcatcaaggtcctattcatcctctcagctaccccattctgttgaggagtaattctcacagttctgtgcctttgaattccaacagagccacaatacctgttaaattcatcactgcaaaactctaagccattgtcagtccttagggttttaaccctttgattagttaaattttccattgtatgaatttagataaagcctcatttttatgtttaagtaaaaatacccaaaattttctagaatggtcatctacaatagacataaaatacacattaccaccatgtgttggagttttctctggtccccaaagatcagagtgaacatactccaaaatgtgctaagttttatgaacacctgttttaaactttagtctacgatgtttacctaaaacacaagattcacagaaatcaactttgcttactctgtccttacccagtagcctttgatcactcatgatatgtaggcctttctcactgatatgccccaacctcctatgccatagtatagcctttaagtcttctggattgctagtgactgcattgttacattgagtcactggttctccatctaaatagtaaagtccttcatgtttgtgccctttaataatagtca

SEQ ID NO: 352586 - DNA, 424 bp, Cannabis indica
tgaataactgctaatttccaaattaaactaagcggtctttacatattaagtgagtgaccagaaaaaaaaaagtggtgagtgattaaattcatggcctacatataatatgctatataaagataaaacaaaacagtaatcaatggaaagcatattagtatcgcaaacagtaatcaatgctatatatctgtatcgcaaattggtatcgtaccgagagtgcaatcaaaatgctactatctaaattgattaaccaacatatgggagtggattttgtcccgttatgccaaaatagggaatacaatccctgattgtactgtagccgttggattgaattggggcatgatctaatggctggggttaaagtaagggtatttagtgggggaaaatggtaaccgattggttttttttttaattttaattaattaat

SEQ ID NO: 352587 - DNA, 669 bp, Cannabis indica
aatcttatttagatttctgagtacttttgcagggcctcttgtgtaagagtttttcttttcatcccccttctttgatcttgtctgccactatttataattgcatagtggcagttaattacaaagctagccaaaatgtgtttacagccattatccctaaaattgtgggatttgattacaaatcaagctaaataaattaggtttttacacagctgtgaatatgccgcttttattgggccgagatgaacgtataattaaagatatatggtaagccttatctcatagggatgtctcgccaagaagggaaacaagatcactttgatagcgagcagttacttgtcattttagcttctcgagaataatattatcttaattctgataactatacttctctggcatcgagaggatcttcctcgtatgcataccatcttcttacgagaaaaacacctcgctgtctgatatcttggcttgtcaaactacttacacttagtttgtatatcgtataatatacgcaaagtatttttagtgttgtcgctttctctttcacgcagcaagattgaggcctcgtcatgaacatgtgcacccacatggtttctcgtcaatacataagatagcagtctgtatgtttctgtctcgcagaagactattcagccaaccgagttataaacatac

SEQ ID NO: 352588 - DNA, 789 bp, Cannabis indica
agaaggataccaaccattgaggataaaggatgatcaaagcctgcatttctacatacaactaaaactgaaggaccccgacttcacaacatacccattgtgtgtgaatgtcatcaacaacccaacaacaaccatcaatccatcattcttgatattatcaataacagaaaaattgctagtgcaaacacatttggatctgtaataatcagagggactaatttgtaatcccagacctgcaagttaacaaacatggcaacaataaatataaattgcaaataaacaagtatataaactataataaaactataaaaaaaactaaaaacaaactgacaaacagaaacaactctacgaatataaactacaaacatctaaaatcgaattgttacctaaaaaagaatagcaaacaactatacctaataatattcccaaaatacatcatacataaacagattattaaactattaaaaaactaggagaaaactaaaacccactgattagagacactaaaatgaaacagatgtttcaaaatatctaaaaaaactagaaatacaaacagaacataaaacacaacaaaaattaaacgaaagaaataagaaacaaactaaaatgcgaaacccacaaaagaacaaaataaaattgatcaaacaaaattaaagccctaaaaatccaaagaaaaacaaacgaaaatttaaaatgaaaactctaaattgtcacaaaccagaaaaaaccaaaatgattttttatatttttatttgttttttaaaatttagtaatttttactcattatactac

SEQ ID NO: 352589 - DNA, 589 bp, Cannabis indica
aatgtacatgtccgggccatatcagaccaagcgggttgagggtctaccagtgttgtgtttttgagactctgttttggcgcttaggccggctgaaagaaaagtacttgtaataatattttgtaaatatttttgggataccaacttctataacttttagtttataaagtttaaagtattacaagtttattttcgttcctattgttattaaagtttaaattcagcgctaattttattagtaatcccgttttggggattagggtttcgtaagtatcttgggtagcatacctaattatttagggcgttacacggtcaatggtcttgcttggaaagactttgatgcaaaacatcctgcgtttgcaagcgacccaagaaatgttcgactagggttagctgttgatggatttaatccatttggcaacatgagtcttgcatacagtatatggctagtgattttggctaattgtaatctaccaccttggttatgtaaaagataattattttttccatccgtccttattcctggtgcaaaatctccaggtaaagacatggatgtatttttaagaccgttggtggatgaattaaaggagtt

SEQ ID NO: 352590 - DNA, 1242 bp, Cannabis indica
tttcaccgccaatttttgaggttgaggactaatcggcatcaacctcaagtttttggggacttttgccgcaattatcccttattattattattattattattattgctttttcataaaaaaatcaagatccttcattttttttttgaatgaaaataatttttattagctggaaacatccgcgaacacaatgggctaaagaacaataggaacatcaccctcagtaaaacgacgacctgaccaataacaagcaccacgtgccatacagtgcgcaactttgttagcagaccgtttaacatgaccaatagaaacattacttaaagaagataaaataaattgacaatcatgaacaaataaaccaaaaatagaaggcatagaaaccgaactaagaatagcttgaacaagtaaaaagaaatccgtctctaaaatgacatttgacttgttattcttctttatccaactaagtgcctctttgacacttagaatttctgcaattttaggtcggcaactgatagaagaaatagttgaaaacgcctcaattaattggccatcacagccatgtgcaataaaccagtcccgacctcatttgtgtcttcaaagaccgccccatccacattaatttttaattgtccaacaaccagtttggacaagtgttctcttgtgtcagaacgattagaagccagggaaaccgagtccagcctcttagcctgagcacacgtccattgtcgaagagtggtacgagccaaccaaacaacatcagcagcactacaacttttaccattccaaagcatatcattctgggccttccaaattgcccaaccaaccatgacagcttcttcaaccaaatccatattgcctactgccaacacttccataaaccagtcaagaaaattggttgctgcagactggccaacacctaacgctaatcagatccaacaagaatgagcaaaggagcattgaacaaacacatgaaaaattgactcttccctatagttgcacaacacacaatgtaaatccacaggaacatgtttactatgaagttgagtacgtgtaggcaaacatcccgaaagagctttcctagcaaaatgtaaaaccttaggagggactttaatcttccacaacatcttccaaacatcctcctccatggatgagttccaactaccattgaccgactgtaattgagcataggcacttttgacagtgaaaaaaccagttggatccttattccaaaaccaactgtcactc

SEQ ID NO: 352591 - DNA, 788 bp, Cannabis indica
aagggtagaacggtaaatttttccctactcgatgtaaatcatcaatagaggataattgattatttagattgaaacaatggataattcatagcgtatctatacttagtatagagcgttctatataatcaagagtgtaatttcaaatttatagtggagtcaggaggaattaataagatagagaatttacttggtaaattctaaaactacttattgggagcttaattatataaactcatggtctctgtactagttgagataatattgtcttgtagactcagttaattgattttaattaatcaattagaattctaaattatactatattttatttatgaattttcactaagcaagtgcttaattaaggaaaaaaaagagattgtagagtttgcttattaattaagagaccttgaaaggtctaattaataaataggttaaatgacaattttatttgataattaattataattattaaatagatcaaattgacatttatggagatagaattaaaatatggtattagagaaaagaaagacaagtttttaataaaatgacaaaattgaaatctaagaggccctaagacatttcggccatagggtttaaatcaaagaaaatttacatcccatactgtttttttattttattttatttatactgttgcacggtaattgtttctttttttttactgtgtttaatatttttttttgaatttcggacaacaagtcacgtgaatactcatatccccaaaatatataagcataaaaattcaaatttgtgatttcattattcgt

SEQ ID NO: 352592 - DNA, 584 bp, Cannabis indica
tccaagagactttttccattcagagaagtgctttgaatagtgcttaagtttctcagctaagttgactatgggatcatttgtattgctttgatggttggaactccaagcctgtgtaagacaatcttcaaagttcggttcagccagccataatttatcaaagaaaaaccgattgttgtgtctttgggttgattgtaattgatggaggttcaagattaaaggacgatggtcagatccaaaatattcttcgtgaagaagaaaatgttttggaaatagagaatcccattcagtattagatatcacccaatcaatgtgctcttgggtatgagattgttggccttgtttatttgtccaggtgaaggggtaaccatgaaattggatatcgtggagagtgaacgaatcaataaagttgcgaaattgggtagaaggagcatgagaagtcgtccccccccccaatttcgtcattcgagtttaaataatcattgaagtctcccattatcaaccaaggagagttatggatagtggatccaactctgtggagaactttccaagaatggattttattttgacaattcggtgccccataa

SEQ ID NO: 352593 - DNA, 596 bp, Cannabis indica
aagaatacatcatttacctattttctctctttttatcttttctattttttctttctctctcttttatctttaactttaaaaagaatttctaacaatgtgcttactagattgaacctaaaaatattattttataggcatacataatgatagattgtgtttgaaaaaatgaattgttattccaatatatgaaaaatagactaatagatttattggtgtatatcattatgtttgattatagcttactctgtattgaaaaatataaattattgttctaacacatagaaactagtaggtttattggcatatataatagtagcctatatgaaataagatgaattgttgttccaatatacgaaaggaaaaataaaattttgttttaatatgtcagaataaactaatagatttattagcatatacgatagtataggctatacaaaaaggctatcatgtaaacaatgggtaaatttttagttgaatatgctaaaataaactaattcgtttattttgcatgtatgagtttaggcatagtatagccatatatgccaaataaccatatgaacaagacattttatgtgagcaagacatctcatcatatt

SEQ ID NO: 352594 - DNA, 762 bp, Cannabis indica
tgtttccttttttctctttaattgtagtttctatttctctttgttatatttgctgcatattgtatgcttaaatcaactctgatttttgagcaaacagataaaaaaattaaatatcaaaatagaaaatgaagttagaagtttgattattaggtattgatataaaatttatatgttcgaatctggttttcaaattttagtgccatttataaaaatttagttatcagacattgtgtattttttattatgttgttgatgaaactattttttttttgtctcttttaataaaataattagtttcttttaatattgatgaaactgattaataaagttagtatcgtttttaaattataattttttttattattttattgacgaaactatttttttttattattttaatgaaattattagtttcttttaatgttgataaaactagttcctaaagtttgtattatttttaaattacaattttttgtattatttttttaagatgatattgataaaactgattttttttttactacttttaatgaaataattagtttctaacgaaaaaaataaacaatagtttaaaaaaaaaaagctttaattttttaaaaaaaacaataataaatttttatttattttaatgtttcattttttaaaaagaaaaaaaagaaaaaaaaaacaaacaaatttaataatttttaacggtcatttctttttattaaatagatttttttattatatattttaagtttttttactttaaaaaaataacct

SEQ ID NO: 352595 - DNA, 883 bp, Cannabis indica
taggatgttaatgaaacatacatggtagtaaatctagatcctggtaaaatatttccaacaatgacctcctggtcattactgcacaaatcaggaacatgacagttgtagggtgcatggtggacaacgaagcatcctccaacattctttttagatcaacatatgaaaatatggggctcctgctgactgacttggcaccctgcacacaagtaatgtacgacttttttggacaaggcattgcacccatggggtagatccatctacaatctttgcctgaagttcccaacaacacatggggtaggatgtttacggggagaccaatagttttcctgtcacaattacaacttggccttgtccaaagccaagaaagagaagatgcccaccaagagcagctgataaagagcccagcaaaaggcaatgaagtccagcccaaagcggggaggcagacatagatcctcactttgaggaacctgtagaaaactttagacctatagaagaactggaagaagtggagattgatcgcacttttctagcgagaagattgaagatagggaagggtttagcactggaaataaaataagtactgataaaatttgtaagagaaaacttggacctcttctcatggtcacatggagacatggtcggaatagacctctctctgatgacccatgctctcaacattgatccaaacttctgacatgtacaatagaaaaggaggttgctagacaaagaacgcgcccaagctctaagagatgaagtcaaaaggatgagggcccatgactttatcactgaagcattctatccactttaggtatctaaccctgtgttggtcgcccatgttgagatttttatgccctaaataaaattcatttcaatataatcaaat

SEQ ID NO: 352596 - DNA, 891 bp, Cannabis indica
tttgagaaaagggtatgtcaatcttagtttctttatttttttggtatttaaattgtgaaactgtgattttaagcgattttaatgcgatatgtatgcgatttctgcatgtttctgttttcaatctgttttcatatacgatgttatgcgatgttttggcgacttttgtgcgatttataatgttagtgttagaacagttattttatgcgatgttatgcgagttttatgcgatatgtgtgcgatttgtccttgttgctattctgatatttttggcgatatgtatgcgattttgtgcgagttatgtgcgattatcggtacttgttaatttgtcagtgtctgcgattttatgcgatttatttgcgattactgtgcgattttgaatgttaaatgtttatttggctttctttcagatggttgtgcttcaaattttgtatcctcggaattgggaggtcgactactggaaggaaaattgtgagggtgaggtccccacagtggaaatggggttggatgaggtcgaagaaacacaagtcggggcgcaagattcgaccgcattcgagacccaagcccaacgggtggcagaatatgttaaaaggtccaaaattattccaccatccccacccaaggaaacagcagacgcctccacatctgccactgtgcccccagcatctgccactgtgcccccaagctctgctccacccaatgactccgactacctcttgttggctaagagattggagaaggtagaagcgcaacaacttgcgattctcactgcccagactgagatgaaggctgacttcaagagaagtcagaaagagtgaagaatcttatcatagatcaaattgcgaccgtgataagtttgttacagaagcagccttcggagccgacacaaccatc

SEQ ID NO: 352597 - DNA, 510 bp, Cannabis indica
ctacaattaatttactttgaattaaatggtttttgaaaggaaaaggattgatttatctggttctctctctctctcacccgaaccctccctttctcttaccctcttagttttcaaagtttgatttgtgagaaatggcttgaattaagagtgttggttggagaatttgtggtgttgaaggttggattaaagcttgtgcaaggaattaaggtagtttcttgctgaattaattgaaaataaatgttgaattcttgttgaaattttagagtaaaaagcatgttcttgagttttgaatattcttgttgcatggtgaatgaattggtgttaatcttgtgaaattgagcttctatttattatttgatttgttgttgagcttgagcagagactgtatggtatttttaggttggaatttcatgttcaaagtaatgttttcatggctggaaaactgttagaatagttgaagagaaagctcttgttcttgagcttgagttttgcttagtttaagcatgattt

SEQ ID NO: 352598 - DNA, 1680 bp, Cannabis indica
cctttttttactttttttttttttttttatgaatagcatctttaacttagaagaaataagttgtaatgactccgttataagctttcattgaagtttacacttacaaaatgatgactcttatatacgagtatgtcactttgactgctttataaaataatgactggccctacaaaccaatacgagtgtttccagcgtgctttgtccttattcgcacacttcctgagaaaactttctaagagatcacctatcttgaaattatcacaggtcaagcacgtttaaccgtggaggtatttcgtgatgggctaccgaaaaacaaaatgcaccttattgatatacgtagtaccaatcgatccatttaagccatatttaactatctcatacctacacagtttcagaaatcatcacacatgagcttccccaagagatgtgggattgcacaactcccggtcttttcccttcgaatcacgggactgactgtcacaatcaccccctctttaagggtttgacatcctcgtcgatcacacttttagttggttcaaggctctaataccatttgtaacgtccccgcttcaagcctccattgggcccttacacccaggaatgatgactcttacacacgagtacgtcactttggcaacttcatagaatgatgactgaccctacaaaccaacacgagtgtttccagcatgctttgtcctcacttgcacacttcttgggaacatgatagcacaattgagtgagagcgctaatcatagatacaggaagagcttggcttaatagagataaatggaagagctcttatttcagtaattatattagtttaccaaaatattatttatcgaaagctaaatattttaaggataaagtacgttgaggggtggaacgataaatttgtccctactttatgtaaatcatctatagataatttttgattatttggattagaacaatggataattcatagcgtatctatattgtagaatatatagagcgttctatataattaagagtacaattctgaatctatagtggcgcaaggaggaattactaagttagaaaatttacttggtaagttctagatctacttattagaagcttggttatataggcacatggttctcacactagttgagataatactacttgtaagactcagtgaattggttttaattaatcaattataattttaaaattagactatctcttatttatgaattttcactaagcaatgacttaattgtaaagaaaagagattttaaggtttatttgttaattgagagactttattaagtttaattaataaataaataaataaattaaatgataattttatttgataattaattataattattaaataaatagttttgaaatttaaaggattgaagttagaaaatatggcatttgtgaaagaaaggattaagtgttgaataaaatggtaaaattctactttagtggggcccatcttatgcccgaccacttaagagtaattttagccaatttttatcaattttttaatgccatataatttaaatctaaccctaggagaaatcctatataaggaataagatggttctcattctcatccaaccaaagtcattctagttttcattctttgtcagacaactagagacttgagaacctccttctatagaattcaaatgtaaagaccgcttagtt

SEQ ID NO: 352599 - DNA, 1288 bp, Cannabis indica
agctgatcgtgaactaggtcctcggggaataccaatgaaagtattcagagaaagttcagaagaacttggaaaggttcgattactttaaaatcgaacaaattctgagagaacaaaactctaacgccgatgccttagcaaaactggccttgcagaacgacctggatcaactgaatctcattccggtagagatgctgagcgagccaaatatatgtgaaactgaagacgtcgagatgatagatagctctccaacatggatgatgcctattatcaattatctacactacatgtaacttccagatgacaaaaatgaggcgcgaaaactattgtattcagtgcctcgctacacaaagatcgaaggcaaactatatagaagagggtattcgatgcccctacttcggtgtgttcttcctacagaagcaaatgaaatcatcaaagaaattcatgagggcttctatggggatcatgcgggttggcaaagtctgtctaaaaagatcattagacaaggatattactggccaacgatcaataaggacacacatgagattgtcaagaaatatgataagtaatatacctcgcgtactgccaacagaacttaaaatgatgacttcaccctacccattcgctatatggggaattgacctaattggggcattacccactgggcgaggaggagctaagtatgcagtactagcagtcgacttcttcactaaatggacggaggccgagcccctcgtttccataacctgcatgaaagtccttgactttgttgtcaagaacattctctgcaggtttggaatccccataaagatagtatctaataatggaacccaattttttggcgacttattcactgaattctgcgagaggaacaaaattatcaaaagcttctcgtcagtatccaagcctcagccaaatggacaagtggaagctgttaataaatcctaaaggataatataaagaagaagctagacgtttccaaagggagatgggttgatgagctacctcaagtactctgggcccacagaactatcaagaaaacagccacgggacacttggtgctaagacgaatctttgcaaatacgagagatgcatcagcaggagtgttcaacctgaactgggagggtccatatgtaattgaagcagtaattggagttagagtctataaattggctcgacttgatggctcgctaataaagaactactggaacgtagaacatttgcgaccctactaccaataaataaatgatgtaactcgcattactgatgtaaactttaaacttcagttatg

SEQ ID NO: 352600 - DNA, 680 bp, Cannabis indica
gtaacagggacttcaagaatatcctgtataacagactcatcaaaatgatttctcagattgcctatatcccaatacccagagtcagaaataaaaattaaaaaaaaaagcttaggcaaaataggcaagtgaccatctttataagaaatatatttattattgggaagccaatgatcctcaatggttagaatgttgtccccatccccaatcttccaaataagactcgaagccatcaaatatcttccccaaaggatactcctccaagcaaaagatgggttatgaccagggacaacctctaaaatagatgagtttagaaaatattgagctttaagcacttgaaacaacaaggagttagggtgtttaaaaattttccaagcttgttttgctagcatagcctgattaaaatgtattaaagaacgaaaacccaaccctcctagacatttagattgagaaacttttttccaagatttccaatgaattttcttggtgttaccagaagatccccaccagaatctagcccttgcagcttcaattcctttacataatttgactggaagcctaaaacaagccattgcatatgcaggaatggcctgaataacaaccttaagaagtatctctttaccagccttggaaaaccatttactagaccaattagtaagcacagaaagaactttgtccttaag

SEQ ID NO: 352601 - DNA, 616 bp, Cannabis indica
atgtgttcggctttcatctttcgggtaattttaggccagcgatcaaagcttcataatctgctaagttattagatgccttgaatccaaacttgactgcagcatgcaggtgttgccaccaggtgtgacaagggcgattcgtgcaccagatagttgatctgtagccgacccgtccacatatagtttccaagtcgacttgtcttcactgttacttggctgaggtgttagtactggctcggggttgccttccgatatgctttcttctttgcatgtacattataccacaaagtctgttagggcctggcctttgattgctattcgaggttggaaggtaatttcctattgacccagctcgactgcccacttgagtaattgtccagaagcgtccggcttttgcaatatttggcgtaatggttggtcagtgtatacccgaacaggatgagcttgaaaatagggccttaactttcttgttgctagaatcaggcagtaagcgagtttctttatcaacaggtaccggccttcggcctcaatgagtcttttactaatgtaatagaacgggtattgtatgttgtttttgttggaaattattttaccaagatcttagatctactcacaagta

SEQ ID NO: 352602 - DNA, 611 bp, Cannabis indica
cacttgctttgcttgactagcaagtatgtatgggtcatctttataccatacaccactgacattaatactagtgataaggttctcgaccgattattttcttccgtcttgaatttgtattgtaccccttgcacttaaataatgtgacagagtaaacaccagtgaaggttaactttagcactttagtgagtgtgccgtaatattaaaaccttctgtttcctgccacaaacaactccactattttgtgtgctcctcttctcatctcgttttgtagccataaatcgaactccattcacaatacatccttcatagtaagtacctaggtgatcagacccggatgctaaagctagcaactctttgccattctctaatgatctagacttgtgcaagtcatacatctataaaaataattacctcattagaaaatgacaaacaccacttaagataataaacctttactacacatatatattcaccttcttgtaaaactacagacaaaaatgttttttgtgtagaacattatgatctccatttgggtaattttgtcggatcacttccaagggttcactgtaacatcaaatagatttgaactgattgattgaaatttaaggtga

SEQ ID NO: 352603 - DNA, 539 bp, Cannabis indica
ttttttctttctttttttatttttcttttctttctttttctctctctctctctgtaactccttcatctctttctctatctcaccaccaccattactcctcttcaaaaatatcatcaccaccaccaccatcatccaccacagatgcccaccaccatccaaagccaccgaaaccaccacccaccatctctaaaatcaccaccacctactggtgccaaaaccaccaccactgcctattttcaaatccaaatcacaaaaaaaaaaaaaaaaacaaaacaaaaacaaaacaccacctcgatatacacaaaacaaaccaatttaaacaaatccaaatccaacaaataaacaaacacacatttatatacacaaaatttcagtccaaaaacacaaaccttaaaaccctaaatttatttctccacaaccattatctttctacagatctgaaaaataaaaatcacaataatacccaagacatttatacacagatctgcaaagaaaaattaatgaaaaaccctaaatgagagagagaggtatcggtgatc

SEQ ID NO: 352604 - DNA, 533 bp, Cannabis indica
acacacacagctcaaatgaattcgtgtcccggatttcttttttcaagaacttacggatacctgccggtagtaaacgttgtaacaacacatgacaatcatgtgatttgagcccggaaatcttgcccgtatccaaattgacatttttgtctaagtttgctgcaaaaccgtcaggaaatcgtacagactttatgaagtctgcaaattcaatccgttcttgaacactaagtgtgtaactagctggaggcttcttccacttcccattccggtcttcatacaaccacaactctcgtcgtatttgcaagtcttgcaaatccattctcgccttgtcggtatcctttgacttcccgtcgatacttagaagagtacctactaagctatcacacacatttttctcaatgtgcattacatcaagattatgtcgtaaggactttgacttccagtactcaagctcaaaaaaaatactttttttagaccaattgagctcttcactagaacgcttccgtttcacacccccgaactgtttgttgttttcc

SEQ ID NO: 352605 - DNA, 563 bp, Cannabis indica
tttttgaatcaaaaattacgaagaaaacaagtttggtgcacaggggtatgcattgcatacccctgcgcgcgcggaatggcccatctgaccaagcatcaaggctgcatgcagcctacttgaccgaggcacatgggcgggacaggggcaagcttcggacatgcttgttgtctgaagcggttttgtccgagcgagccacacttgtgcccatgcgcaagcgtgtgtgcattcaaaacccaatattttcattcaaattcgaaaaatcataactaattcataaaaaatccaaattaggttctgtaaaagcctaaatttattaattttttatctactttctagtaaaaataattccatatcgaaataagaaatttgtcagtaacatacattgcgaattctaaactatcatcacataagcacataaaccacacgaacccatccaaatcaatacaaatcatcgttttaattcatatttcatgaaattaaatcattaccatggctctaaggccaacttttggaaatattttaccaggatctagatttgctaacaagtatgtttcattaacatc

SEQ ID NO: 352606 - DNA, 535 bp, Cannabis indica
atcgggcacaccatcggacgggcatcgggcacaccatcggacccgaccttcaaacccagattgagctaaattccacgtcagttgattctttagtcggtcggggctgcgtggacagttggggcggtcggctgtgggtgatgtggtggatcgccgatggtggttcggtcgagatgggtatggatgggcgtgggttggtttttggcgtgggtggtgctcgccgtgcgtgggtggttcgacgaggaggagagggatgacgtgggtgtggttgttcgacgaagaagagaaggatggccttggatgggcgtcggtggggtggttcgacgaagaagaaagggatggctggtatgggttttggatccctgagaaatttgagagaaaaaagaggaagagagagggacggttgggaaaaatgggagggatattttggggtttaggaaaaagttatccaatttaaaaaattatgcatagtattagtttagggaaccaatttatgggtttattaagcatgaaatttaaatttccctttatattttaa

SEQ ID NO: 352607 - DNA, 702 bp, Cannabis indica
tttaagttatgattccaagtccaagtccttgttgcagtctcggtcaacttccagttttttttccagttttgggtcacagcttacgggtttcgggtccacttttatgttcgggattgagttcaagtcctggtctgagtttgggtttcgctccaaatttcagtctaggtccacatcagcctccgggtgtgggttcacatcgggggtcttggtctaggttgggtcctagtccatggttccaatttcgatctgagtctggagtcagctttgggtctatttccttggttctgatccttgtctgggttcgactttgtgtcgaggtccgggtctagctttgggtttgattctaggtgtgggtttgagttcgggtccgagtctgtgtttcggtttgtgtccatgtctggacaccgatctgggtgtaggttcgggtccaggtccatattcaggtcccgagtgctggtccaagtttggatctaggtgaggatctccgtcaagatctaggtccagcatttcaatcccagtcttgttctttgtgcgagtccaggtacgtatctgaatccctatctaggtccaagtctgtgttttgatcgggtcccaaatttaggtccaggtccgggtctcagttccggtctggatacacgaccgtgtccgggcccgagttccaatctcagtttgggtttgaggctaggtctgtgttcggttcta

SEQ ID NO: 352608 - DNA, 1021 bp, Cannabis indica
attcttgggagaccattcttggcaactggccaagctttgatcgatgttcagaaaggtgaattaaacctgcgagtccaaggagaagaagtggtttttaatgtgttaaaggcgatgacttacccgaaggcaagtgataactgttactttgttgatctgattgatacaattgtgagcgagaaaaagttggtagatgatcctctagaactgagtttaattgaagatgatctgacggagcaagagggaaaagaagtaatgggttatgttaaatggcttgattcctatgggccattaaacaggaagtattatgaagagttggatgtagtaccaagagagcttgcgccatctactgaaaaacctccagagcttgagttgaaggtgcttcctagtcacttgcggtatgagttcttgggagaagataagaagctgccagttatagtgtcagcctcactttctgatttggaaactgatagattgctcagagtactacgggcgcacaacaaggctattgcatggacactgggtgatttcaagggaatcagtccctcaactatgatgcatcaaattctgatggaagaaaatgctaaaccaacaattgagctcaacgcagactcaatccacctatgaaggaagttgtcagaaaggaagttgtcaagtggttggatgctggagtgacttacccaatctcagatgggttagtccggtacaagtagttccaaagaaaggggggtgacagtgatcaagaatgagaagaatgagttgattcccacaagaatagtcactggttggaggatttgtattgattatagaaaactcaacaaagtaacccgcaaagatcactttcccttacccttcattgatcagatgctagacagattggcggtgcaagagtattactgttttcttgatggctactctggataccaccaaatagccattgcacctgagatcaagaaaagaactactttcacatgtccctacggtacttttgctttttgaagaatgccattcggattgtgcaacg

SEQ ID NO: 352609 - DNA, 886 bp, Cannabis indica
gtatagggcggcttataggtcattgtggcttggaaatgcgtgaggaataggtcgacaaaggtctcccatgtcgagatagaagcctcgggcaattggctgaaccaatcgtgggcgttctcttccaatgttgccgcaagaatgcgacattttgcaagctgagttgcctgatccacttccatgatagtattgaatttttctaaatagtcaatggaattagaggtacctttatattttagggattcggataaccgaaatcccttagggagccaagcttgtcgaacttccgcagtgaaaggagaggccccatccagcttgtatatgggctttctctgctgttcgagcattttcaaagcctgcaaaagcatactttgatcaatgttcccggctaagggagcagcgactggtactgctgcaggtgttatcgctattgcagcgagatttgctgggatattaaccttagtggtcacagctggtgcgttacgctggttggtgcgagtatttacaccctgatcacccacttggggatcacagggctcttcaacgtcatgaagtgggtgtgagcatgctctgaaaatagcgttaaggtgatcacatagattacccctgtgaacctgatatcgtcctccctgtggtgtctccacagaaccgaacctcgtgtacctgctagggtgtgcgaccatgcgaggatgaggaggtagattctacgtcattatctcgcgaaagtctgctgcgaggattgcgtcgtttggggtcttcctcggtctgtgcctcctggttgggatatctcgcagattggtccctcgaggttggttgattcaagtcaagtccttctgggttggtccttcgttccctgcgagtacgattattacgacgtctagagttagtt

SEQ ID NO: 352610 - DNA, 662 bp, Cannabis indica
gctcataaggggccatcctgattatttcctgatagctgttgttataagagaactcgatcaggggaaggtactttacccatgatccttcaaagtcaagcacacatgcccgtagcatggattctaaaatctgaatagtcctctcggattgcccatccgtctgaagatgaaatgcagtgctgaactttaactgagtacccatagatcaatgaagacattcctagaatcttgatgtaaacttcagatatctatccgaaacaatggactttgggacaccatgaagatgaacaatgtctctgacatataactcagcgtactggtcaatggagaaactcgtccgaacaggtaagaagtgggctgactttgtaaacctgtccactatgacccacacatagtcaaattgtcccgtggttctagacaaacctaccacgaagtccatagcaatatcttcccatttccactctgttatgttcagtggctgcagtaaccctgcaggttttctgatgttcagcctttacttgctgacaggtaagacatcttgcaacatacttagcaatattattcttcatgcctggccacaagatcatggcctttaggtcttgatacattttcgttgaccctggatggactgaataaggagttgtacgagactcatccattatctc

SEQ ID NO: 352611 - DNA, 1215 bp, Cannabis indica
gctcagtcaaaaacaagtttttaagagtttgtcagtaattcaaagattgcctttcagaaaactgagccttccactttctctctatagccgaccctacctctctctctctctctctctcgatttttctggacagcagctaggaggggagttatttgttttgattcaaggatttctagtgataattgagtactttgattcaaggtatcactttctaagctttctttctttgtgtttcttgattttgagttaagtttgatgttgaagtttggtttttagttgcaatttgttttgggtttggtcaattgatattatggggttaggttatgattgttaggtggggtagagctgatttaattgaaatctgaggtgtttatgtgaggttagggtttggaagctcaagctttgagctttaatggtgaaatgagatttggtgtaaattgttgagttctattggatggtttgggtttatttgagtgtttacaggtattctggaaattattggagagtttgggattaaattgaattgtacatggggatcggttttagggttcctagcacagaaccggtcgaccgattctggggaacgattagaactggtcgaccggttggtaccttggaactgggattccggttgggaaccgagattctggttggtaaccggtctgccggttggcgctttttcccgagccccagttttttccgtttttacgtaatttagggttttagcatcgtaattattgatagggtaattcttagttttgattttaaatccccgacagatgttttagcgtgtctctcatcgaattttgaatattatggtttagagtcctgtaaagcgttgagctgcgtttccacttaggctgaccggcacacttaagcacggatcgaggtaagaatagcatagaacatatcatataagcatgttgtgtttatgattgtatacgttttgggtgatatcatagcagcacaaccattgtgtcggttcggcagtacaggcatcgtactggttaagagtgatattcaccccagagggtattaattggcgctatcatagcggcacaaccattgtgtcggttcggcagtacgggcacagtactggttaagagtgatatcatggccaattatacgcttgggtggtattgatgctatcatagcggtacgaacatagtgtcagtcccgcagtacgatcatagtgctggtagtgggtgatatcat

SEQ ID NO: 352612 - DNA, 711 bp, Cannabis indica
aaaacactttcacaataaaattgatttccgaaacaattatttttcagcaacactgtacataccaatgtttacattgtttttctttctttcattacattctttcgttaaaattgtttcactgcaagggtataaattaatccaacacactttcacaataaatcaacaaacaaaaagggtaaacacatgaatcgaatcaaaactacttcctagtactgtgtaaaattggggaacataaaatgtaccttcaattttctgcaacccgtgaatcaaaacttcttgaataagcagatttaaggcctgtaaaacggattaaaactactcaataaaccaaaaatggaacagaaaaaaaaaatacgaaatgcaaatacacggattgaagaccacatcacaattttgacaaatactttactatccaacttaacccaaactgagaaacaaattaagttttctttttccatgaatgacaaatgcattactatccaaattaccccaaaatgaggaacaaatttatgttttccttttgcatgaatgttgactgagataaggtgcaaggtcaaacggacaaactaagcaagtagaaaaaatcaactatacggcatacagtaacccacaaaaaataagaaaatcgacattaatagtttctgaaaatcgacattcaatatcctaaaataacaaaattacttcacttctaaacaaacatgacatttaaat

SEQ ID NO: 352613 - DNA, 637 bp, Cannabis indica
gaggtaatcgctaccctgaacgtctcattctcggttttcaacaagctttatttgattgtgatttacaagacttagagttggttggatacccctacacatgggagcgaggccgtggcactaacagttgggtggaggtgcgattggatcgtgctttggtgagtcaatcttggcttgatctttctacttttgctaagctttttaatatggacttttcgacttcggaccactgtcctattttgcttgatgcttcctgtggtgtggttcaaccttatttgaagcattttcgctttgaaaatgcttggctaagggagccgctgtgtgtgcaaattgtgaaagatagttgggaggcgaattcgaatttgcctatttcggacaagatttttcagtgtgggcaacagttacaagattgggggaaagagtatacggggaattttaagaaaagaattagcaaatgtaagaaggaagttagcaaatggaggttgggaagggatgaaaattcagttaacaaatttgccgaggcaaaaaaacttctttctgaagcctatgcccaacgggaagtattttggcgccaacgatccaagcaactatggcttcaagatggggaccaaaatagcaagtattttcatacatctgctac

SEQ ID NO: 352614 - DNA, 880 bp, Cannabis indica
tatgttttacaagtttaatcaaaaagcaaaattttaattaatcacatttttccataaacctcgttggttagcaacgagctgcacagtacgtttaaaaatcacgtaatacgcctaaggtagttagggtgttacaactttcattttttatcttattgttttgctactacagctgaatgcaagaaacttgatttccagtgatgatgtacttcaatgttgatcaaaataagcttgtcatctatttctattcctttggtagaatgaagtgagttacatatattgaaagtgtacaagaaaatattccaatcttccaagaaggttcaagctattgtgcatgaataagtgattgaaaagtgtgtttggatttggttatgcattgaagagcaacattttttaagaaacattgctttatatattttaaaactttttcctagttaattttacatgtatcttgcacgtgatattgaacattataattttatttaatttgtttatatattttagtacagtgaaaaataactattattatatttttaatttatacattaagtatttatataattatgtgcgtcttcttttttagagaaaaaagacaataattgttagtagttttttttaactactaacaatatttagatacgatataaataatttaaaaataattgtatatatatttaaggaatctataaattttaattactgaaatttaacgtacaaacaacgtgaaatcaacatgttaaaaaaataacaaaattaaacaacgtttttacaattttaaaataactgtaaaacaacaaataatattatttctaaatataagcaattttcttcatatttacaatctatttctattaatgcccctacttgattcaaaattaacata

SEQ ID NO: 352615 - DNA, 447 bp, Cannabis indica
tttaataactagtaagtaattaaataattaaaattctaatttggttgtatattgtaggttgtgagctaatttttgaggttcgagatatttcggtattgatctgattttaacgtgatataggtatatatattcactagctttttgttattataattaattatcaatgcatgtttagtggaatttgaatatcttattattcatctgtagtgaagtaggttctgcgaatacatgtactgtgatcgaatgggttgataaattttgtattatttatgttattttatttgttctgtattgttatatttttttttttttttacttactttaggcacttataaaatttttgggaacgttccaattacagtcgttatgctgtcagaattttagtagaattagaataaattttactaaaaaaacataaatattaaaggaaaagtacataacataaat

SEQ ID NO: 352616 - DNA, 563 bp, Cannabis indica
acaacacaagcatactatataataatataattttattaagcacataattaaattaatttcatcgttttactcttctctggtcaaaattactaaaatgcccctggctcaccaacagggtcttaatatgtcataaatcatattaattcacaaatattgaactatataataataaattcctcaactatttataattatctaattagggttttgctaatccatttcttaattccagggtattacatgcctaatggcatacatagaacactttagccttatttttaatctctcttgcaaaagtcatagataatttcatatctaatatattttgtattttctttagtagtgttctatacgcaacattctgagttttatttttatcctttatttaaacaaggtagctaacgaaacatgcttgcctctttcctttaattaaaaatttgcccatttagcatgagaattaacagtatgttgctggatataaatgaaaacatgaacttaaaaagagaacaaaataaacaaggttcacaaaagaatccttataacacaataagttcaaataatgg

SEQ ID NO: 352617 - DNA, 509 bp, Cannabis indica
aattatgactaattataaattataattcttatgttgtgactaaatgatccgtaatgaaagtattagtcataaaaattataatttgttgtgactaaatgtgtttttagtcacaacacatgttgtgattaaaactaaattagtgacaacttatatctaaatattatattttagtcacaagtaagtttttagagtaatttgcggcataaatagctaagttttatgccgagtagcagataactacctaagtcgtatttttggcggtaaaaataccttccgtcacactcttggaacttccgtaggtacctctccgttaattgccaaattagttactgcgtggcagttcctgataggtccatgtaatttaatttttattttttctaacaatttttaaaaattttaaaaaatatatatatttaaaaattaaaaaaaatatatatatttaaaaattaaaaaaaaaataattaaaaataaacatatattttcctttttctcttctacaatctctctct

SEQ ID NO: 352618 - DNA, 854 bp, Cannabis indica
aagaaatcattggcaaacaagttgtatttgaagaagagattgtatactcttaagatggatgaaaccagagagttgaggaggcatcttgatgactttaacaagattatcttggatcttaataatcttggtgtcaaaatagatgatgaggatcaagcaataattcttcttagttctcttcccaaaatgtatgaacattttgttgataccatcttgtatggtaaggacactctcaccatgactgaagtgaaggcagcactaaactcaaaagaaattcaaaagaagggtgatgagggaggagatagcaatggagaagggctgttgattgtcaaagggaaatttacaaaaaatcacaagggaaatcagagccatcacaagtcaaaccagttcaaaactagtgcaaagggctctacaaggggatcaaattcaaggagcaacactggaaagcaatgtttctattgcaagaaagaaggacattttagagatgatgctagccttgaaagctaaactaaaaaaagacagtcaacaatcaagaactagaaatcatggtgaagcagaccttgcacatggttgtgagacaatggatgttctggttgcatcaagctcagactcaggtggagaatgggtgcttgactcgggttgttcattccacatgacaccaaacaaagaattgctcagctctttctcaaaagaacacagtggaacagtgctactagggaacaacaaggcatgtgcaattcaaggaattggcactgtcagaatagaaaatcatgctgcaaagttgcagaccctacaacaagtcaggtttgtccctgaactcaaaagaaacctactgtctattgggatgtttgacaaat

SEQ ID NO: 352619 - DNA, 690 bp, Cannabis indica
aaaacaataataaaaaataacatacagataacaaaaaatcaaccaataaattaacaagaatacaacataaaagactgtattttagtaaataaaataaaaaaaaatcataaaaatatttaaaattccgtgtaaactgtatttttgtaatttttttttatgtttttgtgtatttgtaaaataattttttttatatatatataaaaatagagatttccttttatatatcaataataaataattatgtaaaaatattgaattgtattttttttttatttgaatattgaattgtatatactttatatatagagttgaactttagtttctagtttctacctccatcgagaagtttttgtgacccaaattagaataaagtcagctgagttgatccgattgtaggtactactactactaggttggttgttttttcttttgaaagggaagtaggctgctttgggctttgttttttctttcgaaagggaagtaggctgctttggacttagttttttccatttatttcaacttttgttatttgaaaaggaaaattgtgggaattattctatatactattttttaaatttatgatttggattgatttggtagtttctatgtgggttgctatattaattttagttgcgatttaagttggtccgttaattgatataggggtttctgtgtgaaattctgtaaaaa

SEQ ID NO: 352620 - DNA, 428 bp, Cannabis indica
tcaattatatagaatgctctatgtgtaccacgacacagatacgttatgattatccattgttacaatcctaatagtcaaagatcctttatagatgatctacattgaattaccattctacctttcaatgtattttatccttaaaacacttagctacctataaatgatatttcagcaaactaatacatttactgaaatgagatctcattcatttatctctatccagtcaagctcgaaggaaatcatcgtttcacttctaaatacttataaaagctataaattctacacctatgattagcgctccaactcaattgaactaccatgttctcaagatgtaaatattcgccagattcattattagcttccacaaacaacttaaagaacataaataatacaactaagttgaacctaatcatatcaggattcagatc

SEQ ID NO: 352621 - DNA, 945 bp, Cannabis indica
aaatccatctaaagagagttgagagagcgaggaagcccgattacccacatcaatcggtttcttttgcagatcaagcttatgtgggactaaagctcaaagattcaatggctgaaggtatttcgatccttaattatagtgcatatatgtttttattaattccgcactttatacataatcatatatgttttagtttatacatataaatgtctaacacgtatttcactcttaccggacataaaatataaaaaaaaacatgaaatttcatatgtaacatacataatatacctacaatttaaatatatctccatgattgagaaattattattttaaagcctatttctaacaatacgtcttaattatttgctaagaggcatatattgataagagaataaataaattcttaattatcttctaattctcataataatgttaagcgattattacaccggagcagaccctaaatctcaaacctgaacgaaatcagagatggaatcgagtgtatggtaaagataatataatttatataactattaaaataagtcaataccaaatataatattgtattaaataatattaataatacaatactacataacataatacaatacattacaatactacgtaccaaacattcctaacttattaattaaaggaccaattcatgcaactcatgttaacattataccgtcaacataaaatatatattaaaaagatatgcaaagcacattgattgcattttgtatgcaatcttttgatgagtaaactcgatcaatgtacgtacctaatataaaacccatattatatatgagacacttcttaatgggtaatacctattgatgggaactaaaaaaaattaataaagtaacaatctaataaccttttatggcaagtttctaacaattattaaaaaaaaaattatatatattttttataaaattggaaata

SEQ ID NO: 352622 - DNA, 545 bp, Cannabis indica
cttctcccatcagaggatgaggatgaagtacaggaagacgagaaagaagagtctaagtatgagactaattgagacgaagagcccacgagtatagcaatgcttatacctatttttgtgcccaagttagagagggataccgttgcagagtgtgagcgtcttgaggttgaagagctggctgttgaggagcctaaaaaaagaaattggagaagagaaaaagagagacgaaaaagattgtggctgaaaagataaggaaagatgaagaaatgtagaaagagtttagaacaagaggcaaatattgcgaatattgataaagaaatttaactaattatgtatatatttttttttttttgaaaatgaaccaattatgtatttattgtgtcaaaattattctcttaaactattcaatattgataaaataaattatattttgctaaaattttattctacctctctcatgggctcaattaatgtataattagttaaagggctattttcaaaaatataggaaaaattattaaggttatgataaatatggcataaaaagt

SEQ ID NO: 352623 - DNA, 695 bp, Cannabis indica
taccaacttattcctcaagcataccgcctgctctcaggcttatttattttttactccgcccggggatggggctctcccagcccgacggagatattgtatttttatgaacttgtttctgtccccaagaagggggacaaacttaaagacggtttttatgggttccgggcccaccctgacaatgatggggtggttccgtataataggcaaactcatgttaaggagtatcgccatcattttttcttctcttccgggttccgggcagtggaacacccgaagctcctcacggagtgggttaggattcctccttacgagcggaccgtgcctactcaggtctttctccaaagagcctaggccttcgcctcttatgactgggcggtcctcgacgtcgggggcctggttacgacggagaattgccggaaggcaaaactcatcctgccgcatcaatccgtggaggactctaacctttccacggttatctgttccaacgtgagggcgcctgccgcggagaagatcttctgggatgagtttatcgccactgccgagaagaagtaccaggactatctctaccggaaggctcaggagaaagcctactctaaggctcaggcagcttccgggtggccactttgtgtggggagcccggtcgagaggagaagccaggcgatcgctgggaagccccttcatattggggactcggc

SEQ ID NO: 352624 - DNA, 947 bp, Cannabis indica
attttttcatatggtgttttgaagaaaatatttgtagaggctccattatctatcatagttcaggccaccattttgttggctatctggacttctacgaccaacgaaacgttgtgtgggaaattaatcttgacagcatcttcatcattaaatgttatggtgggttcccctgctcgtggtattttttgcttcatttctttgacggtcagaaccacctcttcttgctcgtgctgtaatgttcgagcatacctttcccgagctttgctcgaattttcagctatgtgcgagcctccaataatgacttgtaaatgtccatctactagtggtggtagtaaatcttaattattatctgtcagagcggtcctttgattttgatcgggcttgacatgcatgtgcaggttattcaatttcccacttcaaattgttgcattcgttggtgtcatggccataatctccatgaaaacggcaaaacttagtcatgtctctcttacttacgtcctttttcattggagcgtgtttcttgtacggcgttaatgactgagtaaccatgtagatattctctaaatcttctgtcaggacagagaaagtagtaaacttggcaggattttccccaggggcctgttcggttttgccagaaaactttccctttttaccattgccttgtttgttatttttgttaaactttttaacgcccgagcttgaattgcttgggtactgagggagctggagggatgttccagcagagggagcttttggctggccaggtttaagatcgacttatgcttgctgaatggcctcttcgagctagatgaagccatctgcacgatcaaggaagtcactcatagaatctactggtccgtctcttttgatatccttgcaaagctctctgagaactttgatgccccctgtattgcggtcaattttccttcttcggttaaccgtgcaacctt

SEQ ID NO: 352625 - DNA, 801 bp, Cannabis indica
gtaccaatcaatccatttaagccctcttcaactgtatagtcccatacctacacagtctcaagatcatcacattaaccttccccaagcgatgtgggattgcacagctcctgatctttccccttccggatcacgggactctaaatgctacaatcacccccttacgaggtccgacgtcctcatcgaccatacttccggctgggtcaaggttttgataccaagttgtaatgccctaaaccctagggacgccacatgtatatttttgaaacatagtttactaatagttctttttaatcaaatttgtgataatagtaagaatttcactaaaataaaaccatagcaatgaacaaaatgacattgctaaaaatttatttccgggggttcccaaaacaaattttagcgatgtcatcatgttcattactatagttttatcttggtggagtttttactattatcacagatttgattaaatacttaatctactattaaataaaactaacgtttcaaaagcacacacgtggcgtccctacggatttaaggcattacaacttgccattttttagtattcttcgagaggatcgaaatttgtattttggccataatttttcactcaagtgtccattttagacgttctatatactgttttgaagcttgcgaagagctctacaatatggtatatatgttagagccaaagtataagtttattttaaggtatttatgttagacatttatttgtataaactaaaacatatgtatgtgtatataacatgcagaataaataaacatatacactatatgaatata

SEQ ID NO: 352626 - DNA, 644 bp, Cannabis indica
tctccaccctttccgttggctgtcgtatcccacaaagatacatcgtatcgctttcttgtcaaatttgctacataggtggcttggcatgaataagtagcacacacaaccaaatactcgaaagtgacttactgcaggtttacaaccccacagtttttcaaagggggaaacgaacccttccttagcctggggaagcctattgattacatgagcggctgtctttataccttcagcccaaaatctccctggaacattcttcgcatgtagcatgcttagacatgtttctgcaagatggtaattcttcctctcggctactccattctgttgtggcacttgcacatgtgaattgatggcatatgcagcattctcgaagatactcagaaaatttatctgaggtatatttgccactgttgtctgtttggaggcattggattttcttgccgaattctccttctactatttctttaaactctttaaattttgaaaaagtttcaaatttttctttcataaagaaaacccatacgtatcttgagaagtcgtcgatgaatgtaaccatgtactgcatattgcttattgatggttgtttgactcgcccaaacatgtcagaatggaccaactccaatggtgctttagctttgaactttgaa

SEQ ID NO: 352627 - DNA, 552 bp, Cannabis indica
tcggcatgttaaacttttccaaatttcttaaaattttgcaggatgtcttaaataactataacgtacatgatcatgagaaaaaatttgactaaaaaattatttcggatgctaaaacagataggggtgcatcaatatattcattttaagagggtgcattgtagaatttttcttatatatatataataaatcaaaatttattggtgtctttccataaaagggagataccaaaattattataagcttgaaaaccccaacaacaggagataattatcatttaatttaataaaaaatattttttgaataacaaaatatcaagtaaaataataatgattaaatggaaagcaaagtcattcgttataattattatttatttttctattaacaatgacaatactttaaatcaatttaaatatatatgaaccaatgcttagcgtttggttggaggtaatgaaatggaatggaatggaaaggaaataattttcattccattcctttgtttggttgcattttaaagtattggaatggcattccaatggaatgctctttccacca

SEQ ID NO: 352628 - DNA, 722 bp, Cannabis indica
gcaggtcaaagaggttttgcaggaattggatcaaatggtatggaaagttctggaatcacgaagtttgtaaaagccagtgttccgaagaatcttgttgatgctgcaaatgtgaagtctgctgcaacagtttcacaacctatcgttgcagaaccagtttctgttgccgcaaaatctccaggatttacaaaaagagtaagatttgaggtaaaaagatttattcctacttttcatttttgtggtagaaaaggacacatcagacctaaatgtttcacgttgaaaaatatgtttaaaacaaattattttggtaatttggagaaatctcaaaagaaacataaaggtttgaaacaaatatgggttaagaaaaattgtctagctagtttttctaataaaagtactgcatctcaaatgtggtattttgacagtggttgctctagacatataacaggtgacaaggactttttgattaatattcgacctatgcagtgtgggaaagtcacttttggcaatggcttagctagaaaagtcgttggtatgggaactctcaattttgaagagttacccagattgaaaaatgcgatgttagttaaagggctaagggctaatttacttagcattagtgaaatttgtgaccaagggtattctgtctcatttgacagtgatcactgttatgtacttaatgatgataatcaatgtattttgcaaggatttcgatccaatgataa

SEQ ID NO: 352629 - DNA, 726 bp, Cannabis indica
gggtagagtgttttgcagcaggcggctcctcgaaaagctcactaacctctccggaaggtctattttcctttgaagaggatccctcaccacccttggacttcttggccggaggggaggcgctagagctttcgcccattctcttcctcaaagcatcgatcatctaccgagacatgtctccacggaacaaaaaaagtatggttagaaaacagccatcagaaaacacaaggcatgaaagtcaagaagctcaaaagtaaagtaaaaagcgaggtgaccgcgggcacagagactcagaagtccatcatcacctgacattgatcttatctcaaacatgacagccttccctttttcggcaaaggggggagatggccgaacaggtgaagtgggctcccttatgcgaatggcatgtccaacaggcatgggcgtggccggtagtttcttcttcctcttcaatgtggtcacctgctcatcctcagcttcatcttcaggattcaaaggctcctgagcataatgcttggcccttgcacctcctttcaacttagcctctcgcttcagttgaatcaactcattcttcagatgagttagttcaggtcggccaacaccaaacttcctcttcttccccaccacggacttaggagaaaagtcctcgtggtaaagcccgtacttcaccagattatcaccggaggtcaactggataatatccctatcttcctccggcaactaggcaag

SEQ ID NO: 352630 - DNA, 471 bp, Cannabis indica
ggcggggctcctactcctcctgcatcaggctttaacaggggaggtagtggttcggccatggaccagaaaaggaaagcatccactgcaaccggtggctcgggtcaaaataaaaggttccgagggaaccagagttgaggcagtcgtcagggtagttctgaggcccgatatacctatccagtgtggcatgccagcatactacaagagggatttccctcaacttagagcagaagcaccaagggctccggcgagacccactctagctagggtgtttgccattactcaggctgatgcagaagccagcccttcagtggtgacgggtcagttctcagttaacaattctttttacttcgtattgtttgattctggggccacacattcttatgcgccagccataatcttttagtaaattcaatagaccgcatgatagttatgaatcagggtttcgaaccctattacctggcggagagttag

SEQ ID NO: 352631 - DNA, 595 bp, Cannabis indica
caaagggggagattgtaaagtccttttttggcaatttagatgccaaaatatttttatttatggtgagatttctttgtgcttccaatctgattttatcacctttaatttttcagttttattactcttttctatcttaggaaagattatttttcagctgaaccttttcttgtatggaaacttcttgtaagagaagcaattctcttatggaaagtttgtttttaaaggaaactttgactattatctttttccttaataaagttcgattgtgtcttgaatatatcaaatcatatacactgtttatggcaggtttcaagacccaatacaagatcagactcgtttttggcaagtttccttgttctggtctgatttgctacgtcagaatctctttctgatgctgcaaatcaagttttttttaagaaaattttgtacagctgtagattcgactttgtggctgtctctagggtttctatgttctataaacagaacctagagatcagccatttggattatctcttccaattttcattttttgcatttttcttatttgtgagaagagagttccttttgtgagaacctagttgttcatctaggttct

SEQ ID NO: 352632 - DNA, 337 bp, Cannabis indica
agatcctggtaaaataattcccaacactttcataccagtgggtatcctaaaaaaaatacaaggggctcctcttggtgagaatttggttctagaaacactcaaagtagaggcataggcaagacacccaaaagtccttaaatgatcatatttgggaggtttagatttaagaacctcaaagggggaaacattttgtaaatttagtgtgggtgttctgttgataagatatgcagcagtagcaacacactcatcccataaattcaaaggaatataagattaaaataataatgctctagctacattgagtaaatattggtgttttctatcaacaactgaattt

SEQ ID NO: 352633 - DNA, 942 bp, Cannabis indica
gtaggtgggcagcaacgttgtaacactaccttgcctccccctggtttcctgtcacggttcctatcgcagcctcctgagtaggaaattttagacacaagtgcctaatcgacatgactacaccgaaatccaccagggccgattgaccgaggattgtgtttttaagccgttgggcagtccaccaccacaaatgtgcagtacttaaaggtgctttgggtgtgtttgggcacaaggtgactgggagtctcacttttcccattgggataagtgttgttccattgaaccctgttagctgggaaccgcttggtgagagatcccgatccataaggcctattgccatgaaggcttctttaaataataaattcacagaactcccgttgtcaattaggattctggccacaatcttgttggcgatgggagtctctatgaccagggggtcatgatgagagaaacgcattgtcttagcgtcctcttctgtgaatgtaatgggctgatccattagcgagggcgagagttgagtaacctcccaaacctcactgtgttttacggcccctgcgtaacgtttcagttcttttcaagtagttcctccgatgtggggtcctccgaagatcatggctactcttccgttaggtcttggtggcaggccaggaatttgttgggtttcgcctgggggagcgagtggtgccaatgctctagttgcaccccctggtgctccttgaggcaaaggtcctgctacgtgaaccgggttgagatgaggcaaccggttcttaatccattcgtaaagatgacccaatcaaatcaagttttcgatctcgtccttgaggtttttgcattcattggtgctatgtccaatgtcattgtgatactcgcatcttttattgggatccctccgggagctatccctgtacagagaaggtggtctccggtagtgcgtattttgcctag

SEQ ID NO: 352634 - DNA, 605 bp, Cannabis indica
taactgcttaccaaacaccttttgtcacagttttttttaaaaaagtaacttttagcttttccaaaagctgtgccgagcaagtcttaaaaaattcgaactattttattaaaattattattgattctaatacaacttaaaaaaaaagtaccctacctagaaaatatatatatcaaacattttttagggtattatcttactaaataattttaactataaatattaattttaaatatattaaattagcagattttgatttgatgggaaataataaaaaaaaaaataagaatttctatgcttaatttagttaattatttaaaaatatatcaaaaagtaattttttttcactactatattaaaatttaatgtttatataaaaaatattttaaggaacaaccccacaactttggcatatttaatgtaaaaatgagatatttttttaaatcaaataaaaaattaagtataaaaaattacaaaatttcctaatattaccttctcatatttaatacccattaaaagcatatatatatatatattaatatttttataagaattatttcacaaaaacataaaaacaacaaaaaaattacaaaaatacggtttcacgg

SEQ ID NO: 352635 - DNA, 617 bp, Cannabis indica
agtggatgagcagcggatgggcagacgagaggttcaagtatgatggtggaacttaagagcaggatttagaacagatgattgtctacttgagtgaaagcaagtgatcaatgtgagtgtggagatgttcgataccatgcttctgctatatggtttccttcatgatatttcaataccgttgcccactattcacatcacccatttgactcgctcaagttagttgctctcctaattgcgagagtggtaaccgtactctgattggttccaatatccacttcgctttacttatttggttgagtggtcgaattcaaacccaaatgcggggcgaactatcgtatggccttgtaggcttacccgtttgtattttccaaggcccaataaatttgtctcactatcttattgggccaataatattgggtttatgattaacgagcctgtctgacgttcatatcagacttctcaaacacgcagaaaacagtaagtaaatctttctttaccaatataagagtaaaaaagtaaaaataataacaaaaaaaataaaataaaataaatatttttttaaaaaacccaataaaaaatgcagcttttctcacatatatagagctagttactatagtttg

SEQ ID NO: 352636 - DNA, 875 bp, Cannabis indica
actaaagtttccctatcgataaacaacttggcaataccctaaacaacacaaaaatgggaagaaaaagggttcccaaatttgccccaaccggtaaactggttcctcaaccggaattctggttctgggaggaaatcctggaagccaacaaaaattccggttcctacaggcctctctgaaccggaattccggttcagtgcaggaaacactaaaaattccatatctcaatcaattcaaccccaatccactccaaactttccaaacctgttctaaacatcctagggctcaattcaatagaaaaaaaacaacccagcatgcacagaatcaaaatccaccatgtgagctccaagtttgagcttcaaagctcaaagcttggctaacaccacaaccagccactacaactagcttaattcaaactaaaacaacataagaaacatccagaaaccaaactcaagcacacacaaccaccacagtagctaaaacaccaaattaccataaaaccaaagttttgagtttaaaaattccaaacttgaataaaaacaactaacaaccaccacaacctgttctaacccattcatctgaacataatcaagcccaagaaaacaacaacaaacacatacagtagctacaacaagaaaaaccccaaagcatgcaaaatttattttcttacaacttaagaaactcaaagagacaaggttaaagacttaccaagagttcaagatcccttaaaatctactggaatcaataagaagaggagaaaaacacagcaatcccacctcattttgagggtttcgaaagagagagaatttgagagaaaataagatttttgcctccttttaatttttttcaataaaatgatcaattaccaacttaattca

SEQ ID NO: 352637 - DNA, 570 bp, Cannabis indica
aataaactatttccaagcaacaaaacaacaatcaaagcccaaaatcaattttcaccattaaagcttcaagcttgatttctaaaactcaaagcttgctaaaaccttcaaacaactactaattcatgcttaactcaacataatacatcatattctaactacaaaaacatgattcaaacacaaacaataatcacagcagctactaactcaaaatcatgcaaaatccatttcttaaaattcaagaaaacaagaggtttgtagctaagaacttaccttggaatcgagaacacaaaaaccctgctgcaacaagcttgagatgaggaggaaattaacaaattctagctgcacttaggggttcaaaaatgagggagagagtttgagagtgaaatatgactttccttgatttttttgttatttttgaataaatgaagtaaccttgttttattaaatatctcagcccaaaagtttaacaaaaatctgattttattacttaataacaatccactaaagacaaaagactaatggggaaaaatgaccattttgcccctcccacactaaaacaacataaaaggg

SEQ ID NO: 352638 - DNA, 772 bp, Cannabis indica
cacttccccttaaaaatccacttcccgggaattaaccctttcacaatcacactcaatttcactcacaacaataatattcaacaatgtatgagcaaaaatctcaaaaatccaacacaaagtctaaaattctctagcaatccacaaataatccaatcaaacttgtgtagagagatttaaaatttgttacctcaatctttagtcaacctccattgatgagaatcttaaagctttaaggaagaagaaggtgaatagtgacttttctgaaatttgggtgaggtttagggattttggaatggatttttagaggaaaagagggttggatgagagaaataagtgtttatgatgatttaggataaaagtttatggttagatttgatagagtggggttttgaatggaatttgaagaagaaaaatggtgaagaaggtggttttcggcgtggagaggtgaaggatttagaatgaggtttgatttgaatggttagggatttggccttttaaaactgttctgaccattctcgccgcggcgagatatagcctcgccgcggccaaaacccgtgaaaatataggtgtctctgtaaggcttaaatggccgcggccatgtgttccctcgccgcggccagatttcgtgaaaaatagcttctctctgtaaggcttaaatggccgcagccatatatcccatcgccgcggccactggacaaaatcttttttttttaacaaaactggacaaactggaaaagaaaaataacagtaaaacttaaaaagagttcaacta

SEQ ID NO: 352639 - DNA, 562 bp, Cannabis indica
tagtaaatattgacatattaattatatatattaccgattatattatatatcccatttggaaatcataagattttattatttctattattaatgtaattgtttatttaattttaagaaataaatattttaattgccactagctaacttaaaaaagaaatgagaaaaaaagttgaaagtatgaaattctaataacaaattttataaaaagaaaattaatttgttgtacaaaaaataaatcaagttattaaaactaagtaaaataaattcctaatactgaaatatattgaagaattgatattgtttcgcatattgtaattagatcattattttgatatttttttgttgctttaattatgcaattatctttttgttgttttatatttatttttatattgtttattaagttgttttagagttgcttattagttgtcttttttattttactaaaacacgatattttgtaatcttgaaacattattatttattaacacagtatttttaaaaatttagtacaataaaaatgttaaaaaaatgactataaaaatataaaaacaacaaaaaa

SEQ ID NO: 352640 - DNA, 572 bp, Cannabis indica
caagctctaggtcatgagttgggtagcgctgctttataatcctttctagtgatgagaggcataggctatgactttgtagcttgcatccgaacaaatcccaaaccctgtctggatgcatcacaataaacaacatatttctcttgatctaatggcaaagctaacactggagctgttatcaaacattgtttcaactccagaaaacttgcttcacatttgtctgaccacacgaatcgctaatttttcttagtttactcggtcagtggcatagagattttagagaatccctcgatggaatgtcgataataccctgctaaaccgaggaaacttcgaacttctgtcgctgattttggcctcgaccagtttttcactgactggatcttgcttggatcaaccataatcccattctttccgataatatgccccagaaaagatacctctgacaaccagaattcacactttttgaactttgcatacagcttgtgatccctaagtcgttgcaataccattcgaagatgatgctcatgctcctcttctgactgagattatacaaggatgtcatcgataaacactat

SEQ ID NO: 352641 - DNA, 628 bp, Cannabis indica
tcccaagttccaatcccgatctgagtttggattcagttctatgtctaagtccttgtttctgatcctggtctggattggagttttggtctgggtctgggtctagcttttggtttgattctaggtgttggtgtttgagttcgggtccgagtctttatccgggtttgtgttcaggtcttgaccctcatctgggtcaagggtagagtacaggtccaagttcgggtcacgagtgcgggtccaagtttgggtctgggtcaggatcttggcccaaatctaggtccagcatttcgatcccagtttgggtcttggtccaagtccaagttcgtatttagatccctatctaggtccaagtttgtatttgggatcgggtccctgatttaggtccaggtccgcgtctcagttttggtctgggtacacgaccgtgtacgggcccgagttcgagtctcactttgggtctgactctaggtctgggtccgggtcctggtcccggtactagtcttaatctaaggtcctggttcaacgattcttgttcaggttctaattttgggtcccacgtctaggtctgggttcgggttttattcttcgtctgggttctggtcctagtttgagtcccagatctagacaccgacta

SEQ ID NO: 352642 - DNA, 637 bp, Cannabis indica
aataatgcgttctttaatcggttcactcttgatccagaaggatatgtttgcttgctgtcaaagttttcttttgcagtatttggatgcgggacagaaaagatttattccctcttctcagggtgatcagagtccctcggtcatggatcggtgtcctccaggcaagtatcaggtattcacagatgcagccattgacactgggaagcaggtttttagcttaagtgtggtggtgaagaatgatacagatcaagtgattgttgggttggtgaaaccagttgctggattaattgctccagttatagctgaagctaaagctgtttctcttgcagtggcttggactaaaatgattaatctacctgttcatgttctgttttcggattgtaaggttgtggttgataagattaataaatgtaattggaataatagtgtttgtgatgatgttttaattgatgtttacaactctttgtcctttaatcctaggcctaaagttgtgttcattagaagagatgataatactcatgctcataatttagctaaactgggtttaggattggacaggcagttattatggaatggttctttaccttccttgtaaggacttgtttgctttgtactgcattttctatcaatgaagcttcaa

SEQ ID NO: 352643 - DNA, 792 bp, Cannabis indica
acacaatacaataattagtgggcttaggttggccttcatgtattagacctaaataaaaataaaaattagtatttttatagtatgcggtgcagtttgaaccgcatattaacaattcaaaatcggtaactgcaccgcgtggtttaggaaaaattcaaattgcaaccgcaccgcaaagaatttcaagctgtatttttttgcggtgcggacggtttgagcggtttgataaacacccctagtacccactactaatgaccccataattctctcacaaagcccaaaggagagaaatttaatcttaaattaaagtattgttattcattgaataagccctatactaattgggcctaaataaactatcaaaagtgtgatattttattttagcaacctagtccatttatctatctagaattaaatgggcttcctatatgcatctaagcccaaaaacaaacataaaggttgtaatatcccgataagcctaatggtaaatagttagggtttgtatttatattatgggttaatcatgtaataagtgggattatgatcctactaatttattttagcataaaatttaaattttgctataagtgagtaaataagcgtaattgataaattacagagatttatatagcatgtgtggatgtaattggaataaaaatattttcgggttcagtaactttgaagatccggtaagtggatatataagcttaatttgttgattatggagatttatttgaaatacgtggatataatatgagtcatttgtgaaataaaaatatttcaggttcgacgacc

SEQ ID NO: 352644 - DNA, 625 bp, Cannabis indica
tgttcaccacatcttggctggaaagagaccgaaacctcctcaccaaatcttgggtactgggagattgagactgtgctaagggagtgggtcgcgaagggctgaagaagattgaaactgtgtcgaggaagtggaactagtattgggagattgagactgttctaaggaagtgggtcgcgaaggactggaaggagattgaaaatgtgtcgaggaagtggcactcgaagacctggaaagagattgaaattgtgtcgagagagtgtgaactcgaaggcagttgccaggttgacgtgatcctcataaagaatccgcaatcaccatgtccctgcccatacacacatgcacgcacatgatacatctctaaaacaacatacttataagtattatcccttaaaaatgctcaccataacacagcaacaccaaaatctttctccccttacaaaggcggtgcggcaaaagccacgtccccgtcaagttgaagcttctgcctctcttcatcagtaggacacatgtttttgatcttcaactgaacagaataatcaatcagaatataaaactataaaaaataattaaaaacaacaaaaaattaacaacataaataaaactgaaaaagaaacagtaaagaaac

SEQ ID NO: 352645 - DNA, 655 bp, Cannabis indica
atatggattaaaaagataaaataatagcaaaatatttttaagtggtcgaccatagtagtgggcctcactagttacaattttgtcattttattcaacaatttatcttttcttccactaatgtcatattttccaatttcaattctataaatgtcaaaattatttatttaataattataattaattatcaaataaaatttctatttaccttatttattaattagatcatacaaagtctcctaattaacaaataaattttaaaacctcttttcttcacaattaagcccttgcttagtgaaaattactaaataaatcatagtctaatctaaaactataattgattaattaaaactaattaactgagtctacaagcagtattatctcaactagtgtgaccatgaccctatgtaatcaagcttacaataagtagttctagaatttaccaagtgaattctctaacttattaattcttcctgactctactatagcttcagaattgcactcttaattacatagagcacactattaccaaaaatagaatcgatttgaattaccattgtttcaattcaaataggcaaagatcctctatagatgatctacatcgagtagggataaatttaccgttttacccttcaatatattttatctttaaaacact

SEQ ID NO: 352646 - DNA, 841 bp, Cannabis indica
cggtggttaagacctgtccgagcgtcctccccaagactccttggacttagcagctcttggggtagaggggtttgtagccgttaactcctcggaaagatcaatgacctccccagcaggcatcttttccttagaagaggacccctcaccgcctttagacttcttggctggaggagaggcactagagcttccacccattctcttcttcggagcgtcaagcatctgccgagacatatccgtacggaacaaaaaaaaacatggttagagaaaacagacatcagaatcatgaggcaaaatagtcaaaaagcttaaaaacaagacgaagtgttatgcaaggtgattgcccaagtaaggatcaaaagtccatcatcaccttacatcgcttttattttagacatgacggctttcccttttccaaacacgggaggggacggccgagcaggtgagatgggctcccttacgcgaattgcatgttcaacaggcctgggcgaggctgaaagtttcttcctcctcttgagcgtagtcacctgctcttcctcagcctcatcttcaggattcaaggctcctgagcatatttcttggctcttgaacctcccttcaagttagcctcgtactcagttgaatcagctcattctctggatgagctcgttcaacccgtcgagcatcagatttcctcttcctccccttcacgtagtttcgggaaaggaagtcctttggattagagcccgtacttcacaaacgttatcctcggaggtcaactggatgatattctagtcttaccccggcaatcgagcaagcctttgggccctatcccaaagagaaagagtgaggggaggacggtgat

SEQ ID NO: 352647 - DNA, 729 bp, Cannabis indica
gaagagttagaagagatcgagagtgatacagatatcccgaccagattgctaaagatcggaaatggtttattgctcgaagtacaatcagaattgataaaatttttgactttcagcctggtcacatgcggatatgggtggaattgatccttctatcattttgcacgttctgaatatagatcccaattaccggccagtacaacaaaagcgaaggctactgaacaaagagcgagcattagccctaaaggaataagtagaaaagctacgcaacaacaattttataattgaagctttctacccagcttgggtcgtaaatcacgtactggtgcccaagccgaacaagaaatggcgagtctgtatgatttcacagacctcaacaaagcatgccccaaagactgtttttcactcccaaggatcgatcaactcgttgatgcaacaacagggaatgaaatattaagcttcatggacgcttattcaggctacaatcaaatcaaaatgcatccaccagaccaagaacatacaagtttcggaacagatatgggtctatattgctacaaagtaatgtcgttcggtctaaaaaacactggagctacataccaaagattggtaaacaaaatgtttaaagaccaaatcgggggaaatatggaagtatatgtggatgacatgctcgtcaaatccaggaaggctggggggcacatagacgacctatacgaatgcttcaaagtcctctga

SEQ ID NO: 352648 - DNA, 476 bp, Cannabis indica
cattacttagcttgtaacgtgccatcatagactgcacgtaacacacaacaagggcaggagccacaggtatttctggagcagggactgcaggagcaccttactgtcttaactgctgaatcacttcctcttgttcattgattctagtttgcatttctgcaaacctgttttcccactcttaggcagctttgttagcctgtggcgggttagcatcacccagaccacgtgccctgcccctaggacctctacctcggccacgaacattttggggaatctgagctccttgaccttcattggatccaaccgaattccccttgctcctggtgtttcgcctggcgtccatactaatctgaacagcctgcgtaaccaagagctagtctgttcagatcgtgattaaagaaaaacttctaatgtcgcttatttggaaattaaaaacatgcccccattttactatcaggctactaacatgcttcctaaca

SEQ ID NO: 352649 - DNA, 625 bp, Cannabis indica
taaaatacctctcaaagcccctccgaaatcgaattttaaaagaaacccgtttgatctctcaaactctctacctttggatgaacctcctgcacaacaggaaaatgttgaccagtcccttgcagctgctgtgagccaatttcttaccactgaagatattggcactggttcctcagatgctgcctctcgtggtaatgttactaccatgggatccctgggagttgaccatatccaaaactctactggtctaactcatgagagttcacctttgagccatgggagttttcactctactgttatttgtgaccttcccttcacaactacccagcatgctacggttatggccagtgaaagtggcagtgaaggcactgctgtggagggtgttattccaagaaccactgaaaaagctaaggggaaagcagatgttggggctaaaaggactgcttttcttcctcaaacggttgtggttggtgattctctcaggaatatcctcaagcgtgctcgagctggtcctaccattgctgatgtttctactgccattaatctctctttggaacaagcgggtgttgcagggcaaccccgcccagaaaaatgagtctcatgagttggaatgcccgaggtttgggga

SEQ ID NO: 352650 - DNA, 640 bp, Cannabis indica
tgtcccaacgatcgtacgctccaggtctaaccgccccaatatgtacaatcttcatccgcttactctcatagttgctcaaccttaactttgccctaacctacacatgcaaacaataactgtgagtcaacagactcagtaagaaaagcataatcataaacataaatataacctggattataattaggcgcccatacacccaactataatcctatccacgtgtcccacacggaactcaatctagaacgttcctatgatagtactatcgaccataatatcagtctatacttggtactctgggcatactctagtcgtaccgataggatagtgttgatctcgtacctgagccaaacatacatctatcggtatccagtacaactctatgtatactgataccgctatcaatgtaatctaacaggctctataaatatgtacgctaaacatgtaaatacataagcatatcattatactaatcttacctcgtttcggaattcaagtgtgctagccaacctgagtggaattgctgctcgatgatttacaggcccctaaatcacattattcgtaaaactgatgagtgacacgctaaatcacctttcgggaacttaaaatcgaaactaaaagtttccctatcgatggataacat

SEQ ID NO: 352651 - DNA, 1025 bp, Cannabis indica
ttagtaaaaaaaaaattatattatgacaaaaaaatagtaaaaattatatttttactgtcattttttttttttattaacatcacatttgtaacaaataaagtttcgcagtaaatatccacaataataacaaagtctcctctttagcaattatcccaatacatgaaaaataacatgtatacacattatcaatgaagaagagcaaagcaaaggaaagcatacctttttatggtaaaggtcagaatcattgatagctagcaactcagccttcttacaaccacaatcatacccatatcgaatagcaacagctccaataaacaaaccaattccaaatatagacttctccatcccaagagtctctttattaagtctaatagaatccaaatgaagaattctccctccaaaccacacccttataattccttcagccttacccaactcattattagtttctaagctcttggctgtgactctaaaaaagggtccaacagtttgcagcctaaggtccaatttttgagctcgtgaggtctctaggatttctgaaatggttggtggtggtgtagtaatgggtggttcaaggctttcttttctacaccaagtttggttcatgaataatgattttgggcttggaagcaaggatgttagttccataatttcttttttcagttttggtttggtcagtggtgatgatgagtttgagttatcctaatgtttgtggtcatgacacgtggcatcctaatcaccacatataacatttcgattaaaaaaagaacaaaaaaagaatgagaagatgaattaataaaatcagagatgaataagattccaactactcagttctcaggtggaagctttgcccaaaattgttgtttcttgtcaaggttgggtcttggggaagaaagagagagagagagagagagatgtggcaatggaaattgccgaacggataggatttgggctttctctctatgattttcttttgggctatttacaaaaatatgggaaatgaaagataagttttgatatatatg

SEQ ID NO: 352652 - DNA, 817 bp, Cannabis indica
gattgaggatttatattatttcgggatagaatgtcaggaatatagtcatctgcaccattcaatttcataagataaattagaatgacatcataagcagatgatttataaaccattcacccaatgatataatatttatgaaaattataaatcaaaaagctaagaggaaaaataaaagatcattttgattaaaataagaatccaatgatgtctcgatagacgaaagtcaaagtcattcttattttattatttctttattgttcatatttataaacactggtctatgttgtcatctttgaatgtacaactagattttgcatttacaaatatttatcagtctagatctaacactattatatttgtctaatggatgacaaccctttgggatttgtcccattaaaacaaacaagctaagttagaccaacaataaagattcaaatttatactacaacattaataacagaaaaaaaatatggttcaatataaattcatacacattcaaaaattatcatacattaagcaagtaagaaagacatgtgaaaatactaaacaagcacatcttaaataatttccaaggtttccaacaaactgatacagtatcccagtaggcgagagtcaaagatatcattcattgaatagagtagtcagctcatctaaaatggacaccattctagcaaccttttactcggtcaaaataaaaatccaacattgtccctgtaggcgagagttaaggttattcttattttatgagcttctaccgttgtttcatactttgtaaatttatctctaagtagtcaccgtaggggagagtctaatagag

SEQ ID NO: 352653 - DNA, 832 bp, Cannabis indica
tgtttcgaattcataaaaaaagttagaaaaactactacgaaactaaaattcaaccgaaaatccagtttaatttgcataaaactaatgtcccgacttcaatttttaaatccatgaaaggagatctcaaaaagttgatatggagttcctaaacaatccaactcaagtataatctaaaaaaattacatcaatactatagtaaaatatttatcctggtgtatttttgttgttttctaaatttctaatggtaaatttgttcatattagatcataaagagacatgtagatagagttacgtatgtgaaaatattgttttaattttcaatatttcacaatagttgcattacagttgaataaatattttgctaacagttatttcgtctaattgaaacatctgtctgatggaaccttcggccaaccacccagcaatcacccaaaaacttttatctgattgataccttcgtctgatgcaaccgtcagccaaccacctagtaaccaccctgtaaccatcgtctgatgcaaccaccgcgcaaccgcgcatcaatcaccctgcaaccattgattgattgtgtaagtgatagtgtaagtagtattttgataattaaaatcatataaaaagtataaatgttgtctacaccttatagaggtatttttgtaaataaagtatcaatttataatttctatgtaataaaagtagtgtattttttaaaaattattttgtagtttattcagagaatttatgaataatttatatattttaacaagattgatgtcttgtaattttattgttaatttatagttgtctttttgttattttataattattttatagttat

SEQ ID NO: 352654 - DNA, 1012 bp, Cannabis indica
ttttatatatttagtccttcttcccccctctaagacaatttattatatattttctttagaggagacacttaagccccgtccctaggcccttatcttttttagcgcatttctttgggtttgaatactttatatttatgcttgaatatatattctgctttttaactttgttaaacatttggcctgttttacatttatccgtgtggtatgccttactaccccctgagtgacatgaaaattgtttttaggtcgctcagttttacaaacattaatttagaggttgcatatacttgtccggtacaaatttactttatagggcacaaacttttattttttcgactattggtaatactttcgaaggtgatcagcattccaggccctaggcaccatggtttcgtccattctttttagcttgtaggtctcggagtcgatttcatcctcaacttcacacggtccttcccaattacgcccgagtatccccactccggattcttgagtagctgggaagacccttcttaggagtagatcaccaatagtcaattttctatttttcacctttgagctgaagtgtttagccaccttcttttgataagctgccatgcatatttgagactcatcccagagctcgtcaatttgatccaacgcttcttgtaataaagccttgttagttgctggatcgtaagtcggtctcctgtgggataggaataacatttccaccaggaccattgcctcacaaccgtatgccattgagaatggcgagtggccggttgtggttcttcgggttgtccggtaggcccgtaacactcttggcaattcttcaggccaattgtttttgcaggctagcagctttttccttagggtgacttttaggattttattgacggcttttgcttgtgaatttttttgtggccttgccactgcggagaagcttttgatgacttcgtgttggttgtagaagtcggtaaattcttcgcagtcaaactgctttctgttgtctgagctatcttgtgaggca

SEQ ID NO: 352655 - DNA, 871 bp, Cannabis indica
tgaatcatagcactggcttcatcatcccgagaaagctgccgagggaggaacctgctggaagataaatgggctgaatgatccaaagggataggcgtcggaggtctagaacccatccggggccgacctaaataatggcctaagtgggaaaagtaatactcattggcatgattctcccaccgcgtagaaggcattctaaacctacggagacgctcatcgaatcctataggcctaagacgggtatactcacggatgggaggaacgtaatgtattgttaaaggggacttaccagaacccgaagtgctggcatcgggagctctagtatttggaaccgggaccacaggcttgggcctgggggtcctccgctccggcagagcttccaggcacatagtcctcccagcggccgcctgggccttaatataagccagctcctgttccctcttgaagaggtactccgccatggccatgatgtcatcccggaacaccttctctgctgtcggagtccttgcgtttggacagatgactttggagagattgaagtcatccaccgactgatgccccagaatcaacttggccttccgacagttctctgtcgtgaccaactccccaacatcgagggcttcttgtcgtaagtggcaaaggtcttggcccgttgaagaaatatttgggtaggctcagtccgaatataaggagggatcctaacccactccgtgagaagctctgggctatccatggcctggaaaccgaaggagaagaacaagcggtgacgatactccttcacgtgcttctgctggttaaaagggctgggccctcattcaaaggatgggcccgaaggccataaaaaaccgtccttaagtttatctccctttttggg

SEQ ID NO: 352656 - DNA, 685 bp, Cannabis indica
tacatagctgctggtagttgttgtactcaattgttataattgaaataaatgttgattgattatggatttgaattgagtgttttaacaattttttgtgattacactaatgccgtaaatatttccaaaaatcatgttcaacattctagaacaaaacacattgatataaggcatcacattattaggaaacttattaacaacaaaacattgcagttagaatatgttaatactgaaaagtaattgactgatattctcaccaaggccctagactcaagtcgctttgactcctcagaaaatccctgggagtttgcattgtctaatctcttttgttcttgtttttgtacaaaattgttgagttgttcttggcttgcatctattcttgtttcattcttatttgacaaatcatgtttatgattttggatgataattagcttaggatcttgtacttatcatacttttgatggttgagttaaaagatttaggttactttttttgtgtgactgggattgcataaagtacttttatagagttgagcgattcttgtttctgtttcttgtcaagccccttactagaatagagctacccataatgaggtgtgaaagtcatcttttgagtaagttgaaacttcgtaattaagagttatgaagagaatgcactaccatagaaaagggctaccttcagtatggtg

SEQ ID NO: 352657 - DNA, 873 bp, Cannabis indica
aaatcacgtaatacgcctaaggtagttagggtgttacactttcaatgtctttgccgcaactgaaattcatacgtattgtcgagtggaagtgttaaaagataatcgtgaagtaactaccaacaagaagaaagggaagtccaaagaacgatttcaaactttttgacgacatatgaaaagactgatgtgcgggaattggcaaggtgactctcattctagggatagctttaaaatttgtaacattggaggacaatttttttcatttggtacaagggcccttatggatgcacgaggtggattgtatcctagttgaattttacaattaccaccaccaccgccatactcatgtagcgctcaagtaagttccctttcctttttctttaatgtcacattggggacaatgtgtcaatttagtttggggtgaacttaaatttgtattaatttttatttttatttttagtttgtttctaatttttttttagtttcattgtttctttattttgagttaattgcttaatatgagtcaatttgaaagtaggtagatagcattatttgaaaattttatttatttttcaaaaaatttgtgtgcttggtggtattacactcttgactaattttgtgttttaaaagaacatggaatcaattaggtaattttctagtaattgaattggtttatgtatgctaattgtgcaatgtggaaagttgtttgaaaaaaattctagaacttgcttgcttgctatttgacgcgaaataataaattatgcatgattaggaaagtgatataggcattctttggatcgattgtgtctttcaagtcatccttctaattttatcctagttaccctttttttgagccttaacttattctttgtttct

SEQ ID NO: 352658 - DNA, 596 bp, Cannabis indica
tatgtcacattggggacaatgttaacctttagtttggggggaggaatttaaaatttttaagttttcactgtctgtctttagtggtttagtttagttgataagtgagccgatgataattgatttgaactactgttgttatttgtgaaatggattgaaatcttgaactgtgtgcttaattcgtaaactctttagattaacttggatgccttgtgaaaaactttttatcgatgtaaattattaagttttggatagtatcatttttgttctacttgggtctgtggaatgtttgcttgtgatggaatagaacttgcttgacttattaccttgaagcgagatccttgataactgttgcttggaaatgatttaggcaattttatttggaccgatcgagcctttcaaacctacccttataattttgtccctagtatacccaatttgagcctaagcttgtttcaaaattttaaccacttaattaagcttattgtgtttccattatctactttaattcgcaatgtacattattaagccataagcttataaataagtttgggggagtgaagtgttatgagtggcattattttagaagtgggagattg

SEQ ID NO: 352659 - DNA, 592 bp, Cannabis indica
cgaaactatggattttgatacaccatgcattctttgtgaaaaggttgttttaactggtagaaaatgtgcagactttgtgaatcgatctaccacaacccaaataaaatcaaacaaacccgtggttctaggtaacccaaccacaaagtccatcgtgatatcttcccacttccactcaggtagggttaaaggctgtaacaaccctactggtcactgatgtttatccttgatctattgacaggttcagcatctcgatacgaattctaccacattcttcttcatcccgctcagccagaagtaaggtttaagatcttgatatatcttggtggtgctgggatgtagggaatatggagttgtatgagcctcttcgagaattttatttctaagttccacactattaggaacacaaaccctggttttgaacaacaacatcccactacctaacactataaagtccctggcttgatcagctgaaacctcttctctaatctttactaactctggatcagtcaactgagcgactttaattcattcaaacagatcagattgcagcgtcaagttatgaagcttccctacaacaaactcgatgctagat

SEQ ID NO: 352660 - DNA, 1219 bp, Cannabis indica
attttttaataattttaaaaccctccaagcacttttttttattttgaaataatttatttatattttttaaataattatattaggtggatcaatataaatgtgtcatgtgtataagattatacacatcaattggttatgctggcagttaactgtgataaatagatactttaaatttactaacggttcagtagttcaaagagttttacctccaaaattttaatttggacggttaaatataagtgaaatgataattgagagagtttagctgcaaaaaactcattgtaaaaataaaatgtagaaaagtagaatacgaatttgagcccgtataagaaaacgggtcagcctgaataaagcacgacacgaatcttagcacaattttttttttttgatgaatcaagtattgtattgctcataaatgtcatttgtacaaacaaaatagcatcctcatagaaataaggacctatatgaatcatatatgttctatcattatttacatcaatgctggttactctatcttataaattggaaaatcaatcttgatctttcttcttgacttccttcggcaaaagcaccaaaacacgggtccttataatctcttttgtgtgctgaataatctggtttgtgcttactatcttcatgtcccatatgtgttcattccttgctttccaaaggttataaatcaaagaagcaatggttgccgaaaatacattcttcctgaagcttgacagctttgctcttcttatccctctcaccagctgctgcattgagttgcattgtgagccccattgcaaccattgttttacttccagcaaacagtgagcagaaaccgaacatatgaaaaataaatgctcaatgttttcttggtgttgattgcacaagacacaagtatcttcctgcactatgttatgagctttcaaccttgcttttgttctcaaccgattgtgcattgctaaccagaaaatatagcaatgtttgggaacatttagccttccccaaacctctctatcccaggtgatcttcggctgaactgggcagagcaacttatacccttcagcaatggtatatcgggttccaacaaaccgttgaatatccatcatgctcttgatttggtcctttgcattcaccacctatttccaataccagctgccattttgtgggaacttatattcccaccaatctccctatttaatatatacactatgtatccatcgaacccaca

SEQ ID NO: 352661 - DNA, 754 bp, Cannabis indica
gccccataagacaacccattatttaaatatagagaatttttgaaaaaacactattggttgagtgtcacatagtttttaactaatatcattaactaatcgtgaaacgctactataaaaagtactcacccactaatacccaataataatacataaaaaaaattaattggatttttcatatttttaattttttgtaactatgtgtattgtgtcctatggataaggtgttcatccaaccgcccataccgcacaaattgtccgcactttatcacaccacataaaaatatagtttgaaatcttttacggtacggttgtgatttgcatttttttaaaccacacagtgcagtgcaatttacagttttgaatttaataattgtggttcaaacgacactccactgtatatattttaaaattactaatttttacaatatatttttattcttatttttatataaaaataaatatatatatataattgatgattagtatatatgtaataagatttttgtttgtattgttaaaatgccatagattaatttttaaatttttattataaagttcgataataatagtagtcaggcccggtcatgggcataggcgggctaggcttgtgcctagggcccacccagcccaagggctcaaatttttttttcctcttttaaaattatacatttttttaccgattttaaaaaataccacattttttctaacataaaggcccaaaatttttttttctccctatggtccactttgtttc

SEQ ID NO: 352662 - DNA, 664 bp, Cannabis indica
ttgtggaacacgggaaaatccgtatggacatggaaaaggtgcgggcgatccaagagtggacgaccccaaccaacgtgaaacaacttcgctcgtttctcggtctagccaattactatagaagatttgtggagggctattcgagaagagcgacacccttaacagagttattgaagaagggtgttacatggacgtggtctgagaagtgcgaagaagcttttcgaagtctgaaagaagccatggtcgaagatcctgtattagccctgcccgatgtatgcaagccttttgaagtacagactgatgcgtcagattatgctttaggaggggtactcgtgcaggagggccaccccgtggcatttgagagccgcaaactttccgaagcagagaggcggtacactgcgcaagagaaagagctcttggcagttattcattgtttacggacgtggaggcattacttgctggggtcaaagtttgtggtgaagacggacaatactgctgttagtcatttcctcacacagccaaaactgactcccaagcaggccagatggcaggaattcttggcagaattcgacttctacttcgagcacaaggctggacgtcttaatcaggcagctgatgcccttagtcgtaaagcagagttggcggcactaaaggtgttagcgggcat

SEQ ID NO: 352663 - DNA, 588 bp, Cannabis indica
caagcctacactccgatttgaaaagactaaagggaaagcatcacgaggagtaagatagactttaagcagtccttccaattcgggaaggagggttggagacgtatcgtagccccagtgacctttcttgtacaaacatgcatgcgagagtcatgttgattttttacgtaacaagattcagcttccgagaaggaaggctgaaaattgtataaaaaattcaaagcttagacttcgcttgaaaagatcaataggaaaagcatcacgaggagtaggataaacttcaagcagtccttccaagccgggaaggagagctgaagacgtgtcgcactcccaatgatttttcttgcacaaacttgcaggcgggagtcatgttgaatttttatgtaacaagctttagcttttaggaagaaaggttgaagttgtataacaattcaagcttagacttcgcttgaaatgatcaatgggaaagcattatggtgagtaggatagacttcaagtagtacttccaatctgggaaggagggttgaagacgtattacacccccagtgagctttctagtacaaagtgcatgcgagagtcatgttgaatttt

SEQ ID NO: 352664 - DNA, 502 bp, Cannabis indica
tctaactaagcttcactaatccttttactctccaaaataaaattaataaaacaatattagaaaggcagccatagataccactagaagccaaaataagggtttaaaaaggaaaagacctaattacccctctaattaattaaactagttaccaactcccgagggctaattggtcattactaaactcgacaattcaacacttaacaaaataccccgagcaaataacatacatcaaaatatatgcaatatgactctctaaaggcccaacgtcgctgtccacagcttccgaacacaatcacagaaattgagtaatttacataaaatagcataataacatatatgatatattaaatatatttcgaaaatgttcatttcataattattaatttagtctcatttatgaaccctaattatttaataattcaaagcattaatcatatgcggtctttacatatttaacttgcaaactttattttcctgcccaggaagaacataaccttctggt

SEQ ID NO: 352665 - DNA, 843 bp, Cannabis indica
tttttacaaaaaaatcataaaagtcctaattttttcctatatattagattatattacatttatatatgatttaatggttgaattaataattttaaaaataatttaaaacaaaacaagtttattataattgttcatttatttacatgatctaacaatgttcattacaacttattaataaaattctgtggaaagatattaaaatatataaaatctagtttatctttaaacattagattaattaattaagtattagtccatataatgcacacaaaaatttctgattttcttaatgattttagcttttaagtttcaaatgctaaataatgatgatgttaaaaaagcatgcccaaagatgcaattacaactgccaatatatgtcatattgaacctaatgctttgcgagttttaaatgctttacactctacttcttaggatttatcaagttctttttatttaattttagatgatggtttaattaaatatgttattaaattgaatacatatatgtttgttggatcggtgaagtttctgattttattttctctattattatacatatttctaaaaaaaaaacatgcccaaaatttgtatatttgctgattaattacatttgcattaatttttataaattcaacaaaacttaatataatatagatggttcattacaagaaagtacagcaatatatatttatatatataagaaacgatcaaacttacaattaattagattgagttttgtcgtggtattaatgatgagttttgtcgtggtattaatgatcgagaatacattattaacagagaaatgctaatagaaacactaataatattattattagtataatt

SEQ ID NO: 352666 - DNA, 545 bp, Cannabis indica
tgtgagctgggacccactgggtgagaggtcccgatctgtcaagcctgtcgcggtgaaggcttctttgaagagtaagttcacggaactcccattgtcaattaagactctggccaccactttattcgcgatgggggtctctatgaccaatgggtcatgatgagggaagcgcaccgtcttggcgtcttcttccgtgaacgtgatgggttggtccatcaaccggggcctttgagctgtgagttgagtaacttcgcatacctcattgtgtttcgcggccccgcatagcgcttacactccttgcgagtagtccctccgatatggggacctctggagatcatggctaccctttcattagcccggggcggcagaccggggatatgctgggcgtcgcccgtgggagcagctggagccaatacacccgctgtaccccccagtgttccctgaggcatacccacggtcacctgacccggattgaggtggggcaacctattcttgatccactcatagaggtggcccaatcggattagattttcgatctcgtccttgag

SEQ ID NO: 352667 - DNA, 1096 bp, Cannabis indica
gaccggcactatgttcgtactgctatgatagcatcaatagcacccaagagtacaattgaccataatatcactcttaaccagtactgtgcccgtattgccgaaccgacacaattgttgtgtcgctatgatagcgccaattaatactctctggggtgaatatcactcttgacaagtacgatgcctgtactgccgaaccgacacaattgttgtgccgctatgatatcacccaaaacatatacaatcatacatacaacatgcacatatctcatataacacgctatatacagttcttacctgatttccgaattcaagtgtgttggccgacctgaacggaaattctcgcgctatcacattaatagtaacacagatgagtgactcgctaaatcactttccagggatttaaacttaaaactaaaagttcccctatcgataaataaacatggcaataccctaaatctctcaaaaatgggaaaaactagggttccaaaaattcccccaaccggcaaactggttcccaaccggaatttcggttctgggtcaccaaccggtcgactggttgccacaggtcccccagaactggaattccggttctgtgctgggaacccgaaaaattctccctttgacctcaaaatccatctaagcttcatcaaactttccagtatacctatacaatgtattcacaacattttccaaccaacaattcccagaaaaaaccactaaaactcaagttgccattaaagctcaaagctactcaagcttgcttaaaactaacaccatgcatcaaaatcaagtaccagaacctttaatcaaccaatattgagtatagaaaccgaaccctaaccatttctaaacttaacagcccctattactaaaaaacacaagctcaaactaagaaataagcttaaaaacacatactcaagagttctagggctttaccttgattaaaattcacaaaaccctcgcttaaaagtggtatctcaatcatagtgtggaagattgtgtagaatccaatcaagaaggagaatcagtatcaaaggaaggagagaaagagatccaggttcagatcttgattatgttatgctacagaaaggaatca

SEQ ID NO: 352668 - DNA, 447 bp, Cannabis indica
aaataaataaataattagtttatgttagatattttataaaaatttattaaaataatagtaaaatattaatttatatatttaagctctaataaaatattcaaaaaatgagagaataaaggagagaagagattgatgcatttagagtgatattataatgccatgtcaccgcctcatatgtctcctatatatatatatatagatatagttagatatagatgattcaatccaagttacccttttatgatcgagcatatatattaataatattaaacaaattaatgacatatatattaataatattccttagaagattaagaacagaaaaaggttaaaaaataaataaatgaatgaagttaccttttaatgagccaaattattgttgtcgcaatcccaaatcggaattattatttttattgttatcttccctgaaaagttttaccaaggttg

SEQ ID NO: 352669 - DNA, 908 bp, Cannabis indica
aaaagcctggcaagtcaaaagttacttccataggaatgtccgcccaactcccccattacccaaataattcatgctcaaatggtaaacattccaacaacaacaacaggcaagggaatgggaagaagggaaagttcaccagcaaaactgagcaagctccccgagagaatcaagcaaagtacactgcatttacaatcttgactgaggatatagaaagtgtttacatggccacttagtcgctagccccgtataagaaacccaagcccatgaagaaggatgtcagcaagagagacattaccaagttctgtcgatttcatggagattacggccatgacaccaatgaatgaagaaatctgaagcgggaaatttaattcctgataaggaaaaataacccacatttatagaagtatttcaaggccgatcagagtcagaggaatgacaataaccaagacttgctacctccaccagtagacggacatctgcaagtcatcattggaggcccgcacatagctggagattcaggcaaagcttgggagatgtatgcccgaatagcacaacacgagcaagaaaaagtaatcctggtcgtagaagaaatgaagcctaaaatcccacgggcaggagggcctaccgtaaccttcaacgacgaagatgctatataaaataggttttcgcacaacgaccttttggtcgtagaggtcgagatggctaacaagatggtggccaaaaccatgattgataatggagcctcttccaatatcttgttgaagactgtctatgaaaagatgggactccagctcaaggatctaaccccatgtcttttgcctgtctatggtttctccggccaaggagtcgcacctctaggacaaattaacttacccctcactttgggcaagctccgacgagcatgacta

SEQ ID NO: 352670 - DNA, 1057 bp, Cannabis indica
agagattgagaagtgggcttcatttgaagttgaggcttcccctcgaaggttggtgttagagggaaagggaagaagttaaaggagatattatctgctgagccagggattgagaacaatgaaggggtaggggatgttcaagtttctggccgttgctccttcgaacatttgggtagaatagtcccacttctcaacgacgctaaaaaagaaatggtcagaaatgcttgttttctctacattcttaagggaagatgccccgtacatcgatgctaagatagttagttggctcatcgatcacgtggatctaaccacttctcggctggagatatttggaagaacgatccaactatcgtctaagctgtttgaggatgtcattggaatcagggatgggggaaaacccgtgacaaccgaaagtgaccgtgaacgcattgagtttgacctaattttaaaggccaaggactataagttttccctgactttgctggagaatgagttgaagaagagcagtgagagcgattacctgtttctcattaagtgtctgcttgtttgtattggaactgtcttgttgcccaagaatggtaccgaggtcagcactagctacatgcactctttagttaatacaaggtcaattaagaagaagaattgggcgactgctgggtttcgatatcttatgagctctctacagcggtacaagactaagaacactaaaaatgtctccggttgcaccatatttttacaggtaagttttcgaattattgtgatggtagtaattttattctctcgtgtactgcggtgctaatagatgtatgtatttttgtttggtggcagctggtatatttgactcatgttgactagactgctagtcacgtggaccgctctgtggctccaattggcttttggaccacaaaacagtacaaatcagtgtacaagtggattcgagaccacggtggtcacacaagtggaaaggtacatttagtacttcaattttctgatgcattagattttatttgggagatatgctaactaaattttttggtgtactaagcaggtgaaattgact

SEQ ID NO: 352671 - DNA, 1005 bp, Cannabis indica
ttttctcaaatatgctatcatcttttctccccgagcctcgtattccccagatatgtgatttaccagcagctgtgaatcactgtagattttaatatgttcagccttcatctcttgagctagttttagaccagcgatcaaagcttcatattcagcctcattattggatgctttaaatccaaacttgactgcaatgtgcaagtgttgcccctaggtgtgacaagggcaattcctgcactggatagttgatatgtagctgaccagtccacgtgtagtttccaagtcggcttgtcttcactgttacttggctgaggtatttgtactggctcggggttgctttcttatatgctttcttccttacttgtgcattctactacaaagtctgctaagctcttccccttaattgctattcggggttggaagataatctcgtattggcccaactccactgcccatttgagcaaccgtccagaagcatcaagtttttgcaatatttggcgtaatggttggtcagtgtatacccgaacaggatgagcttgaaaataaggccttagctttcttgttgctagaatcacgcagtaagtgagtttctctatcaatgggtatcggccttcggcctcaatgagtcttttactaatgtaatagacttgatgttgtatgtcgttttcttctctgatcagtaagtcacttacagcagtctccgtgacagccaagtacatcccaagttcttcttagtccagaggttttgatagtacagaatgttttgcgagttgcatttttagctcttgaaaagcattttcacattcctccgtccactcaaattgcttgtttcctcgcaggatgttgaagagcagaacacacttgtttgttgattttgaaatgaattcgctgagtccggcaatccatccagtcaaaactttaaacttccttggttcttgttggcgacttcatatccaggaaggcttggatgttctccagattggcttcaattcctcgggcgttgacaat

SEQ ID NO: 352672 - DNA, 600 bp, Cannabis indica
tgtccagtctgcaaggccttatggtcaaagagcagttcttaagtttgctcagtacactagtgctcatgccattgctagaagacttatgaataaactaagctattcatgtaagacgccttagcgagatacgttttgcagcgtatcttaatccacatcagcgttgactctttaaaagcagtttaaatcacagctgtgggatttttttcatgataactgcatttatttacgtggagcgtaattaaggccctcaatttcagggaaatattgttgtgggattcgaatttaaatgtaattaactgccaacctatgttattataaataggggcaaggggacgaaaaatccttgagagaaaaaagaatacactgattgtaaagaaccctagttctgtatcaaaaaaagtctgaataagattgactcgtggactatgcagagtttattgcaaaaccacgtaaaaaacttggtgttatttttgctccttttattttctataatttctgtgctaaacctaattaacgaaaataggctcatatttgttaacaaaaatctgttgtaacagtttgctgctttcatttgagagcctacgtgataaaagcttagaa

SEQ ID NO: 352673 - DNA, 744 bp, Cannabis indica
aaataaattatcgtaaattaatatttaaaaattaataaaccttttcaataattaaatcttaataatctgctaatttccaaattaaagctaagcggtctttacagataataacctactcctgttgtatttgtattaacttgagagaaggaataaagttttctttctctcgaaagctctgacaatgaatctgtaaattattttctctcttatatcactattctctctcttgggtgtattttcgaatcaattcttttggtccccttcatagtgagattatgccactatttaatggactaattacatgaggaatgtttccctttgtctataatgaataaaataagaaactacattaattctataattactatgtaaggaatagtaaagtaaagtgtgttgcctttattctgtaactcaatctcacaattatagggattgtctttgtttcttggaaataatgagattgatctttggaattgccatcttacacgcttcgcttggcattagcatgtctgcatgttggttggacatcttctccaccattttattcgggtatttgagtgttacaaatgttaaataaccattaatggactgctaggaatactttcctctacccaggtgtcataaatatgggacacatgtcatcaattcttattgccatgtcaaggtgaaaaaaataagataacattttcccccaagtctgtgcaggaccttcctagtcgcacgtggacttcactcagcctggag

SEQ ID NO: 352674 - DNA, 587 bp, Cannabis indica
tacttaagtcgttttagcatggctatggctagggttaggaatttggatgacagcactcaactcacatcccttcaggtaggaatctctactgatccattaatcgcagggggcgatttgtgggatgactaacgagaacgtccagtgagaagcgtcactgagttcaacgaaagggcttaggtttttgttcgaaaggaagaagcccaaaaggaaatgaatctgttgaaaactagctcaggaagaaaacaaaacaatgttacaataggtactatttccacgagaattgatatcttgggggcttcttgttcgaagagaaaggacagagttaaggaattgtcgaaggataaaaagaagtagaaaaagcgtgataagtacgtgccagtgtatactatttataccgtgcttaatgaaactcaggagaatatttaccttgcacatggaaaaaggttgccttcgacacgcccaagcccatgaggaattcgaggagcaaaagagatcctaacaagtattgcaagttccataaggatattaggcatacggtgacgaatgtcaccaattgaaagatgaaatagaaagtctcatcgctcgag

SEQ ID NO: 352675 - DNA, 462 bp, Cannabis indica
taatgggacgagtaatcctgaggcacacgttgcctctacttccaaacccaagaataagaagaagtggaaaaataccaagaagcgagctcaagctgtgaaaacagctaagaacaaaaaggctgctgcttctggtgatacaccaaaaggaaagtgtttctactgcaatgagaaaggccattggaaaccccaatgtcctaagcttcttgcaaagaaacaaggtatttctttctataaactgatgagttttagtgaattattatccatttggattattaattctggactactaaccttgtttatttgtttttcttcttacagctcaagcttcttaaactcaggtgctgtctaagcgagttggatttgaaagctggacaaaggggcggagttcgtccaagataaagataaagctcatttatttatttaattttgaatcaattgtttcagttttaaaacaatttggtt

SEQ ID NO: 352676 - DNA, 533 bp, Cannabis indica
tttttttttctgtgtctcataaaattgaaaaatatgagtctgggtatgaaaagcgtaagaaaagaaaaaaattgaggagttaacgcaatctcaaagaggagctcttgataaattcattataaaagaaccacaagtttcttttgaaaatcataatcataatgttgttgatactgatgaaaatatgttgcctattattgagaatcatagtgaaaatgatgatgtagaaaatagaagtgacatgcctattgaaaatgataatgtggaagcggaaaataaaggtgatgtgcctattgaaaatgataatatggaaaatcaaaattttgattatgaaaattgtgatgatgatcatttgaataattcactctaaaataaaattttagaggataataataatgttgagcaaacaaacttatttaaaaatttacttgacatatttgatccaagaaattgggatcctcttgatccaaaaatgattgatttattagtgatgaagggtccaaaaagagattattctattatggctggtcctaaaa

SEQ ID NO: 352677 - DNA, 572 bp, Cannabis indica
tgaatagggtattcaaggattccttgatatatgtgttatagtatttatcgatgacatccttgtgtactctcaatcagatacggagcgcgagcaacaccttcagattgttctgcaggtattacgagacaataaactgtatgccatgtttaaagagtgtgaatttttactatcccagatgtctttcctcagacacattgtcactacaacaatttatgttattagcggcggagttattagcggcgggcactctccgccgctaataacaggggtattagcggcggagagtggggtccgccgctaataatgggggattttttttttttgaagagtattagcggcgggcagtccgcggcaattgctccgccgctaatactagtagcggcgggcccgccgctattggtccgccgctattagtattagcggcggagcccgccgctaatactccgccgctaataaatgggcgggataattcccgctcatgtatttcaaactattagcggcagactattagcggcgggggtccgccgctaatagtatttttttttatttttttttttaatttttaatactat

SEQ ID NO: 352678 - DNA, 793 bp, Cannabis indica
tttaaaaagaaaagctctctattcgaccacttaagcagcaagaaattgattttgacctcttgttgttggtatgtttcctctagcttctcttttaagttttcttggtgaatttttatgaaaatgatgtgttgcatgcttagttttaggtcattgttgttgctgggatgttgtagatgttttcagagatttaagcttgtttatttgagtgtatttgagctgttcgtgatgcatgatagttaggttgagtaaagttatggtttttctatgcaaaagtttagttttcaaagagaaaattgagaatttggtggctgtgattattgtatgagtttgttttggttttctgcagctttagtatgcatgtttaagtagttttaatcttggtttgatgttggttggtgagctttagccaagtttgagtttgaaactcaaagcttggagctcacatggcactttttgttgctgtgcattctgggtagtgttattgctttagatatgttatttgggtcctatagaacaggtctggaaggttttaggttgtttgggtgtgattttgttgagttatgaatttttgaaattctgcctacgaggaaccggaattccggttgtgcatccagaatttcggataggttttgaaaattcccagaaccgaaatgccggttggacaaccggtctaccggttggggaaatttcaagaaccctagatttcctcgtttttatgttatttggggtattgccatgccttttatcgatagggaaactttaagttcctagtttatgtccccgggaagtgatt

SEQ ID NO: 352679 - DNA, 583 bp, Cannabis indica
tttttttacatagtatattaaaataatatatgctatatttaagcatatattgtcaaatttccctttaatatttaaattaataaaatattatttaaataacattgatatttattagttggttaatgttttaaatttgaaaaagatatttgggattgttatatcaatctctaaatttttgaatttgacattattcaaaattcttggataaatgccattttttttcaactaacttttcttgttttgttacatgtttgtttatttaattgcttattcaaatttttatgattaacttgttgatggattcaatgatgtaaattaattatagtcaaattattaataggataaataaataatttgtaacatataattttataatttcttttgataaacctagtaacatgataaagttcatctaaatcatttgtctatatgagcttatatatttataattgggcttagatgcatataggaaatccattactaaaataaaatagtagaaattacacagtatatggaaaaattataagagtttacttttttatggcataaataaataatactatggggttataagttttttttt

SEQ ID NO: 352680 - DNA, 1545 bp, Cannabis indica
aaataaatcttgaattctcttttcttctcaattgtgcccttccttggtaaaattcacaaataagacataatctttatttagaatcctaattgattaattaaaaccgattaattgagactacaaaacaatattattctaattagtgcggggaccatgaccctatgtaactaagctcccaataagtagatctaaaatttaccaagtaaattttctaacttattaattcctcccgactctactatagattcgtaattgcactcctgattacataaaacgctctatataccaaaaatagatgctctttgaattatccattatttcaatctaaataatcaaagatcctctatagatgatctacatcgagtagggacaaatttactgttgtacccttcaatgtattttattcttaaaacacttagctacttgtaaatgatatttctgtaaactaatataattactgaaatgagcgctcaatcattttatcgcgttaagccaagctcaaagaaaatcatcatttcacttctaaaatttatgaaaattatagatttcatatctatgattagcgctcacactcaattataataccatgttcccaagatgtaagtattgggccgaactattgggtcagctttaacgaataagtcaaaacacacaaatagtacatttaagctagaacctaactatctcaggattaaaatcttttgacctaacatcatctaagtgatattgacttagaaagatataacggtaagtttatgatatcttttctactgtcaatatcggtccagtctgatgtatactctatacatccgatactagtacactttgctaatgtcttataaaagatattctacttatacaagtgtaagtaaactttatggctaattatcacgtcagtataagtccagtacactgataaatcatgggactaaatactttgaagtatataatcgtgattattttccactgtgtagacaacactataatcatgaataactatatattttgtatttgatagaattttacattaaacatataatcatgtgaactatgcaacataaaatgatttctgtatcaattagtaaatctgattatattaaaatgggtatttagggcataaaatctaaacaaactcccacttgcactaatatcaaactaaaagtgcatttcaattaatcctaacatcttgatgtccaaaacaagtgtagcatgtagtattataattgtaatagtatctgacatgttgtatttaatacaaattttatccaccattacatatccttaagtcacaaaattcttgatattgtactgaaatttatttctgtatgtatactcctcttagggcccgttcggtgcgcaggactggactggattagacaggctaatttgttcagtctagtgtttcgacatgttggaagtctagataactaatacaactgatctcatctatctgaaattatttatctcatccagcagggtgggataaataatcccatgcaaatgattttttttttatcatttttttagttaatatattttaaattt

SEQ ID NO: 352681 - DNA, 526 bp, Cannabis indica
cttacaaacttagtgtggatgcagcagttagaagtcgagacaacaaacatggttatggtgctatcgtgcaagactctcaagactagataatagtagggttttactcttctgctccctcagggctgtctcccatcttcgtagaagtagaggctcttaaccgagcagtgagttggggtagagctatcaatttccctattagtctggtgctctcagattgttttgaccttgtctcaataatattaaagaggagaaaagactattcagctctttaagatttgatttggactgttctcaactatttgtcctacttttctaatgtatctatccaccacaccccaagagctcacaaccaattggcgcacaaacttgcacaagatgcattaggaacagacgaagagtgtaacaccctaaataattaggcacgctacccaaaatacttctgaaaccctaatcccctaatcgggattactaaccaaaatagcgcagaatttaaacttttatgttaaacagaatgaaaataaacttg

SEQ ID NO: 352682 - DNA, 1081 bp, Cannabis indica
gatttagagatctagggaggaagacttagttgattgtattgtattatcaaattgtgataattgctatggatcaatcaagtacgcatacataattatcatatactattatcatgttctatattatatacaaattgatcttgggtttattattgatttatctaataagtggtatcagattaccaattgtatatgatttaggacctataatttgtgtaacaattaatatgtatatgttaattttctctaattatatattaatttcgttattattttttgtttaatttttcgttatttagtcttaaaattttagaggttttatttctcgttaaattttttttctattgaaatattatatgtatgaaattattatgtattggttgagaattttatgtttaaagttttagggcttatatatttctattatgaaattaattttgtgtttttttgattttattgattataatctgaaattgattgtgcatatctcatcaataattattttaaaatgtttctacacgtttaattttcgaattggatgagataatcggattcctttggcactaactattttattaaacatataaaagaaaagaaaaattaccttttatactattttttaaaaaaatttacggttttggttgctcttaaagttttaatataggttgttgtgtaaattttggttacgatttaagttgtttcgttcatttttatgtggattgctatgtgaatttccgtaaaaatacaaaaaaaaaaaaaacaaataatttaaagtataaaaatgaaaaaaaggagataataaaagtacaataatcatagtccaggttaaaaatcttatttttttttctaatatttatacttatagttaaaaaattaattagattgatttattaaatttttttttctatttagtggtgcttacaattaaaatatagtgataacagtaactttaaatgtaatagtgattataagtaaaatacaatgataataagaactttgattgtagtgacaactacaaatttataagagtaatttggggcataacctccttaagtggttagggtttttacattaaccctctatt

SEQ ID NO: 352683 - DNA, 1419 bp, Cannabis indica
ttgggaagtaattctggtcaaatccttctttgagattgtttaacaggggtagcgtcttttgatacttccaacctgtgcacaacaacttttggattgaaccttggcatgtctcgatacccccaagcaagtacatctttgttctcacaaaggacttgtttgtactgtggtaactcttcttcagttaataaagcactgacaaacacaggctttggatcatcctcggtcccaagattgatctctattaaatcatccatagttgattgtcacccgtcttctaattcttgaggtgttggttgaatgatgtctataaaatcttctgaagggtttgtgcttgagccttcatcttctacggtcaaactttctacaaaagagaggtaattgacttgaacaaaatttttttcatcttcttgtgtttcatgcccgtaaatagtaattctcaaaggtttcttctgttttggcacccactgtttttgctttctagttccttttttggttgtggagcacttgggaaaacaagcctttcgaatgctgacactcgtggggtggatgtgcttgcttcaagtctatcaaatactgacacccacggggaatgtgtaggaacatcgttgctgcgaaacattttttgttcctcttctgttaactcgtctggttccaaagaagcttttaaacaatcactattttgatgaattgtgattcctttttgcttcctgaaatgaaactttttcttctccattttgaaggcttttggagttacagaagtggaagactttttattgagagtaacaacccttttatttttcttgctatctttaccaaaggaaattgaaatttacattttacccttaggtagtgactgattgattttccttagcggtaaagtaaagcttgacattaggtctgtcattgaatcttcgattggtgtcaaagcttttggccctactcctcgtcgacttttagggatgtacttgaaggttcgtttttggttagataccatcaagttctcctctttgggctgaggagatttcacaggggatagttgcttaatttgtagagagttttgtgcggttgagctttcatgacgtttgctctcttcaagtttccctttcagaatggtgacattagctggtttgtaaaattttgcattagcataattcacttgttccccgtaaaagggatttgggtctgcattgacacttttgactttgcattccctgtaaaacttaaaaacatttgtgaagtgttgaaggaatgactccatattcatgaagccacggtcgccctaacaacacattgtaggatgtatctgaatcgatgacatggaataaggcttcagaatttaattcacctatttcaatttttagtgtgatacgcccccttacttttctccagcttggtaaaaccttgaattgtcaatgatga

SEQ ID NO: 352684 - DNA, 612 bp, Cannabis indica
ccccacaagttcaaaatgtcgacatggaaaatgtacatggggaaagaagatcccctttcccatctcaagtactttgaaatgcaaatggatttgcaaagggtacgaggagatgtatgctgcagaatctttcctgccactctgtcggaagccgctcaataatggtatttcaagttggctcctggaaagtttagttcatggaaaaccttctcttcggaattccatgcacaattctcctccttgcgccaactcccattgcatttgggagacttggtcgaagttaagcaacaaacaggcgagccactccgggcatacattagtagattcatgacggaggcgaccaaagtttcatgaataaccgaggatggaaagttatccgcgatactggggggcatcgaagtcctcggtgaactttggaaggatataaggaagaacgggccggtagactcaatgagtgatttccttgatagagtcgaaggcttcatcaagctcgaagaagccattcaacgagcagaatgagaacacaagtcgggaaagtcaaaggctccttccactggaacatctgcccaacttcccaactcccaaataattcaagctcaagtggcaagctttcca

SEQ ID NO: 352685 - DNA, 1125 bp, Cannabis indica
tataagggttcttgtgttaccaagaagcccattgtagaagttgtgaaccaacatccacttctcaataccatgatgagggcactttctgatgagatccgtgaacctttcccaagactcatggagagattcattatcctgctgacagaagttgttgatttctcctcgcaacttggtagactatgttggaggaaagaacttagacaaaaattttgttgccaagtcattccatgtggctatggagtttggtggcaaggagttcaaccaactcttggctcattctctcaacgagaatggaaacagtctcaaatggatggcattatcaataactccattgactttaaaagtctcacatagttccatgaagtttgataagtgcagattgggatcttcagaagggagtccaccaaactggactgaagactgcaccatttgaattatggcaggcttaatttcgaagttgttagcattcactgctggtggcctgatacatgactgaacccccgtaagagttgggaggatataatctctcaagttgcggccattagcttgatcttcaacggcacctccattattaccgttgttttctccattatttgcaacattagcgttatcagccatgatttctgatgtttcagcaggtgctcaaactctctcttgccttttgttccttctgtttctcctacaagtcttctcaatttcaggatcaacgggtaatatgactccttgaccttgacgacgcatacactcaaaatccctgagatagataaaaacagtattgcaaaaaatatattagaaatttagcaagagaaataaaccaaagtagaagttaatataattttatgtaatattaatctttatacaattccccagcaacggtgccaaaaacttgttaagaaaattattaaataatacgcaagtgcacgcaatcaagtagtaaactcacgcaagtgaggtcgaaccacagggaattggattaattactactaaattatacttatgattctatttggtcaatcaatactttttatgattcaaaaagaatgaaagtaattcaagaaacttaaataacacaagtgaatattaatcaagatgagacaataggaaggagaatcctgttgtttgttt

SEQ ID NO: 352686 - DNA, 740 bp, Cannabis indica
catgtatatttcttacaaaaatatataaatcaattagaacaaaatcaaggagaaagagaaaagcattaccatgttggagtgtgttcttctctgttggttagggcttggaaactggtttgtggcgatatgcagtggtggtgtaaagagaagaggctcagcaaatttcaaatgtcgtaccaatagaaaagctgttcaggtatgaaattacgatattgtcccggtcagtggtagcttttttttttttactatggaagttaattattattctaggtgttaaatatggaaggaatataagataatattgcgataagttcgtgcgtgccgtgatctatatttaattgtattgtttaaaaagtaaatgtgttgtgttgtgatattaaaaaatatgagtcatgtctcgtactaatatttttaaagggtagatctggtactatctcgatattttcgtattgtgttcgaatttgtattgttttttgcttgtgacaacccgtatttctttaaacagaccagcgtgttttcatatcaagacttaaatttttgctttacttttttatattttttttttataattactaaattatgtatatattttaaaattttaattatatttatataacttttgaataatattataaagataattatataaaaaaattagaaatttttacatgaaaatacactacacaaaatttattacctaaaaatactcttacacgcctatatctatttttttacttaca

SEQ ID NO: 352687 - DNA, 866 bp, Cannabis indica
ttttaccaatcaacttcaagacgtctttcagtgagatttatagtcttgacgagttggaagctgacattcgaataatgactactgaagtactctttttatcattaagagttatgattgtgaaaatgaagtgttacgccttcaagcaaagaaacaacgaggcgtatatcatcaacctcaaaaaaataaggggaaaaactccagctctctatcaaggtcattagtactaagttcctgtcaagaaattccagaacgctatgatttaaaacgtgtataaatacacgatcattttgatcctgtaaaagcatattagtcacagttgtgtgattttcaaattataactgtatttatacttcgtgatatgtagtcaaaccccacgatttcaggggataaaggttgtaaagattacggtcaattctgtaattaactgcctagtatgtgattataaatagagtcaagttagattaaaaaagggacgaaaaaatcataagagcaaaaggccttgaaaaaccatcagaaatctaataagattgactcgtggactatgcagaattttaaccgcaaaaccatgtaaaaaatcctttgtgttcatattttccttttctttatcgtttttatttttctttgcaagtttatcatttaggctcaaattttggttagcgaaaatctgcgttaacagtatctttcctgcaactttaacattcagtctcactagtagaggtaaagaccccagataggtttttacacttctccaaaatcactactctacccccaaagtaatcatcatcccatcagtagactttctagtactaacacaagtctagaaacctgattggtgtagtctaagagtattaaaataccactcttat

SEQ ID NO: 352688 - DNA, 439 bp, Cannabis indica
ttaccaattggaccctctattttatttttttaaccaaaaaattaacttttattaaatcaaatcagctaccaaagtagcttccaaaccagcagggacataacccccgcgagaaacacagccaggaatagaaccagaagaacgagttaaaaagttagccgtctggttcctaaaccgtttaacaaaattaattgaaatatgaaacaaatgagaggattgtataagagcaacacagtccgtgattaaaagtcccaccggagacaacaaccgcttcttctattgcacagcttccaccagcaacagcgagtccgactccataaccacaccagcagacaccccccctctacccacctccccttcacccaactgagcgtctccttcaacgccatagcttcagccataaacaggtcgggttgaccataaatttttgttggaaattatt

SEQ ID NO: 352689 - DNA, 557 bp, Cannabis indica
atttcttcaagagcccgactccaagtgttggtggaacccccgctcttcctactcctagatatggtaggaatagtggtgattccaccactgaccagcaaaggaaaactaccccgacatctggtggtttgggacagagcaagaggttccaagggaaccaaggtagaggtggatgccagggttattcttatcctaagtgcccacgttgtgagaaacatcatcccagagagtgcaatcggaatacatgcttccagtgtggcatggttgggtattttaagaaagattgccctcaggcgaagaaagaagagcagaagcaagaagcaagacccgtacctacttgggtatttgctattactcaagctgatgctgcagccagtccatctatggtgacatgtcagcttcttgtcaacaactcctattttactgtattgtttgactctggggttacacactcatatgtggcatcacgagtaattaatcaattgggtaggccttgtaattttattgagagagggtttggaaccctacttcctagcagggaattaattatctccaaaagg

SEQ ID NO: 352690 - DNA, 565 bp, Cannabis indica
ccagaaaagtcgctagagtagttgttggtgtcagaaaaatcgccagagttattgctggtaggggtgcacaaaatatggaccaaaccattcaacccaccaacccaacccattttttgtagcaaagagttatatatgttaagagtaggccacgactcattaggttgaaaagtgataggccatataattatgggttggttatgggttggacacattttaactctatataacccaaaccaacccatttcttgaaagatgttccaaatttgagacaacttacatacataaaatatattttatattcacaaatacatacaaatatatattttatatttttatacataaataaattatattgtgataaccttagaacgtcaattgaccaaaacacatcactaacatgtagtctatagtttccctactacttctaccaacaagcctaatgtgagaatccatcactattattaactttcctactcacacaatgcactactatctagttttttttttttttttaaagtacactatattacacacacacacacacatatatatgtatcgttttttt

SEQ ID NO: 352691 - DNA, 542 bp, Cannabis indica
agatataagaattctaatatacaacccttatcatctaacatataggtcacttttagagatctttcttgactgtctcctaatgttccttgtttgattacttcttagatggctcccactcaacagtaggagtttggttaaattcatacatagaagtacatttaacctcttactattggttcttagggatatcttgtagtgacatattatcttagtctgaaactgtaagtttcttctagactaagtcatcaacatagcattctagtatttactttaatgtacaatacttgcttaagattaagtaatcataagagatatcataaaaatttcataaggattaggtattttgcccaagtcattcgaatagactttgcaaaattctcctgttttatcctcaaaattcttataagttatttctatccatatgaatggttagatttactttctcagttatattctaaagttcatatcacgatcataacatagtaagctatcacaagtgtcatcctattaaagatgggcttagaattttaaaattctcccac

SEQ ID NO: 352692 - DNA, 542 bp, Cannabis indica
cggagccggtagggagcgccggcggaggtggcgtcgcggaaactgggcacggtgtgtgtgactttgaattgggtatggggttcagtggttcacggctgggctgggcactgcattttttcactttattatcaatattaatcgggctgggtatatccgaccgccacaattcatttttattttatttatttattattaatttttcttttcaataatatggagtatgggatgggcatcatccaatccaatccaactgaaccgaaccgattcgatcaaattcaatttaattaaaaaatgttagatatctaattacaattgaattggatactaaaagaaagttagattctaatttgattggattggttattggatgtcaacctcaaaatctaattaaaaatagattcaatccaattacattatatatgttaaaaaattatttatataataaaaaatattaaaaaatataatatatattaattacatttttattagatatttttatgtgttaaatttgtaatacttgattgttttgtgtttttatattc

SEQ ID NO: 352693 - DNA, 590 bp, Cannabis indica
tgttttaattatttaaaacgtttgactgcattacacttataaagatcgtatatttatgaagcattaaacttaaataaagggtgataatttactgttacgtatttttttcttcatatttttaagttaatattgaaatttaggtgtgtaattagatatctaattaaaaaatcgatccaatccaataattagattgattttgaggtctaattggattggatcggatgatgattttccaaatcaaattagtgattgaattagattggatgaaaaaaaaaggttaaattcagatgctcactcctaattttgagtaggcatggaaattgggaatgctcccagtccatatctttgttaactagtttaatacctatttccatctcgatcatcgcatatttttttattggaggcggagaaaaaaatctcatctagggtggataataataatacctaattgaggatccatttatttaaaattaaataaaattatgaataaaaaagataattacatagaatttaaaatattatataccattgataatttaaaacaaataatgctatttaaagtaaaataaaaatatttaaaaatttactaa

SEQ ID NO: 352694 - DNA, 567 bp, Cannabis indica
tcaacataatgatctttgaactgcatatccaccaaatatttctccactcctatcagttcgcaagatctttaaccatttaccttaatgtttttcaaaattgctagaaattcatgaaatttctcaaatatttcaaatttttttgcataaggttaaatctagagtgatcgtcttaagaacataacaacaactcatatccacccctgaatgtacatccatatttgaatatagatgatcttacttttaagtggatataggcatattactctttacagagaatgatctagtcaaaaccactatgaacaagatgcaaatgcaatagatatatcagaatgtagttgtggtcttttgatgacttaggtctagttacatcaaaaagttcttagaatagtccaagtggatcctagtcacagaatactaaactcatattccatacattaacatacagttttaatccattgatagaaaatggatattaataacttgtgaaagtcatattgtaatgtatgatgtaatctaggaaacagaaatataaaatttctatttggaatctaaaatttaaagtcaaag

SEQ ID NO: 352695 - DNA, 679 bp, Cannabis indica
atcagacccaaagctagacccgaccctggacccaaactcgaaccaagaccaggattagaaccaaggacttcatagaactgaatccagactcagatcgggattagaacttgggactcggacccaacctagaccaagacctaggatgtgaacccaagcccaaactcacaccaagactcgaattctgacccaaactcaaacccaaactcgaactcaaaatcgcaaatagaactagaaacgaactaagactaggacttggaccagcgcctaaacccacactcgaacccatatcaaaacccagacagagccctaaacccgaaccgagactaggactcgaaccggaacctagactgggacccaaacccacacaataatcagcaccttgacccaaaatcaggatagggacctgggaaacagaactaggaccgagacccagtaaccgacccagacccgaacttgaatatagcacacagctcgtgacccggcaccagaaatataaccagactaggaccccagatagggatccgaatctggacccagggcttggacaaaacccgtattcggtgtctggatttgaggcccatccttgacccgaaccctaacaaggacccgaacccacacccgaagcacaactgaaattggacccagatccagaaccataacaggacgaggacccagactc

SEQ ID NO: 352696 - DNA, 580 bp, Cannabis indica
tggtaaaatatatccaacagtcacaattcaagttttgatttaaggtctgggttttgtttcgggtccaggtataggtccaggttggggtcggggtcctagtcatagtttgagtctaggtacaagttttttgaatcccggtctcggtccaggtctgagatcgagttaaggtttgggtcttgggtcttggtcccaggttcgggtctgggtctacgtcttggttcgggataaggcagggaccgggacccgaaacccaatactcggacctgggacctgagaaccgaaccatgacctagatgggggacttgggccttaaacccaaacctggaccaagacctgtgcaaaggatcagacctagatgggggacttggacctgaaacttgaccccagaaccgagaccgagaccgagacccgaaacttgaccccagactcaagacacaagacccgaccttagacccgaaacccaggaactgactaccacaacacaacacctaacccgaacccaaacccaaacataggacttgttggaaattattttaccaagatcttagatctactcataagtatgttgattaacacccta

SEQ ID NO: 352697 - DNA, 691 bp, Cannabis indica
acctaaatttattaattttttatcatcataaattgtgatttccatacaaccatcaaatatgcacataaatcaacatgaacacatccaaatcaacataaacatcattttaaatttatatctcatgaaagtaaatcgttaccatggctctgaggccagttgttggggattattttaccaggatctagatttactacaatgtatgttgtttaaacatcctaaatctgaatttctagaacaatggaatttaagcacatgtaaagttcaagaaaccttacattagttgtagcgaaattaaatgacttcttctactgagatctctaacccttgtatcctttctgtagcagagtatcaccaagatctgagcctgattctctttcagttgattagattcttcacagtcttacacactatgattgagtaccaaacttgttgtgcgtgggcatgtactctatcactatagggttagaaattgaagagagaaagagagagaaggattcaaaaattagagagaagaaggctcaaattttgactgaaggctagtgaatgcataagctacaagttttgtgtccatcactatctatttacaggaatccttctaggtttaggtttgacttatttggcattaaaaaattgataaataaatggtaaaattaagcattagtgatcggccataggatgtggacccaccact

SEQ ID NO: 352698 - DNA, 738 bp, Cannabis indica
tgaagggaaggtgcggtctttgagtggcgcgaggacggattgtgccaagtcgcaataagtttaaccttcaaaaggtggacaagtcagatttagtgactcgtgaaactaagtcctcgcaggagaacgactcattcagttgcgtgttatcaactgaatcagtctcgctccctttagcatctccatcctcatctgattcacgatcaggaacctcccagtcctcgcccatctctttgacttcggtgtcagggggatgcctagagtgaataagatgttcgcgagctgataccgtagattcgctatcttgaatctcgatagttcctggttcagcgagctcttgagccatcctctcgatatttgcagaggacaacagacccagctccgcatctccagcaattggggtctcctcttctgaaatcgatgttgggataaagctatcctactgatcatggtcgtcgtcgaaagcattgcctccagagccaagcatctggttgtccgacgaatcgctcatctgaaagatagaagatcttttcagtgtggtgaatgtgcgaaaaaaatataactgacctcacccagatgccgctagaaggaggggttataagtgacctcacctgtatggcgctataagtgacctcacccgcataaaaaaactaagatctccgttgaaaggtctgattcggattcgtacgtgaaaaaaacaaatccgcccaccaaggcataaaatcgcaggtgtgcgactag

SEQ ID NO: 352699 - DNA, 687 bp, Cannabis indica
aaaaaacacgtgttctgatccatgcagatcctgtccggccaaggaggccttgtttgaagcctggccgatcattggtggctttcgtggggtctggccggccatagggactatgtccctatgctggccgtcttatgcctggaattagggttcttggccaaacactagaatgggtattggggtcttgcaggccacaaagacttggaacacctttatggggtgtgcttggaagtaaggccttagtttgcgagatgcatggattaggcatgaggcaagtttttcaagagggggatatctcaactctgcccataataaccttttacttacatagtaaactggttgctgataccttccctcttctcccactaatgctgcattaatcgtattctccaagtaaaggagtaaagtctctccagttactggtttagccaaaactggaggtgttgatagatgtttctttatgtttatgaaggcttcctcgcgctcgtctttccattcaagttttttgttgcctcacagcacattgaagaatggtaagcacttgtcggttaatttcgagatgaatcggtttagagcttccattcttcctgttaaggcctggacttccttcggctttgtgggcgatggcatttctatcaaagccttaatttttttaggattcacttcaatgcccctcgcgttaactatgaa

SEQ ID NO: 352700 - DNA, 674 bp, Cannabis indica
tctgaaaagtcgatacaagttctccaaataccatttggtttttggacaagaagaggattagatctccacgatgggtagaatgcctcgcgtataaagtcgttaatcaacaacttgtgctcttcttctttgagtgccccttgtctttcagaattcaagggtagcctttttttgtctcttagctgggtaatgagggtcgatattcaagtggtggcaaataactttagggtcgatccctatcatatctgaatggctccaagaaaattgatcctagtttgccttcagaaaagttattagctgctattctagtttttcatccagatttttcccaataaatacacatttagtggcattttttggatctaaaacaacttcctccaattcctcgattggtttaaactgattcttttcatcttgaattcgaggatctagatcctcatcatgtttctcgccttcctccattatgagtaccattaactgatggccgacttttctattttttagttctatacgatagcatccatgagccagtagttggtcacctcgcactacacctacacctgttggtgtctgaaattttaaagataggtgtttaattaaactaactacgcgtagtccaattagtgcaggatgaccaaatagtatagtataggccgatggtaggtcaacaactagaa

SEQ ID NO: 352701 - DNA, 618 bp, Cannabis indica
aagtaattacatatttaataaaatatgtccatttaaatattatttattttctgggatattacaagaactcagagtgagaatggccaaaatcctagaagtatagatgaggagcccattcgtggagacactcagcctatgtgagaaggaacttatgaaacggagaaccgtcaccttagacgctgcttggaggaggcacagtggcagaatgttgagttagaacgtgatgcagtcgtaactaggacagcgcaggggactaacactccaaattaacctaaacttggagtgagaagaccacgaggaagacctcgtggctcacgaaccaggagacaggaaaatgcccaggaagaacagcatagggaaaatgagatacctcctgaaaatcagaatgatcagccaaaaccctctcacagaaatgagaatgggaggcaaccagaaactgatgaacgagaaattcctcatgaaaatgaggaggatcttgggactcagcgtggagaacgtaggtcacctgcgagaaatcaccagcattattcctaaaccaattgagagagggctcatacaaaccaaaatgggggaaatacaacaaaccacactcaggggaaagaacaaagcatgaagaag

SEQ ID NO: 352702 - DNA, 522 bp, Cannabis indica
aattgttattcattgaataagcccaattctaattaggcctaaataaaattatttatgtgaaattttattttagcaacctagtctacttatttagtaaaacttaaatgggcttcgtgtatgcatctaagcccaaaagcaaatatttagatcaatatttgcatctcaatctctgtctacagcatctcctcctctctcaacctttaaatcaaaaaggtattagttttattattttttttaaaaaaagtcaataagttataaattaaaccattagttatagttatatatatatcacttatactgttataatgtttagatacttatttaaatattttgaaaattatgttgtagctttatttttcatatttttctttcctgtgacttgaaattcatatagaatacttgagtaattaaaatctaattagatatataattaggcaatatagccgcttttcgcgcggctattttaattttattttagtataataatttaaaaaaaaactacttaagaaattaataaataat

SEQ ID NO: 352703 - DNA, 778 bp, Cannabis indica
atgtcgaaatctgctagaactgagtgcgagtgatgcccgtgccatccaccatgaagtactcatcagcaaaacgcccaatctttctgatggtcgtatcgtccgtgcctgttaaccacttgaagattggttgagagtagtaaaagtaccccaacctgccttgcttgggggtggacttcaaatcaaagaaccaagcaacttcgtggggagagggcatagcccatttctgggaggcatagaggacgaagagggcaaacaaatacttgatgcccttaggagtgaattgggtcgggcagaggccgaagaagtctgccacatttttgtaagtattgatgtaaaggcctcaatgccccttgctgaccatgggcacccaactaggcgcacatccccctttcagggtttgtggcacgattgttgtaggcgagaatgtagcaatccaactcgcccaggtatccattctagtcgagagaccgaaggcgcgcctcagtaaccttggacgaagggcttacccacctggcgcccaaggcattttgccttctgtgaggaaccgcagtagcaagttcctcactgacgtagtccatgccctcaaccaggacgtctccgtcaccatcaactgctccccagccttgttgtactccccgtagtttgggggttcaacctttgcctcttcctcctccttagaggaactgccaggacgtacatcgtcctgcccctcaatctcctggacctcagggtccccttcatgatccccctccatctggatggctggatcctgttcggc

SEQ ID NO: 352704 - DNA, 842 bp, Cannabis indica
ttgccggttgccgggggaagaccgaaatattatccagttgacctccgatgataatcttgtcaggtacaggctttatcccgaggactttactcctaagtccgtggcggggaagaagaggaagtctggtgctgaccggactgaacgagctcatgaggaggatgagctcattcaactcaagcgtgaggctaagttgaagggtggtgctagggccaagcaatatgttcaggagcctttgaatcctaaagatgaagctgaggaagagcaggtgactccactgaagaggaagaagaaactcctgggcttgcccaggcctattgaacatgcaactcgcataagggagcccatcacctgctcggccatctcctcccgtgtttggaaaggggaaggctgtcatgtctaagataagagcgatgttaggtgatgatggacttctgagtcttgtgcgagcgaccaccttgcattttactttattttgttcttgagcttcttgattttcatgccttgtgtttctgatggctgtcttccaaccatattgtttttgttctgtgtagacatgtctcggcagatgctagacgctctgaggaagagaatgtgcggaagctctagtgcctctcctccggccaagaagtctaagggcggtgaggggtcctcttcaaaggaaaagagacttttcggggaggttattgatctttccgaggagctgattgtggcaaacccctctacccccaaagctgccaagtccaaggatctggaccaccaacggctgggtctgaactggtcaggagtgatcctgaacgggtgcaaacaccaactccacctttgccagtgcttctagaggccaa

SEQ ID NO: 352705 - DNA, 555 bp, Cannabis indica
ttatcagaatgatttcttgataaaaaaaaaagagtttatttcctttaatttttatttcattctcactttgactttttagtatgatagtttatgttatgttttaattcttttttatttatctttttctttttattccgttttaatactcttagaatttagggaaaaaaaaaggaaaatacaaaaaggggaaaaaattacaaaattactatgggccggtccattcaacatttatacatcccacatacaaatatttacaaaaataccacatgctctaaactttcagccgcacggactgaacgatgaagatgaacatacctcgatcgtttcaaaacagcaaaacaaccaaaatgaaaccaaaacgagggaaatacaaccattaattccagcgaaattaattggaaaagaagacctgcaatgatctaaacagaaatttacgaaaaaaaccagaaaaactaggaagaaactaaaattacataattgttttcgattttattcgatcaaaacaactctccctaatatcgaaatttagattcatgaaatgtagatctgtaacaa

SEQ ID NO: 352706 - DNA, 1059 bp, Cannabis indica
ggggataaatgaggctggggagctagttgataacgatggcgacgtcctggttgaggacgtggactatgccagtgaggaacttactgtcgcggttcctcatagaaggcaaggtaccttgggtgttaggtgggtgagccctccgtctaaggttactaaggtgcgcctgcaggatctcgaccaggatggctactggggtgaattgaactgttacattcccacccacaataatcgacccacaaaccttgaaaagggaatgtgcgcctggtcaggtgctcatgcctagcaaggggcattgttgcctttgcactcgtactttaagaatgtgaaagacttcttccacctctacccgacccaatttactcccgagagcattaaatatctgtccgccctcttcattctttatgcctcctagaagtgggagatgccttctctgcacgaagttagctggtttctttatttgaagtccacccctaagcaaggctggtcggggtacttctatttctgtcaatcggacttcaagttgttgacgagcaccggggataaggccatcagcaaaattgggcattttgttgatgattacttcatggtttatggcatgggacaacccacacccggttctcgcagatccccacatatcaccgccctcccttcactattgctcttagtgatagagctcaagagcttgctcagctaccgaggcatgaccggaatatcattcaattgacctccgaggacagctttgtgaagtacggactctatccgaaggatttcattcctaagctagtgaaggggtgaagaggatatctggtgctggacgggttaagggagctcataaggagaatgagcagattcaactaaagcgtgaggctaagttgaatagaggtgtaagggccaaacagtatgatcatgagcccttgaatcctgaagatgaggctgaggaagagcatgtgactcggctcaaaaggaggaataaacttccgacccaatccaggtccgttaaacatgcaatgcgcattagggagcaaaggtcacatgctactttattggtagtattttctt

SEQ ID NO: 352707 - DNA, 1100 bp, Cannabis indica
tcggtgggggaatcatgccaaggagtattatttctcccacttaggcgattatttaggtcggtcccggatgggttctgaacctccggtgcccattcccttggacccttcagcctatttatcttctagctggttccgtccctcgaacagctatctcagggatgatgcagccagtgttatgattcaggactttgctagggccgaattagagagtcagggtaggactagcttgattgttttttgctaagtgtatgttgctttcatggatgttctaacacttggcctattttcttgttgcagcagccgtacccatggacgaaatcttggccactcttgctggagcccatagtcctgatgcttcccctcctcctacttcttctcagttggtcactcccgggagggcttcctccagcgccccttcgggcactattgtcttggtggacgaggaggaggtacttcttgaggaagctgaagaaggtgaagaagagcaagaggtcgccctcgtgcgcaagcgcaagggcaagatggtggaggaggagccttctaagcgcccccggagggtggacactccggccccgagtcatgactctgggattccctccgaggcggaggaatacacagtgcctcatggcattgtgttgactccgatcccaggcgacgaggagaggcagaaccttcgggtagccaaatacaactacgcccttgacgagtacacccgggggcatgctgaggtggaggccttgaagagggtcttacgagaggagcagcaaaacactctcaacgtggaggacttccggaatccgtgggacctgaacatggacccgctgacggactggttcaaccgtttccttgggcccaccttggccccttttgcctcggagatgaccagcgagtatgtctcccatctgactcaattcccgcccaaacggtacgctggttgtgcctccttgaactccgtataccaggttcaagacatcagcaacgccatggctaaggtaagtacttgtggtttatttctttcctcgatattttgtctgaggcatttgatctcactcttatctccttttttagattattgtcgagaccagccacctctccaagac

SEQ ID NO: 352708 - DNA, 516 bp, Cannabis indica
tgtttacctactcatgtttatgaaagcaaaatcacacatattaactataagaaaagagaagaaaatagagaaaaaaagaatgttgaaaaccctctgaaaaatgcctccaatattgcagttgatctctgaaattcgtatctatattctctgttttttttctctgaattacttgatgaaatcaactctcttcttccctttatataggcattgagggcctaaaatgatagataaaacgcacatgtttttattcctattcagatttgaatttgggaaacctcaagaacccacgattttttttgctgtagaaaagaggcgggttgcggcacattaaagctgtgtcgcggcccatgtgaccttcctgagataattttttttgattccccacgtaagcggaccgcgacacactaaagctgggtcgcggcccgtgtgctccactgctccatattccacgtgatttatctttttctgggcttgaatttgatttttttccaccttgatattttttatgcgatattc

SEQ ID NO: 352709 - DNA, 507 bp, Cannabis indica
ggtaaaataaatttccaacaggcttggggggtaaatggttccctctatttcgcccaacatatgtggaccagtttaacaacgacacgtggagctgagaggcttaactcttaaagaaatcgactaagtctttggcaacaggagtgtcagtgagaagataactcctggagaagatgtgagaagactccaggtactcccggagaccaggaccgtgctaaggcatcttcgcgaggtactggactctatttgaacagtcacctcgcatttaatgccgcatggaagaaaacgtattggaactgccataagcaacacgtctgacgacgtgacccctctcttgcagctattacgctgtgattaataaggctagtgacaactactttatgagggatcacatcaatcaagaagggataaacgattatatccacctaactcctaagatacctacagtataggtcatgtatttcctattttgcatcggctaggaatatgtgcccctattgaacctgcaca

SEQ ID NO: 352710 - DNA, 693 bp, Cannabis indica
tttggcaattcatttccaaatcgaggtcaagcttctggcagaggcaccttttttcccaatcgtggaggcagacctggttccaatctggataacaaagttcaatgccaaatttgtttgaggtatggtcatactgctactgattgcttttaccggtttgacaagaattttttaagttcacagacaggtccaaacaccagtagcagtggcttgcatcaaactcagaaaccacaggccaacattgctactaacaacaactcaaatgatgcaaattggtacccagattctggtgctaccaatcactgcacccctcaagctcaaaaccttgcaaattgctatgactatgatggtcaagatcaaatgtatgtaggagatggtacaggtttgtctataaagcatattggtcaatccttttttattcctcagcattcatctcattctcttgttttaaacaacttacttcatgtacctgaaattacaaaaaatctcatcagtgttgctaagtttgccaaggataataatgtttattttgaattccattctgatttgtgttttgtcaaggaggaagtgagtcatactatcttgctgatggggaggcacaagaatggcctgtattcttttgatcagtctcaaattggcaccatttactcgagccctagctgtcctttacccacccactgcagcaaacagaaccaa

SEQ ID NO: 352711 - DNA, 555 bp, Cannabis indica
atttttgttgacctataatagcaggttagcaatatgtaaaaatttcttttttaaaattaaattaactatttcttaaaataattaatttttaatttgaatatttaataagaccctttttagcaattaatattaataaaaatatatttaaaattgaagtctctattatattttttttaacagttaagatatttaattataatatttacaataaaactctattattttataaaatttaaactttcaccccttctaaaatatatttttgaataattaatcacaaattctaagaatagtgtgaaatactagaatatgagaattcatgatttatacatcatatctaaattcttatttcatctctatatcttcaagttacatgttttagacagaacttgaaaaaaaactaacaactttatatatgtatatttttatcattaacatatattcgagatcaataatcagtaaatgatgttctaactttgttgacaatacctagtcaaaattaataattaataataatcaataacatcggtttttaagtttatcaagaacacatgt

SEQ ID NO: 352712 - DNA, 626 bp, Cannabis indica
ataaataaataatgcaaaaaatatagaattaagagtttaaaatatgggagaaaacaataaataaatttgataaaacttgtaataataagtttcgccaaaaaagtcatcggcgctaaaaaaatcgttggtgccggaaaagtcacctgaaaagttattatcgccggaaaagtcactgaaaaagttatcatcaccagaaaagtcgccaaaaaagttaccgtccctggaaaagtcattagaaaagtcacgaaaagtagatgtctcagatacaaataaaaatagaaccgattctaacataatgaataaaaataaataacacaaaataaatcaaaccagttataattgaaatataaccggttctgtaacataataaataaaaattaaaatataaaataactcaaacaagttataattaaatagagtcagttctattacaattttataatgaataaaaacaaataacacgaaataactcaaaccggttataactaaaatagaaccagttatataacataataaatacaaacaagttacatgtaataactcaaaccgaatacaattaaaaaaaaataagaaaatcaagttctaaaatactgaaacataaattaaaaacaaaactaagttctaca

SEQ ID NO: 352713 - DNA, 948 bp, Cannabis indica
tggatgaaaaactaaaatagcaattaattgatttttttgaaggcaaaccaggatcaatttgcttggagccactcagatatgtttggaatataccctaaagtgatctgtcatcatttaaatatcgatcccagttaccctgtaaaaagacaaaaatagcagccattagattccgagagacaagaggcagttaaagaagaggttgataaattattgactaatgactttatacgcagggccttttatcccttgtggatttcaaactcagttcttgtcccaaaaccaaacgacatttggaggacttgtatcgacttttcagacttgaataaggcatgtcctaaagactgtttcccattacccaggattgattagttagtggatgcaatagtaaggcacgagctgatgacttttatggatgcatattctggatataactagattaaaatgcatattcctgaccaagagcatacaagttttgtgacaaatatgagactttattattataaagtcatgttgtttggtttaaaaaatgctagaacgacgtatcaacgactggtgaatggaatgttcgagaaccagattggacgaaatatagaagtatatgtcgatgatatgctggtaaagtcaataaaaagtgaagatcacatgtaggacctcacagaatgctttgatatacttaaaaagtataatacgaatcttaatctgaagaaatgctcttttggggtttcctcaggaaaatttctcggcttcatagtaaatgcgagaggaattgaagccaaccaagaaaaaatcaaggccctaatggagatgccctcaccaccaaagccaaaagaagtccaatctttgatagggagaatggcagcattaaacagattcgtctcattcattctctcattctcttctcttatttatttctttattctatattttttttgtagcaatgaataactt

SEQ ID NO: 352714 - DNA, 699 bp, Cannabis indica
taaacttttccaaacgatcttaagctctcaagtcctgagctctaactatttagtctaatcttagatattactctaacatataccataaaatggctaaataattatcatcattgcattctacattcaaaactgagttcaacgacatataatatgactatatacatttggagttccaaaacctcacctaagcggtacacattaactatcggtggcggtagaaatcagtgtaccagaaacatcgccaaaaatagggatagtatatatcaaaataaccacatcgacgagtagatcaagctcatgccaaccatttctcaaaatagtacatgatattgctgaaaagtcatcggaaaggggtagagctacaaaaatgtcacaggaagcgggctgggcaaaatggcttagtgtaggttgttctcctcaacaagctaagtctaatgctgaagacaactcgtcaaacgggcaccggaggtggccggaaaatctgttcaaagtttgaacctccgaattttgacttgagatctcaggctagtagtggtaaaatgggcaacgccggttgggggttgaggttgccaacacctggggattcggatggtccaatgcatggggccagacggtgaccaaaaaggggttttcgaagtcacgccagtgatggggtttgtggtttgtttctcttgtggtatgaagagagagagagagaga

SEQ ID NO: 352715 - DNA, 556 bp, Cannabis indica
aagttatggaatctttaatcgatagttgctagtataattcattaatgcgcgctcttcggtgcaagtaatcttggtttagattacaaatgtagtacgatatcaaagtgaatgtgatgtatataatcgaaattatatatgataatgaccaatatgaatgaagttatctttatctaacatgtcatttactataaatatctaattcatatcataatgatgatcaataatagatcggcctaaatcttgagtaatcatgaactcatgttcatgttattaatttctttgattcactcgttaaagtttctaagagaagatgattcttacaacttctattttgggaatctaataatgtggatgactggaaacatgatctataattatgaaatcttgacttttctaacggatcaaatgttggttccctttaagtgttaattttagaactggaaattcgtgcataaatttagatgggatctacatcatacttccattagtgaattaatgataccaaatgataaagaagtaattagaagggtaaaatagtaatttgaccaaaactaat

SEQ ID NO: 352716 - DNA, 781 bp, Cannabis indica
tcaaaccaggacccgaacctgaactcggaccaggaccccaacgcggaccctgacctagacccaggagatggaactggaacatgaacaagaactgcaaaccaggacccttgaacaagacaaggattgtgaccaggacccggacccaagccaagaaccgaactcggacctagccccaaacccaaagcgagacaaaaacttgagcccaaacacgatcgtgtacctagactgggagcgagagccggacctagacctagacttgggacctaatccaagacccagactcggacctagatagggatctggatacgaacctagactcgaacccacacccagacccaggtcgggatcgaaactcgggacctagatccatactgagaccctaacccagaccgagacctagacctgcacctaagaccaaaactcggacctggacctgaacccaaacccagacctagacccagactcggacctacactcaaaccaagactcagaccccaaaaaggcccagacccaaactcgaactcagacattgaatcgaaatcaaaactgggactaggacccaaacccaaacatggacccagatcgggacctaggacccagaccatgacctgcgcctcggaacctagacccaaattcgaacacagtactcagactcaatcttggaccaggactcaaacccagatcctgacctagaccgagattggaaaccgaaacgggactcaaaccctaacctagggcatggaccgggacacgggcatcagaattgggaccgagacccaag

SEQ ID NO: 352717 - DNA, 337 bp, Cannabis indica
tattccatttctaaaaaaaattaagtaaacaacatattacaaatattgattctgattgttttttatttattctattacatttctccattaacttattcttattttgattattgtatagtaaacgtgccattagggttttggggtttggggaatgggaatgggaatgggaatggtctagggaatgggaatttgcatgggtcgggaatgagaatgggaattagaaatggaaatgggctggggaatgggaatgggaatcggtcggagaatgaaaattggaatagaaataggaatgggtagaggaatgggaatgggaatgggaataggaatgcgaatggga

SEQ ID NO: 352718 - DNA, 649 bp, Cannabis indica
acttgtccaggacaaatttactttacaaagcataagtttatatttcttgagtattggtaatactttcagaggtgatcggcgttccaggccctaggcaccatggttccgtccattctttagagcttgtaggtcccggaaccgatttcagcctcgatttcgtatggtccttcccaattaggcccaagtacccccactccgggttcttgagtggctgggaagacccgtcttaggaccagatcaccaacagcaaattttctatttttaacttttgagttaaagtgtttagccactttcttttgataagctgccatttgtatttgagactcatcccggacttcatcaatttgatcaaacgcttcttgtaataaagccttgattgttgttggatcataagtcgttctcctgtgggatgggaatagtgtttccaccgggaccattgcctcacaaccgtatgccatcgaaaatggtgagtggccggttatggttcttggggttgtccggtaggcccataacactctcagcaattcttcgggccaattattttgcaggccagcaactttttcttcagagtgacttttagatcttattgaccgcttctgcttgcccgttcgtttgtggtcttgccaccgcggagaagcttttgacgact

SEQ ID NO: 352719 - DNA, 1369 bp, Cannabis indica
cattcatcatagaattaaaattcatgtcttggattttgaaataacctttaactaaaaggaactactccaaaactagatattataacgataatcataatgaatagtaagagtttaaagagaataaaagactatgatgaagaacagttcgaagcctcgatctacgtctcttccttgctctctctaagttttcatctcaatttggtagctctagggtcttggaattcatagcctaaaaggttctatttatagtgcttgaaaagatagatgaatcctcttagaattaggatttttttttttttaaaaaaaaaaagataagtgtggcgctatagcttaggaattaggcgcaatagcggccatgagatatttctcgaaataacccacgtgctgaaatttatattttttttttaggcttgtgctatgtataaaacatgcgattgacttctaatctatcataatttcttcaatacaatttagaatcagacgattcaagatgttttggaaaaactaagaactagatccaaaactttcatgttgagctccaagtccatttcggcttctaagttcatcaaaatttgtaattaaattatgccttgtaaaactgagctcgccaactttcactattttctaccaaaatatgctaacatccctccaaacgactctaaatgcaagattagtctttaaaatatccaaaataattaaaatcacactaatcaataatttaaagaatcaatctaagaatattaatacataaattgatcatatttataagacaaatatggactcatcaaattcctccacacttgactcttgctcgtccttaagtaagttaataataaaatgaatgatgcttaaacaaaccaatctttatgaaaaataatgttagtttcaaaaattgtacatccctctataattctaagaaaatccaaactcttcaatcattagaatttcaactaaagataattacttttcaaactcaattttgtgtgtgttcaatcaattcatcatattactaacattcaaatcaattcatggatgacaacaaacaatgctcatctccaaagaaatgtgtatttcaatgaaaatctactctataagattaattatcaaaccattctccactaatgtaattacacacaatctgaagatcaataggactttataggcttataatgtaagacgagggtgaaaggtagataaagaaggttaatttaggctcaaatcacaccatagcatacatatacaatattctctcaaataattccattttgtattccccaatcactctcctcaataattcaaccttgtatttttttttcatagaacttactattcccccacacttgaattgttgcaagtattcatttatttt

SEQ ID NO: 352720 - DNA, 674 bp, Cannabis indica
taaatatatatttttatatatatgaatttgttttttaaagttgaatatatttatgtatagttttttatgtaaatatttgagaaaaaaattaattacttaatttaaagttagttattattgtataaatttaatgtgtaaaaatttcatgtgttttaaaaaatataatgtgttatcaagttagttgttattgtaaaaaatttaatgtgtaaaaattatttggagaaaagttttttgaataagattttggtttaggtaaaaagtttatttatttaatttgatattgtaaaaattgttatgcgcgaaattcgactggaggacacgtatcaagataaagggaatgtgaatcggtgccaaatctttttatggaataactcattaattgtgtaagtactagagtatatttgcaacacgctgactgtaaggtcttaggcgaggaatcaatatacgaactggtacttagtgtattaacgagaaaccatatatcgctaaaggagaatagcgaggcactagagaagaataatacataccttagcttacaataagcaaattaagtgtcaaagtcggaccggctcggagtacaagaatgtgagatgaccatctcgctacgagtaaacttcttatagtttcatccaactaacggaagcgagactcataaccctggcaagtcagaagat

SEQ ID NO: 352721 - DNA, 569 bp, Cannabis indica
ctcatattccatactttaatatacaatttgaattcattgatagaaaatggtattaataacttgtgaaagtttaactgtattgtattctggaaatagaaataaaaaatttctattttgaatccaaaatttaaagtcaaagacttaaatttatacaaagtatacatgagtattcttctctcttggaccaccactactaatctaactttaagtttactttgcctaaagtaagcatatataagtaggagattctaagattgaggatttttatcatttcgggatagaatgtcgggaatataatcatatgcgccataatttcataaaaaaaaaaatatagaatgacattttaagaaaatgatttataacctattcatccaatgatatactaagtaagcaaattcaaaatgaataagctaagaggaataagtaaaggataattacgatttaaaataagatccaacgatgtccccgtaggcgagagtcaaagttattcttatttgtataatcttcttgtttcatattgtaaatacttgtctaaggtgtcatcaattgatgaacagctagatgttgca

SEQ ID NO: 352722 - DNA, 606 bp, Cannabis indica
tttttttatttttacacttcaaagtattttttttttttgtatttttatagaaatccacataacaacccacatagaaactaccggagcaatccaaaccgtaatttttttttaaaaagttaaaaatagtatatgtgatgattcccataaattataacacagtttggttattaaaatggtaaaattatagtaatcttctcgacgccatgcatgtttaaaaaatttaggaaagacccctatatttgtaataagacaaaaatattatctttaattttttttttttgaataattagcatttttctctcaaaacttttgacactacatgatcttgtcccctaaaatatacggcttgataaattttttccctaaaatataacaattacataattacgcctcttctgttagttttcatttcttcaaccgttaaaaattagtatttttaccctctaaactttgaccaaaataaaattttatccttttattaaaaaaaaaataattttaaaaattataatgctctattaattcttaaaaaattaataaaaattattaaaacacttgataaaaatattaagtgtacttaaaaaacttaaattattcctaaaaaatatt

SEQ ID NO: 352723 - DNA, 1159 bp, Cannabis indica
tgaactgcaacctacttttctgggaggtactgacataattaaggctgagcagtggatgagtacaatcacccgtatccttgataatatgggagtgacgggaacagagagagtgaattgtgcagctttcatgttacaagatcatgcccgcgtctggtgggatattgtgggacagactcgtgatgtcaatgtaatgacttgggatgagtttaagaatttgtttgaagaaaaattttataacatcgctgtgaggacttcacacatggaagactttgtgaaattaactcaggggaagatgtctgtggccgaatacactctagagtttgatcggctgtccaagtttgctggtgatctggtgcccacagatttcaccaggaaacagaaatatgtgagaggactgaatgccacaatcagtcgggacttgaagattaccactactcatgacactttgtacaagaaagtggtagagctagccttaattgctgaggaggctgagcatcaggtaataaaggagcagactgcaaaggatgttgtcacggcatcgaaccctgctgctagtggtaatatcagtaaagggaccgacagtggtaacactgatcacaaacgaaaggttgatgcttccggaacatcagggggtaacaggaagtttcggggaaacagaggtggccgccagggccgcggatcttcattccgatcttatcctgagtgtccaaaatgcaagaaacaccatcagggtgaatgtcgggccaagacttgtttccagtgtggcatggtgggccacttcatcagagattgtcctcagactaagaaagaggagcctaagaagaatgttactcagaacccgggacgactttttaccatgactcaggctgatgctgatgctagtccgtcagtggtgacaggtcagttgtctataaatggttgttcttatactgtattgtttgattcgggagctacccactcttatgtgtcaagtagagtaattgaaaatttcgataaaccatgtgatatttatgcttcggggtttggtacccttttaccttcgggagaccttatagtatccactaggtggattcggtccttgtccttctggattgacggttgtgaattaaccgccaatctaatagaattgcaactgtctgattttgatataatcctggga

SEQ ID NO: 352724 - DNA, 821 bp, Cannabis indica
ctacacgtgtaatgcctatattggcccctgtttttcctctttattattctctactactacttaatgaaatgcttatcaactcactcaattgagctgagttttcctctcttaaatttctctcgtatatcatcactatgagttcatgcgatttcacagtccgtaatgtttgctttctgaactgcataatgtatatctttcatcctacttattctaagcttcatgaaattttttgccctaactcgagaaaatttcaaactttctgagttttgacttttcgctgaacattcttattctttaatctgttgagtactcctagtcggcatctttgcttgttttaacgttcgatattccgactaaacactcatattttgtgttgtgttttgttaatgaacacaggtgagttttgggagagcgaacatcgagtcgaccaggacttgcttcaattcttgcacgaggaccatcctcatctctgttctagcccacctacttccagtgaaggacattctgcctcgaatctttcatccagccataggatgatggctcgcactaaaaagacaactcgcatggctgatgcatctgaccctcaagtggctcggcacgccactttgcccagcgcagaacaagatccaaccgtctaagaggagggggatgatgaaggggacgccgaggtccaggaaattgaggagtaggacgacgtccgtcctggcagtccctccaaggtggaggaagaggaggaggttgcacccccaaactatggggggatataatgaggctggggagccagtcgatgcagatggagacatcctggttgagggtgtgga

SEQ ID NO: 352725 - DNA, 707 bp, Cannabis indica
gggttttcagatttatgaatgggactcctattaatcaaatagcatgcattaataagagcctctcaccaatacatttttcctagaccaaaactaattaataaatatcttactttattcaacaaagtcctattcattctctcagcaacaccattttgttgaggtgtatgcttaacagtcctatgcctaacaagtacaaactcaaaacacagcaagccaaattcagtattgatgaattctaaaccattatctgtcctaagcactttcaatttcttttcatactggttttctacttccgttttcattctctgaatttttctaggcattcaatcttagttttaagtagataaacccacacatgcctactgaaatcatctacaatagacaagaaatagtgtttacctgagtgagttccaatcttgtgagaccctcacagatcagcatggacatattccaatggcctcttagagcaatgattgcctgtcatgaacttcaatctgtgatgctttcccaacacacatgcttcacaaaatggtactgaattaggttcgaaatttcccaggagcccttgcttggtcaattctttgatcccttgctcactcatgtgacccattctttaatgccacatttcatctcagtttcttggtgttgcaaaatactggcttcacaagccattactgtttttccttgcagaatgtataagacattct

SEQ ID NO: 352726 - DNA, 575 bp, Cannabis indica
ccgccaacaataaccgagccacaaaccttgaaagggggatgtgcgcttggtcgggtgctcatgcccagcaaggggcattgttgccgctgcacccatacttcaagaatgtggcggacttcttccgcctttgcctgactcagttcacccccaagggcattaagtatttgtctgccttcttcgtcctttatgcctcctagaaatggtatatgccttctcctcacgaggttagctggttctttgatttgaagtccacccctaagcaaggaaggtcggggtacttctatttctctcaaccagacttcaagtggttgacaagcaccgaggataaggccatcaacaaaattgggcgttttgttgatgagtacttcatgttggatggcgcgggcatcacccatactcggttccagcaaattccaacatatcactaccctcccctaactcttactcttagggatagagctcaatagcttgctcagctccaagggaagaccggaatatcatccagttgacctccgaggataactttttgtagtacgggctctatccgaaggatttcatgttggaaattattttac

SEQ ID NO: 352727 - DNA, 172 bp, Cannabis indica
tatattttagttcactaaaacatcatttacaggtagctaagtgttttaaggatcaaaatacattgaggggtgaaacggtaaatttatccctactcggtgtaaatcatctatatagaggatctttgattattgagattataacgatggttaaatgtgatagcgtatctatatg

SEQ ID NO: 352728 - DNA, 893 bp, Cannabis indica
cattcactttctctttctctcttcatcttcttcttctttcttttcatttactttatattattttatattattttctaacatatgttgttttatgtatttctatgaatttagaaacttttgcttgtaatgtatcaattggtctacgtatcaaaattgataacatttgagattatgttgggttatacacaaatgatcctttttgatctctctttagccctctatctcttatttttaggaggtcttttttcactagcaagttttttttagaatactttatttattctggtgatgacagacttatatttcttagtttcaataagaataataagaatactaacccctaaagtactagattccaccaattcaaactaaaaaatttacttttcttatcattttatagcttaaaatgcttattatagaaaatgttttctaaaatatgtgttaatatttattgtaattataggttaggattaggtagttactaggaactactataaattattatgttattttctattatctattaccaattaaattactaaaaaatcctttagttttgccataggtaacattaatatgcaaagcatttttttttttttgaagtggagatttttattttacgagaacgttcatccattacaatagatattaaatcagaagaagcattaagctcgctaaagatacaatctgactaaaaacaagactgtctcgcaacacaataagcaaccctatttacagatcgtttaacaaaagaaattaacacattgttcagaagagataccatcatacgacaatcttgtactaacattccaaattgtgatggcatatgactctcctcattaataacttgaacaactgtaaagtccttttttggcaagttaggtgacaaaata

SEQ ID NO: 352729 - DNA, 797 bp, Cannabis indica
tgttatgtcctttataggatattagtaacgtatgctagtatcggatgtatggagtatacattagactggaccgatattaaacttggataagatatcataaacttaccgttatatctttctaagtcaatatcacttagttgattttagatcaatagatcttaatcctgagatagttaggttcgatctcaactgtgttatttatgttccttgagttgttctttaaagctgaccaattagatcgaccaaatacttatatcttgggaacatggtagtaaaattgagtgggagcactaatcatagatacagaatctataacttctatattgacatagaagtgaaatgataattttatttgagcttggcttaatagagataaatgaaagagctcttattttggtaataattttagtttactgaaatatcatttataggaagctaagtattttaaggataaaataatacattgaggcatagaacggtaaatttatccgtgctcgatgtaaattatttatggaggatatttgattatttggattataacaatagataattaatagtgtatctatatcttagaatatgtagggtgttttatataattaagagtgcaattctaaatctatagtggactcaggagaaatgaataagttagggaaaatctatttattggaagcttgattatataggcccatggttcccacactcgttgagataatattggcttgtggactcagttaattatttttaattaactaattagaattctaaattagactatgtcttatttatgaattttcact

SEQ ID NO: 352730 - DNA, 691 bp, Cannabis indica
gaagactgccaaccactctaaattaagaatgacaaaagtttacaattttacataaagttgttataaaaaaaccttatttcacacgatatatatcatgtgcgaacacattcaacaacacaaaaacaataagaacacaatccttttggtagctagagaagaaatggtatgtaacaatgtgataatgaattgaagtgagcatcactcaagacactcaactctacaacagcctaaaagagcataacaacaacaacaaaacaactttcatctgctcttaggtgggaaccaagagcagaaaaaggaagtgaatattttgacattgtaagaacttgctccaggagccttgaaaatccatcacacagggtcacaacatatccacaagtatctaaattatcctctcgaattgtctgtcagtctgaggatggaaaactgactgaacttcagcttggtacccatggctcgctggagactttgccaaaactttcaggtaatctttggatctctatctgatataatggactccggagccccatgtaacctcactatttcttaacatataagtctccatattgatccactgtaaatgttgtttcactactagaaaatgtttggacttagtaaatctatctaccataacccaaatagaatcgaacatccccgtggttttaggtaacccaaccacgaaatccatagt

SEQ ID NO: 352731 - DNA, 935 bp, Cannabis indica
aattgatagaatttatgggaatattatgataagttgataatatagatattagggtaattaggagtatgtggaatttaacttagcaccctagaactatagatttcttagtgactatgaaatgataagataattataaatataatatttttattattttattattatattattattattattaatattattgttataatattattttattatataaaacttatcagtaaattgataagtatatatattatacgttatacatttataaatagaagaagaataaaaacgaaaccctcctccttcgtcaataaattctctcttctcttatatctattttcttcgattttcaatccaaaacctagcgatctaagctccggtagtggcaggatagaaaatcctcatagcggaaaagcttaaggtaagatttaattttgttttaagtgtaaaataattggttttgtataggggttttgcgaaatagaatagttatgaaggttctgacgttataggattgttctcgggtagtcatgagactagttctgatgttttcttgctaaaattgaggtgattttgatttagaaattgagtttagaactttttataaattaagtccgaacactagtggcgtttgctaattacaggctcgattttagattgtatttcgtaagtatggtagtatatatggtatctatgtgccctatgaagtttggggaggtttgaacaggttctagtagcgtttcgagtgcgtcaactttaaaaaaacatatttttgcccttgataaaccagtcaactggtttgtaagccagtcaaccggttctggccaaatagtttaccatttcgggtagcctcgggcactcgagaatcgtattttggtcataacttttcactcgggtgtctgttttggatgttctatatgttcggctttgtgccctaaata

SEQ ID NO: 352732 - DNA, 1156 bp, Cannabis indica
tgactctacctaagcattttcctcgtttatattatgttattattaatttataatttttatttaacttattttcttattattaaatctctataaaaaaaacacattatatattatttcatttacaataatatattatttgagaattcttagaagtatataatgaataaaatattaaacaattgataaatctatagagttcactaaagaaatctaaaaacaatcaaaagtgattgataagcacttgcttataaaatcaaattattgttgtcaccgtatctcacttatagtcggcactatatttaaaacttatatcatcaccatatctcacttgtagtcgtcattacattcaaatcgatgtctacctcacttgtaattattttttttttaaaaaaagaaaatatatattattatatttatagtaattttttaacaataattttgttatagtataaatagatatttttatacttttaatttttatagtcactaattaataaattataatttaaaatggtgctagatatgaattaaaaaattataaatttaaaatgtatggtatggtatcttcaattaattaacattttttagtcgatgatattcactataaaaaactgttacttttagtgacaaccttttagttacaacataaattttttgtgactaaatgtgatttttagtcacaacaaaaagttacttgtgactaaaacatagtatttagctataagttgtgactaatttagttttagccacaacaaatattgtgataaaaatacatttagtcagaacaaattgtaattttatgactaatacttttagtcacagactttatttagagtattttactcaccaaccaacattactcatagtaataaatccaagatcaagtatttatttagagtatcaaataaaataaatacacacagagacggagggactttagcccatatgtaggctaaagccctcactcaaatatatacattaaattttttatatgtagatatatacatatattaattcacttcactcaatttattaaagcccaattcacaaaagccctcactcaatatcttaatcatgactcatgagctactctcattctaattaagcccattttaaaagtagtccaatacaaataataaaaaaaataatactttat

SEQ ID NO: 352733 - DNA, 659 bp, Cannabis indica
tttttttatgaatttttcccccttttttagtttgacttgcctctatttataattacataggagggtcgttaattacaatgttgactgatattttacaacaagtatcccctgaactcatgagattttatcacattccacgtaaaataagtgtgattaatatttgaaaatcacacagctgtgattggtccacttttactgggtcaatataaacgtgtattaaatacgttgcaaatcgtatcgttttgggacatctcacagggaatatagcaacaacaactttggtagcaagctagagtttttcccaaaactttctaaggttgataatgtgaacctcgtcatttatgctattaaatacataacgctccatttgacaattgcagttcttcgcgataaggagaacttcagtagccaacagcatttgaatgtcagcttctatctgaaagaattaacttgtcggagttatgaatctcactaaaagatgtctggagctaattagtgaatatagcacgagcgtgtcttcctatagcgagatgaatgcgttgctattagttgtataagtttacacgactattatacttagtttgtataccgtgtattatatgcaaagtgtcttatatcttgtcttctaatgcgtagcgaggttgatgcctcgccttgta

SEQ ID NO: 352734 - DNA, 1083 bp, Cannabis indica
accactaaaggacaaaatataaacttaggcaaaatgaccattttacccttgcccacacttaaaacataaaaatcacttaggggtattttggtcacttctagatttccgactattctcgacattcccattatctaactatactgccgcgctatactaataattttaggatgtgattttagtagccaaacaccgtatttcaatgttgctgggcacaaaacatgcaaaattatgaaattccatatatgacattcaaattgcattctgaattcaaataaatcatcataaattactaattcaagactaatatgcaagtttaataattataccctaattatctgctaatttcctaattaaagctaagcagtctttacaattatccctccccttaaaagaattccatcctggaaatctaacctgaacaactctggatattgagatttcatgtccgattctaattcctaggtggcttcctccaccttgctatttctccagattactttgaccaaagatatggtcttgttctgaaggaccatattgcaactcaagattttcataacttagtacatgagcaaggtctgaaacgtacttccttagcatagaaacatggaatacattatgaattgctgaaagaactggaggcgaagctaaacgatatgccacttgtccaaccttctcgagaatttcaaaaggtcctgtaaatatagggcataacttgcctcttttcccgaaatgcttgatccccttcattggagacactcgtaggaacacatgatcccccacttgaaactctacatttctgcgttttggatctgcataactcttttgcctgctctgagaggcactcattctagctttaatcttctcgattgcttcattagtctgttgtactgattttggacctaagtatttcttctcccctatctcatcccaatgaatgggagatctacactttctgccatacaacaattcatagggagccatccctatagtactctgataactgttattaaatgagaactctatcattggcagatacttactccaagagccctcgaaatccataacataggctcgtaacatatc

SEQ ID NO: 352735 - DNA, 961 bp, Cannabis indica
agtaaaaggttactaagggaaaatctaggtatctctctctggaaaagctcgcgttatgcctagtccatgcgtcacgcaaactacggccgtacttccaggctcaccccataaaagtgttaaccgatcagcccttgagacaagttttatcaaaaccagatgcttctagaagattgataaaatggtcaattaaactgggacagtttgatataacataccatcctcaaacatctatcaaggaccaagctttagctgactttccagaaaaaatccaacctgatcagtgagactcgaaaacctggaaagtatatgtggatggcgcatccaacgaacagggttcgggtgcaggggtaagattaatatcgtcgggaggctttaagtttcactaggctctgaggttccaatttgatgcatcaaataatgaggctgaatatgaagtcttgattgcctgtttaaagatagtagaggccttaaatgttaaaaatctcatttgtcatagtgattcgcaactgatcgtgaactaggtcctcggggaataccagggcaaaggcttgaaaatggcgaactatttagagtaagtttggaaaactaggaaagattcaattactttaaaatcgaacgaattctgagagaacagaactccaacgccgatgccttaacaaagctggcattgcagaatgatcttgatgaactaaatctggttccggtagaaatgctgagcgagccaagtatatgtgaaattgaagacgtcgagatgatagatagctctccaacatggatgacgcctattatcaactatttactcgacgggcaacttccaaatgacaaaaacgaggcgcgaaaactattgtatacagtgcctcgctacacaatggtcgaaggcaaactatatagaagagggtattcgatgcccctactttggtgtgttcctcccgcagaagcaaacgaaatcattagagaaatt

SEQ ID NO: 352736 - DNA, 720 bp, Cannabis indica
atggaggttgaagaagaagccaaaaaaacgtgtcgttttccacaatatggaaaacgacatgttgttttttcatgcttgtggcaaccatcttttgctccaaacgatgtgtcgtttttccgtgtggaaaaacaacgtgtcgtttttcattttaaggtagccaatgttttattgaaaatgacgtgtcgcttttcgtcgtgtgaggcagccttacagttgaaaatgtcgtgtcgttttgccttttgtaaaaatgacatgtcgtttaggcaatgtcattttttaaaaaagaggtaattttttttgaatttataatttttatttatttagaatattaattattttcctattatatgttaatttagtcaattttctatttttgtttaatacatatatttagtataaattgaaagtaaaaatatgtttaatttggtaatttattacatgatttatttaggcatgtaataattgtgctactttgtataattgtgcatttaattataaattaccaaatttatgtaatttattgtctaaattaataaaatttgaaaaatctctcattaattatatatttaggaattagcatttaattaagtatcatacattaattgtatcaatttgtatttatttgacaaatttgttttaatacaattaaatttatatttgtatgatttaaatgctatacatgaattccttttatagtgctagatatatttagaaatattc

SEQ ID NO: 352737 - DNA, 809 bp, Cannabis indica
tttatccgtaattggatgggatcctcctgctttggaccaagctgttggtgaaggtcaggtttctttcgattcaagtgctctcgcagatccggttgggagtaattgctgacagaccttctcttactcgcagatcgcatcctactcatagactttgtctttgagtgagttacaaatttactggttcccatactttctcgatcatcagctcattgagtactttctcctcttcgagttgagcgactgtgggttcttgactgcctagaggtcacactagcttcttcacactctgttctttccccctgagagcggtttttcgtatgtctccattaaagtctgtacgagtcttcgctctttgggtttgggaagaatgatggtgatttctagtaggtgacctccattctccaggttgagtcccaagatcctcctcattgtcatgagggatttctcattcatcggtttccgcttgctcccatctagctgttcgttctgattttcagggggtatctcattttccctgggttgttcttcccgggcattttcctctttcctagttcgtaagccacgaggtctgtctcgtggtcttctcactccaggttcaggttgattttgagcattcgtcccctgtgccaccctggccgaggctacatcacgttctaactcagcgtttcgacgctgctcctcttccagacggcgtctcaggcggcagttttccgtttcataagtaccttctcccatagactgggcacctccacgattgtgttgggatttgtgccctaaataaaactatatttcaatgtaatatttatcag

SEQ ID NO: 352738 - DNA, 782 bp, Cannabis indica
ggcccccactttgcaatttttccctctctcacacagcaaccgaggtagcatggatctttccttttttgttgaacttggcatcaaacacaatacccccgccgtcattgggtgcgacaaagcaggtgcaaaacaacttacttctaaccatgtcttccacaaccgcacaaaacatattgaggttgatgtcaattacatcagagacttaatcaagagaggactcatcgaaattaggcacattcctatacatcagaacagactgctgatgtattcagaaaagctactttccataagccagatcacctacctaaaagacaagcttgccgtggtgtcacaaccaagttaatcttgagagagcgtgttgaaaatagcatttttaacacatgtttctaattctcaagtgggttggtggtagcataggattccttttacctactttttgaatccctattaatttctgccaataaaattaattagcacatgtgaatagtgcattatatatacacccatttgtaccgtatacctgcaagaaaagaaaaggaattagaatattcaatacactaagggctcgtttggaacgccatattaggtcgtattgtattgtattgtattatattaaattgtattttatgcaatatttttatgtaaaactatatgtggtaataacttttatagacacctaaatatataatattttagtataaattaaagtttaacatagtatcatataaaaatatgatatataatctaattcaatataatacaatacaatacaatacgactta

SEQ ID NO: 352739 - DNA, 761 bp, Cannabis indica
agtctgcaagcagtattatctcaactagtttgggaatcatgggcctatataatcaagcttccaataagtagaactagaatttaccaagtaaattctctaactgattaattcctccttgtgccactatagattcagaattgtactcttaattatatagaacactctatatgtgccaagatataaatatgctaggaactatccatcattctaatccaaatagtcaaagatcctctatagatgatcttcatcgaatagggacaaatttacccttctacccttcaatatattttatccttaaaacacttagctactataaatgatatattagtaaactaatataattactaaaatgggatctcaatcatttatttctattaagccaagctcgaaggaaatcatcgtttcacttctaaatacttatagaagctatagattctatatctataattaacgctcccactaaattacactatcatgttctcaagatgtaagtattcggctgacctagctttaacgaaaaactctaagaacataaataatacagttgagcagaacctaaccatattaggattaagatcaactaactgatattgatttagatagatataacggtaagttttatgatatcttatacaagtttagtatcggttcagtctgatgtatactccatatccgatcttagcatactttagcaatgtcttggaaaggacataacacgtatccaaggtgtaagtaagctctatcactgattatcatgtcag

SEQ ID NO: 352740 - DNA, 858 bp, Cannabis indica
actgtaaaaggaacatgatgctctcatctcatcctcttgtcaacttgactattcaacctaccaaatctagtttttcatttctctgacaactagtagatgagagagttccttccatagtgatttcaccctccttcattgttcttcaccattcaaacccttgagtgatagagtgccatgcccacacatagcaagtcaagtactcaatcataatgagtaaaaactgcggtaaccaaacccgaaggagagaaagagatccaggttcagatcttgataatgctttgcgacagaaaggaatcaagggctggagatcttgaacgaaaggagtcattatattctgctacaatcaatgtaaggttttcttaaacccttatgtgtttattttctttgttttaaagatattcatattaaggatgttaatcaacatacttgttagtaaatctagatcctggtaaaatattcccaataaggccaaggtcccatgactcagctaagcaccagccagggctaccaaacccaaacatgaatagactagctttgtagggtggaaccctaggggtggccaattcccatgattatgccctaggaccggtcaagtctcaagcaagatccttagggtcggccagggttagttttgaattgaaatgtgtgttctttaaaaactcagatatgtacctcgtcgattcttttccttaggaaatcacacattatgcattctaatactatcatgcaaatcaaaataccaaaaagattacaatctaacgtgagaatctaaaagtttgtaaaagcttgaaaagcttgaaacttatcaatggaaggttcaaagaagagatgtcaaagaagagaagatgaggcatatat

SEQ ID NO: 352741 - DNA, 767 bp, Cannabis indica
aatccgtcgtgcacctcaaatagagtcgtgcagcttcttcttgagtaacacatctgagcaatagaaacgagaatcctcttctatacataattccctctactatgatataccgtgcagctttccttctcatctttcgagcttcattccgattatctgggagttccccagtgttgaggtaggcggctatcggtgtcatccagtttggggaagtatcaatcatttcgacttcttccgtgccagtgatgctaggctcttcaaggaactggataggaaccaagctcaccttatcacttacattactgcttgccaatcgagctaacgcatctgctgttgtgttttcttccctttgaatttgtttgagaccgtagcttttgaattgtgcgagcaggtcatgtattttgctcagatacgctatcatcttttctccccgagcctcatattctccgaacacatgatttactaccagctatgaatcactacagatttcaatgtgttcggctttcatctcccgggctagttttaggccagcaattagagcttcatactcgggttcgttattagatgctttaaatccaaacttgactgcagcgtgcaggtgttgcccccaggcgtggcaagggtaattcctgcaccagatagctaatctgtagctgacccgtctacatgtagtttccaggtcggcttatcttcactgttacttggctgaggtgtttgtaccagctcgggattgctttctggtatgctttcttccttgcctgtgcattcta

SEQ ID NO: 352742 - DNA, 880 bp, Cannabis indica
aatcacgtaatacgcctatgctagttagggtgttacatatactctgcaacacaaaggaatcaagggttagagatctgagtggaaggagacatattattacgctgcacccaatgtaaggtttctcatactttatatctgtttacttattatcgttttagaagttcatatttaggttgttaatcaacatacttgtgagtagatctaagatcctggtaaaataattcgaacagcaataaccttactctaactaaggtcaagaaggaaaatacctccgggcagagtttagacaacggaaaaggcatcgcccaataggaagtcgccgaaggttgggagaaagacatggatccccgacttggggaagaaaataaaaatgttgggccaatagaaaagttcgaagaggtggagatcaatccagatagctcgaccaggttactcaaaatctgttaaggcttgctgctcaaaacaaaattagttttaataaaatttttgagtgcaaaccttgaaattttttcctggtcacatgaggatatggtcagtattgactccactgtcatgtttcatgccctaaacattgatccaaacttttgtcctgtctaccagaacagaagactatttgacaaagaatgggcacaagcattgaaagaagaggtagaaagactacgcataaaaaatttcatcaataaagatttctgcccagcttgggttgcaaaccccatactagtagccaagccaaaaaattggcgagtatgcaatgatttcaccgacctcaacaaggcgtgtcccaaggactatttttcacttcaaagaattgatcagctcgtggatgcaatagtcggacatgaaatcttgagggttatgcttggagcgtacggtctttggg

SEQ ID NO: 352743 - DNA, 448 bp, Cannabis indica
ccagctcagacccacctctcggtaggtcagacttgtccgaactccctcttcgaaactccttcgactgggcaacttttggagtggaggggtttgcaaccgttagctcctcagaaagatcgatgacctccccgacaggcgtcttttccttggaagaggttccctcaccgcctttagccttcttggccgggggagatgcgttggagcctctgtcgattctcatcttcagagaatcaagcatcttttgagaaatgtctgcacggaacaaaaaacaagatggttagaagaaacagacatcaaaaacataaagcataatagtcaagaagcttaaaagcaggacggagtaatatgcaagatgattgctcgagcaggcctcgaaattccatcatacctgacatgttggaatttattttaccaggatcttagatttactaacaagtatgttgtttaa

SEQ ID NO: 352744 - DNA, 501 bp, Cannabis indica
actctgccatcacactgctggatggcaatctttctggttccaatgaccctgcatgaatagtaattttccattagaactttacctccatcagatgatttatatcaaaaaatgattctcgactcggacacatgtgataagtgcatcgggagtcaagaatccactcccttttcaatgaggattctgagatggagaacaattttccatctgttgagcagtcatcactatcctccacgatcgcaactgaatctttcttacggtggtgatgcctatagtccttcctatctccattgtgagatttgttgaagccttgctgctccttgtacttcttgcaaaatctttgcaagtgtctgaaccttccacagaagtaacactttcgaaattccttctctctagacttcaatctttgttgagagtattggtgtttactcttaaaaatttctttcttaggtgatctccctcttgccaaatacacttttttcttcttggattccttctccaatt

SEQ ID NO: 352745 - DNA, 754 bp, Cannabis indica
aactgcattcttgacagaacaagtaagtgcggtgattgaacaaaagataccgatcaaatacaaagatccaggttgtcctacaatcgcttgccaaattgggacacaaggatttggtcaagctctcctagacttaggcgcaagtgttaatctcatgccttattcaatttacttgcaactaggcttaggagaaatcaagcccacatctgtggtgctacaattggctgaccgctcaattaaaaagccacgaggaatagttgaagatgtcttgattaaagttggaaaattctattaccccgctgactttttgattttggacactcagtctgaggttaatactgagtcaaaaattcccatcattctcggtaggcctttccttgcaacagccaatgctctcattaactgtaggaatggtctcatgaaattatctttcgggaatatgactatggaggtcaacatttttcatgttgcgaaacaaccaccagacgaggaggaagattgctatcatactgatgtgatagacacaattgttgaggaggaagttcttttgcatgatgattctgattctttaaatgatctcgtccatgactttgatactaaaaatatgctttatccacctgaggaagctaatgtttcttccattcttgagatgtcccaagatgaagcatcaccttcgcaatatgagaatttgcgattccagacccgatctatgaaacgcttcttcgagtccatgtgcgatattgacaaattctggtaa

SEQ ID NO: 352746 - DNA, 702 bp, Cannabis indica
taacacaatcaatcatcaaactcacaaaaataacacatccaaatcaatcaaaaaaagttttaaatccatatttaatgataaaaaatcattacgatggctctgagattagttgttgaaaattaatttaacaggatctagatttactaacatgtatgttggattataattctataatcttacatcatatatataaatttcctaaaaaaacgaaataaacacataaaagtaatagaaaactttacattgatggcaacagaataatatgactcaatctgttcagatctctaacccttgatcctttctgttgcagagtatgatcaagatctgaacttggattctccttcaattgacaatttaaactacacaatcttcctcactatgctaagtattgctttgaatcatgtgggtaatttctcaataccaaggactacgaatttttttttgaataaacactaagagaattttgaaattatagataaaaaaataataggttttctttttaatttaatttgttagacaagagagagtctattatggttatctttgaatcaaaagccataatgttctatttatagggattcattaggtttagggttagaactaaatgggctgatttgaaagatccaatgacctaaaacaaaccctcatggccaagccccttagaaggcccatgagttagatttttgccattattttgcttcc

SEQ ID NO: 352747 - DNA, 749 bp, Cannabis indica
ttaataacaaaaccatatggagaaaccattggcttattagaattaatatcatgaaccacattaaggcaatcggtttccaccactaagtcactccagcttttattttttatccaactcaatgcttccttgattctcactgcttcagctaacaaaggagagaccacaccagaatgtatggtctgtcgagcctctaccacagcaccagctgctgtccgagccaccatacctacaccaaacttgtgatcatgttgaaaaatagcaccatcaacgttaacctttagcttaggaaaaacaggtagaaaccaatgctcattcttttcttcactcacatggttgagtggagaaatttggtaccggttttgagcatctaaccagttagctaaggtgagttttgctgatgtaacaatttcgtcaaccgtaggagatttagcattccaaactttgtcatttctatacttccataatgcccaacaaagcatcgaaacgtctatcttagtggaggcatcccagctttccaaacctgcctgaaaccaagcagcaaaagtgacagcttgcaattcaaaaactactaggccgatgttgcaccagcaggcttttgcccctacattacaccatggacagtttgtctcaaactgaacatgtctatttctcagctgagatttagtaggaagacatttcgaacaagttctccacaaaaaattctttactttcggaggtaatttcagctgccacaatgccctccaaaaacc

SEQ ID NO: 352748 - DNA, 691 bp, Cannabis indica
aaactttttgatgataccatggtccgcacagaaatcgatgaaggattggctgtcgaactgtttgcgattgtctgagactattttgtacggtagtccgaactggcatatgatgttcttcactataaagtcttgaactttctttgatgtaatggttgccagttgttcggcttcagtctacttagtaaagtagtcaactgctaccactacatactgcaccgcgtctttacgtttaggtaattgcccgatcaggtcaattccccaaatggcaaagggccacggactttgcatctgtgtcagttcgttgggcggagctcttggtatctttgaaaatctttggcatttttcgcacttcttaacataggctctcgaatctttaatcatcgttggccagaagtaaccttgccttagaatttttttggataagctctgtccggcggcgtgatttccacagaatctgtcgtgaacttcagataggagtcatggagcttcgtctcgtgtgacacatttgagtaatggcatcgagaatcctcttttgtacttgaccccttctactataatatatcgtgctgccttctttctcattttcccagcttcatttcggttatctgggagttccctagagtcgaggtaggctgttattaacatcgtccagtttggggacgtgtcaatcattttgacttcttccgtgcca

SEQ ID NO: 352749 - DNA, 898 bp, Cannabis indica
ataaggtatccctctgaagggaaccagcagaaaaaccccacctccactcctgggaaaaagaaaaaggtgtaggatccgtgcaaggtccgctcagatttcccacaagcgaaaggtccgcagaggggaaaactccaaaaagggagtcttggccctctggatcgagaggaccgaaagagcgtttctatgcaccgggaacccggagggagaggaagaagggaccaaaaatgccctcccgtcgatctgagacattagattaatgggaaacacggtgacctccgggatcacctagaccaaaagaatcatgtgcccacagtctccacaggaacactaaacaaaggaatcatggctgagcttgccatactccgaaaggacattgctcgagtctcccgaagacaaaaaggttatgactctgactctgaatgtgaagactgggagccttctgcaaggcacatcttggaagcagagctccccaaaaatttcaagatgctcgaaatggcagcttataccgggaactcggaccctagcgatcacctgtcacggttcaaccgagtcatgacagtcatgagagtcagcaatgacgccaagtgtttatgcttcccgcttactttaagcgggtccgcggaagaatggttcaagaaactggagccaggatccgtggattgctggaataagctgcaaaccagcttccggagatagtttgtcgctgcgaggaaagttaatctggaggtcagcgccttgactaacatcaagcaactgcctacggaaacattgaagaatttcataaagaggttcaaggaagaagcctcaaagaccaagaaagttgatgacggacaacagcttgctcttcttcaagcaggaatccgtacagggactccgttctggaatgagttacagcaag

SEQ ID NO: 352750 - DNA, 953 bp, Cannabis indica
gggtcataattactaaaatgcccctggctcaccaacggggtcttaacatataattaatcaaataaattctcatatattgaactatataataatataattcctcaattattcataattatttaattagggttttgctaatccatttcataactctagggtattacattcagtgtggcatgccacggcattacaagagggattgtccccagctcagaactgaggcaccgaagactgcagcacaacccactccagctagggtgttcgcgataactcgggctgatgcagaagccaacccttcagtggtaacatgttagctctcggttaacaaatcttatttctctgtgttatttgactatggggccactcattcttatgtggcggccataatttttagtaaatttgatagaccagatgatagctatgaaatagggtttggaaccctactgcgtggtggagagttagttatctccataagggggattaggtctatgccgataaaaataaaagatagagagttgagtgctgatttgatagagatgaatttagtggattttgatattatcttgggaatggatttcttgtccaagtacttagccagtattgattgtaagaggaagatggtaatcttccaacctgaaggtgaagagccttttatttttgtcggttcagttcaggggtcttggatcccagtaaattcagtgctaacagcaagagaattgttacaagagggatgtctagggtttctggccgtggtattggataccactcggtctgactctgttcggctagaagatatcaaggtggtttgggaatttttagatgtttttcctgacgaacttccgggtttatcagctcagagagaaattgatttcgttattgacttgacacctggagcagaaccggtttccaaggctccttacagaatggctccagcagagcttaaaaaattaaaa

SEQ ID NO: 352751 - DNA, 553 bp, Cannabis indica
tgttttaagttaaaaacgattggttttatatactgactttgtgattaagagtggttatggagattctgacttcgtagaattgttctttggtagctacgggactagtttcaatgtttacttgttgaatttgagatgattttgagatagaaatcgagtttgaaactttttaaagcttagtttgaacgttaatggaatttttcatttaagggctcgattttaatttctgttcataagtatgataatatttatggtatatatgtgtcttgtgaagtttggagtgacttggataagttttagtagtgtttcagtgagtgggaaatttgggattttcgagtatcaccgtttttagaaattcttaggagatcagaaattgtatttttgtcataactttttactcgggtgtctgttttggatgttttatatattgtttcgaagtttgtgacgagctctataatatggtatatattttacagccaaaatataagtttatttcagtgtatttatagcgcagggtttggtagaaaatcctatattatcttatgtaaatattaag

SEQ ID NO: 352752 - DNA, 742 bp, Cannabis indica
atatgattttcattctatttttactcatttgtgaggttttctcattttatgaagaaagtttgatgatacatattttcaaaatagtcccacattgtttaggaattatgttgggtgttatactatatagtataaatagtctattaatctttacttttatttgtaataaaatgagtttttttaaccttatgtggtggttgaataaaatatttttattatttaatctaatcttgcttaattagttaaaaaaatttatttattattttgtcaaaatcttagtattaagaaaagtttcttaaacacaagaaaaaaaaaatctatataggaaatgtggcattttatatgattgttattctatttttactcatttgtgaggctttcttatttgaatatagaaatattatattactaacatttttatataaatctcttatttttctgtttcaaaaacaaataatattgtgatgccctattttatagttgtcataccaaatttacttttggagagatgacatcccaccgataccacaaaataaaatgtaaaaattttcataatattagtaaaattatttccttctaataaagtaaaaaaaaatctaaatggtctcttaaaaataaatatatcatcaatcacaagcccattttattaaatttagaaatgttattctttttttcatttattttattaaaaaaacacatgtaatttcttttttacttccacaatttttaatatttgccacaaaat

SEQ ID NO: 352753 - DNA, 604 bp, Cannabis indica
aaagggttttatttagggcacaaaacccaacaatggctacttcatggactgacgactggccctacagaccaatacaagtgtttccaacgtgctttgtgctcctctcacgcttcctgagaaaactttccaggaggtcacccatcctaaaattaccccaggtcaagcacgcttaattgtagagttatttcgtgatgggctaccagaaaacaagatgcaccttgttgatataggtagtaccaatcaatccatttaagcccttttcaacagtgttgtcccatacctacacagtctcataatcatcacacttgaccttccctaggcgatgtggcattgcacaacttacttggtattttcccttacagatcactggactactgactgtaacaatcatcccctttacgaggtccgacgtcctcgtcgaacacacttttgaccgggttaaggctttgattcaatttctaacgtcctcgcttcgagcctctattgggccttcccccatgtaaagaccgcttagtttaatttggaaattagctgctaatcatgtttaattatgaaaattatttatagatatttaaataattatttatactgttattgttgaatt

SEQ ID NO: 352754 - DNA, 718 bp, Cannabis indica
ctgatacgaagagcctaccaaactgtaggtcagcaatcgccgaatgtcattcccctgtgagagacggatgaggatccaacgatgaatacttcgtagactgcaaatggtcagccgcccaatccccgatcacgagttccactcatgggcccagcggtaggcgagaagacattgtctagtaattcattaggaggagtcatacctgatggttccaaccagataaaaagtgccattccacccgtcaaccaagcaaatgaaccgctaaggcagccagacgcttctatgttcgaaaggttagcgacaacccacgacctaaggaatgatctaaacagaaggaggggagcagacgattagaatgttacgacaatcgtgcagctcggagcccgtactcaaatccccacttagaaagatgctgacgtaatcgaaattgacaagaatgccgagcacgtcagcccaaccgtacaagctcagctagacgaagtgaaaaatatgtttcatggcatggtgggacaaagaaataatgatcttgagctagaccgagcatgcagaactcctttctcgccggagatcaatctcctgccactgccccacaagttcaaaatgccgacgtggaaaatgtacacggggagagaagatcccctttcccatctcaagtacttcaaaatgcaaatggatttgcaaggggtacgaggagatgtatgctacagaatcttccctgcca

SEQ ID NO: 352755 - DNA, 569 bp, Cannabis indica
ttttttaatttttttaaataactttttacgtggaccaataaaattgtgctacctgtatattgtgtccacatggacaatccaacctgacagttaacagctaaatttagacagaagtgttaaattgctaacagaacacgattattggaggttttaccgcccaaatttgagttttgagaattaagtaaaaccaaaatgaaaattttaaagattttaatgccatttacccaatttgaatacacacctaaatatttagtttagtctagggatgcacacgaggcggggaattggcagggagtgctcccccgtccccatccccgttaaggattttaatccccaaccccgcttattatccatcggggatggggcggggaatcccctaatagaaaaataaagtttataataaaaaatttaaaatatataagaattaaaatattacacattaattattattcaataaactaattattatctaaaacacaacatataattcataaaaaagatactaatatactaaaaaacatacaaacataaattataaattataaaatattactagaaatataagataa

SEQ ID NO: 352756 - DNA, 501 bp, Cannabis indica
aaaagaaaaaaataaattatatactggtactatagactatggtgatcttctcttgtcggtccgagaagactggtagaattaaatatgtgcgtggcgtgggtatcctgctttaatttgcatatataaatagtttttgtattttcatggtgaacggtcaatggttagcaatctaattctttgcatatatgtgaactgtgtttgttgtttactttatcttgttcatttattggtttcttgatattttagtagtagtagttgtagttggatattgcaagtatctcttttctcttttaactagttaataattgtctttcctggaaagcaccttcttccatcttttttgtgctatttcttgtgaatttatatatataggacatggatgcagtcacacatgcttgacaggtactgtattttttttgttttttttttaagtagcgacggattgagctaaatataatattttttgtgcccaacttaataatagtcatttttcaataagat

SEQ ID NO: 352757 - DNA, 1062 bp, Cannabis indica
tccagctcccgggaaccctaccatcggctactccaccagtgagcgacatacaattctccgctaccccaggatataatcagagccaggcattggctcctgcatcttctcattatgggaatccttctgggatgagtggacaagtcccgtctcactccgcttctgctgcaagcctagctggaccttctcatggctctcggagcaagaggtcctcgaaaggtagcaaccggacggaggacaaatgacagaaaagggggtacactccccagtacacccagtacacggaactgacggactcccaagaacgtgtgttttttccaccaggcaaaatacgcattaccggagaccgcctcctctgtacagagatagctcccagagggatcccaacacaagatgcgaataccataacgacattggacacagcaccaatgaatgcaaaaaccttaaagatgagatcgaaaacttgattcgattgggtcatctctacgagtggattaagaaccggctgcctcatctcaacccggttccagcagcgggaccttcgccccagggaacgccagggggtgcgcccgcagcgttggcaccaatcgctcccccgagagaacctcagcagactcctggcctgccaccgagacccaatggaagagtagctatgatctctagaggaccccatatcggagggactactcgaaaggaattgaaacgctacgccgaggctgtcaaacacagcgaggtttgggaagttactcggctcccagctcagaggccccaactcatggatcaaccgattacgttcacagaagaagacgcaaagacggtgcgttttcctcaccatgaccctctggtcatagagactcccatcgccaacaagattgtggctagaatcctaatcgacaatgggagttctgtgaatttgttatttaaagaagccttcacagcgataggcctcacagaccgggatctttcgccaagtggttcccaactcacgggattcaatgggacacacttatcccaataggaaaacgtaaggctgccaatcactttgtgcccggacacaccccaaag

SEQ ID NO: 352758 - DNA, 1366 bp, Cannabis indica
tattttcaaataaataaataaataaataaactcctccatctttttttagggtaatttgcggcataacctccttaagtggccaggtttttgcaactaacccccaattctaaaatttttgtggtaaaactccctaaacccaagttctgttagcacttagccctttccatccattttaagctgttaactggcatggtggaatgtccacgtgtacataatgtacacgtgacacaactttattggtcaacgtaaataaatatttaaaaaaataaaaaattaattattttaaaaataaaaaataaaaaaatatatatttttctttaaaaatcaaaaaaacaattttaaaaaaaataaaaataaaaataaaaaaaaatacctaattccctaattccctctctctcttccaccctcctccttcttcttcttcttcttcttcttcttcttcttctttctatctttttctctgctaaggcaatgtgtcaacaatcaaaacactgtaagtaaaaacatcaggagatacaccctctccctctgttcattatcgcatagccacaaattgatacagatttaaccaaaaatttataaataaataatgagtcatattctgtatatggaaaaacaaacagtcctcaaacccagtgagtctaaactaaaagtggcttaaaactaatcaaacctcatcttcatggagaagcatattagggatttccttggtgaccgggaaccggcgaccagtctcagagcagatgagggcgccttcttagaggtgaagttggaggagggcgtggtgaaaacgacaaaggaagtcgttggagaacatggatttgagaaaatcgggcatcacttttagcttcaaaagagtgagaaatccaggaaacgcaagactttgcgagtatggtttgtagggcaatgaggtctcagtccaaatcgaaccagttgtggtcaagctccaaaaggacaagaggagctttgtgaggaagatctttagaagtttgaaaatactggtgtagaaagctcagttgttcgaaggagagctcagtgtgtttggatttgagattttcttattgtggatttgatttgggtttgtttgttttggtgaaatttgcatcttagattgtggcaggtatttagtgtttaggtttttttgattgtgtttggattcaaaaaaaaatgttgaggtggtggtggtggacagttatggttttgttcagtatgatggtggtgatgctagaagaagaagaaggaggaggaggaggaggagtgcatgaggatagaagaggaagaaagaaaagaaaagaaaaagaattagtgtttttttattatttttttttaaattgttttttaatttttaaagaaaaatgtttttttt

SEQ ID NO: 352759 - DNA, 832 bp, Cannabis indica
agatttttctgccattaatggttagagaaaaatatgttttttttttttctctattttttcattcccgacggttaaaccatcgcctataacagggcttaggcaccggttttaaaacgtcgggaagtctatattagtgacggtttttaactgttgcttattttgcctgttttgtgacggtcgtataggcgatggttatggaaaccgatgtgaatactttaaacgactatttaaaaacaccgagaaaaattatttttgtagtagtgatgattttatatatttaatatattttattttatttttaacagttttattatgagagattatgagaattatgttggactaaactaatatttattatatatgttggatcattaacttttaaattatgtattttttatatatactatatattttttaatgaaattaatttaaatagtagttaaaatggattggataaatccaatctaatattctaataaataatcaatcaacacattcaatgattagaattgatccaatctaatatatctattggatcggatcagatcggataactcagttcgattagattggatcggatgataaaatttaatctttaataaataattggattgaattagttgaatcgaaatctattaaatgtgatccaattaataacatgtaatgtatttatagagagaggaacgctgatataaaacagaagagcaatcactcttacaatatcatcttgtctgttatttttttttttttttttttttttttgtgtaaataatcttgtctgtattttaatacaccttctaaatcctaaaggtttattttttttttaattttt

SEQ ID NO: 352760 - DNA, 763 bp, Cannabis indica
catcctcatctccttcccctgttcagaaaaaaaaatccaaaatgggattgaaatctctagctaacaaagcaaagggtaaacgtccaattattgaagaggaggattctgattttgctcctcctttaaccaagcgtgggaggccacatcctaagaagaaatcaaagctcagtgtggaagagaaaatggttgatgaagtttctgggaaaaaagctagtgttgctgccgatgttcgaaccgaggttggttttcagtttcattttcgtttcccccttttttgaacattttattgtatttccagtttctgcgtttttgtttattctactttgtgaaattttagggtttcgcttttaaaatttcgtttgatgttgtttaattttttaggtctttaattttgtttgatcaatttattttgttcttttctgggtttggctttttaatttgattgtatttactttcgttacagtgttcgtttgtgttttaggttctgtatgtgtttgtaatttattgttagatatttttgaaacttctgttttcgttttagtgtgtgtaatcagttggttgtagtttcctcttagtttgtttatagtttaatatgtttatgtttgatgtgttttgggatttttattaggtatagttgtttgctgttagtttttaggtatcaatacgatttcagatgtttgcagtttatatttgtatggttgtttctgtttaggagtttgtttttagtttttttatagttttattatagttgctatacttgatt

SEQ ID NO: 352761 - DNA, 651 bp, Cannabis indica
cgctaattggtttcttttagctttagttatcctctgaagcatacaatctctttctattttttgggtcggtcaactattttggtgagacacgttgaccgacgcaaattggtccttttatagtagtgcatttttatgatatttagggtatcattataacaaataccaatagtggaaccctttgtagtgagtttgggtttcttagattagagttttggcgtattatttacccgtttatgtaaatgtgacttagggcatccatccagcatgaggttctccattcaggtcagccaattcacttgaattcgaaaatgaggtaagactaccataaaacatattacatatgcatgctgtgtttgtgattgtatatgttttgggtgatatcatagcggcacaaccattgtgtcgattcggtagtacatgcactgtactggttaagagtgatattcaccccagaaagttttaattggcgctatcgtagcggcacaaccattgtgtcggttcagcaatatgggcatagtactggttaaaagtgatattatggccaattgtactttcaggtgctattgatgctatcatagcgatacgaacatagtgccggtctcgcagtgtgatcgtaatgctggtagtgagtgatatcatggtcagtagcac

SEQ ID NO: 352762 - DNA, 823 bp, Cannabis indica
ttaaaatattaattttttaaaaaatatttaaagaattaaacacaaaattcattataattactttatatttataaaatttattaagcactctaattatattttacactaactaaaatttttgtcctctaatctttgacatgtaccaaattataccctttaaatttttaaggtcgttaaaaatacctcttgagcttgaactgttaagactgttggatttaaagacttttgtccaattttagtaaaaaattaaatctaacataaatgaaagttcagggacatgctttagtacatgttaaagtttgagagacataatttggtagttatcaaagtttgggagcatgttttagtacataaacaatcactgaaatagtaaaattgaatgaaattagatacaagtccttaaatacaacaatctcaatagtgcagaagacatttttaacgaccttaaaagttcaagggacatgatttgatatatgtcaaaattcaggaggtaaaaattctaattaatctatattttataaattgtttgaggttttaatttcactttttatatggtgatatgtgtagagattaatattatatgtttaaaatatattaaaatttgaaaaaaaaatagaattattataaagaaattgatgtataggataatgtaaaagtttgagataaaactaaaaaaaaaaataaaaattaatagtggtatattttgaaaatagtttagaaaactaattaagagttctcttatttcttccttaaatatacattctaggaatattcgcgttcatcgttaacttaactaagattgtacattagctaatattaattc

SEQ ID NO: 352763 - DNA, 621 bp, Cannabis indica
cgtactgatcaaagaggaaaacaacatccaacaccaggtctattcatcagtaagagactcattgaggctgaaggccgatatccattaatagaaaagctcacattttgcttgattttagcaacaagaaaactaaggccctactttcaagctcatcttgttcgggtatatattgaccaaccattgcgccaaatattgcaaaaaccggacgcctctagacggttactcaagtgggcagtggagttgggccaatatgagattatcatccaaccctgaatagcaattaagggtcagaccttagcagactttgaagtagaatgcacgggcaaggaagaaagcatatcaacaaacaaccctgagccagtacaaatacgtcagccaagtaatagtgaaaataagctgacttggaaactacatgtggacgggtcggctacagatcaactatccggtgcaggaatcgcccttgtcacgcctagggggaaacatctgcacactactgtcaaatttggatttaaagcatccaataatgaggccaaatatgaaagctttaattgtcggtctaaaactagcctgggaaatgaaggccgagcacattgagatctgtagtgattcacaactggtggt

SEQ ID NO: 352764 - DNA, 950 bp, Cannabis indica
ggaagcaggatcgaagtccttttgcgtttggaaatgtaatctattgtaaaagagttttgttttataaacaggggatccctatattacgatagtatttaaaatggaagtctttattttgaatttaattaaaggtttaaattaaaccacactttttccaaaatttatagattagtgataataagtttataaaagcacacacgtggcgtccctgagggtcaaggcgttacaaacaagatattcgagcagctataaatctttcttttgatgaagaaagatgccagttcgaggagtggagggatcgagagatggagataatgagagcctagcatgcagccattgacaactgttccaggcaagccaccgcactaatctgaagagcttatcagatcaccgaccagcggctagtgactactgctaacattcctacggggtcacaaaatggattagaaaagtatttagctgatcacaccccacaaactcacatcggtggactgtccaatccaaggctaaaggttcaaattgtgggttaagtggtagacgggtagatttcaccaaaccgtcccttaggaaggaatggttagcttgataccctcactcagacagagatatcagaccaaccccttgcacaaaatggtcagacttaggggcccatcagcacatttgtatttgaccgactggctaccgtgcacgacctcagaaatattctgaatcgtagaagagaattgtacagataaaatgttcccctaccgtctagccgaataatgcatacaaccatgtccctgtttaagttcaaagacatcctaatgaggcacatgtcgatccacaagcaggtcaagttgatccattagtacaacataaatagatcatcttaagagcctcatacaaggtctgactgacccaaaactcacaaatctcgagcttgatcagactagaggatcaccattctcact

SEQ ID NO: 352765 - DNA, 1466 bp, Cannabis indica
ttgaaatacacacatgagtcatacttgcttttagtgtatccaatattcagcatataagtgtcaaaccttaagttccattgcctaggtgactgcttggggccataaagagacttcttaagtagacatacctcatctgtgttcccattatcaaagcccttaggttgttgcatatagatttcctcttctaattccccatgtaagaaagttgtccttacatccatctattaaatctctaggtccatgcatgctgcctttgccatcatggctctgagtgaaccccttggcaactaaccttgccttgaatctggtaggctcattccctaaaccttctttatgcttgaaaacccatttacatcctaccagcttgtagaactctagtttcttcacaacaatccaggttctattctttctaaaagactgcatctcttcttggatggcttgcaaccatgctacaacatctttacttctcatagcttcttgaaagctagtggtttctaaaatgtcaacctcttctataatcataagtgcatatgcaatgaattcagcataaccaaaacgatcaggggcttttctctgtcttctctatttatctagagctaattgatagctacttagtccctactaatcttcattgtcttccccttctgttacctcagttccatagttggtgttgtaggagcaacctactccacctcaatctggacattctcatatgatacagcttcactgtcttcgcaagtgctcttcgttttcatggccatttcatcttccttgaaaactacatctctactaatcaagcacttcttgaatccaggttctaaacaccacactctatgtcctttaacccctttagggtagcctagaaacatgcatctcaatactttaggttgcaacttatcttgtctaatatgcacaaaatgcagcacatccaaacactttcaagtgatctaagtttgggattttacctgtccataactcttgttgggtcttgaagttttttggcacaaatggtgatctattgataaggtaacaggctgttttgagagcttctccccaaaaggttctgtccaaaccagctcctagtaacatgcacctaaccctctcaatcaatgttttaatattacccttttgggtaaaaaggatggtgcatgcttactataccaaattctttggtctccaggatctttaaagctcgttattttccttcaagctctttcctaacagtgaagcttggttctaatccaagttttgtttggcaaagaatgtgggagactcaacagttgttactgaatggtgttcgttgacttaaacaagtttagactccctctaaagtattgccgcaatcctttgtaatccactttatgaatctgacttctgaaacacctttaagcccaaactcccttcgtctttgaagtatgagtgcttacttcctcccgaagtaaggcttcaacaagtcttctcccgaa

SEQ ID NO: 352766 - DNA, 486 bp, Cannabis indica
gcttcttttctcgatttttgtccatttcattgtcttgattaggtgtttcactatttctagagtttgagcaacctctagggggtataacagaacctagggttgtgggttagggtttcccgggattagggttttgatcatgtaacttacccggtttcataatgtgattagggcatccatctagcacgagattttccattcaggttgcccagcacacttgaatctagaaagaaggtaagaactatatataatgtgtgagatcagtatctgaaagtatgtatatgttatgtgtatatgcatgcttaaagtgttagttgcactaccaacacttgtagagttaaggtatagggtgcattagtatagtgaatgtaatttgagagtacattacagtgataccagcacaagtacgagaaagtactgagtgtgtgtagtatatcactcagtggtactcagcgtatgaaacaaaccctaccaacactcgtactgtga

SEQ ID NO: 352767 - DNA, 1195 bp, Cannabis indica
ctgaacctgtatatacatatactttaatttgtccctttttttttatattcaagttttattacataaattaaattaaatttataatatagcgtgttgcatgcgcaatttttcttttttcattccattaaaaaaattgattattttaattttgattaaaacaatatataactatgcgatatgacttggccgtatacatatagcgaaagaataataaagaaaaaaaatagagtaaaacaaataagcttgtatatattaattcaaagattaatattaaaatggatatttttttaattattctatatattattttttaatatttttttttaaaaaaaaagaagaaatttatggtttgatttctttaataatttttatgtgagttaccatgtggattttagttgcaatttaaattgttatgtttatttctgtaaaaatatatataaaaaatactttttgaagtataaaaattaaaaaaaaaaaaaaaacctcttattatagtatgggaaattttaaaattgaggtttgatgaatcatatatttttagtcaatttatagattatgaccatcacatgatttgagaagagaggatattatatattgttataaattgtgctaagtgatggggccattaattagtgatgatggagtgagattaggtttttttggcatgtttaataatggcataaaaatatagatatatatttaattaaaatataaattagtgttatctaattatattatgaatgaattagatagagaaagaaagccgcctctataattaattaagtttaatttcaactatctcatgcatgaatgctcttttatcttatgtttagggtttgggataaagctaaaagtttttatcacaattaaaaacgttatacgtacaaagtttattttatcaattagcatatatatatatatatatatatactaggtgaatgtacgtgccgagccacgtattgctagtttcatttaagattttggtctttttaagattttgaatgtattttatttttaaagattacaaattttttgtttgaaaaaattaaatatttatatttgaaatattatttaataatgtattaaaaataatattagtgtaattataaaattgtaaataaatttattattggagtagtagattattctatttagttctttttttaacatagcattgtaatgaaagtttatatct

SEQ ID NO: 352768 - DNA, 900 bp, Cannabis indica
ctgtttcatcttcatctaagatttattcaatttgtgtttattgtgaatgtgattaacaactcacctcttacatgctatttaatttgattcagaacctgagaaattagatttaaatatgttaaaaaaactttgatatagatttccatttagaacgagagtatcaaatcgatctatatgatttagagttgagttcattgcttcctactgtttaaatttctcatagagttatagagaatttataataggtcgagttgtatatttcttaacctaaatattaaattttaaatatgattcatcagtaaataataaagtagatagaaggagattagaattcataatttctcacatatatatttgaatttagtttaatgttctttgttattcttcatttaaattttttcttgattatttttattttcaaaaattataattttggttaccaaatagaaaataaaattggattttttttttttgaataaaaaataaaattgcatattggtacttgaaaaagagtctttgtgggaatgataatcggtgttactataataaactataaaactttttatgtatacatgcatagctcttaattattgcaaaaaaattaattatttgactaaaaaaaaaaaattaataaactaataataataataataaaaaacaggtgggaaaggttgccaatgccatattcacaaagtaacatactcaaagaaattagaacaaatttcaaatttctaccttgccaccgacccctatatggatatccccattctcgatatcatcattctaaatcctacaaatctttaatcacataataaaactaaaatttttatttactaaaaaataactatgcgctctataagaacttttatttttcaattttaaaacagaaataaaagtata

SEQ ID NO: 352769 - DNA, 539 bp, Cannabis indica
aaaagtgtgttatatttcattccaacatatcaaccaaaatcgttttccattatatgaatttgaagatgtttaccgagatttttggaaactaattaaaatagagcctaagaaatattaaatgcagtaagcaaaatagacaaagagttttacatattcaggcgttaatgaaccttaatctacgagtcagtattttggccttaaatgactggtctaatattttacagtggtgtttacataaaacctcaactctgctctcttgatttctcttgaagaagaaaaaagcttagaggaattttaacagagtttcggctgtcttttttgtgatccccttctatgtgggaataaaagggtatttataagtactagtaaccccatgacccatttagggtttctataaaagagcccactattggagtaaaattcacataaaatactgactattggacccccaagaaagttcattctcgtgcattgaggcaactgtacaatggggaccattgtatgtacaggacacgcgtcgccaaaaggttgcaccttga

SEQ ID NO: 352770 - DNA, 746 bp, Cannabis indica
gaaagggaggggtaaagtatgtcatagtagcagtagactacttcacaaagtggacagaggctcagccaatgaagactataacagctaaaaagcactagactttgttatcaaaaacatagtgtgtcgatatggcttgcctcacaagatagtctcagataaggaaagcagttcgactgcgaagaatttaccgacttctacaaccaacacggagtcgtcaaaagcttctccacggtggcaaggcgacaaacgaacggacaagtggaagcggtcaataagatcaccctaaagaaaaagctgctggcctgctgttacgctatttttagcctacgttttgggtcactttttatagttgtttttgttctttattattatatttggaatagaattacgcttgttttctttggtttcaggtttcacacttggaatgtataaattgatcaaatttcggaaaataacaatctatagaatagagaaaattctgcaagaaaataaagctgaaacttcaagcttaaatttgacagagattttggaaaaattcaaaacataaaagttttagatttctttttcttctttccaacgcatcttgaatcaactcatttggagtccgtaagtgaaagttatgcacattttactaaaagatgctgaagttgtcaaattttacttcagtagtcgcgaccaccactttccatggtcgcgaccctttttcatggtcgcgactaggagaccaaacagcaagtttttttttt

SEQ ID NO: 352771 - DNA, 1240 bp, Cannabis indica
tcatgagttcaacacaactacttcccttgagtagttgacaacaagacacataaacacttctcccccttttagtctatcaaagaagtcaaagacaaaagtaaagcaactttggtaaactaacatggtccacatttgcctacaggttctttacccaagttaggtaatcctcgaacaatccttacattggataattttttttttttagatttttgcaacgttcaagttttttataccataatcagttgtgttattaatagtagagtgacaaatggcatagatagtgatggtgtagcaattatcattaaatctaaacccttgaaaaataattttatcgcgattattaaaagcataacaatgactactatcaaaattaacagtgaaatcttaatcacaaatttgattaatgttgaggagattagctcttgtgccttgttgtcaatgttggaaatattttattagaatctaaatttactaacatgtatgttggattataattctaaaatttatcattctaaatatgaattttctaaaaacaatgaattaaactcgtaaaggtataaaaaaaaaccttatattagtgacagcagaataatatgactcattccattcagatttctaactcttaatcatttcttttgcagagtatgatcaagatctgaatttgaattcttcttcaggtaacaaaaagactataccatctttcacactatcttgagtattgccttgaaatgtgtggacaattactcaatcactctaagaatttgaaattaacaagaagaagaagatgagatttcgaaataatgagagctccttttattttatattgtctgacaaagtgagtcaaaaagtgtcataaaataagagctatcgtattttattttatggtaactttagggttaggtttagaaattaaatagaatggaaaaaaggtaaaattggcttaatttaaaccatatggccgaaacttacatgtgggctcataggttttaattttgccattttataagactttattattcttttcaaaattaccatttcattctaactttgtaaatgctgattttatctatttaataaggctaattcggatttttatcccctgaactattgagattgttgattaagatttgtctattcattcattttactatttcagtgattgtttatgtactaaactatgccctcagactttgatatctaccaaatcatgcccctcgaactttgacatgtactaaattat

SEQ ID NO: 352772 - DNA, 514 bp, Cannabis indica
gtggaggcttgaactcccaacaagaaccaacacaacaccaattaaacatgcaaagatcaggaatacaaacaacaataaaccagcaatcataaaccagtaattaaaccagtaacaaacttgcagaaaacactaaatgaacacaaagaacttacgtggttgggctacataatcaaggtgatcatgagcttaatccacgggagaaagcagccttaaacatggctgggatgatgaattttattactctgaacagaggtacaaaacagggattaaaaccctgaagcaacaatggagactagctccttacagattctcaatcgagatacaagactcacaactctcagtttctgtttctctctttctgtttcttctctcaaccctctgaattttgtcttccactcatcatccataatagaacacttccagcattatatataggtgtttaggctaactaacttaactgaaaaacagttaagttagttggacagatattaccaactgtcaaaactgacagtaa

SEQ ID NO: 352773 - DNA, 569 bp, Cannabis indica
tcctagtcctacaccaagtactaataaggatactcgtagcgaggttgggaccttcgttccaaaaatgaatttggaggtgttggcaactgatgtgttacctgaattaaacactatgatgctgacagttgacaatgtagcacaaatgccctttcatgatgataatagtcattatacatctatgggtggcacatcaggtggggagttacatctaggaaagtttttagaaacaaagagcatttaaagatggttgttggcttgtatgcaatgaagaaagggtttaaatagttcgttaagaagttcgattctgctgtttggaacgttacatgtaaggatccagattgtgggtggagattaagagcgaagaataacgtactttctaacatgtttaaggtgactacatttcaaaatttacatacatgttcccttgatgttcaaggaaaagataaccgtcatacatcacctttgataattgctcacctaattaaggataaatttgcaactaacaacttggatcatttggcctctgatataaggaaagatatgcaccacgattacatgatccaaatgag

SEQ ID NO: 352774 - DNA, 659 bp, Cannabis indica
tcccttaatcttaatatatatattttatcacgtaattaatggtgccagtgcacaatttgtctatttgtcatagacatggatgttacgctcacatgcctatatatgtctatgtggcatagacctacatgttgctctcacacgtctatttataataaggccttagtaaggtttatttcggttataattatcgagtctaacctggttatgccttgctcgcataactctattcatatatatttacgtaatccatacattacgttctttcagtcgtttatcctagtaatatactaggtctaaccaagttatgtcttatgcacttaactcttgtcatatatgtatgccttcaatagatatcaaagcatatagaatcttagggtaataaccctaacttgcatactaaatactcagtcctacaacacattacggtatgcccgaaataacatttattgagggtaataaccctaacttatgccttcatttaattaacaatataaccatacattattgcttccttgctttcataatgttctagggtcataatcctagaccacaataaaattaacacaatgtactagtttatcgagtctagcttattcaggccttagatgcataattttttggtccaacatatttatcatggtataacatttaacatcttt

SEQ ID NO: 352775 - DNA, 517 bp, Cannabis indica
tgttgctgtgattttgttgttgaatctgaggtttaaagcatgttattttgagtagattagagctacttgtgttgcttgttggtggtgttctttaaagttatggaatttatattcaaaagataaaattttcaaagagaaatttcgaaattggttggtgtgtttgttgcatgagttagagaatgttttttgcagcttttctatgcatgattatgtagtttcaatctagttttgatgcttgtaggtgagctttagccaagtttgagttttgaactcaaaacttggagctaacatggaatttttagtatctgtgtgttctgggctattttggtgcgttggttttgttctttcgggtatatagaacaggtctggaaggttttgtgtgaattggatttgatttgaatgagttatgaatttttgaaagtttcttgcgaggaaccgaaatttcggttgtgcaaccggtctgccggttgggagattttcaggagccctagattttctcgtttttatgttatttggg

SEQ ID NO: 352776 - DNA, 657 bp, Cannabis indica
gagagagatgaagagtttttctctgtgatgagcttcttgtagaaatcttttagaaactctcaccaatttcatgttcttcagtctctttggtctcaaagcgttaactcaatctctacgacccttccaagtccacccttctccaacttacccttttctattactggttcattttgttattgttttattattgctttaaggttgttttcttttatttctttatcacatttttctaaatattattgtattgctatatttttaataataataggaaaataataaaatttgtatgtaaaatattttttttcagtatcctatgctccaatatatattaagttttttctccgttgctccctgctgttttttagttgttctgcttctttttctttttgatgtctcctcttgtatgttctcttattgtaccccaactcctccattttgttacatttgttatgttgtttcttttcttagccaacttccatcctcttttttttttgtcttccaaatttcatcatttcaatgggagataagactattactatccatgattctttcattccggcaattaccttaaataaatatttagtggttggtttaacttgtgtgatttgaaaccaacatttgttaaatatatgacataacagtgaaacaacccaaaaa

SEQ ID NO: 352777 - DNA, 699 bp, Cannabis indica
ccacaggtccaacattgctgcttgggtccccaagtcgaggatcccatcttcatccccgccttgggaagctccctacttggaaatgttttttcccttgtctgtgctctggctggaggatacttccttcttagccttggccactgcaaggttataacattcccgagcagtctgttggtttcctctcagacatcctaccccattcttcgttggaaactttaggcacgagtggaatatcgatgtgatagcctttaaatcatacaaagttggacggcgtagcattatgttaaaggttgaaggaacatctaataccagaaattgtggcataatagtcatactcatcggagcttgtccaacagtgagaggtagacgaatttgtcctagaggtgcgactcctttgccggagaaaccatatacaggcaggagacagggggtcagatctttaagctggagccccatcttttgataggcagttttgaataagatgttggaagaggctccattatcaatcatggttctggccacaatcttgttagctatctggaccaccgcaaccaacgacccattgtgcagaaacttgattttgacagcatcctcatggttgaaggttatggtaggccctcctgcccgcggaattttaggcttcctttcttctgtggccaggatcacttcttcttgctcgtgttgtgctgttcgggcata

SEQ ID NO: 352778 - DNA, 541 bp, Cannabis indica
gaaaggtgtgcctccaattaggaaaaaaaatctgaattaggtcagcaatctcgatttccgtaacctggtacgacgaccaacttaagggctaggtcgacgaccacaggcaaaactcgaaaattggagtttctgcaaaatccccaactagtcacgaccatggtcgcgaccagataaaagggtcccgactaggctttctctggtcgcgactactgactcctttttagcagctttggccaaattttcaccagtttatcccatcttttcgtcaattgactgaatctgaactttaatgccctgagaacctgaaacaaggaaaatcaagcgtaaaactgagaaaatgcttaactattagacctgaaacataggctaaatataacctaacaactttccataggctggataagtctctttcatccaactttaacattcagtctcactggtagagttagagactcccaatcggtttttacacttctccaaaatcactactccaccccaagagtaatcaccatctcatcagtagactttctagcactaatgc

SEQ ID NO: 352779 - DNA, 733 bp, Cannabis indica
aagatcttttgatctgataggggtagaagaagtttaaaagtaatatatgcagttcaacgatattttatatctattgaactctagactatattcataactccacatgatctctataacacttaggggtggataaagctattgacatatgtagttcattttgaactctagactatactcaatacaccacagtagctctatagcacacatattttcattagacatggatgtaatataatgaacaaattagcaaatttactagaacttattcttgatcctgtaattctgttccaattaatatattactgatgtaatagaaattgatatgaataaagttcttggacatagtatcacagtaccttattttagtggaataattttaaaattttaagcccatctttatttggatgacacttgtgatagcttactatgttatgatcatgataggaactctagaattcaactgagaaagtaaatctaaccactcatatggatagaaataacttatcagaattatgagaataagatagaagaatttttgcaaagtctattcgaatgacttgggcaaaatacctaatcctcataagatgtttcatggtatctttaatgattacttattcttaaacaagcattttacattaatgttaatactagaatgctatgttgatggcttagcctagaaggtgttaggttttatgccctaaataaaactccatttcaatgtaatctattttat

SEQ ID NO: 352780 - DNA, 704 bp, Cannabis indica
accaaacgacattacttgtagcaatatagacccatatatgttcggaaacatgcatgttcttagtctggtggatgcattttcatttgattgtagcctgaataagtgtccatgaagcttaatatttcatgcgctactgttgcatctacaagctgatcgatccttggaagtggaaaatagtctttggggcatgctttattgaggtctgtaaaatcaatacaaactcaccatttcttgttcagcttgggcaccaatacgcgatttgcgacccaagctgggtagaaagcttcaattataaaattcttgttgcacaacttttctacttcttccttcaaggctaatgctcgttctttgtccagtagtcttaacttttgttggactggccgaaagttgggatcaatattcagaacgtgcgaaatgctagaaggatcaattccaactatatccacatgtgaccaggcaaaaacgtctaggtttgctctcagaaattttatcaattctgattttacttcaagcaacaaatcctttccaatctttagctttctggtcgggatatctagattgatatcgatctctttctaactcttccacaggtccaacattgctgcttgggtccccaagtcgaggatccacatcttcatccccgccttgggaagttccttacttgggaatttttttttcccttgtctatgctctggctggaggat

SEQ ID NO: 352781 - DNA, 568 bp, Cannabis indica
atttttttttttttttctaattatgccataaatactattattatttataaacaaagataaaattaatcttaaataaaatattttcaatataataatatattgcattaaattcttgaaaatattataaagaattaattttattttgtatttttacactataaaatatgtaatattttggcatttaacaatcatgggtatataaatatggacatatctccattagtatgaggctttttaagaaggttttcaagaacaaaatcatgagaacttaggccgaaaacaaccaatatcatacttagattggagatagttggtgtttgaggatccttgacaaattgatatcagagccataacctaacattaaccattcgaatgaatcctcttaaagtgatgtgcctcagtgtactctcatgatatccgtggttgtgcttagttaggcggtgtactctgattccgtctaaagttggcctagtaatgagcaagaaactctcgagatagtggtagggctccatgtaaggcatgcgtttcaatgcattggaggaaagtacactagttggtagagagtgaa

SEQ ID NO: 352782 - DNA, 396 bp, Cannabis indica
tttaaaaattaaatgtttaaaaaaataataactccaaatttatttttagttttttggcttttagatatttaaaaaatgatcattttttcctatcacttactaaactctctatatatattttaatttatttctcataattttataattcaatttactacttaccttatcttttcttctctcatgatggagtgttcttagttggaactgttatgaaataatataaaataatataaaatagatgagaagaaagaagaagaagatgaagagagaaagagaaagtgaatgagaatttctgagttgtttattccaatggggtgaacccctatttatacaaatacaagagtgagatattaagaaactaagaaaaaggaaaactaaggaaaagaggaatgttga
